United States Patent Application Publication US 2021/0283215 A1 - sequence listing, part 2

SEQ ID NO: 3159 - DNA, 1458 bp, Staphylococcus epidermidis
ttgcaagattttgataacttaattcctggctggtttaaaacatttgttcaagtcgggaatgacttaatttggtctcaatatcttattggattattattaacagcaggttttttctttacaattagttctaaatttattcaactcagaatgttaccagagatgtttagagcattaactgaaaagccagaaactttaagtagtggtgagaagggtatttcaccatttcaagcttttgcgattagtgctgggtcaagagtaggaactggaaatattgccggtgttgcaactgctattgttcttggtggccccggtgcagtcttctggatgtggattattgcttttattggtgcagctagtgcatttatggaagcaacgcttgctcaagtttataaggtacatgacaaagaaggtggattccgtggcggaccagcctattacataacaaaagggctaaaccaaaaatggcttggaattgtatttgctgttttaattacagttacatttgcttttgtatttaatactgttcaagcgaatacaattgctgaatcattaaatacacaatacaatattagcccggtaattactggaatagtacttgcagttattacaggtattatcatctttggtggtgttcgtagcatagctacactatcttcacttattgtgcctattatggctattgtttatataggtatggttttaatcattttattactcaatatagatcaaattgtacctatgattggcactattattaaaagtgcattcggagttcagcaggttactggtggtgctgtaggagctgctattcttcaaggtattaaacgtggtttattctcaaacgaagctggtatgggatctgcacctaatgctgctgctacatctgctgtgccccatcccgttaaacaaggtttaattcaatcattaggtgtattctttgacactatgcttgtttgtacagctacagcaattatgattttattatattctggtttgcaatttggtgatagcgcgcctcaaggtgtagcagttacgcaatcagcgttgaacgaacatttaggttcagcaggaggtattttcttaactgtagcagttaccttatttgcattttcatctgttgtaggtaactattactatggacaatccaatattgaatttttatctaacaataagatgatattatttatttttagatgttttgtagtacttttagtatttgtaggtgctgttgctaaaacagaaacagtttggagtactgccgatttatttatgggtcttatggcaatagtaaatatcatatcaattataggtttgtcgaatattgcgtttgcagtgatgaaagattatcaaagacagcgtaaagaaggtaagagacctgtgtttaaacccgaaaacttagaaataaatttatttggcattgagacttggggacaacatgcaaaaatgccaaaaaaatag

SEQ ID NO: 3160 - DNA, 849 bp, Staphylococcus epidermidis
atgagcaagtatgtaataacgaaaacactcaataacaatgtcatcatatgcacaaaaaatcatcaagaggttgttttaattggtaaaggtattggttttaataaaaaggttggtatgacagttcaagagaatgcttcaatagaaaaaatttataaattagaacaacaagagcaacaagaacactacaaaacacttttggagctcggagaagatcatgttgttcaagcggtgatagaatcagttaatattatcaatgaatctggtctaattacagatgataaaaatttggttgttgcacttacagatcacatcatttatgcctataaaagacttaagcaacatcaaatgattacaaatccatttgtgattgaaacaaaacatctctatagtaatgcatacaatgttgctcgaaaggtaatcgataaattaaataaaaccttagacgtacattttccagaagatgaaattggattcatcgcattacatattgcatccaactctgaaaaattatcaattcacgatatttcagtaataaacaagttaatcaataagagtattacaattattgaaactgatttacaacattcaattgataaacaaacaatacaatatcagcgttttataagacacatacaatttttaatatatcgattaactaaaggtgagtatttagaagcacaggagaattttatatcgatgataaaaactatgtatcctcgtagttttaatacggcttataaaatattaaaaatgattcaacgtgagtttagtgtgtatgtatacgaagcggaaatagtttatttaacattacatatcaatcattttgaagttcaaattagtagtgaataa

SEQ ID NO: 3161 - DNA, 1218 bp, Staphylococcus epidermidis
atgaaaaatgaaaaagaaataaatggaaaaaaaagccatttttttagtttgtcagagtctagatttatgaggtttttaggcggaaatgaccttatttatgctttaattgcattggttcttttaggtattgtcatttttatctttgataaaatttcatatgtctttcaaccatttattattgtatttaatacaatagcagcacctattattgtttcattagtgctattttatttattcaatcctattgtaaatatgatggagagatatcgtattccaagactattaggtataacaattatttatgttgcaattgttggtattattacattaatagttaatttacttattccaattattggatcacagatagaaagttttatcaaaaatacacctaattatttacataaaattacgcgttcacttgataaacttaataataataccattttatctggttacatgggacaagtgaacgaatggttagaatctgctcagaaaaagataccatctatggtttcagattactcagacggatttggatctaaactcgcaacttttgctgaggcagtcgcaaatatcggtattgttattgggactacaccttttgtgttattctttatgttaaaagatggtcataaatttaaagattatactacaaaaattatgccacctaaatttagaaaagattttcatgacttgttagaaaagatgagtgtacaagttggttcatacattcaaggtcaaattattgtgtcattttgtattggattattactatttattggctattcaattattggtcttaagtacgccttagttttagcaagtattgctgcagtaactagtgtggttccttatttaggaccgacaatagcaatatcacctgcgattgttatcgcgattattacttcacctttaatgttattaaagttagctgttgtatggacgcttgtccaattctttgaaggccactttatctctcctaacgttatggggaaaacattgaaaattcatcctttaacaattattttcattttattatgtgcaggaaatttaatgggcattgttggtgtgattattggtattcctctatacgctgtacttaaggtattggtttcacacatatttatgttatttaaacgaagatacaatcgctactatggaaatgatgctggtgagtacactatcactgaagaagaaaaaggaattaaacaataa

SEQ ID NO: 3162 - DNA, 2523 bp, Staphylococcus epidermidis
atgacacaagaattaaaaagtaaattactttctttttttaaatttattttcgccactgctttatttatctttgtaatttttacactctatagagaattatcacatatcaattttaaagagacattcatacagttcggcaaaattaatagattatggctcgtactactatttgctggtgggggactgtcactcatcttattatcactgtacgatattattttagtaaaggctcttaaacttaaaatgccgttgattagagtctttagagtgagttatattatcaacgcccttaattctataattggttttggagggtttataggtgcaggcgtaagagcttttgtgtataaaaattatactaatgacacgaaaaaacttgtacaatatatttctattattttagtatctatgcttacgggattaagtttattatccatcttagttgtcctgcgtatatttaatgcttctcacatgattgatgaaatttcgtgggtacgttggattttatatattgttgcattatttttaccaatttttattttttataccgtcgcacgacctgtagatagaaataatcgttatatgggtgtgtattgtacagttgtatcatgtgttgagtggatggcagcagctactgtattatattttgctgcattgattgtcgatatacatatctcatttatgacttttgtaggtatatttgttattgcagctttatctggtttagttagttttattccaggtggttttggcgcgtttgatttagtcgtgttactaggactgaaatcacttggtatttctgaagaaaagatacttctagcattagttttatatcgatttgcttattattttgtgccagtgatgattgcgcttatactatcttcatttgaatttggaaatactgctaaaaaatatctcgacaattcgaagtactttatacctgtaaaagacttcacttcatttttgaggtcttatcagaaagatattttagctaaagtgccttcattttcgttagcgattttaatatttttaactagtattattttctttattaacaatttaactattgtctatgatggattgtatgatggaaatcattttgcctattatattgctttagctatacaaacgagtgcttgtttgttacttattttaaatgtaagaggtatttataaaggcagtcgtcgtgcaataatttatgcctttatttctattattttaattgctagtgcgactatatatacttatgcgtcatttttattattgtcatggctcattatcatatttgtgttactgattttagcttatcaacgtgcgcaagtacttaaacgaccattacgctttaaaaagttggcgtttatgctacttcttagtatctttattctttatttaaatcatattttaatatcaggaactttatatgcattagatgtttatcatattgagattgatacgtctttattacgatattacttttggatgaccattgttattattatgctactcgttggcgttattgcttggctttttgactataagtataaacgccctcatcatagcattgatttaacactttgcgatgcaattattcaaaaatacggtggtaattatttaagtcaccttgtttatagtggtgacaaagattgtttctttaatgaaaataaagattcttttattatgtatcgatataagtccaatgcccttgtcgttttgggtgatccaattggcaatactaaatcattcgagtcattattagaagcattttatcagtttgcagagtatcaaggttatgagattattttttatcaaataagtgatcaatatatgcctttatatcataattttgggaatcaattcttcaaattaggtgaagaagctattattgatttaacaacgtttacaacatctggtaaaaagcgacgtggtttcagagcgacgctcaataaatttgatgatttaaatatcaattttgaaattattgaaccaccatttactcaagatttctttgatgaacttaaatttgtgagtgataaatggttggatggaagaagtgaaatgcatttttctgtaggtcaatttactcaaacttatttatcgaaagcacctattggagtaatgagagatcattctggcaagatgattgcattttgtagtttgatgcctacttattctaataatgcaatatctgttgatttaattagatggttgcctgaattggatttacctttaatggatggattatatcttcatatgttgttatggagtaaagaaaaggggtataaagcatttaatatgggaatggcgacactctcgaatgtaggtcaattgcattattcttatttaagagagagaatggcaggacgtgtatttgaacatttcaatggtttatatcgttttcaaggattaagacgttataaagaaaaatatagccccaattgggaacctagatttttagtttatcaaaagcattattctctgtgggagagtatgcttaaagtgatgagagtcatacgccataaataa

SEQ ID NO: 3163 - DNA, 516 bp, Staphylococcus epidermidis
atgaatatcaatactgcatactttgctggtggctgtttttggtgtatgactaaaccttttgatacattcgatggtatcgaaaaagtcacgtcgggatatatgggaggacacttagttaatccttcttatgaagaagtaaaaactggatctactgggcattatgaagtggttaaaattgagtatgatgttgctctattttcatatcataaattattagaaattttcttttcagttatcgatcctttggatgatggtggtcaatttcaagatagaggttctcaatataagactgctattttctattcaaatgaacatcaaagacagttagcagaacaatatatatgtgaactccaagatagttttaacgctgataaagcaattgcaacaaaaattttaccggcatcaactttttatgaagcggaagtataccatcaagatttctacaaaaagaaccctgaacgttatgaacaagaacaacaagatcgtgctaattatgtcaaagataatcatatgtaa

SEQ ID NO: 3164 - DNA, 990 bp, Staphylococcus epidermidis
atgactgaacagaaggatattaaagaaacagagtatcgacgacagaaaggaacaacttcgacaccttctaggcgaagaaataaaaaaagaatgcggaagttaccttttatcattttagtcatccttattattttaatttctatcattgtgtatattacccatcagtataacagtggtatgaagtatgctaaagaacatgctaaggatgttaaggtgcataaatttaatgggaatatgaaaaatgatgggaagatttcagttcttgtccttggcgcggataaggctcaaggtggtaaatcacgtactgactcgattatgattgttcaatatgattacgtacataaaaaaatgaaaatgatgtctgtcatgagagatatttatgctgatattcctggttatgataaatataaaattaatgccgcatattcacttggaggcccggaattgttaagaaaaacacttaacaaaaatttaggtgttaatcctgagtattacgctgtagtagattttactggatttgaaaaaatgatagatgaactacagcctaatggtgtcccaattgatgtggaaaaagacatgtctgaaaatataggtgtgtctttgaaaaaaggacatcataagttaaatggtaaagaattacttggttatgctagattccgtcatgatccggaaggcgattttggtcgtgtgagaagacaacaacaagtgatgcaaacattaaagcaagagttagttaatttcaatacagttgcgaaactaccaaaagttgctggtattttaagaggttatgttaatacaaatatgcctaactctgcgatttttcaaacaggtataagttttggaattcgtggagataaagatgtgcaatctttgacagtccctattaaaggaagctatcaagatattaatacaaataatgatggtagtgcgcttcaaatagactctgagaaaaataagcaagcaatcaaaaatttctttgaagataattaa

SEQ ID NO: 3165 - DNA, 153 bp, Staphylococcus epidermidis
atgtataaagaatataacttgactcatactctaccaatggaaacttcagttcttatccccacaaatgatatttcacgacatgtaaatgatattgtagaaacaattcccgatactgaatttgatgaattcagacatcatcgtggcttaatataa

SEQ ID NO: 3166 - DNA, 186 bp, Staphylococcus epidermidis
atgccaatcattaatgtgaaattattagaaggccgttctgatgaacaacttaaggatttagttacagaagtcactcacgctgtagaaaaaactacaggtgcaaataaagaagcgattcacgtggtcattgaagaaatgagaaaagatcattatgctgtcggtggcgtaagaaaatctgatcagtaa

SEQ ID NO: 3167 - DNA, 1263 bp, Staphylococcus epidermidis
atgtatgattacaatttattagaagatagggatgtactctgcatagaccaaaaaagcttttttgcgagtgtatcatgtatggaaaaaggattggacccattaacaactaaactagcagttgtagcagatacgaaaaggcaaggttcggtcgttctagcagcaactccaaagttaaaagaattaggtattaaaacgggatcaagactttttgagataccacatcgtaatgacatttatattattaatccaagtatgagaaagtatttaaatgtatctgttgcaatttcaaagattgcactgcggtacgttccacctgaagatttacatcagtatagtattgatgaatttttcatggatgtaacggatagttaccatagatttaattcaacagtttttgctttttgtaaaagatttcaaaatgaaatattagaagaaacaggtattcactgtaccattggaataggctcgaatatgctattgagcaaggttgcaatggatattgaagctaagcattcggaaaacggtatagctgaatggcgttatcaagatgtacctgaaaaattatggccaattcaaccacttagagatttttggggggttaataagcgtacagaaaagaaattgaataaaagaggaatatttacaataggagatttagcaaagtatccatatcattatttaaaaagagattttggagttttaggtatagatatgcatctacatgcaaacggtattgatcaaagtaaagtaagagaaaaatataaagtaacaaatccttcaatatgtaaaagtcagattctaatgcgagattatcaatttgaagaatccaaagttgtcatgcaagaattgatagaagatgtagcaagtcgtttaagagcagaaaagaagcttgctcgaacaattcatttttctttcggttatgctgaaggtggtggcatacataagcaatatactttggaggatcctacaaatttagaaagagatatattcaaagtcattaattattttgcaaatcgtctgtgtgacaaaaaagcattgtatagaacgttaagtgtatcgttaactcagtttattaaagaaagcaatcgacaactcaacttattcattgatgaatatgaacgtaagaaagatgtaaaacttgctaaaaccattgatcacttacatttaaaatatggaaaaggaattgtgtcaaaagcgacttcatacaccgaagctggtacaaagcatggtcgattaggactaatggctggtcataaaatgtag

SEQ ID NO: 3168 - DNA, 1089 bp, Staphylococcus epidermidis
atgcgaaatattttatttgtagggttaggccttattggcggtagcttggcgagtaatttaaaatatcattacagtaatttcaatattcttgcatacgattcggactacacacaacttgatgaagccctttctataggtattattgatcaaaaagttaatgattatgctactgctgttgagatagcggatataatcatctttgcaactcctgttgagcaaacaattaaatatctatctgaacttacaaattacaatacaaaaactcatttgattgtaacagacacaggtagtaccaaacttactatacaatcattcgaaaaagaattattaaaacatgatattcatttaattagtggtcatcctatggcaggaagtcataaatctggtgttttaaacgcgaaaaaacatttatttgaaaatgcttattacattcttgtatttaatgaaatcgaaaataatgaagccgcgacatatttaaagaaattacttaaacctacgttagcaaaatttatcgttactcatgcaaatgaacatgatttcgtaaccggtatagtgagtcatgttccacatatcatcgcttcaattttagttcatctaagtgctaatcatgtcaaagaccattctttaatcgaaaaattagcagccggtggctttagagatataactcgtatagcaagtagtaatgctcagatgtggaaggatatcactttaaataatcaaaatcatattttatctttacttaacgagattaaagaacaaattactggtattgaaaatttgatacgagaacaaaatagtaatagtatttacgatttcttcgttaaagctaaagattatcgtgatcaacttcctgttaaacaacacggtgcaatatctactgcgtatgatctttatgttgatatccctgataagccgggtatgataagtcaaattacaaacatcataagttcacataatatttctattataaacttaaagattttagaagtacgtgaagatatttatggagctttacaaatcagttttaaaagtcccgaagatcgagagaatgctataaaagccctcgcaaattttgatacttattattaa

SEQ ID NO: 3169 - DNA, 1407 bp, Staphylococcus epidermidis
atggatattgtatacaaaaaggtgaatgctcaaattacgccagaagctttagcaaaattaaaacaaaaaaagatcatttttgaaagtacaaatcaacagaaacttaaaggtaggtactcgatagtagtattcgatcattatggcaaaattacattagataattctcaacttttaattaagttagacaatcattgtgaaatagttaagaatcaaccgtatcaacgacttaaggaatttgtagataaatattattttgaaatcaaagataaatatttaaaagatttaccttttatttcgggctttatagggacatgtagctttgatttagtacgacatgaatttaaaaaattacaagatattaaattagaagatcatcaaactcatgacgtccaattttatctagtggaagatgtatttgtttttgatcattataaagatgaattatatattatcgcaagtaacttattttctgatagaacaaaagagagattaaaggaatctattgaacgtaaaattgaagatttaaaaaacatacatttttcggttgaggatataaattataaatccatccctcgacatataaccaccaatatatcagagcaacaatttgttcaaactattagaattttaaaaaagaaaattactgaaggagatatgtttcaagtagttccttcaagaatttatagttataaacaccattttcaacacaatttacatcaattaacttttcagttatatcaaaatttaaagcgacaaaatcctagtccatatatgtattatattaataaagatgtaccgattgtaataggaagttctcctgaaagttttgtaaaggtaaaagatggaaaagtttatacgaatcctatagctggaacaattaaaagaggtcaaaataaaaaagaagatgaaaataatgaaaagacattaatgaaagatgaaaaggaattgagtgaacatcgtatgctcgtagatttaggaagaaatgatattcatcgaataagtaaaacaggcacttcacaaattaccaaactaatgacaatagaacgttatgaacatgtcatgcatatcgttagtgaagttattggagaattaaaaccccatctatctcctatgagcgtcatcgcaagtttgctaccaacgggtactgtctcaggtgcacctaaacttagagctatacagagaatatacgaatcttatccttataaaagaggtatctatagcggtggtgttgggtatatcaactgtaatcatcatttagattttgcattggctatacgtaccatgattatcgatgaggaaaaagtcagtgtcgaggcaggatgtggagtagtatatgattctattccagagaaagaacttgaagaaacaaaacttaaagctaaaagtttattggaggtaactccatga

SEQ ID NO: 3170 - DNA, 567 bp, Staphylococcus epidermidis
atgatattaataatagataactatgattcttttacctacaatcttgtagatattgtagaaaaacaatgtgaaacgattgttaaatatcccgatgatacagatatatgtaatctgaaaggtattacagcagttattatttcaccaggacctggacatccattagacaatcaattattaattaaattaattgaaaatttcgaaaatttacctattttaggtgtttgcttaggtgcacaagcgctcacttgttattacggtggcgatgttatacaaggtagttgtgtcaaacatggaaaagtagatactttaactattgttaatcagtcaccactatacaaaggaattaagtcaagtttcaaagttatgcgttatcattcattaattagtgatccatgctcatttccagaaagtttattaatcactggccaaacatatgatagtatacaatctttccaacacaaaaacagaaaacattatggcatacagtttcatccagagtcattcgctacagaaaatgggaaacaaatcattattaattttataaatatagcaacgagaggaagttga

SEQ ID NO: 3171 - DNA, 996 bp, Staphylococcus epidermidis
atgacccttcttgagaaaattaaacaaaataaatctttatctaaaaaagatatgcaatcatttattgttacactgtttgattcaaatatagaaaccaatgtaaaggttgaattattgaaagcttatacaaataaagacatgggtcaatatgagctaacgtatttagttgaatattttatccagacaaactatccaaaccaaccattttataataaagctatgtgtgtttgtggcacaggtggagatcaatcaaatagctttaatatttctacaactgtagcttttgttgtagcaagtgcaggagtgccagtcattaaacacggtaataaaagtattacttcacattcaggaagtacagatgtattacatgaaatgaatataaaaacaaacaaaatgaacgaagtagagcaacaattaaatttgaaaggattagcattcataagtgcaactgattcttatccaatgatgaaaaagcttcaatcaattagaaaatcgattgcaacacctacaatttttaacttgattggaccattaattaatcctttcaaattaacttatcaagtgatgggggtatatgaagcttcacaacttgaaaatatagcacaaacattaaaggatttaggtagaaaacgagcaattttaattcatggtgcaaatgggatggatgaggccacgctttctggtgaaaatatcatttatgaagttagcagcgaaagagcattaaaaaaatatagtttaaaagcagaagaagtcggtttagcttatgcaaataatgacacgttgataggtggttcacctcaaacaaataaacaaattgcattgaatatcctaagtggcacggatcactcaagtaaacgagatgtagttttgttaaatgctggaattgctttatatgttgctgagcaagtggaaagtatcaaacatggcgtagagagagcgaaatatctcattgatacaggtatggcaatgaaacaatatttaaaaatgggaggttaa

SEQ ID NO: 3172 - DNA, 789 bp, Staphylococcus epidermidis
atgactattttaaatgaaattattgagtataaaaaaactttgcttgagcgtaaatactatgataaaaaacttgaaattttacaagataacggaaatgttaagaggagaaagctgattgattcacttaactatgatagaacattatcagttattgctgaaataaaatcgaaaagcccatctgtacctcaattaccgcaacgtgatcttgttcaacaagttaaagattatcaaaaatatggtgctaatgctatttcaatattaactgatgaaaaatactttggcggtagttttgaacgattaaatcagttatcaaagataacatcgttaccagttttatgtaaagattttattattgataaaattcaaatagatgttgcaaaacgagctggtgcatctattattttattaatagtaaatattttaagtgatgaccaattaaaagaattgtattcatatgcaacaaaccataatttagaagctctagtagaagttcatacaattagagaacttgaacgtgcacaccaaattaaccctaaaattattggtgttaataatcgtgatttaaaacgatttgaaaccgatgttctacatacaaataaattacttaagtttaaaaagtctaattgctgctacatttcagagagtggcattcatacaaaagaagatgttgagaaaatagtagattcaagtattgacggtttacttgtaggggaggcattaatgaaaacaaatgacttaagtcagtttttgcctagtttaaagttaaagaagaatctctatgatagttaa

SEQ ID NO: 3173 - DNA, 624 bp, Staphylococcus epidermidis
atgatagttaaattttgtggttttaaaaccgaaagtgatattaagaaaattaaaaaattagaagttgatgcagtagggtttatacattatcccgatagtaagagacatgtctcactgaaacaattaaaatatttggctaaaatagtgccagatcatatagagaaagtagtggtcgtagtaaatcctcaaatgtccaccataaagagaataattaatcaaactgatattaacacaatccaattacatggaaatgaaagcattcaattaattagaaatattaagaaacttaattcaaaaataagaatcataaaagcaattccagcaacaagaaatttaaataataacattcaaaagtataaagatgagatagacatgtttattatagatacaccatcaatcacatacggagggacaggtcaaagttttgactggaaattattaaaaaaaataaagggcgttgattttctcattgcgggtggtttggattttgaaaagataaaacgattagaaatatattcatttggacaatgtggttatgacatctcaactggcattgagtcacataatgaaaaagattttaataagatgactcgaatattaaaatttttgaaaggagacgaatga

SEQ ID NO: 3174 - DNA, 1209 bp, Staphylococcus epidermidis
atgaaaattcaaacagaagtagatgaattgggctttttcggtgaatatggtggccaatatgtacctgaaacattgatgccagctattattgaacttaaaaaagcatatgaggacgcgaaatcagatactcacttcaagaaagaatttaattattatttaagtgaatatgttggtagagaaacgcctttaacatttgctgaatcatacacaaaattgttaggtggtgccaaaatatatcttaaaagagaagacttaaatcacactggtgctcataaaattaataacgcgataggacaggcactattagctaaaaggatggggaaaactaaattagtagccgaaacaggtgctggtcaacatggtgtagcaagtgccaccatcgctgctttattcgatatggatcttattgttttcatgggaagtgaagatatcaaacgtcaacaacttaacgtatttagaatggaattgctaggagctaaagtagtgtctgtgtcagatgggcaaggaacactatcagatgctgtaaataaagctttgcaatattgggtgaatcatgtcgaggatacacattatttattaggctcagcgttgggacctgatccgtttccaactatggtcagagattttcagagtgtgattggtaatgaaattaaaagccaaattttaagtaaagaaggacgacttccagatgcgttagtcgcgtgtgttggtggaggatccaattcaataggtacgttctatccatttatacaagatgatgttaaattatatggggtagaagctgcgggaaaaggaagtcatacgcataatcatgctttagctatagggaaaggtaaaccaggtgtattacatggttccaaaatgtaccttattcaaaatgatgatggacaaattgaattggcacactctatatcagcgggactagattatccaggtattggacctgaacattcgtattataatgatattggtcgtgtatcatatgtaagtgctacagataatgaagctatggaagcacttataacattctcaaaagttgaaggtatcattccagcaattgaaagtgcacatgcattgagttatgttgaaaaattagcgccaaatatggatgaaaaagaaattattgttgtgactatttcaggtcgtggagataaagatatggaaacaattaaacaatacaaagaaaacggtggtgaacaaaatgagtaa

SEQ ID NO: 3175 - DNA, 732 bp, Staphylococcus epidermidis
atgagtaaattattcattccgtatattatgggtgatttaaattttattcatcatttaaaaacattaactgagaatggagcagacattgttgaaattggtgtgccattttctgatcctgttgcagatggacctataatcatgaaagcagggcgcaacgctattgacgagggttcaaacattaaattcatttttgatgaattaataaaaaataaaaatactatttcatctaagtatgtattaatgacttattataatattctaagtgcttatggagaagaattatttttggataagtgtgatgaagctggtgtttatggtttaattattccagatttaccttacgaacttacaaaaaagtttaaaaaagatttttatcatcattctgttaaaataatatcgttaattgccatgaccgcaagtgatgctaggattatgcaaattgcaaagaactcagaaggatttatttacacggtaacaatgaatgccacaacaggtaacagtggggagttccatccagatttaaagagaaaaattgaatatataaaaaaagtttcaaaaattcctgtggttgctggatttggtatcaaaaatcctgaacatgttaaagatatagcgtccgttgcagatggtattgtaattggtagtgaaattgtaaaacgtattgaaatagattcaagaaaagaatttatcacttatatcaaatcaataagaactacgttgaattctttataa

SEQ ID NO: 3176 - DNA, 660 bp, Staphylococcus epidermidis
atgagtaaaaaagttttatttgttttaacaagtacaagtcaatttacagacggtacagaaactggattatggttagaagaagctggagcaccatataatatattgactgaagaaggtatcaatgttgatgttatttctattaaaggtggaaaagtaaatcttgatcctaattctgtttctaatgaatcactgaatcagtatgctaaattcgtgtcacacttaaacgatacacctagtatcgaaaatgtaaatgcagatgagtatgacgctatttatctaccaggtggacatggtactgtatacgattttgccaataatgagaaattagctgatattttacttcaatttaaaaatagtaataaaataatctcttcagtatgtcatggacctagtgcgtttgtaggtgtaaaagatgcaaataatcactatctagtagatggtgtcaaaataacttcatttactgatagtgaagaaaaagcaatgggatttgaaaataaagtaccatttttaactcaatctaaattagaagagcaaggtgcaaattttgtagtgaaagatgactttacatctcacgtagaaaaagacggtcaatttatcactggacaaaatccccaatcaagtgaagacattggtaaagcacttgcaaatgaattaaaataa

SEQ ID NO: 3177 - DNA, 114 bp, Staphylococcus epidermidis
atgttaaatataaaaggtgaagtaaaacgacctatttttctaaaaataaaaagaaatagatataaagatataaatgggagttatgaagatgaagtttacgaatttgacagctaa

SEQ ID NO: 3178 - DNA, 1254 bp, Staphylococcus epidermidis
atgaagtttacgaatttgacagctaaagaatttagtgactttactgatcgtatgacatatagtcattttacacaaatggaaggtaattacgaattaaaggttgctgaaggtaccgagtcacatttagttggaattaaaaataatgataacgaagtgattgcagcttgtttattaacagctgttcctgtaatgaaaatatttaaatatttttattccaatcgcggtccagtaatagattataataataaagagcttgtacattttttctttaatgaattgagtaaatatgtaaaaaaatataattgtttatatttaagagttgacccataccttccgtatcaatatttaaatcatgagggagaaataactggaaatgcaggtcatgattggatttttgatgaattagagagtttaggatataaacacgaaggatttcacaaaggatttgatcctgtattacaaatccgatatcattctgttctaaatttagcaaacaaaagtgctaatgatgttttaaaaaacatggatggtttaagaaagcgtaatactaaaaaagttaagaaaaatggagttaaagtccgctttttatctgaagaagagttacctatatttaggtcatttatggaggatacctctgaaactaaagattttgcagatagagaagatagtttttattacaacagattcaaacattataaagaccgtgttttagtaccactagcctatattaactttgatgagtatatagaggaactaaataatgaaagaaatgtgcttaataaagattataataaagctttaaaagacattgagaaacgtccagagaataaaaaagcacataacaaaaaggaaaatttagaacaacaactcgatgcaaatcagcaaaaaattaatgaagctaaaaacttaaaacaagaacatggcaatgaattacccatctctgctggcttctttataattaatccgtttgaagtagtttactacgctggtggaacttcaaatcgttatcgccattttgcagggagctatgcggttcaatggaagatgattaactatgcaattgaacatggtattaatcggtataatttctatggtattagtggtgactttagtgaagatgctgaagatgctggcgtagttaagtttaaaaagggctatgatgccgatgttatagaatacgttggtgactttattaaacctattaataaaccaatgtataacatttatagaacacttaaaaaactaaagaaatag

SEQ ID NO: 3179 - DNA, 1254 bp, Staphylococcus epidermidis
atgaaatttacagagttaacagttaaagaatttgaaaactttgtacaaaatccatcattagaaagtcattatttccaagtgaaggaaaatattgctacacgtgaatcagatgggtttcaagtagtgttattaggtgtaaaagacgacgacaatagagtgatagcagctagcctgttttctaaaatccctacaatgggcagttatgtgtattattccaatagaggccctgtaatggactattcagatttaggtttagtggatttttatttaaaagagcttgataaatatttacatcaacatcaatgcttatatgtaaaattagatccttactggttgtatcaagtttatgataaagatattaatcctttaacagaaaaaaatgatgctttagtaaatctatttaaatcacatggttatgatcatcacggatttacaacccaatatgattcttccagccaagttagatggatgggggtattagatttagagggcaaaacccctgcatctctaaggaaagagtttgatagtcaaagaaaacgaaatattaataaagcgataaactacggtgtgaaagttagatttcttagtaaggatgaatttgatttattcttagacttataccgagagactgaagctagaactggatttgcttctaaaactgacgattatttctataactttatagagcattatggcgataaagtattagttcctttagcttacatagatttaaatgaatatatacaacatttgcaagaatcactaaatgataaagaaaatcgacgtgatgatatgatggcgaaagaaaataaaacagataaacagttaaagaaaatagctgagttagataaacaaattgatcacgataaaaaagaattgcttcaagctagtgaattacgtcaaacagatggcgaaattttaaatttagcttcaggagtatactttgctaatgcatatgaagtgaactatttctctggagggtcttcagaaaaatataatcaatatatgggaccatatgcaatgcattggcacatgattaattattgttttgataacggttatgatagatataatttctatggcttatcaggtgattttactgaaaacagtgaagactatggtgtttatcgctttaagagaggttttaatgttaggattgaggaattaatcggtgatttctataaaccaatcaataaagtgaaatattggttattcaatacattagatcgcatacgtaataaattgaaaaagtaa

SEQ ID NO: 3180 - DNA, 765 bp, Staphylococcus epidermidis
atgaattttatttttgatattgatggtacgatttgttttgatggatgttccatcgattcatcaattaagcaaagacttttcaagctacgtcaagctaatcacaatgtaatatttgcttcagcacgtcctattagagatttgcttccagtcattcctgaatttgcggatgataccttgattggtggtaatggctcaattatctctaaaaatggacaaatcgaaattgtttcggtaatcaatgagcatgatatcagtctaattaaaaaacttataaagagatatcaattatcatacatcattgatgataaatttaattatgcttcaaatttggatagtaataatgaactgtatcaacgtattgatcctgatggtaaagcacaatctctagatatggatgagattcgaaatcctataaaagcaattctattaaatatagataacaaagattttgacatgattgctcatctattagtaagtcagtctcatggtattgaattaattcgtcattacagtgagtcctatattgatgtaacggcacgtggcgttgataagtatactactattcaatatattttaggaactaatagtgattatatcgcttttggtaatgatcacaatgatgttcatatgcttgaacatgcgtatcaaggttattttgtaactaatcaatttattgaacacacatcatttttaaaaaatcaaaatattacagttattgatgacacaatacatgcaatatgtgaggttttagataaatatctataa

SEQ ID NO: 3181 - DNA, 1011 bp, Staphylococcus epidermidis
atgaaaaaattattaacattagtatctattattctttttgcaatagtattaacagcatgtggaaatgataaatcaggtaatagttatgattcaaaaaaaacagtgactattaaaaatacatatgaattcaaggataagaataatacacatcatcgtggtgaaatgaaaactgacactgttaaagtgccttataatcccaatcgtgtagcggttcttgattatggtgcactagatgtaatgaaacaattaggattacaaaataagattgtttcaattgcaaaaggtcaaggaaattcatttttaccttcctcattagctgaatttaaagatgataaatattctaacttaggcaacccaggtcgaccaaattttgatcaattagctaaatctaaaccagagctcattctagcatcttttagacaagcccatactaagacaattgacgaaatgaaaaaagcagcacctaatgctaaaattctattcgtaagtccagacaatgataattatttaagttcaataaaatctcatacatcaacaattggtaaaatattcaataaagagaatgaagccaatgatttaaataaaaaattagaacaacaagtaactgaaactaagaaaagtattaatcatgactcagtattattcctagttgttgatgataaagggataaaagcatttagttcaaatggtcgctttggaggatttttaaacaaagatttgggtattaaacatgttgataaaaacatgaaagataattcagctggaaataatattaattatgaatatcttaacaaagttaaccctgataaaatatttgtaatagatcgaacgaagaatggcactgataataagataccaagcatcttacaaaataaagttattgaaaatgtaaaagctataaaaaatcatcaagtttatcaatttgaatccaatgcatggtattttggtgaaggtggcaatcaaataacgattgaacaactaaaaagaattaaagatgcattcctaaagtaa

SEQ ID NO: 3182 - DNA, 699 bp, Staphylococcus epidermidis
atgattcaatttgatcatgtagattattcatatcatcgaaaacagcctgttttaaaagatattaatataagtattcaacgtggtgaaaaaataggggttttaggggaaagcggtgctggaaaaagtactattggttctttaatattaggtcaattaaagccaacaaaaggaaaaataagtatcgattcaggaaaggttctacctatttttcaacatgcgacagaaagttttgatcgtcaattcacgattgaacagtcattgagagagccacttttattttatcgacaattaataccacaaaatatcaaaaatatcattcttaactatttaattgaatttaatttgtctacagatctaataacaaagtttcctcaagaggtaagtggtgggcaactacaaagattaaatattatacgttctctcttagcacaaccagatatattggtttgtgatgaaataacttcgaacttagacgtcatggccgaacaaaatgtaatcaatattttacttaacgaaaaaaacattcaaaataaaacactaatcgtcatctcgcatgatttatctgttttacaaaggttaacgaataggataatagttatcaaagacggtcaaatagtagatgattttaaaagtaaagatttatttagccataaaagacatccatatacaaaactattaattcaaacgtatgaatattga

SEQ ID NO: 3183 - DNA, 777 bp, Staphylococcus epidermidis
ttgaaacttttaacaataaaaaatctaaacatcaatgataaagaagggcaagcaattattaaaaatgtcgacttaaatatatataatcaatctctaaatgtcattataggtgaaagtggtgctggaaaaagtttgactgttaaagcaatattaaatcatttacctactcagttacatatgagtttcgatgaatttaaaatgcaaggtcaaaatacttctggtatcaagcaacttttaggtaaacatatcggctatatctctcaaaattatgctcaaagttttaatgaatatactcgtttggataaacaacttatagctatatatcgttatcattttaatgtttctaaggataatgcattgaaaaagataaaaaaagctttaacttgggttaacttaaatgatgaatcaatcattaataaatatagtttccaactttcaggaggacaattagagcgagttaatattgctagcgttttaatgttagatccagaattaattattgcagatgaacctgttgcatctttagatgtagtgaacggtcatcaaataatacaactccttcaacacattgttaaagatcatcataatactgtattacttatcactcataacatgaatcatgtcctcaaatatgctgattattttaatgtaatgagaaatggcatgatgattgaatctggagaaatagacaaattatttaatcaccatcatcttcatcggtatacagaacaattattaaactatagaagcaagctgcaaaaggaggacaacatctaa

SEQ ID NO: 3184 - DNA, 720 bp, Staphylococcus epidermidis
atgagtatgaatcatttacttggcacagatgattacggacgtgatttattcagtcgtttagtcgtgggctctcgtgcaacattgtttgttacactacttactttacttttcactgtagtggttggagtacctttagggttacttgcaggctataaaaaaggttggattgatacgattatcatgcgaattattgatataggattaagcataccagaattcgttattatgattgccttagcaagtttttttcatcctagtctttggaatttagtaatagctattacaatcataaaatggatgaattatactcgcgtgacaagagggattgtcaataccgaaatgaatcaatcgtatatacagatggcacaattttttaatgtctcaactttgaatatcttatttaaacacttattaccaaaagttttaccatctatatttgttattatgatagttgattttggaaaaatcattttatacattagttcattatcatttttaggtttaggtgcacaaccaccgtctccagagtggggggcaatgttacaagcagggcgtgaatttattacttcacatcctatcatgattatcgctccagcatctttgatatcaggtacaatattgatatttaatttaactggtgatgcagtaagagatcgtttattagaacaaagaggtgtaaaagttgaaacttttaacaataaaaaatctaaacatcaatga

SEQ ID NO: 3185 - DNA, 1002 bp, Staphylococcus epidermidis
atgtttaaaatgataatttataaactttcacaaatgattgtcgtactatttatattaactacaatcacatttatattaatgaagctctctccaggtaatcctgtagacaaaattttacatcttgatatttcgcatgtatctcatgagcaaatagaaacgacagagaataggcttggcttaaataatcctatttttattcaatggtggcactggttaaatcaattgtttcattttgatttaggaacaagttatcaaacaagcgagcctgtaattaaggaaatagcaaattatcttggtcctacacttattattacttttggtacgcttatagtgtcattagttatttcaataccattagggattatagcagcagtttactaccataaaatttgggataggataatccgtgttatgacatcattatccgtaagcctaccatcattttttatcggtcttatcttattatatatatttagcttgaagttgaatgttttaccaacttcagatgaggggcgtttcgcttcatatattttaccaataattaccatgagtattggaatgtgtgcttattatattcgatttattcgttctactttattagaacaatatcaaacacctatagttgaatcgtctcgtctcagaggtatgcccgaaagatatatactttttcaagatatccttaaacctacgatactaccaatcatacctctattaggtttatccattggtagtttgataggtggaacagtagtcattgaaaatttatttgatattcctgggttaggctattttttagttgacagtataaagtcgagagattatccagtcattcaaggttgtgtattatttattggtttctttgtagtgattataaacacaattgcagatttactttcattacttatcgatcctaaacaacgttatgctattactcagaaagaaacatcaaagtttaaatggtttaattcacatagaaaagaaggtcgtaacgatgaagtttaa

SEQ ID NO: 3186 - DNA, 339 bp, Staphylococcus epidermidis
atgacaatatttgatatgccaaactatttgtggattaccattcttggtatgattttattaactgtattttacacacttgtattaaataaatggttccagtctgcaatcattacttttgtagttttagcagtacttgccttttttataccaaattttcaaaacatttcatatcaaccactgcttggatatgcaggattcttaggcataatgagcttaatcataagcttttttatttggtatttttctagaaactggagaaaaaatcgtagaaaaataaaattggaaaaagagattcgcaaatatgatgatgaagagtcacttcgtcgtcatcataaataa

SEQ ID NO: 3187 - DNA, 1812 bp, Staphylococcus epidermidis
atgagtgaaggtttacctttgagagaagaagttccggtaaaagaaacttgggatttgaaagatttatttacaagtgatcaagcattctatcaaacattggaacaagtagtacaaatgtctttagattttaatcatacatattatcagaaacttaataacatagaaataatagaaaaggcattagatgaatatgaaaggatacttatagaaatagatcgtttatataattatccagaacttagattaagcgttgatacgtctaatgaagaagcacaaaaagttaacgcaaaacttaatacgacttctggaaaacttgctggtttattatcttttgttgattccgagattttggagttacccgatgagataataagcgaattgaggtctcaaacaaaataccctcattttattaaacaacttcaagatcgtaagccttatcaattatctgctgatgttgaaaaagtattagctacattaacaccaacattgagaagtccgtttgaattgtatggtactacaaagagtttggatattaattttgaatcgtttgattatgagggtgttacctatccattggattatgcaacatttgaaaatgaatatgaagatcatccatctcctgaatttagacgtaaaagttttagagcttttagtgatgcactacgacaatatcaacatacgacggccgcaacatataatatgcaagtccaacaagaaaagattgaagcgaatttacgaggatatgattctgttattgattatctactacaagatcaagaagtaacaaaagatatgttcgatagacaaattgatgtcattatgagtgatttagccccagttatgcaaaagtatgcaaagattattcaacgtgtacataacctggataaaatgcgatttgaggatttaaaaatttcaatagaccctaactttgaaccagaaatatcaattgaagaatcgaaaaaatacatttatggagcgctcaaagtacttggtgatgattatgtcaaaatgttagagtctgcctatgattaccgttggattgattttgctcagaataaaggaaaagatactggagcatattgtgcaagtccatacattacacattcatatgtatttatttcatggactgggaaaatggctgaaacattcgttcttgcgcatgaattaggacatgcaggtcattttgcattagcgcagaatcatcaaaatttgttggaatctgaagcgtctatgtattttgtagaagcaccttccacaatgaatgaaatgttgatggcaaattacttatttaatagtagtaataatcctcgatttaaacgttgggttattggttcgattttatctcgaacttattatcataatatggttacccaccttttagaagcagcttatcaacgtgaagtgtatagccgagtcgacaatggagagtcattaactgccccactgctaaatgaaataatgttgaacacttataaagcatttttcggtgacactgttgaaatgacagatggggttgaattaacatggatgagacaaccacattattatatgggattgtactcatatacgtactctgctggattgacaattggtacagttgtatcacaatgtatcaagaaagaaggtcaacctgctgttgatcgctggttaaaaacgctacaagctggtggtagtcaatctccaattgaattggcgcaaatagctggcgttgatattacgactgacgcccctttaaaagagacaattaactatatttcaaatttagtagatgaattagaagtattaacatatcaaatagaagaaaattcataa

SEQ ID NO: 3188 - DNA, 648 bp, Staphylococcus epidermidis
atggcaattattagacaaaaatatgaaggtcagctagatggattaattaaagatttacggcgtcttggtcttcgtgtatattttaatattaacaatgcactagtatctttaggggaagaaaagaaatcattcgcaagacaaaccattgagaaagacaaagaaattaaccatttagatcatgaaattaacgagaaggtaatcatgctaattacgagacaacaacctattgccaaagatttacgtatgatgatggcagcactcaaaatctctactgactttgaacgaatgggggataatgctgctagtatcgctcatatacgtttaagagttaaaataaatgataactatgtgtttacacgtttaaaaaccatgggtaaattagcgatgctcatgttagaagatttaaataacgctattagaaataaagatttaccactgataaaagaagtcattgagagagatgaagatattgatgatttatacgttaacatcgtcaataccagttacttaattgataatgacccattcgtagctggtcaagcacacttagcagctagacacttagaacgaataggtgatcatataagcaatattgctgaaagtgtttattattatttaacaggccaacattttgaaacttttgattaa

SEQ ID NO: 3189 - DNA, 876 bp, Staphylococcus epidermidis
atggctaattcacaagtagcagaaaaagagaaactagacgcacaaacaaataatcaagactcagttgccacaatagtaactactgaaaacaataagaaaaatacaattccagacagtgaaaagaagattgtttattcaactcaaaatctagatttatggtatggagaaaatcatgcgttacaaaacattaatttagatatattggaaaataatgtaactgcaataatcggaccttctggatgtggtaaatctacatacatcaaagctttaaatagaatggtcgaattagttccatctgtgaaaactgcaggtaaaattttgtatcgtgaccaaaatatatttgatgcaaagtattctaaagaaaagctacgtactaacgttggaatggtctttcaacaacctaacccattccctaagtcaatttatgataatattacttatggccctaagactcacggtattaaaaacaaaaaaattctagatgaaatcgtagaaaaatcattacgtggcgctgcaatatgggatgaattaaaagatagattgcatacaaatgcttatggattatcaggtggacaacaacaacgtgtttgtatagctagatgtttagcaattgaaccagatgtcattttaatggatgaacctacatcagcattagatcctatttctacgttaagagttgaagaacttgtacaagaattaaaagaaaattactcaattatcatggttacgcacaacatgcaacaagctgcgcgtgtttcagataaaactgctttcttcttaaatggatatgtcaatgaatatgatgatactgataaaatcttttcaaatcctgccgacaaacaaactgaagattatatatctggtcgttttggataa

SEQ ID NO: 3190 - DNA, 906 bp, Staphylococcus epidermidis
atgtctacacattcaaatactgctaacaaaacattgattgataaagatgccgtagaaaaaaatatttcttctcgtgataggaaaaactcggtaaacaaatggttatttttattatgtacattaattgggctcattgttttagtagcactattaattcaaactttcgttaaaggggcgggacatctaactcccgaatttttcactaatttttcatcttcaacaccagcagatgctggtattaaaggggctttagtaggttctatttggttaatcttaagtattattccaattagtatcattttaggaataggtacagcaatttatttagaagaatacgcaagagacaatatttttacacaaatcgtaaaggtgagtatatctaatttagctggtgttccttcaattgttttcggtttactaggttatacattatttgtaggcgcggcaggtttaggtaatagcgtgctagccgctgcgcttacaatgtcactactaatcttgcctgttattatcgttgctagtcaggaagctatcagagcagttcctagttcagtcagagaagcatcatatggtcttggtgctaataaatggcaaacaattagaagagttgttttacctgcagcattacctggtattttaacaggtttcattttatctttatcacgcgcattaggagaaacagcaccacttgtaatgataggtatacctacgatacttttagcaacaccaagtggattactcgaccaattctctgcgttaccaactcaaatttatacatgggcaaaaatgcctcaagcagaattccaaaacgttgcatcagcaggtattatcgttctactcgttatcttattattgatgaacactgtagcgatacttcttcgtaataaatttagtaaaaaattctaa

SEQ ID NO: 3191 - DNA, 927 bp, Staphylococcus epidermidis
atggcttcacaaacaaaggtgagagaaatgatagctaagaataatgctaaaaagggcgggctaagtgataaaattgtcccaattattttagccattatttcagctatatctatattaactacaattgctattttatttacacttttaaccgagacgattacgtttttcacacgagtgccattatctaaattctttttatctggtacttggaacccaactggttcatcaccagaatttggaatttgggcactcatcatcggcacattgaaaattactgttattgctacaatcgtagcagttccgattggtttaggagcagctatctaccttaatgaatatgcatctgatcgttcacgtagaatcattaaaccaatattagaaattttggctgggattcctacaattgtatttggcttctttgctttgacatttgttacacctatattgagaaatctaattcctaacttgggagagtttaattcaatcagtcccggtattgttgtgggtataatgattgtccctatgattacaagtatgagtgaagatgcaatgtcatctgtacctgataaaattcgtgaaggtgcatttggattaggcgcaactaaatttgaagtcgctacaaaagttgtattaccagctgcgacttctggcgttgttgcttcaattgtattaggtatatcaagagcaataggtgaaacaatgatcgtttctttagctgctggtagttcaccaacatcatctctaagtttaactagttcaattcaaacgatgacaggatatattgttgaaattgctacaggtgatgcagcatttggttctgatatttactacagtatttacgctgtaggttttacacttttcattttcactttaattatgaatttattatcacaatggatctctaaacgattcagagaggagtattaa

SEQ ID NO: 3192 - DNA, 978 bp, Staphylococcus epidermidis
atgaaaaagtggcaattagtcggtactactgtattaggagcttcggttttacttggcgcttgtggcggaaatgatggaggttcaggagacggcaaagatcttaaaggttctgctaaaggtgaaggttcgtccacagtagctcctatcgttgaaaaattaaacgaaaaatgggctaaagatcataaagacgccaaaatttcttcaggtcaagccggtacaggtgctggtttccaaaaattcattgctggcgaaactgatttctcagacgcttcaagacctattaaagacgaagaaaagaaaaaattagaagataaagggattaaatatcacgaattcaaaatcgcacaagatggtgtaacaattgcggttaataaagataacgactttgttaaagaattaactaaatcacaattaaaagatatttactctggtaaagctaaaacatggaaagacgttaactctagttggccagataaaaaaatcaatgctgtttcacctaactcaagtcatggtacttacgacttctttgaagaagaagttatggacaaacaagatatcaaagctgagaagaacgctgatactaacgcgatcgtatcttcagtaactaaaaacaaagaaggtatcggttacttcggttataatttctacgaacaaaataaagataaattaaaagaagttaaaatcaaagatgacaatggcaaagttacagaaccaactaagaaaacaattcagaacggttcatacgcactaagcagaccattatttatctacgctaaagacaaatcattaaaagacaataaagtaatgtcagaattcatgaaatttgtacttgaagatgaaggtaaagcagctgaagacgctggttatgtagcttcacctaagaaaacttataaatctcaattagatgacttaaaagattttttagataaacatcaaaaatctgataagaaagacgacaaaaaatcagaagataaataa

SEQ ID NO: 3193 - DNA, 897 bp, Staphylococcus epidermidis
atggcactagataaagatatagtaggttcaatagaatttttagaagtcgtaggattacaagggtcaacatatttacttaaagggccaaatgatgaaagtgtcaaactcaatcagtcagaagttgctgatgaagatgattttgaattaggtgaggaatatagttttttcgtttatccaaaccgttcaggagatttatttgcgacgcaaaacatgcctgatattacaaaagataaatatgattttgctaaagttataaaaaccgatagagacggtgcacatattgacgtaggacttcctcgtgaagtcttagttccatgggaagatttaccgaaacttaaagaactttggcctaaagcaggtgattacttgctagttactttgagaatagacagtacgaatcaaatgtttggacgattagctagtgaaacgattgttgagtcaatgttcacaccagtaaatgacgatagcaaacaaaacgaatatatttctgcacgcgcttatagattactcagagtaggtagcttcttattaagtaatgagggttataaaatctttgttcacgaatctgaacgtaaacatgagcctcggttaggtgaggcagtagaggtccgaattataggtcataatgaaaaaggtgaattaaatggttcgtttttaccattagctcatgaacgccttgatgatgatggacaggtcatatttgatttacttgttgagtatgatggtgaattacctttttgggataaatctagtcctgatgcaatcaaagaagtctttaatatgagtaaaggctcgtttaaacgtgcaatcggacatttatataagaaaaagataatcaatatagaaacaggaaaaatcactcttaccaaaaaagggtggagccgtgtagatgattaa

SEQ ID NO: 3194 - DNA, 1608 bp, Staphylococcus epidermidis
atgttacaagtaactgatgtaagtttacgttttggtgatcgtaaactatttgaagatgtaaatataaaatttacagagggtaattgttatggattaattggtgcaaatggtgctgggaaatctacattcttgaagattttatcaggcgaaattgattcacagactggtcatgtatctctaggtaaagatgagcgtttggctgtgttaaaacaagatcattttgcttatgaagatgaacgtgttttagatgttgtgattaaaggacatgaacgtttgtatcaagtgatgaaagagaaagatgaaatttatatgaaacctgatttcagcgatgaggacggtattcgcgctgcagaacttgaaggagaatttgcagaaatgaacggttggaatgctgaagctgatgctgctaacttattatcaggattaggcatagaacctgacttacatgataaaaatatgtctgaacttgaaaataatcaaaaagttaaggtattgttagctcaaagtttatttggtgatcctgacgttcttttactagatgagcctaccaatggtttagatataccagcaataagttggttagaagactttttaattaattttgaaaatactgtcattgtcgtttcgcatgaccgtcacttcttaaataatgtttgtactcatattgctgatttagactttggcaaaattaaactttatgttggtaactatgatttttggtatcaatcaagtcaattagcacaaaaaatggcacaagaacaaaataagaaaaaagaagaaaaaatgaaagagttacaggatttcatcgcacgcttctcagcaaatgcttctaaatctaaacaggcaacaagtcgtaagaaacaattagaaaaaattgaattagatgatatccagccatcatctcgtagatacccttacgtgaaatttactcctgaacgtgaaattggaaatgatttacttacagtagaaaatctttctaaaacaattgacggcgaaaaagtactagacaatgtttcattcactatgaatcctaatgataaagctattttagttggtgatagcgaaattgctaaaacaacattgttaaaaattttagctggagaaatggaaccagatgaaggtacatttaaatggggtgtaacgacatctttaagttacttccctaaagataactctgagttctttgatggtgtcgatatgaatttagttgaatggttacgtcaatacgctccagaagatgaacaaactgaaacatttttacgtggtttcttaggtcgcatgttatttagtggtgaggaagttaagaaaaaagcaagcgtgctttcaggtggagaaaaagtacgttgcatgttaagtaaaatgatgttatcaagtgctaacgtacttttacttgatgagccaacaaaccatttagatttggaaagtatcactgctgtaaatgacggattaaaatcatttaaaggttctatcatcttcacttcttatgattttgaatttattaatacaatcgcaaatcgagtgattgacttgaatcaagctggtgccctttctaaagaagtaccttatgaggaatacttacaagaaattggtgtattacaaaataattaa

SEQ ID NO: 3195 - DNA, 1203 bp, Staphylococcus epidermidis
ttgaatagaagtgttttaaaatttggcggttcttccgtcagtgattttaaaaaaataaaaaatatcgctgaaatgcttaaaacacgcattgaagatggtgaagaattaatcgttgttgtcagtgctatgggtaagacaactgatcaattgatgaataatgtatcaagtcttacttctacccctaaagatcaagaacttgcattgctattaacaacgggtgaacaacaaacggtttcttacctttctatggtactcaatgatataggtgtaaatgctaaagcgatgacaggttatcaagctggcattaagactgtaggacatcacttaaaaagtaaaatagcagaaattaatcctaatatttttaatgaggcttttaaaaatcatgacattttagttgtagctgggtttcaaggtataaatgaagatttcgaacttactacacttggacgaggtggttctgatacaacagctgtagctttagcagcaagtaatcagacaccttgtgaaatttacactgacgttgatggtgtgtatgcaacagatcctagaatacttaatgaagcgaagcgtttagaatatgtctcttatgaggaaatgatggaaatgagcgcgcttggtgcaggtgtacttgaaacgagaagtgttgaattagctaagaattatgatattccactttacttaggaagaacgttatcaaatgtgaaaggaacatggattatgtctaaaagtgatttattagagaaaaaagcagtaactggtgtcgcattggatacacacatgatgcacgtcacgataagttatcccctaccggataatcagttactgacacaattgtttaccgcattggaagaagaatctgtaaatgttgatatgatttctcaaattgtaaatttagaaggtttacaattatctttttcaattaaagatagtgatgcacatcaaatttcttcaattctggaaaatttatcaacacacttttcagcacttgattataaaattaatgaagcatatgtcaaaatatctttaattggatcaggtatgagagatatgtcaggagtagcatcaaaagcttttacgacacttatcaattcagatattccattttatcaaacgacgacatcggaaattagcatttcttatgtaatagacgaagaaaatggtgaaaaagcagtagaagaattgtatcatgccttcgaaatttag

SEQ ID NO: 3196 - DNA, 990 bp, Staphylococcus epidermidis
atgacaagattagcagtagccggagcaaccggattagttggaacaaaaatgttagagacactagatcgaaaacaaataccttttgatgaattagtattattttcttctgctcgctcagcaggaaaaaaagttgaatttcaaggacaattgtatactgttcaagaattaactgatgaagcagcaagtgaacattttgattatgttttaatgagtgcaggaggtagcacaagtgagcactttgctccactatttgaagcggctggagccattgttattgataattctagtcaatggagaatggctgaagatgtcgatttaattgttccagaagtgaatgagcctcaatttacacgtggtattattgctaatccaaattgctctacaattcaatcagttgtacctcttaaaattttacaagatgcatatggtttaaaacgtgtcgcttatacgacttatcaagccgtatcaggttctggtgttaaaggtaaaagagatttagctgaaggtgctaatggaaaagaacctgaagcatatccgtatccaatttacaataatgtattaccacatatagatgtttttcttgaaaatgggtatacaaaagaagaacaaaaaatgattgatgaaacgaaaaaaattctcaacgaccaagacttaaaagtgactgccacatgtgtacgtgtaccagtacaagatagtcacagtattgaaatcgatgtgactttaaatcaagacactacagttaaagagatacaagaattatttgcacaagatcaacgtgttgttcttgtagataatccaagtaaaaatgaatatccattagccattcattctactggcaaagatgaagtatttgtaggacgtatccgccgagatgactctcttgaaaatacgttccatgtatggtgtacctctgataatttgctcaagggcgcagcattaaatgcagttcaagtgttagaacaaattttaactttgaaaggagcaagataa

SEQ ID NO: 3197 - DNA, 885 bp, Staphylococcus epidermidis
atgacacacatgtttgaaggcgttggtgtagcattagcgactccctttaccaataatgaggttgatttcgacgcattagaaagacatgttcaatttcttttaaataacaatattcaagcaattatagtgaatggcactacagcagaaagtcctacattaagtgacgaagaaaaagagaaagtattggcgacagtagttaaactcgtgaatcatagcgttcctgttattgtgggtactggcactaataatacgtataaatcaattcaagcttcaatacgtgctaaagaaattggtgcagatgcagtcatgttgattacgccctactacaacaaaacgaatcaacgtggtttaattcaacattttgagacaatcgcaaatgaagtgaaattaccagtaattctttacaatgtgccatcacgaacaaatatgacgatagaaccagaaacagttgaaattctcagtcataatccatatatcgttgctttaaaagatgcgacaaatgattttgattattttgatcaagtaaaacaacgtattaatacaaatgaatttgcattatatagtgggaatgacgacaatgttgtgaagttctatcaacgtggaggtaatggtgtcatctctgtaattgcgaatgtaattccacaagaatttcaatatttatatgaccaaagacaaaatgaaaccgatattactaattactttaaacctatcgagaaattgttagaagcgttgtcacttgacgttaacccaatacctattaaagttcttaccgcatatttgggttatggtcactacgaagtgagattaccattagtgcctttagaagaagcacaatgtaaacaagttgaacgagcatatgaacaatttaaagcaggtgaacaataa

SEQ ID NO: 3198 - DNA, 723 bp, Staphylococcus epidermidis
atgaacatactattaattggatatggtgcaatgaatcaaagagttgcacgattagctgaagataaaggtcatgaaattgttggagttatagatagaacttcaaaagcgtcgacaccttattcacaatatcaacacattagtgaatgtaaagaagctgatgttgctattgacttttcaaatcctgaattgctctttcctctattagaagaacaattcaatttgcctcttgtcatagcaactacaggtgaaaaagaaacgttaatacaaaaattggaaacgctaagtcaaagaacacctgtattttttagtgcaaatatgagttacggtgtccatgcattaactaaaatattagaaactgcagttcccctactacaagatttcgatatcgaactaacagaagcgcatcataataaaaaagtcgatgctcctagtggcacattagttaaattgtatgatgtcattaaagaattacgtgacaatgtctcacctgtttatgatagacacgaaaaaactgagaagagaactcatgatgagataggtatacatgctgttcgtggtggtacgattgtcggggaacatgacatattatttgcaggtactgatgaaacaattactatctcacataaagcacaatcaaaagatatctttgcaaatggtgccattggcgctgcagaaaaattaattcacaaaaacccaggtttttatacttttaataatctataa

SEQ ID NO: 3199 - DNA, 723 bp, Staphylococcus epidermidis
atggtacaacatttatcagctcaagaaatcattcaatatattagtgatgctaagaaatcaacaccactcaaagtttatgttaatggtcattttgaaaatgtcacattcccagaatcttttaaagtttttggctctgaacattcaaaagtaattttctgtgaagcagatgaatggaaacaattttatcaacaaaatcattcattaatcactgaattagaaattgagatggatcgtcgtaattcagctataccgcttaaagatttaacaaacacaaatgctcgtattgagccaggtgcgtttattcgtgagcaagcaatcattgaagatggtgctgtggttatgatgggtgctacgattaatattggagctattgtaggagaaggaacaatgatagacatgaacgcaacacttggtggccgagctacaacaggaaaaaatgttcatgttggtgcaggtgctgttttagctggtgtcattgaacctccaagtgcttccccagttgtcattgaagacaatgttttaattggagcaaatgctgttattcttgaaggtgtacgcgttggtgcaggtgctattgtagcagctggagctattgtaactcaagatgtgccagctggagctgtagttgctggtacgcctgctaaagtaattaaacaaacttcagaagttcaagactcaaaacgtgagattgtgtctgcactgcgtaaattaaataatgaataa

SEQ ID NO: 3200 - DNA, 1152 bp, Staphylococcus epidermidis
atgaacgagttagaattcgttacattgcacagaagacatttacatcagtatccagaattaagtttacatgaatttgaaacgacatcgtatataacatcttttttagaggatttaggcgtaccttacgaccgaccacttaaaactggtgttattgcttatttggaaggtaatagtcaccacactattgcattcagagcagatatagacgcgttaccaatttatgaagaaaatgatattgattttaaaagtaagaatgataatgtcatgcacgcgtgtggtcatgatggtcatacgacagcacttatgctttttgttaaaaggtgtaaagcattgtatgacaaatctgaattacctcataatgtagtgtttatatttcaacctgccgaagaaaccggtggaggagctaatcgtttaatcaaagctggcgcttttgacaagtaccctattgaagcggtgtttggttttcacgttaatccgtttgaaaaagaaggtaaaattgtaattcgagatgaagaaatcactgcaagtgccactgaatatcgcttctttttaaaaggattatctagtcatgttgctgataaggagcaaggtcattcatgtggtgaggggttacagcatgtcttaagtcaaatcggccaaatccaacaatttcatttgaatggattgaaacgtaacattattcatatgggtcattttgaagctggtgaagctattaatacagtaccgagtcatggttatcttgaaggtacaattcgtacatatgacacagaagatttagctattgtaaaacaccaaatgcataaaattgcgaaaagtgttcaattattatttaatgttgaatgtgaggttaaatttgaagaaggatatccaccaacaatgaatcatccacaattacgtcaagccgttgagaacgctataaaaggtgcaaatttagaaatagttgaaaaaaaactacccttcctgttcggtgaagattttagtttttatggtcaacaacttgctccttcatattttgtatttgttggtactcaaaacaatgaaaaaggttttgtgactggtcttcatactgcccatcttaattttgatgagaaaatattaattgacgttgtaaattattacgagcatttgttaagaaattataaagaggtgtaa

SEQ ID NO: 3201 - DNA, 1074 bp, Staphylococcus epidermidis
ttgacagcaatttggtcattagacacagaagcattttatcagaatgcagtaaaagtaaaaaataacgaaccaataatggcagttgtaaaaaacaatgcatatcattatggacttgagtttgcagtgaaaacatttttaaaagcggaaattaatacatttagcacaacttcattaaatgaagctatacgagttagaaaaatagcacctgaagcaactatatttttaatgaatcctgtttatgattttgatttagtaaaacgttatgatattcatatgacactcccctctttaaattattattataaatataaacaagatttaaaaggcattcatgtacatttagaatatgaaaatttattacatcgttccggttttagaaatatcgaagaaatacgtgaagttttaaaagatcatgatcaaaataatcaagataaaatgattatttcaggaatatggacgcattttgggtatgcagacgaatttgacgtagatgaatataaaatggaacgtgatgcttggttaaacttgataaatacacttttaaatgaaaattatcattttgatatgatacattcacaaaatagtgcaagttattttcgtgagaatcaaatgttacttcctcatcacactcatgctagagttggaattgccctttatggttcaagaccatatagtcttataaatgaagaacgcattactcaatctttgactgttaaaggtaatgttatacaagttcgtgatgtaaataaaggtgattattgtggatatagtttcgcctttgaagtaaagaatgaccacactcaattagctgttgttgatataggttatggcgatggtattctaaaatcaagagcaaaacacgaagctataattaatggcaagcgatatccaattagagcactaatgatgagtcatatgtttattgaagttgatgacgaagttcatgcacaagacgaagtcatattatataataaggatatacgcatagatgaatttacatttaaaggtgttggcgcaaattcagaacaattaagcgcaatgaatcacgattctcttatgaaggagtatttataa

SEQ ID NO: 3202 - DNA, 1266 bp, Staphylococcus epidermidis
atggtagttaattataatgataatggcgaactgacaatgggaggtacaagcttaaaaactattgcacaaagttttggtacaccttcgattgtttacgatgaagaccaaattcgtaatcagataagaagatatcataaagcatttgaagcaagtggtttaagctacaatatatcttatgcctcaaaagctttcacttgtattcagatggttaaattaattgatgaagaaaatttacaattagatgttgtttctgaaggtgaactttatactgctcttgaagcaggatttgattcgaaacgtattcacttccatgggaacaacaagacgaaacgcgagattcaatatgcattagatagtcagattggttattttgtagtggatacgctcgaggaaatagatcttattgataaatatgctgatagtaatgtagatgttgtattacgtgtaaatcctggggttgaagcccatacacatgaatttattcaaactggacaggaagatagtaaatttggattatcaatcaaacacgttctagcattaaatgcagttaataaagtaaaagcaacgaaacatttgcaacttaaaggtatacatttccatattggctctcaaatcgaaggcactgaggcgatgattaagacagctaaaattgtgcttaattggttagcaagtgaacgaattgaagtgagtttactaaacataggcggtggtttcggaattaaatatgtcgaaggagatgaaagtttccctattgagcaaggaatatctgaaattactgaagctattaaagaaactgcgcaagcattgcagtacaatattcctgaaattgggatagaacctggccgttcaattgttggagaagcaggtatcactttatatgaggttggtacaattaaagatatccctggagttaataaatatgtatcagttgatggcggaatgagtgatcacatacgaactgcactttatggtgcacagtatgaggcgttgttagttaacagaaatgaaaaagctaatgaatctgtaacaattgcaggtaaactctgtgaatctggtgatattatcgtacgagatgcccaattaccctcttctgttcatagaggtgattacctagcagtactttctactggtgcgtatcattattcaatggcttcaaattataatcaaatgcaaaaacctccagtatttttcttgaaagatggaaaagcacgtgaagtgattaaacgtcaatcattgagacaattaattattaatgatacgaaataa

SEQ ID NO: 3203 - DNA, 750 bp, Staphylococcus epidermidis
atgtttaaatttaacttcttttatatttcaaagattcgtgcaacttggatgctttacctcattgggatttatcctctcttgatattcctagctgaattacttaatagtaattttctttcattatcagcaactcataagaatagtgtaagctttttagaattatttatcgcaatatatgatactcaacaaaaagtaatgctatcacttataattattggatatttatcttctttattattttatagcgaaattagcacaggaagactattgttttataaggatcaaagtcgctacaaaatttttaattctaaattaacatctattatttctagttactttatattcttattcattttattattatcaacgttagtagtttatttgttttatgttaacaaccatgaatattcatctcattcttttatgttaaataactcagaattaaatcatactctaatcttaaatcttcttggaatctttttaactgatttattcttaattttctatgttgttattttttctgtgaaatttaattctgggataactattattagtatgattttatgttacgtggtcataaagattacagacaatattaataaaatcaagtttttcccttcaaatttcacaaatttagataccgataaaagttttatttttaacttatcaataatgagctctattactattgtttatatattcattatttacctcttagcaattacgattttcagaaaaattcaattttaa

SEQ ID NO: 3204 - DNA, 864 bp, Staphylococcus epidermidis
atgctagaatttagaaatgtgtataaatcttttaagaagaaagaagtattatgtgatgttaattacaaattatctgctggagaaaaggttggtcttataggttctaatgggtctggaaaatcaacattaatgaaacttatagctaaaactcaattaccatctaaaggaaatgtttattttaacaatatagatatacataaatctcacaatatgataaaagatttttctttcatgataggacaaatatattatcctgagttaaatgcaagacaaaatattgaaaattacctaaaaattaataataagattagctatataagtgaaattcaaaagatgctaaacattgtaggtttagaagatattgaaaagaaggttaaaaattattcgtatggaatgaaacaaagactttgtttagctatttgtttaattaccaaaccaaaagtagctgtattagacgagccattcttaggtttagatccgcttggggtaagggaattaaataatatcattgagaaatattcaaaagaaaaaaacactttatttttaatatctagtcaccagttaaaagaattagaagatctttgtgatagatttctattactcgaaaaccatcaaattagagaaattgacttacataatagaatattcactcaaaagttaatattcaaaaatactttaaacaatgctccagaactaaaggctaatttcaatttcattaaaaaaattgatagcaattcaataacaattataaataaggatgaagaggtagatcttacaaatttacttaatttagtaggtaaaaatcccttaataaaaattgaaagtaatgataatctattatcttcatatttctataaagagtag

SEQ ID NO: 3205 - DNA, 411 bp, Staphylococcus epidermidis
atgaaatcaatattattatccctatttttaaactgtttatttttctcaattttaactcttttagaattacgcattgatgtttacttggcaaatttattaattattttagtcccatctattacatcagctatcttaattattttcacttcaaaaatgaaattatatttatggttaaatgtaatttcaaacctaattttttacattatttatagtaaatatatcatgcatctagatggttatctatcctatatcgagagggcgcaaatcaataatagtgatatagaaattaaaatatctccaaatatgcttgaattatctcagattatctttttattttttgtttatttaatacctcaaatgattgtagtttttattaaacataaaagaggtgaaatcaatgctagaatttag

SEQ ID NO: 3206 - DNA, 201 bp, Staphylococcus epidermidis
atgaaacaaggtacagttaaatggtttaatgccgaaaaaggttttggtttcatcgaagttgaaggagaaaacgacgtattcgtacacttctcagcaattaaccaagaaggatacaaatcattagaagaaggtcaatcagttgaatttgaagtagttgaaggcgatcgcggtcctcaagctgcaaacgttgttaaactataa

SEQ ID NO: 3207 - DNA, 270 bp, Staphylococcus epidermidis
atgcaacgtaaacatattcaagtttttggtacagtacaaggtgtaggatttagattttacacgcaacgtattgctcatcaatttaatattaaaggtacagtccaaaatgttgaggactatgtagatatatatgctcagggcgacgatacagaattagaacagtttattgattctgtgatccaaggtgcttcaccggcttcacaagtgtctaattacaatattgaagaattagaccttgatgaatctttatcagagtttaagacaatttag

SEQ ID NO: 3208 - DNA, 591 bp, Staphylococcus epidermidis
gtgggtataccagtggcctttattgtttggcttattactgtttttgcgttggatttatcattcattatagacatgcttatcagttttggtagtttcattgcatcatacttccctacgcaaaggctcacttcacgaaagtatcttaatgaaattggtttatcaagaagagattacagatatgttcaatcacagcttcatcatgcacatactaaaattagaactatcttaaagtcatttattaatattcgttcaatcaaagattttagacaagtaaatgatatatatcgaatttctcgttctattcatacaagcattaagcaaagacccgcgatgttttttaaagttgaaagctttttctattctcatttagataatgcccttaacttagtagactcgtatacacgtcttgcaagaatgccacgtaagtcgcaagatgaaaagctaaaattagaacaaacacgtattactctggatgaaataaaaagaacgctcattgctgatcttaaaaggcttaatgaggaagattatgagcgactagatgttgaaatagaattaaatagattagaacagcaacgtcgacataataattaa

SEQ ID NO: 3209 - DNA, 1131 bp, Staphylococcus epidermidis
atggtaagtgaacaaagtagtaatcggtcacatccacttgattactatatggataatcaatcaactgatcatcatacaatcgctgaagatcttgaaatgcaattaactgaaaatgataaacaaagaattaaatcaataagtgagcaaattgagccacttaaccatgaaggattattaaaatatggtgctaatcttcaacaaaagatgtctcatttttctcatcaaattttagatgacgttcaatcaaaagatatgggaccagttggggaaactttaagtcaattaatgggaaaattaaaatctgtaaatccaaatgacataaatccagaaaaacaatctagattaaagcgtttatttaaacgtactaaagcttctattaatgaagtgttttctagaatgcaatctgtaagttctcaaattgatcgtattactattcaattagaaaaacataaagatcagttaactaaagatgttgaatttcttgatcaattatatcaggaaaataaaacttattttgataacgtttctttatatatcttagcggctcagaaaaagaaaaaagaaatattgacagaaaccataccccagttacgagaaaaggcgcatcaaactggtaatcaaatggatattcaggcaactgctgatatggaacagtttgttgatcgtttagataagcgcatttatgatttacaattatctaggcaaattgctattcaaactgcacctcaaatccgtatgatacaaaatgtcaaccaagctttagccgaaaaaattcaaagttcaattttaacaagtattcctttatggaaaaatcaaatggctattgcccttactttgatgagacaaagaaatgctgtttcagcacaacgttcggttaccgatactacgaatgagttacttactcaaaatgcgtcaatgttaaagaaaaacgctattgaaacggcagctgagaatgagcgtggcatcgttgacatcgaaacgttaaagacaacacaaaatgacattattgaaacaattgaacaaacacttcaaattcaagaagatggtaggcagaaacgtcaagttgcagagaaggaacttaatgaattagaacaagatttgaagcagcatctattatctatgcgcaaataa

SEQ ID NO: 3210 - DNA, 1344 bp, Staphylococcus epidermidis
atgaataaaaatacgtggattataggctttactttattcgctatgttttttggcgcaggtaaccttatatttccaacacaacttggactcgaaagtggtcatttcttttggccagccatactagcctttgcacttacgggtattggattaccgcttcttggcgttgtggtaggcgcgcttgataaacatggttatattgggtcttttaataaaatatcaccacgattttcattaatatttttgattatcatctatctcactataggaccattatttgcgataccacgtacagcttcaacttcatttgaaatgactgttactcctattgcacataatagtgggaatttagcattatttatttttacagtaatctattttttaatcgttctttatttatgcttgaatcctaataagatgatagatcgtattggttcattacttacacctttattacttattaccattgtcgctatgatcattaaaggttttgtagattttggtggacattcttcaaattacggcatgacaaatgcttatcattccaatttaagtggattttcacaaggatttacacaaggttaccttacaatggatgctattgcttctattgcattttcgatgatagttgttaatgcgattaaaacaacaggaatacagcatgctgataaaatctttaaacaaaccattattgcgggtctcatagctgcaatcgcattagtatttatatatatttcgctagggtacataggcaatcatatcaatattccgtcagatactctaaaggaattgaaagctaaagatcaaaatataggtacgtatttactcacaacaatggcaacgaagggctttggtactttcggaaaatacttacttggtattatcgtatcattagcatgtttaactactgcttgtggattaatcgtatcagtaagtgaatatttccacagaataatacctaagataccttataaagtatttgtggtgtttttcattttagttagtttcattttagctaatcaaggacttaattccgtaattaaaatgtcagtccctgtacttagtgtaatctatcctgtggctattacagttattttgttaatactcattgctcgcttcatacctacaaaacgtattgcacaacaaataccgttaattattgtagcaattgaatcaatcttaagcttaataacgacacaagggtggatacgtatttcattaatagatagtttacctttaaaagaatattcacttgaatggttcccaattgctgttgtagcaactcttgttggttacatgattagttattttgttaaacaatctaacattgtatatcaaaaagaataa

SEQ ID NO: 3211 - DNA, 1890 bp, Staphylococcus epidermidis
atgagtgatcgttttataaaattcaacgatgaacaattagatgcaaaacaagtaatgatgttacaagacttagcacgtttacttttaaaaaatgagcaaacgcaagttaaaatacaaaaattcccttactataatccttatagtaatacactcattgcgagttggttttggtctcatagaccgaaacatattgaacaagctggactaaaaacagatgtcttactcgcaacgtatggatatctgaatatgaatctttcaatcatcaatcaagttttacacaacaacgattttgaacaccctaagttctttcatcaattatttaaacttttagaggacgtacgtatatttgaacatattagacaacaaagacctagtactacaaaaatgattgatttacgcatagaaacacgattatcttttacagaatctcaaattaatttctacaaaactaaaactgtatatactgatttactttttctttatttagaacatgcatttttaagtcaaaacttttttaatattccatccatacatccagcatttgatgatattttagttcatatgtatcagtacttaccaaatatttttcagaatcaaacatcagaagataatatgtatttagcagaacgtattatgtatcaagtggatgatttattaaaggaagatatgctaaatgaatattactacttacctcaaaaattatatgaagatatttatgcagatagttttgaagacttaaagcgtacagatgcgagcaatactgatggtaaagataatcaacagacagacgaagatgtagaaacagctgaagctgaaacaaaagccgcagacagtgagtctaaaggcggggcatatttagaaatggagctacatgagggtgaaaacagtgaagttatggctgataatgatacggctcgagaaggcgacagcactgatgatatgactgatatgatgaccaaaaaaggaaaagggtcagaaaatacacttgatcatgatgaaggtggatttataggacaaaaccaagcttttgctttaaaaggcattaataaagacgtaagtattgaatggaatatccctgatattacacctcaaaatgtgatagattatcaatattcaaaaaatgatgtacagtttgaaattaaagatttaatacaaattatcaaaaagaccatcgacagagaacatgaagatgaaagacataatttaacaaagggccgtttacaaaaagaccttattaattggtttattgatgatcaatttaagttattttacaaaaaacaggatttaagcaagactttcgatgcaacatttacattactcatcgatgcatcagcgagtatgcacgataaaatggatgaaacgatcaagggtgtcgttttgttccatgaaactttaaaatctttgaatattaaacatgaaatactagcatttaatgaagatgcttttgaagctgacgaacgtcaacaaccaaatatcattgatgaaatcattaattataattactctatctttgaaaaagaaggcccacgtatcatgacattagaacctcaagacgataatcgtgacggcgtagctatcagaattgcgagcgagcgtttattacaaagaagtcatgaacaacgctttttaatcgtattctcagatggtgaaccgtctgcatttaattacagtcaagatggtattttagatacgtatgaagctgttgaacgtgcgcgtaaatttggtatagaagtatttaatgtctttcttagccaagagccaattactgaagacattgaacaaaccattcataacatatatggccaatttgctttatttgtagaaggtgtggaacatttaccgagtcacttatcaccattactaaaaaaattgttacttaaatctttataa

SEQ ID NO: 3212 - DNA, 792 bp, Staphylococcus epidermidis
atggtacaaacagtttacaaaaattcagatcaaacagtttttgaagatgctaaagctttatttcaattaaataagaacatactactaaaagggccaacaggatcaggaaaaaccaagcttgccgaaacgttaagtaatgttatgaaattgcctatgcaccaagttaattgttcagtagatctagatactgaaagcttattaggttttaaaacaattcatactaatgaagaaggtcaccaagaaattgtcttcattgacggtcctgtaataaaagcaatgaaagaaggtcacattttatatatagatgaaattaatatggcaaaaccggaaacattacctatacttaacggtgtattagattatcgacgtcaattgacaaatccttatactggtgaagtgattaaagcagcacctggatttaatgtaattgctgctataaacgaaggttatgtaggaacattaccaatgaacgaggctttaaaaaatagatttatcgtcatagaagtagattatatcgatggtgacattcttaaaacagtcattaaagagcaaagtaaattacaagatgaacaattgattcaacatattgttaaatttaatgaagatttacgtactatgaccaaacaaggtcaaatttctgaagaggctgcaagtattcgagctttaatcgaccttagtgatttagcaactgtcatgcctattgaacgtgctgtacaacgtacaattattgataaattagaggatgagcgagaacaacaagcgatacttaacgctatcgagctcaatttttaa

SEQ ID NO: 3213 - DNA, 204 bp, Staphylococcus epidermidis
atgttacatgaaacttggaaagaacgtacaccaattaaaaaagtagaagtgacaaatactgatgccaaaaaatttacagttgcagatatgctaactatcggcaaacagtatgatgttattaacgaaactgaagaatattatcaaattatagataattctggtttagtaggtggctattacaaagactactttaaagagatataa

SEQ ID NO: 3214 - DNA, 810 bp, Staphylococcus epidermidis
atgagtggacttagaagtgtcactttaggaacaaacgatttatctaaaacgaaagaattatttaaccacatcattggtttacaacattcaactaaaaatgaacatgccataagatttggtgacgctaatttaagtcctggaacgcgtgttcactttgttgaggttccagaggaagattataaaaatccacacatagatagtgttggacttagaacaccttctgattctggattagtagaatatcaaactatttttgacaagtttaatatatcctatagttcaatcactgaacttaatggacttaaacatttcacttttaaagatcataatcaacaaaaatttgatatttattctaacgagttaaatacgggtataggcttaggtatgcctactttcgatagtcctgttaaccctttacatcaagttcaaggcttaggtccagtcattattaaggtgaacgagttatctgtcaccacttctattctcacacaagtatttcaattagatttatttgctgaatatcttccacatgaagatgcacaacaacatattcaagtgtttcgtataggtgagggtggtcttggtggtgaaatccacttatttgaaagcgatgaagatattcaaatgaatacacacgggccaattgagcaagtggaattctctacaaatgatacccaattgtatcttcaagcaaaaaatcgtttagatgagattggtgttccatatcaaactctcgaacaggatacttcagaatctcttagaatcactgaaaatagtggcatttcatttatttatacacttgaaaagtaa

SEQ ID NO: 3215 - DNA, 174 bp, Staphylococcus epidermidis
atgtctaatttatggattatatttgcagttactgtactaatagcagtttattccgcaattgaagtatttacaaatttaaatcataaacaacaaccaagatttaaatattttactatcgcatttgttgtgtttattatcttagcgattatagaagttatatttcttgttcaatga

SEQ ID NO: 3216 - DNA, 1263 bp, Staphylococcus epidermidis
atggcagaggtaaaagttccagaattagcagaatcaatcacagagggtaccattgcagaatggttaaaaaatgtaggcgataatgtagataaaggtgaagctatcttagaactagaaacagataaagttaacgtcgaagtagtttctgaagaagctggggtattatcagaacaattagccgaggaaggcgatacagttgaagtaggtcaagctgtagctgtagtaggagaaggacaagtaaacacatctaacgatagttctaacgaatcttcacaaaaagatgaagctaaagagaaagaaacgccaaaacaatctaatccgaattctagtgaaagtgaaaatacacaagataatagccagcaacgtatcaatgcaacaccatctgcacgtcgacatgcgcgtaaaaatggcgttgatttaagcgaagtatccggaaaaggcaatgatgttctaagaaaagatgatgttgaaaatagtcaaaaatcttcaagtcaaacagctaaaagtgaaagcaaatcacaaaacagtggttctaaacaatctaataacaatccatcaaaacctgttattcgtgaaaaaatgtctcgacgcaaaaaaactgctgcaaaaaaattattagaagtatcaaatcaaacagctatgcttactacatttaatgaagttgatatgacaaacgttatggatttacgtaaacgtaaaaaagaacaatttatcaaagatcatgatggtactaaattaggatttatgtccttctttactaaagctgccgttgcagctctcaaaaaatatcctgaagtaaatgctgagatagatggcgatgatatgattactaaacaattttacgatattggcattgcagtatccactgacgatggattactcgtaccatttgttagagattgtgataagaaaaattttgcagaaattgaacaagaaatcgctaatttagccgtaaaagctcgtgataaaaaattaggccttgatgacatggttaacggttcgtttaccatcactaatggcggtatctttggctcaatgatgagtacaccgattataaatggtaatcaagcagctatcttaggtatgcattcaattattacacgcccaattgcagttgataaagatacaattgaaaatcgtccaatgatgtatatcgcattaagctatgatcatagaattatcgatgggaaagaggctgtaggattcttaaaaacaatcaaagaactcattgaaaaccctgaagatttattacttgaatcataa

SEQ ID NO: 3217 - DNA, 2805 bp, Staphylococcus epidermidis
atgactaagaacaagaaagaatttacagaggctcctgtaaacttcggcgcaaatcttggccttatgctagatttgtatgatgattatctacaagatccatcatccgtacctgaagatttacaagtcttgttcagtacaattaaaacaggtgaagctcatatcgaagctaaacctaccactgatgggggtggttcacaagcgggagatagcacaattaaacgtgttatgcgcttaatcgataatattcgtcaatacggacatttaaaagcagatatttatccagtaaatcctccagagcgtcaaaatgttcctaaattggaaatcgaagattttgatttagataaagaaactttggaaaaaatatcatctggaattgtctctgaacattttaaagacatttatgacaatgcctatgatgcaattgttcgtatggaaagacgttacaaaggaccgatagcttttgaatacactcacattaataataataaagaacgtgtgtggttaaaaagaagaattgaaacgccttataaagcaagtttaaacgataatcaaaaaaaagaacttttcaaaaaactcgcacacgtagaaggttttgaaaaatatttgcacaaaaattttgttggggctaaacgtttttcaattgaaggcgtcgacacattagttccaatgcttcaacacacaattacattagcaggtaacgaggggattaaaaacattcaaatcggtatggctcaccgtggacgtttaaatgtattaacgcatgtcttggaaaaaccttatgagatgatgatttcagaatttatgcatacagatccaatgaagtttttacctgaagatggtagtttagaattaacctcaggttggacttcagatgtgaagtatcacctaggtggcgttaaaacgactaattcatacggaatagaacagcgtatttctttagcgaataatccaagtcatttagaaatcgttgcacccgttgttgctggtaaaacaagagcagcccaagataatacacatcaagtaggagctccatctaccgacttccataaagcaatgccgattattatacatggtgatgcggcatatccaggtcaaggtattaattttgaaacgatgaacttaggtagtttaaaaggatattctacaggtggttcacttcatattattacaaataatagaatcggttttacaactgaacctattgatggacgttcaacaacgtactcttccgacgtagctaaaggttacgatgttccaatactacatgtaaatgccgatgatgtagaagcaacaattgaagctattgaaattgcaatggaattccgtaaagaatttcataaagatgtcgttattgacttagtaggttatcgtcgctatgggcacaatgaaatggatgaaccttctattactaatccagttccataccaaaacattagaaaacatgattcagttgaaattttatatggtaaaaagttagttgatgaaggaattatttccgaagacgaaatgaatgaagtcattgacggtgttcaaaaagaaatgcgaacagcacatgataaaattgataaaaatgacaaaatgaataatccagatatggaaaaaccagaatcacttcaactacctttacaaagtgatacgaaagatttctcatttgatcatttaaaagaaatcaatgatgcaatgcttgattacccaaaagattttcatgtgctaaaaaagctcaataaagtactagaaaaacgtagagaaccttttgaaaaagaggaggggctcgtcgattgggctcaagcagagcaacttgcatttgcaaccatattacaagatggaacttcaattcgtttaacaggtcaagatagtgaaaggggaacatttagccatagacatgctgtgcttcatgatgaagaaaatggtaatacattcacaccattgcatcatgtacctcaacaacaggctacttttgatattcataattcgccattatctgaagcagctgtagttggatttgagtatggttataacgtcgaaaataaaggtaactttaacatatgggaagctcaatatggcgacttttcgaatatgtcccaaatgatgtttgacaatttcctctcaagttctcgcgcaaaatggggtgagcgttcaggtttaacacttttcttaccacatgcttttgaaggacagggaccagagcattcatcggcacgcttagaaagatttctacaattagccgctgaaaataattcaactgtagttaatctatctagtgcaagtaattacttccatttactacgtgcacaagccgctagtttagataccttagaaatgagaccattaattgtcatgtcacctaagagtcttttaagaaataaaacagtagctaaacctattgatgagtttacatctggcggttttaaacctatcatcacagaagatatcgatgaacaaaaagtcaaaaaagtgattttagcatcaggaaagatgtatattgacctaaaagaatatttagctaaaaatcctaacgattctattcttctcatagcagtagaaagattatatccgttcccagaagaagaaattaaagaagtattaaaatcgttacctcatcttgaaaatgtgtcatgggttcaagaagaacctaaaaatcaaggtgcatggttattcgtgtatccttatctaaaagcacttgttgctaataaatatgatttaacttatcacggtagaatacaaagagctgcacctgctgaaggcgatggagaaattcataaacttgtacaaactaaaattattgaaagtagcattaacaattaa

SEQ ID NO: 3218 - DNA, 1371 bp, Staphylococcus epidermidis
atgattaagcgccaaaaattaaaatataaatggatgcttattacgacgctcattaccttcacgacaatattacttttctgcttaattattattttctttttaaaagatactttacgaagtagtgaaattgacgaagctgaaagaagttcaaatgatatcgccaatctgttccattctaaatctttaagtgatatatctgcattggatttaaatgcatccttagaaaattttcaagaaatattgatttatgatgataagggtaggaagttaattcaaacatcaaatgataatacacttgcttatgataacaaaattgatttcaaacatcctgaacgtatacatattcaaagaagccacggtattaattacttagtaataactgaacctatacgttcgaaagatttttctggatacagtgtattagtccattctcttcaaaattatgataatctcgttaaatcactttatatagttgcacttgcttttggattaattgcaaccattattactgccggcgtgagttatatcttttcttcacaaattactaaaccgatagttacaatgtccaataaaatgaatcaaattagaagagatggttttcaaaataaacttgaattaactacaaattatgaagaaacagataatttaattgatacttttaatgaaatgatgtatcaaatagaagaatcttttaatcagcaacgtcaatttgtcgaggatgcttcacacgaattaagaacgccactgcagattattcaaggtcatctaaatttaatccaacgttgggggaaaaaagatccagcagttttggaagaatctttgaatatttcaattgaagaagtgaatcgaataacaaaacttgtcgaagaactacttttacttaccaaagatagagtcaatcataatgttttggaatgtgaaaatgtagacgtaaatagcgagattcaatcacgtgtgaagtcactgcaacatctacatccagattatacttttgaaacacatcttgctactaagcctatccaattaaaaattaaccgtcatcagtttgaacaactcttactcatatttattgataatgcaatgaaatacgacactgaacataagcacattaaaattgttactcaactaaaaaataaaatgattatgattgatattactgatcatggtatgggtataccaaaagctgacttagaatttatctttgatagattttatcgtgtagataaatcacgtgctcgtagtcaaggaggcaatggattaggactatcaatagcggaaaaaattgtgcaacttaacggtggtatgattcaggtagaaagtgaactacaaaagtacacgactttcaaaatcagttttccagtactaaactaa

SEQ ID NO: 3219 - DNA, 660 bp, Staphylococcus epidermidis
atgacaaatattttaattgtagaagatgagcaaaatcttgctagatttatagagcttgagttaactcatgaaaattatactgttgatatagagaatgatggaaaggtgggtttggataaagcattatctaagccctatgatttatatatattagacttaatgcttccaaacataaatggtctagaaatttgtagacaaattcgtcaaaaaacaactactccaattatcatcattactgcgaaaagcgagacatatgataaagtagctggattggactatggggcagatgactacattgtaaaaccctttgatatagaagaattgcttgcaagaataagagcggtattgcgcagacagccagataaagatgttttagatatcaatggtattatcattgataaagatgcctttaaagttactgttaatggccatcaattagaattaactaaaacagaatacgatttactatatgttttagctgaaaatcgtaaccacgtcatgcaacgtgaacaaattctcgatcacgtatgggggtataatagtgaagtagaaacgaatgtcgttgatgtttatattcgttatttacgtaataaactcaaaccttttaataaagaaaaatccatagaaacagtacgtggcgtagggtatgtgattcgatga

SEQ ID NO: 3220 - DNA, 768 bp, Staphylococcus epidermidis
atgtataaaagaaatgaacgtttgaatcttattcgtaaacgtgttgatcagtacggacaggtggcagtaaaagatttagctatattcttacaagttacgcctgaaaccgtgagaaaagatttagaaaccttagaaaacgataaactgattacacgtacacatggaggtgcgatacaatacaatcatattaataaagagaaatcatatgcgaataagtggcagaaacaatcacaagtaaaagagcgtattgctaagaaagctgctttgcaaataaagtctggagaaattattgtcatcgatggtggaaccacaacagggcgaattcctcaatatctcaatgatattactcagaccacgattgtgacgaattctctgaagattgcggatgaattgaatcgtgctatagaggagcaacgaattcaagcagaagtgattatgcttgctggaaagacgaatactgaacaagatgttgtgcgcgggcatatgacgaatgagttattacaacgttttaaatttgataaagcttttatttcatgtggttcgtttgatacgagtgattgttatgaatttgatctggaagaagcgcatgcaagtcacattatgattcaaaaaagtcaactgagttatctcttagcggatagtagtaagcgagatgcgcatgcgtcgtatcgtattgatggttttagcgaaattgattatatgatttctgattatgctaaacctcagaatatagaatattttaatcagaagcattggttacagatttaa

SEQ ID NO: 3221 - DNA, 1326 bp, Staphylococcus epidermidis
atgatcgtttctaaaagaacgtttcggtcattatacattcctattttgatagaacaacttttcatactcatcatgggtcaagctgatacattgatgttaaacagctatagcactgatgccgttgctgcttcgggaatgataagccaaatactcatgctcatcacgtttctgattacaatcattcatgtgggtacaaatatacgtattgttcatttgaaggaacatcaaccttcaagtatttcacaagagatttatcataatttgttattcaatagcatagtatctatcgtatttacgattgtgattgggatcgcattcgaacttatcttacgactttttcaggtacctcaagatatattcaaactgacctatcaatttggaatgattatattgagtgtactcactttaacgacctgtcacatgtatattggtactgtattacgtgtcatgaatcatgcatcatcagctacacgcattactatcattagtaatgtgactaatatcattttgaacggtatcgtactctttattattccagaatatgtaggtaaccctgtattaggtgtcgcggtggtaacagcgttcagtcgtttattgggatgtactttagctttaattgcgctgatacaaattttccgtccattcaagcattacttcaagctgagctggaagaaaatatatcaggtttcgacattaggtatcccaacagcaggtgaacaaatttcttataattttgcacagacatttacaactgcatttattgcgatgttaggcactcaagtcatcgctgcgaaatctgtttctactgttttaagcggcctgtcttttagttgtgctatggcatttagtgctgctagccaaatttatttaggaaaatttatatcccgtcgacgttaccgtactttaaagaaagttgttataaaaagtatttggtttaatatcacacaatctttcatgattatgacgtgtgtatttataggatttatagtgtgtggacgttggataacacacgacatacaaacctatcatttaatcatttactatcttgttatactttttggattagaaccgatacgtgcaattaataatctaattgtagatttattaaacgtgacaggggatgtacgttatccagtcaccgtgagtgttgtgaccacatggttgttattattacctggaagttatctattagggattcattggagattaggttatacaggaattattttagtgagtattgctgatgaagcgctgagatttatcattatgtatcttagatggcgaaatgatcgttggcaagcacgaatgaagcagattggagtatag

SEQ ID NO: 3222 - DNA, 855 bp, Staphylococcus epidermidis
atgactacaattctacaattaagcgatttacatattgggccacacaatgatgaaaaagatcaaaaaacttacgatttaattcatcatatgatgacacactatcaacctgacatcacagtattaacaggtgaccaaatttggtctgaaggcgtcattgattcaggtcgcgtttataaaaaattaatggagtatttaaatcgatatgatacgcaaattgcaacgacatttggtaatcacgatacagaggggcatctcaaacgttcagacttacgcgctattgaggaccaatattctaccaactatgtacagaaaaatcatagcctcattgttgatgataaagaagcttatacaatagaagttgtaaacaacgatacagtcacacatgtgctttatgttattgatggaggagattataatccatttggcataggtgattatgattttataagacctgaacatgtgaattggcttagggaaacacatcaagcatatcaaactcaatttcaacacaactttcaacataacttattatttacacatattccattacaagaatatagagaagttgagaatattggtgaatatcatggcattttcaatgaacctattgcgtgctcaaaaattaattccggattatttagtcagatgttactaaacggtgatattgaaggtatgttctgcggtcatgaccatgacaatgattttacgattaatttatatgggattcgccttagctttggtcgtattggtggttacaatacttatggtgatttacaacgtggggctagattaattgagttgcaacctgacgctatatataaatcgaaagtgttagaatttgatgatcgtttctaa

SEQ ID NO: 3223 - DNA, 897 bp, Staphylococcus epidermidis
atgaaagtttcacaagataaaagtgcgcttgtcattcgtattatctcattaatcattattattggcttagtaatcacaattatcctcccgatgattaatatctttgccttagcatttaactctggggtagatgctcaaaaaggtggcatcactttctacccgcgtaaattttcactagataattttaaggagatatttaaacaaggcacgttattaaatgcattatttattagtatcgcaaagacagtcataggaacgatactaagcgtcatattaacagctatggctgcatacgttctaacaatcaaaagtttaccgtttcgaagaatcatctcattcttcctagtctttacgatgttattcagtgtcggtgttgtaccactttatatcctattaaatcaacttcatttaactgatacattctgggtatacattttaccgtcactttatagcgtttataacattttaattatgcgtacattcttcaatcaattacctagtagtgtgattgaagccgctagagtagatggttgtaatgactttcaaatcttttggaaaattgtcttacccatgagtaaacccgtggtggcatcaattacattatttaacgccgtgagtcagtggaatgattggtttacaggtgcattcttcgtacgtaatccaaacctcaaaccgttagctactgttttacaagatatgttaacgaaacaagctgccattgcagatgctttaaaacaaaagtcaggttcatatgcgatgttagacaagttgacaattacaggggactcaatgcagatggcaatgattgtactattaacaattccagtattattcctcttcccatttgttcagaagcattttgtaaaaggtataactatcggttcgacaaaagagtaa

SEQ ID NO: 3224 - DNA, 1689 bp, Staphylococcus epidermidis
atgtttagaaagtctatgctcatcttaatgattgctgtcattttgttcgtaacagcatgtagcaaagataaaacgcaagatgaagcgaaaagaaaagcagatgctaaaggtaaaccagatacatggattgcagatagaaagcttaaaggacttgtgtttcaaagtgataacgatgcctcccctaaaatgaataaagaagtcgctcaagaacttaagaaaaagactggcatcacgttagaacttcaaaccgtttctaatgaagattccacagaagcattaacttcaggactcgcttcaggagatttacccgacttcatcgtttattacttagacgatagtggaagacctgaaatgaaagtactaaataaagcagcgaaacaaggtcgactcacagacttaacgaaaatgcttaaaaacacaaaaatttatagtaagtatttcaaaaaaggatatttaccaaaagatacgaaagataacatcatgtttaataaagaacaagatggaacgtaccttgtacatatggggattaaccgtcatccaggacaagaagaacgtcgcactgtaggtggtccttacgtcagaaaagatatcatggataaacttcatatcgaccctacttctatcaagacgtccaaagatgtagaaaaacttgctgaaaagatgaaagaacaccacttcaaagatgataatggtaaagaaatcacacctattggcccaacagcgtggggcggtgacgatcgtactaaattctataatgaccttgtgtggactggtcagtctgatgagaaatttttaaataaaggtaagaaaattatacatgaatcacaaaccgaatatccacttaaacgtgtacattacgttaaagaccttatgaagaaaggcttaatgacaaaagagttctatacaatggaagaaaataaagcaaaagaaggactcgttaatggctcatggggcattgtttcagatttacataactatgttactgaaaatcaaagtatgaaatacgttcctcttgggccactcaatacagtcaaaggtaaatttagagttgaaaagccatataaatcaggcgcaaacggttgggctgtaccaagtacgactgaacatcctgaagacgtcgttaaactcgctgatttccttgcaagtcgcagaggtaaattactcggtcagtacggtattaaaggacgtgactatacgttagataagaaaggtaaccctcatgttaaacctgaagtgttaaaagaagttgaaaataatccagacgaagctaaaaaacgtggttttagaggtgcgggttcttattgggcagatcatcttggttatactgatatagataataaagctgatttcggtgaaactgaatacggagataatacaaaaacgaaaaagacgactcctgaaaagattgctgatatgtggcattatgatcaaagacagaaacacgccaaaatcgtaaacggactcacagtaaagtcattcttatctaaatatgaatatggcgaagatttagaagttgcactcgatgattatagtgacgctattaaacgtgcttattattctcaatcagacaaggaaacgaaacaaattattgatagtgctaagcaacgtttagaagaggcaggcttaaatcaatttgaaagatacgttgaaaatcaaagagataaaaaaggaactcaaattatttattaa

SEQ ID NO: 3225 - DNA, 957 bp, Staphylococcus epidermidis
atgagtaaaaacaaaaaacaaagccttcaatccgctcatcaaaaacctttgttaaaaagaatgtgggaacacaaagtactttacttaatgattttaccttgtttactctttttcttgattttcaactatattccaatgacaagtcttgttctggcattcaaagatttccgcttcgatactggtatcatcggcggtgattggaaagggctatactattttaaacgctttttctctgaccctcgatgtattcaaattattatgaatacgctaattataagtggcatgaaattgattttagctctaccatttccaattattttagccattatgtttaacgaaattaaagattctaaattaggtaagatcagaggtttatttcaaggcgtactttacatccctcattttttatcttgggttgtagttatcggtattttcaagaaattactcgctccagatgatggacttatgaatcaactgatccatcaatttggtggcgacgggtcgacttactttatgatgaaccctgagtatttccacaccatcatgttttctagttatatatggaagaatgtagggtgggattccattatttattttgcagcaattatgagtattaatcctgaaatttatgaatcagctgcgattgatggcgcgaatcgtttcaaacaaattatacatattaccttacctatgttaacaccaacaattgttattttattcatcatttctctaggcgatattttaaaagcagggttcgatcaaatttacctactcaaaacaccaggtaacgctaacgtttcagaaatactggatacatttgtgattcgtactggtattgagcaaggcgatttcagttacgcaattgcgattagtctattacagggtgtgataggacttatcgctgtcgtcattattaataaattcgcagataagaaactggatacatcactatattaa

SEQ ID NO: 3226 - DNA, 1092 bp, Staphylococcus epidermidis
atgatacaaatcaaggatttaaacaaagtttacgacaatggtagttacgcagttaaagatttcaatttagatattgaggacaatgaatttgtagtatttgtaggaccttcgggatgtgggaaatcaacaacgttacgtatgattgcaggacttgaagatgtgagcaaagggacaattagtatcaacgataaagtaatcaacgatttacaacctaaagatcgtaagattgctatggtctttcaaaactatgcattatatccacatatgacagtttataaaaatttagctttcggcttaaaaatgcgaggaatcaagaagaaaatttatgacgaaaaaattcaacatgcagctcaaatattagaaattgaaaacctcctcgaccgtaaacctaaagccttatctggaggacaacgtcaacgtgtggcacttggtcgagctatcgttagagaagctcaaatctttctcatggatgaaccactttctaatttagatgctaaattacgaagtaacatgagaagcgaaattataaaaatacataaacaaatgaaagcaacaacgatttacgtgacacacgaccaaactgaagctatgacaatggcatcacgtatcgtcatattaaaacaaggcgaaatacaacaaattggtacgcctgaagaaatttatcgtcatcctgtcaatgaatttgttgccactttcattggtagcccatcaatgaatatggttccaatgacctacaacatggatgcttggtacttcgatggacaaaaagtggctgatgctacattacttcaacttgcatcgcatgcacaatacagacttggtatacgacctgaagacttacatcttgttaatgataacgaaataagtaattatccaatccaactttctcaattcactgtagacttagttgagttaactggttcatacaaattacttcactgtcatcacaatgagcataaaatcatagcagctgtagatagtaatttggattttgaattaggacaaacagtttccttcggtataaaaacggaagatgcacactttttcgattctgattcaggcgaaagagtacaagaggaggttttatcatga

SEQ ID NO: 3227 - DNA, 615 bp, Staphylococcus epidermidis
atgaatcgatggaaacgcatttcattgcttattgtttttacacttatttttggtataatagctttttttcatgaatcaaggcttggaaaatggatagataacgaagtatatgaatttatttattcatctgaaagtttcattaccacatctattatgttaggtgtaacaaaaattggtgaagtttgggcaatggttgcgctatccttattattagttgcttaccttatgctaaaacgtttcaagattgagacattattctttgtaatagtaatgagcttatctagtacactcaatccactattaaagaatatctttgatagggaacgtccaacattattgcgtttaattgacatttcaggctttagttttccaagcggtcatgctatgggctcaacttcattctttggaagcgctatatatgtaataaaccgtcatgattcgggtatctctaaaggcgtgttaatcggtttatgcgcacttttcattttattaatatcaacttctagagtgtatctaggcgttcattaccctacagatattattgccggcattattggcggtgtattctgcattgttttatcaacgttaatattgaaaaaacaactcgctgtataa

SEQ ID NO: 3228 - DNA, 1074 bp, Staphylococcus epidermidis
atgacaaaaattgcatatacaggtggaggaacagtaggacacgtttcagtgaatttaagtttaattcctacttcgattgaaaaaggacacgaagcattttatattggttcaaaacatggtattgaaagggaaatgatagagtcacaactccctgatattcaatattatccaatatcaagcggtaaattacgtcgttatctatcttttgaaaatgcaaaagatgtctttaaagttttgaaaggaattttagatgcacgtaaaatacttaaaaaacaaaaaccagacttacttttttcaaaaggtggttttgttagtgttccggtagttatagccgcacgttctttaaaaattccaactatcatacacgaatcagatttaactcctggattagctaataaaatttctttaaaatttgctaagaaaatatacacaacctttgaagatacacttacatatcttccaaaagataaagctgattttgttggggctactgtacgtgaggacttaaaacaagggaataaagaaagaggatatcaactcactgattttgataaaaataaaaaagtgttattagtcatgggaggaagtttaggtagtaaaaaacttaataatatcattcgtcaaaatattgaggcacttctccacgattatcaaattatacacttaactggaaaaggacttgttgatgactcaatcaataaaaaaggttatgttcaatttgaatttgttaaagacgacttaactgatttattagcaatcactgatactgttgtaagtcgtgcaggttctaacgcaatttatgaatttttaacgctacgtataccgatgttactcatccccttaggacttgatcaatcaagaggagatcaaattgataatgctaaaaactttgaatctaagggttatggtcgtcatattcctgaagatcaacttacagaagttaacttattgcaagaattaaatgatattgaattacatcgtgaatctattattaaacaaatggaaacatatcaagagagttacacgaaagaagatttatttgataaaattattcatgatgcattaaacaagtag

SEQ ID NO: 3229 - DNA, 504 bp, Staphylococcus epidermidis
atgattagattagcaactaaagatgatttacttagtattactcaattagtcaaagaggctaaacagattatggaagaattcaacaacaaccaatgggatgatgaatatcccgcgaaagagcattttgaagaagacatcgaaaataaaacactatatgttttagacgttgatcatacaatttatggttttattgttatcgaccaaaatcaatcggagtggtatgatgacattgattggcctgttaatcgaaatggggcatacgttattcacagattagctggatcaaaacaatataaaggtgctgcgactgaacttttccaatttgccattgacttagcaaatgaacatgatattcatgtcattttaacagatacatttgccctcaataaacctgctcaaggattatttgaaaagtttggttttactaaagttgatgagatagagatagattatcatccttttgatagaggggcacctttttatgcatattataaaaacatataa

SEQ ID NO: 3230 - DNA, 1476 bp, Staphylococcus epidermidis
atgaatgatcatcaaaaaaatcatgcaacatctcaagatgataacacaaagtcaacaccatctaagaatagcaagcatataaaaattaaattatggcatttcatactcgttattttgggtattattcttttaacatccatcattactgtagtatcaacaattttaattagccatcaaaaaagtggtttaaataaagaacaacgtgcaaatttaaaaaaaattgaatatgtctatcaaacacttaataaagattattacaaaaagcaaagttctgataaattaactcaatctgccatagatggtatggttaaagaacttaaagatccatattcagaatatatgactgctgaagaaacaaaacaatttaatgaaggtgtatcaggtgatttcgttggcataggtgctgaaatgcaaaagaaaaatgaacagataagtgttactagcccaatgaaggattcaccagcagaaaaagctggtattcaacctaaagatatcgtcacacaagtgaatcatcattcggtagtcggtaaaccacttgatcaagttgttaaaatggtccgcggcaaaaaaggaacatatgttactttaactataaaacgtggttcgcaagaaaaggatattaagattaaacgcgataccattcacgttaagagtgtagagtatgagaagaaaggcaatgtaggcgtactaacaatcaataaattccaaagcaatacttctggtgaactcaaatctgcaatcatcaaagcgcataagcaaggcatccgtcatatcattttagatttgagaaataatccgggggggttattagatgaggcagtcaagatggctaacatctttattgataagggaaatactgtcgttcaattagaaaaaggtaaggataaggaagaattaaaaacttctaatcaagcactaaaacaagcaaaagatatgaaagtatccatcttagttaatgagggatcagctagtgcttcagaagtgtttacaggtgctatgaaagactatcataaagctaaagtttacggttctaaaacatttggtaaaggtatcgttcagaccactcgtgaatttagtgatggttcattaattaaatatacagagatgaaatggctaacgcctgatggccattatattcatggtaaaggaattagaccagatgttagtatctcaacaccaaaataccaatcactcaatgtcattccagataacaaaacttatcatcaaggtgaaaaagataaaaatgttaaaacgatgaaaataggtctaaaagctttaggttatccaattgataacgaaacaaacatatttgacgaacaattagaatctgctattaaaacatttcaacaagacaataatttaaaagttaatggcaattttgataaaaaaacaaatgataaatttactgaaaaactagttgaaaaagcgaataaaaaagatactgttttaaacgatttactaaacaaactaaaataa

SEQ ID NO: 3231 - DNA, 225 bp, Staphylococcus epidermidis
atggttaagaattattcattttatcaatttattatgaccgtgcgcggaagaaaagacgataaaggggtttttgctgagcaaatttttgaagaccttgcctttccaaaacacgaagatgattttaatacattatctgaatatattgagacacatagcgaattcaccctaccaatgtctgtatttgatgacttatatgaggactatacagaatggttgaagttttaa

SEQ ID NO: 3232 - DNA, 501 bp, Staphylococcus epidermidis
atgtttaaaaagttatttggaaaagctaaagaagttgacaaaaacattaaaatctacgcacctttgacaggtgagtatgtcaaaattgaagatattcctgatccagtgtttgcgcaaaaaatgatgggagaaggctttggtattaatcctacagagggtgaagttgtttcaccgattgaaggcaaagtcgataatgtttttccaacgaaacatgccgtagggttaaaagccgaaaatggattagagttattagttcatatcggattagataccgttcaattggatggcaaagggtttgaagtacttgttgaaagtggagatgacattaaaataggtgacccacttatacgttttgacttagaatatattaataataatgcaaaatctattatttcccctattattattacaaactctgatcaaactgaatcaattcatattgaagacgtacaagcagtagttaaaggggaaacacaagttattgatgtgacagtaaactaa

SEQ ID NO: 3233 - DNA, 429 bp, Staphylococcus epidermidis
atgattaaaaaaaacaaagaagaactgaatgacatggagtatctagtcactcaagaaaatggtactgaacctccgtttcaaaacgagtattggaatcactttgaaaaaggaatttacgttgataaattgtccggcaaaccattatttacttcagaggataaatttgaatctaattgcggttggccaagtttctccaaagcattaaatgatgatgaaatcgtagaacttgttgataaatcatttggtatgattagaactgaagttcgatcagaaaaagcgaatagtcacttgggacatgtttttaatgacggacctaaagaaaaaggtggtttaagatactgtattaactctgctgcgattcagtttataccttatgataaactagaagagttaggatatggagatttaattaaacattttaaaaaatag

SEQ ID NO: 3234 - DNA, 528 bp, Staphylococcus epidermidis
atggcatatgcgacactagctggaggttgtttttggtgcatggttaaacccttcacctcatatcctggaataaaatcagtcgtttccggatatagtggaggacatgtagaaaatccaacatacgaacaggtatgcacaaatcaaacagggcatgtggaagctgtacaaattgaatatgattctaatattacaacatttgaaaatatcttagacgtttactttaaaacatttgacccaactgatgacggagggcagttctttgatagaggtgaaagctatcaacctgtcattttttatcatgatgagaatcaacttaaagctgccgagttaaagaaacaacaaattgacgaagagggtatctttaaaaaacctgttatcacaccgataaaaccatataaaaatttctatcctgcagaagaatatcatcaagattactacaaaaagaatcctacacattatgaacaataccaacgtggatctggtagaaaagcatttatcgaatcacactggggggctcaaaatgattaa

SEQ ID NO: 3235 - DNA, 849 bp, Staphylococcus epidermidis
atggctaaacaaattatcgtcacggattcaacctctgatttatcacatgaatatttaaaacaacataacattcatgttataccattaagcctgacaatcgacgggaaatcttacactgatcaagttgatatctcttcaagtgagtatatcgatcatattgaaaatgatgcagacgtcaaaacaagtcaaccacctattggtcgatttattgaaacatatgagcaattagctcaagatgacgttgaaattataagtattcatctttcgtcaggcttaagtggtacttataatactgctgttcaagcgagccatatggtagatggcaatatcacagtgattgattctaaatctatttcgtttgggttaggttatcaaattaagcaaattgttgaattaataagtcaaggtacatcaacagaagaaatagtgaaggaaatgacacagttacgtgataacttgcaactgtttgtggttatcggtcagcttaatcaactcattaaaggtggaaggataagtaaaacaaaaggtttaattggaaacattatgaaaattaagccaatcggaactttaagagatggtaaacttgaactagtgcataattctagaactcaaaactctagtgtgcaatatttaaaaaaagaaattacagattttgttaaagatcataaaattaaatcaataggtattgctcacgccaacgttaaagatttcgttgataaaatcaaaaaatcatttacagagtcatttgattttagccaatttgatattaatgtaacaactccagtgatttctacgcacactggacaaggtgcaattggacttgtggtattgagagatacgttgaactaa

SEQ ID NO: 3236 - DNA, 486 bp, Staphylococcus epidermidis
atgacattatcaataattgtcgctcacgataaacaaagagtcattgggtaccaaaatcaattaccttggcacttaccaaatgatttaaagcatgttaaacaactgaccactgggaatacacttgtaatgggacggaaaacttttaattctatagggaagccattgccaaatagacgtaacgtcgtactcactaaccaagcttcatttcaccatgaaggggtagatgttataaactctcttgatgaaattaaagagttatctggtcatgtttttatatttggaggacaaacgttattcgaagcaatgattgaccaggtagatgatatgtatatcacagtaatagatggaaagtttcaaggagacacattctttccaccatacacattcgaaaactgggaagtcgaatcttcagtagaaggtcaactagatgaaaaaaatactataccgcatacattcttacatttagtgcgtagaaaagggaaatag

SEQ ID NO: 3237 - DNA, 957 bp, Staphylococcus epidermidis
atgtataatccattcgacgaagcttatcatggcttatgcgaagagatattagaaatagggaatagacgcgatgatcgcacacataccgggacaatttccaaatttgggcatcaattgcgtttcgatttaaccaaagggtttcctttacttacaaccaaaaaggtttcttttaaattagtagcaactgaattattatggtttattaaaggagatacaaacattcaatacctacttaaatataataacaatatatggaatgaatgggcatttgaaaattatgttcagtctgatgattatcatggaccagacatgacagattttggacatcgttcccagcaagaccctgaatttaacgagcagtataaagaagaaatgaaaaaatttaaagaacgtattctaaacgatgatgcatttgctaaaaaatatggcaacttagggaatgtttatggtaaacaatggagagattgggaagataaaaatggaaatcattacgatcaattaaaatcagttatacaacaaattaaaaccaatccaaactctcgacgtcacattgtttcagcatggaatcctactgaaatcgattcaatggcattaccaccttgccacacaatgtttcaattttacgtacaagagggtaaattaaattgtcaattatatcaaagaagtgctgatatatttttaggtgttcctttcaatattgcaagttatgctttactgacacatcttgttgcaaaagaatgtggacttgaggtgggtgaattcattcatacatttggagatgcacatatttattccaatcatatggatgcaatacatacacaattatcaagagatagttatctaccacctcaattaaaaattaatacagataaatcaatttttgatattaattatgaagatttagaattgataaattatgaatcacaccctgctattaaagcacctattgcggtataa

SEQ ID NO: 3238 - DNA, 663 bp, Staphylococcus epidermidis
atgttagagttcaaacaagtgagcaaatctttcagagatggcaatcaaatgattcaggcagtaaagcctaccgatttaaaaataattcagggggaactgattgctatcgtgggaccttcaggttcaggaaaaagtacatttttaactatggctggcgccttacaaagacctacgtcaggaaatatttacatcaataacaaaaatatatcaatattatctgaaaaacagttatctcaaataagaattaacgaaataggttttatattacaatcgacgaatctcgtgccttttttaacaatcgaacaacaattcaaacttcttagtaaatataaaaaagatacattaagtgaagatgcatatcaaaagttggttaaacagctaaatttatcagatattaccaatcaattaccaaatcaaatatctggcggtcaaaaacagcgtgtggcaatagctaaagctatttacacaaacccatcaatcatactagcagatgaacctaccgcttcactagatacgaataatgcaatggctgtaatgaaaatacttcaaaaacaaacgaaagaaagaaataaaacatgtgtgattgttactcatgatgaacgtttaactcatttttgtgataaaacatatttcatggaggacggagttctttcactccaatag

SEQ ID NO: 3239 - DNA, 1050 bp, Staphylococcus epidermidis
atgtttttagcttggaatgaaataaaaagaaataaaattaaattcagtttagtcattggcatattagtacttataagttatttattattcctactgtcaggacttgcaaacggccttattaaaatgaatactgaaggtatagaaaagtggaatgcagacgctatcatattaaaaaaagatgctaatcaaaccgtagagcaatccttattcaatatatccaaagtacaaaatacttatgaaaaatcaaccacattaaaacaacaaggagttattatctcaaaccatcatcgggaagaaaatgcgttactttttggcgttacacacaaatcatttttaattccgcctataattaaaggtcatcaagttgaaagttcaaatgaaatagtcattgatcaaacattagctgataaggggttcaaaataggtgacatcttatctttatctcaatcagacgaaaagctaaaagtggtaggtattgtagaaagtgctaaatataatgcttcacccgtgctattctctaataatcaaaccattgagaaacttaatcccaaattatcaaaagataaaacaaatgctatagtaatcaaagactcaaattggaaaaatcataaacttaacaaagatttagaaagcatttcaatatcgcagtttattaaaaatcttcctggctataaagctcaaaatttaactttgaactttatgatcgttttcttatttataatttcagcaacagtaattggcgtattcttatatgttataacactccaaaaaacacacttatttggtgtacttaaagcacaaggctttaccaacggctatttagcaaaaatggtttttgctcaaactttcatattatctttaattggaacaatcataggatttctcttaacactattaacaggtacatttttaccgcctgtcgttccaattcattttaatttattaacgatgttgatatatggaattgttcttatcattatttctttattaggcagtctattttctgttctgtctataataaaaataaatccacttaaagcaattggatag

SEQ ID NO: 3240 - DNA, 441 bp, Staphylococcus epidermidis
atgatgaatggatacgaagcttatatgaaagaacttgcacaacaaatgagagctgaattaacagacaatggattcacaagtcttgaaacgagtgatgacgtcaatcagtatatgcaaaatatagataatgatgatacaacatttgttgtaatcaactcaacatgcggttgcgctgcaggattagcacgtccagcagctgttgcagttgcagagcaaaatgaagtgaaaccagatcataaagtaactgtatttgctggtcaagataaagaagcaacacaaacaatgagagattacatccaacaagttccttcaagtccctcatacgcattatttaaaggtcaacatttagttcattttatacctcgcgaacatattgaagggcgcgacatcaatgatatagctatggatttaaaagatgcttttgatgataattgtcaataa

SEQ ID NO: 3241 - DNA, 261 bp, Staphylococcus epidermidis
atggagattatagcaatttcagaaacacctaatcataatacaatgaaagtttcgttgagtgaaccacgtcaagataactcatctacaacatatactgccgctcaagaaggtcaacctgaatttattaatcgattatttgaaatagaaggtgttaaatcaatattctatgttttggattttatatcaattgataaagaagataacgctaactggaatgaattattaccacaaatagaaaacacgttcgctaaaagcaattaa

SEQ ID NO: 3242 - DNA, 195 bp, Staphylococcus epidermidis
gtgaaagctatactcactaatacagaacaacaagcaattcaacacatcgaccaattgatgaatacttattgtcaccaatgtccattaaaaaagcacaatagaaaaactcacggtaaaacacaagcacatcatttttgtataaatgaatgtacggtcggtaaacaaattaaacaaattggtaatgagttacaatag

SEQ ID NO: 3243 - DNA, 705 bp, Staphylococcus epidermidis
atgtataatgaaatatttggtattgcgtcatttattgttacattcgctttaatggtactgatgtatcgctgttttggtaaacaaggactaattgcttgggtagcaataggaacgattatcgctaatatacaggtcataaaagcggttcatatttttggtattacggctacacttggaaatgtcatgtttgcttctatatatttagctactgatatattaaatgacatctatggtcgtaaagttgctaaaagagcggtgtggcttggtttctcttctaccttagtaatgattatagtcatgcaaatgtcattgcattttattcctgccccagtagacaatgcgcaaaactcattaaaaatgatttttgatttagtgcctagaattgctataggttccattattgcttatatcataggccaacatattgatgtatttatattcagtatgattaaaaagatatttagctctgataagaccttttttattagagcatatggtagtaccattttaagttctatcattgataccggtttatttgtttcaattgcttttattggtactatgcctggtactgctgtttttgaaatatttattaccacttacttgttaaaactagtgtcaactatttttaatgtaccatttggatatatcgctaagtcactatatcgaaaaggaaagatagaacaactagataatgggtattga

SEQ ID NO: 3244 - DNA, 393 bp, Staphylococcus epidermidis
atggctaaaatacattttgatgctgcgactaaaggaaatcccggccgaagtgcttgtgcgattattattaaagaaaattcacaaagatatacatttacccatgatttaggtgaaatggataatcatagtgcagaatgggcagcaatgttacacgctttggaacatgcacgcgaattaaaagtatctaacgcgttactttttactgattcaaaattaattgaagatagtatgatgcaaggtaaagttaaaaatgctaagtttaaagtttattttgaaaacatagaaatcttagagcaaagttttgatttgatgtttgtgagatggattccacgaaagcaaaataaagaagcgaatcaacttgctcaacaaacactatacaaacttacatcataa

SEQ ID NO: 3245 - DNA, 30447 bp, Staphylococcus epidermidis
ttgaataatcgtgataaattacaaaaatttagtattcgaaaatacgcaattggaacattttctactgtgattgcaacacttgtgttcatgggtatcaatacaaaccatgcaagtgccgacgagttgaatcaaaatcaaaagttaattaaacaattaaatcaaacagatgatgatgattcgaatacgcatagtcaagaaatcgaaaataacaaacaaaattctagtgggcagactgaatcattacgttcatcaactagtcaaaatcaagcaaatgcacgactgtcggatcaattcaaagacactaatgaaacatcgcaacaattacctacaaatgtttcggatgatagtatcaatcaatcgcatagtgaagcaaatatgaataacgaaccattgaaagttgataatagtactatgcaagcacatagtaaaatagtaagcgatagcgatgggaatgcttctgaaaataaacatcataaactaacagaaaatgtacttgcagaaagccgagcaagtaaaaatgacaaagagaaagagaatctacaagagaaagataaatcgcagcaagtacatccaccattagataaaaatgcattacaagctttttttgacgcatcatatcacaattacagaatgattgatagagatcgtgcggatgcaacagaatatcaaaaagtcaaatctacttttgactacgtcaatgacttactaggtaataatcaaaatattccttcagaacagcttgtttcggcatatcaacaattagagaaagcattagaacttgcacgtacgttaccacaacgatctactacagaaaaacgtggtagaagaagtacgagaagtgttgttgagaatcgttcatcaagaagcgattacttagatgctagaactgaatattatgtttcaaaagacgatgatgattctggtttccctcctggtactttcttccatgcttcaaatagaagatggccttataatttaccaagatctaggaacatcttacgtgcttctgatgtacaaggtaatgcttatatcactacaaaacgacttaaagatggatatcaatgggatattttatttaatagtaatcataaagggcatgaatatatgtactattggtttggacttccaagtgatcaaacaccaactggtccagtaactttcactattatcaaccgtgatggttcaagtacatctactggtggcgttggatttggatcaggtgcaccactacctcaattttggagatcagcaggtgctattaattctagcgtagcgaatgattttaaacatggctccgctacaaattatgcattttatgatggtgttaataatttttctgactttgctagagggggagaattatacttcgacagagaaggcgctacacaaactaataaatattatggcgatgaaaacttcgcattgctaaatagtgagaaaccagatcaaataagaggattagatacaatatatagttttaaaggtagtggtgatgtaagttatcgtatttcatttaaaactcaaggagctccaactgcaagattgtattatgctgctggcgcgcgttctggtgaatataaacaagcaacgaactataaccaactctatgtcgaaccttataagaattatcgaaatcgagtacagtcaaatgtccaagttaaaaatcgtacacttcatttaaaaagaacaatcagacaattcgatcctacattacagagaactactgatgttcctattttggatagtgacggttccggaagtattgattcggtatacgacccattaagttatgtaaagaatgtgactggtacagtcctaggtatttatccatcttatcttccttataatcaggaaagatggcagggagctaatgcaatgaatgcctatcaaattgaagaacttttttcacaagaaaatcttcaaaatgcagcacgttcaggccgtccaattcaatttcttgtaggttttgatgttgaagatagccatcataaccctgaaactcttttaccagtaaatttatatgtaaaacctgagttaaaacatacaattgagttatatcacgataatgaaaaacaagatagaaaggaattttcagtatcgaaacgagcgggccatggtgttttccaagtaatgagtggaacgcttcataacactgtaggatcaggaatattaccttatcaacaagagatacgtatcaaacttactagtaatgaaccaattaaagatagtgaatggtctattacaggatatcctaacacgcttacattacaaaatgctgtgggtagaacaaataatgctactgaaaaaaacttagctcttgttggtcatattgatccaggaaattatttcatcactgttaagtttggtgataaagtagaacaatttgaaattagatcaaaaccaactccaccaagaatcattacaactgctaatgaattacgtggaaatcctaaccataagcctgaaataagagtaacagatataccaaatgatactactgctaaaatcaaacttgtgatgggcggaaccgatggcgatcatgatccagaaataaatccatatactgtccctgaaaactacacagtagttgcagaagcataccatgataatgatccaagtaaaaatggggtcttaacattccgttcatcagactaccttaaagatctaccattaagcggtgaattaaaggcaattgtttattacaatcaatatgtacaatcaaactttagtaatagcgttccgtttagtagcgatacaacaccacctacaattaatgaaccagcaggactagttcataagtattacaggggagatcatgtagaaattactcttccagtcactgataatactggcggttcaggtttaagagatgtaaacgtcaatttacctcaaggttggacaaaaacctttacaatcaatcctaataataatactgagggtacgcttaagttaattggtaatatacctagtaatgaagcatataatacgacatatcatttcaatattactgcaaccgataattctggaaatacaacaaatccagctaaaacctttattttaaatgttggtaagttggctgatgatttaaatccagtcggattatctagagatcaactacaattagtgacagacccttcttcattatctaattccgaacgagaagaggtaaaaagaaaaataagtgaagcaaatgctaatataagatcatatttattacaaaataacccaatactcgctggagtaaacggcgatgttacattttattatagagatggttctgtagatgttattgatgctgaaaatgtaatcacatatgagcccgaaagaaaatccattttcagtgaaaatggtaatacaaataaaaaagaagcagtaatcactattgctagaggacaaaactataccattggtccaaacttaagaaaatatttctcattaagtaatggttcggatttacctaatagagatttcacctctatatcagctattggatctttaccttcatcgagtgaaattagtcgactcaatgttggaaattataactatagagttaatgctaaaaatgcttatcataagactcaacaagaacttaatttaaaacttaaaatagtagaggttaatgcacctactggtaataatcgtgtatatagagttagtacttataatttaactaatgatgaaatcaataaaatcaaacaagcatttaaagcagctaattctggacttaatttaaacgataacgatatcactgtttcgaataactttgaccatagaaatgttagtagtgtgacagtaactatacgtaagggcgatttgataaaagagttttcatcaaatctcaataatatgaatttcttacgttgggttaatataagggatgattataccatttcgtggacttctagtaagattcaaggtagaaatacagatggtggattagaatggtcaccagatcataaatcacttatttataaatatgatgcaacattaggtagacaaataaatactaatgacgtgttaactttacttcaagcaacagctaaaaactcaaatttacgttcaaatatcaatagtaatgaaaaacagttagcagaacgagggtctaatgggtattctaaatctataattagagatgatggcgagaaatcttatttacttaactcaaatcctattcaagtattagacttagtagaaccagataatggttacggtggacgtcaagtcagtcattctaacgttatatataatgaaaaaaattcttctatcgtaaatggtcaagttccagaagctaatggggcatccgcttttaatattgataaagttgttaaagctaatgcggcaaataatggtattatgggtgttatctataaggcacaattatacttagcaccatacagtccaaaaggttacattgaaaaattaggccaaaatttaagcaataccaataacgtgattaatgtttattttgtgccttctgataaagtaaatcctagtataactgtaggtaattacgaccatcatacggtatattctggtgaaacatttaaaaatactatcaatgtaaatgataattatggattaaatacagtagcttctacaagtgatagtgcaattactatgaccagaaacaacaacgagttagtaggtcaggctcctaatgttactaatagcacaaataaaattgtaaaagttaaagccacagataaaagtggaaatgaaagtattgtttctttcacagtaaatataaaaccattaaacgagaaatatagaataacaacttcatcaagtaatcaaacaccagtgagaattagtaatattcaaaacaatgctaacctttcaattgaagatcaaaatagagtaaaatcttcactcagcatgactaaaattttaggtacaagaaattatgtcaatgagtcaaataatgacgttcgtagtcaagttgtaagtaaagtaaatagaagtgggaacaatgctacagttaatgttacaactacattttctgatggtacaactaatacaataaccgttccagttaaacatgtgttattagaagttgtacctactactagaacaacagtaagaggacaacaatttccaaccggcaaaggaacttccccaaatgatttctttagtttaagaacgggaggtccagttgatgcgagaatagtttgggttaataatcagggacccgatataaatagtaatcaaattggtagagatttaacattacacgctgaaatattctttgatggtgaaacaacaccaattagaaaagatacgacttacaaacttagtcaatctattccaaagcaaatatatgaaacaactatcaatggtcgatttaattcatcaggtgatgcatatccaggaaattttgttcaagcagtaaatcaatattggccagaacatatggacttcagatgggcccaaggatcaggcacaccaagttctcgtaatgcaggttcatttactaaaacagttacggtagtttatcaaaacggccaaactgaaaacgttaatgtactattcaaagtcaaaccaaataaacctgttattgatagtaatagtgtgatttcaaaaggacaattaaatggtcaacaaattttagttcgaaatgttccacaaaatgcacaagtcactctatatcaatcaaatggaactgttattcctaatacaaatacaactatagattctaatggtatagctactgtaacaattcaaggcactctaccaaccggaaatattactgctaaaacctcaatgacaaataatgtaacgtacactaaacaaaatagtagtggaattgcttcaaatacaactgaagatataagtgttttttcagaaaacagtgatcaagtaaatgttaccgttggcatgcaagctaaaaatgatggtattaaaataattaaaggtacaaactataattttaatgacttcaatagtttcataagtaatataccagcccattctactcttacatggaacgaggagcctaatagttggaaaaacaacatcggtactacaacaaaaactgttacagttactctacctaatcatcaaggtacgagaactgtagatattccaataacaatctatccaacagttacagctaagaatccagtaagagatcaaaaaggacgaaacttaaccaatggtactgacgtttataattatattatttttgaaaataataaccgtcttggaggaacagcttcttggaaagacaatcgtcaacctgataaaaacatagccggtgtacaaaatttaattgcacttgttaattatcctggcatatctacaccattagaagttcctgttaaagtgtgggtatataattttgatttcactcaacctatctacaaaattcaagtaggagatacattccctaaaggaacatgggcaggctattacaaacatcttgaaaatggagagggattaccaatagatggttggaaattttattggaaccagcaaagtacaggaactactagtgatcaatggcaatcattagcatatactagaactccttttgttaaaactggtacttatgatgtcgttaatcctagcaactggggtgtttggcaaacatcacaatcagctaaatttatagttacaaatgctaaacctaatcaaccaaccataactcagtctaaaactggtgatgtaacagtaacacctggtgctgtgcgtaatatactaataagtgggacaaatgattatatccaagcatctgcagataagattgttattaataaaaatggaaataaattaactacatttgttaagaataatgatggtcgttggactgttgaaactgggtcacctgacataaatggtatcggaccaacaaataacggaactgctatatctttaagtcgattagcagttagacctggggattcaatagaagcaatagcgactgaaggttccggagaaactataagtacttcagcaactagtgaaatttatattgtcaaagctccacaacctgaacaagtagcaactcatacttatgataatggaacattcgatatatcacctgacaattcacgtaattctttaaatccaactgaacgtgtcgaaattaattacactgaaaaattaaatggcaatgaaacacaaaaatcattcactattactaaaaataacaacggcaaatggacgataaataataaaccaaattatgtcgagttcaatcaggataatggtaaagttgtattttcggccaatacaattaaacctaattctcaaattacaataactcctaaagcaggtcagggtaacactgaaaacacaaatcctactgtaattcaagcacctgcgcaacatactttaacaatcaatgaaattgttaaagaacagggtcaaaatgtgactaatgatgatattaataatgcggttcaagtgccaaataaaaatagagttacgattaaacaaggaaacgctcttccaacaaatttagctggtggtagtacatcacatattccagtagttatttattacagtgatggaagttctgaagaagctactgagactgttagaactaaagttaataaaaccgaattaatcaatgctcgtcgtcgactagatgaagaaattagtaaagagaacaaaacaccatcaagtatcagaaactttgatcaagctatgaatcgtgctcaatcacaaattaatacaactaaaagtgatgctgaccaagttataggcacagaatttgcaacacctcaacaagtaaattcagctttatctaaagttcaagcggcacaaaataaaataaatgaagctaaagcattattacaaaacaaggctgataatagtcaacttgtgagagcaaaagaacaattacaacaatcgattcaaccagccgcttcaactgatggtatgactcaagatagcacaaggaactacaacaataaacgccaagcagctgaacaagcaatacaacatgcaaatagcgttataaataatggagacgcaacatcccaacaaattaatgatgctaaaaacacagttgaacaggcacagagagattatgttgaagctaaaagcaacttacgtgctgataagtcacagttacaaagcgcttatgatacgttaaatagagatgttttaacaaatgataaaaagccagtatctgtaagacgctataatgaagccatttcaaatattagaagagaattagatacagctaaagcggatgcaagtagtactttgcgaaacactaatccttcagttgaacaagttagagacgctttaaataaaataaatactgttcaacctaaagtgaatcaagcaattgctttacttcaaccaaaagaaaataattcagaacttgtacaagctaaaaaacgtttacaagacgctgtaaatgacatacctcaaacacaaggtatgactcaacaaacaattaataattataatgacaaacaacgtgaagctgaaagagcacttacatctgcacaaagagtgattgataatggggatgctacaactcaagaaattacttctgaaaaatctaaagtagagcaagcaatgcaagctttaactaatgctaaaagtaatctgagagctgataagaatgagttacagactgcatataacaaattaattgagaacgtatctaccaatggtaaaaaaccggcgagtatacgtcaatacgaaacagccaaagccagaatacaaaatcaaattaatgatgctaaaaatgaagcggagcgaattttaggtaatgataatccacaagtatcacaagtaactcaagcattgaacaaaatcaaagctattcaaccaaaattaacagaagctatcaacatgcttcaaaacaaagaaaataatacagaattagtcaatgctaaaaacagacttgaaaatgcagtaaatgatacagatccaacacacggtatgactcaagaaacaattaataattacaacgctaaaaagcgagaagctcaaaatgaaatacaaaaagcgaacatgattattaataatggagatgctactgctcaagatatttcttctgaaaaatctaaagtagagcaagtattacaagcattacaaaatgctaagaatgacttaagagctgataaaagagaattacagactgcatacaataaacttatacaaaatgttaataccaatggtaaaaaaccatctagtattcaaaactataagtctgcaagacgaaatatcgaaaaccaatataataccgctaaaaatgaagcacataatgttcttgaaaatacaaaccctactgtaaatgcagtagaagatgctttacgtaagataaatgcaattcaaccagaggttacaaaagctattaatatacttcaagataaagaagataatagcgaacttgttagagcaaaagaaaaattagatcaagcgattaatagtcaaccatcactaaatggtatgactcaagaatctattaataattacacaacaaaacgtagagaagcacaaaatatagcaagttctgctgacactattattaataatggggatgcatctattgaacaaataacagaaaataaaattcgagttgaagaggcaactaatgcacttaacgaagcaaaacaacatttaacggcagatacaacttctttaaaaactgaagtacggaaattaagtaggagaggcgacacaaacaacaaaaagcctagcagtgttagtgcttataacaatactattcattcgctacaatctgaaattacacagactgaaaatagatcaaatactatcatcaataagcctattcgttctgttgaagaagtaaataatgcattgcatgaagtaaaccaattgaaccaacgcttaacagatacaattaacttattacaacctttagcgaataaagaaaacttaaaagaagctcgtaatcgacttgaaagtaaaattaatgaaaccgttcaaacagacggtatgactcaacaatctgttgagaattataagcaagctaaaataaaagctcaaaatgaatctagtattgcacaaactcttattaataatggtgatgcatctgatcaagaagtttctacagaaatagaaaaattaaatcaaaagctgtctgaattaacaaattcaatcaatcacttaacagttaataaagaacctttagaaactgccaaaaatcagttacaagcaaatattgaccaaaaacctagcactgatggtatgacgcaacaatctgtacaaagctatgaacgtaaactacaagaagccaaagataaaataaactcaattaataatgtcttagctaacaatccagatgttaatgctatcagaacaaacaaagttgagacggaacaaatcaataatgaattaacacaggcgaaacaaggtcttactgttgataaacaaccattgattaatgcaaaaactgctttgcaacaaagtctagataatcaaccaagtactactggtatgactgaagcaacaattcaaaattataacgctaaacgtcaaaaagcagagcaagttatacaaaatgcaaataaaattattgaaaacgctcaacctagtgtacaacaagtgtctgatgagaaatctaaggtagagcaagcactcagtgaattgaacaacgccaaatcagcgcttagagctgataaacaagaattacagcaagcatataatcagttgattcaaccaacggatttaaataataagaaaccagcttctatcactgcgtacaatcaaagatatcaacaatttagtaacgaattgaacagcactaaaacaaatacagatcgcattttaaaagagcaaaatccaagtgtagctgatgtcaacaatgcactaaataaagtaagagaagtacaacaaaaattaaacgaagccagagcacttttacaaaataaagaagataatagtgcactagttcgagccaaagaacaacttcaacaggcagttgaccaagtcccttcaacagaaggtatgacgcaacaaactaaagatgattacaattcaaaacaacaagctgctcaacaagaaatatcaaaagcacaacaagttatcgataatggcgatgcgactacacaacaaatttctaacgccaaaacaaatgttgaacgcgctttagaagcattaaataatgcaaaaactggtttaagagcagataaagaggaacttcaaaatgcatataatcaattaactcaaaatattgatacgagcggtaaaacgcctgcaagtatcaggaaatacaatgaagctaagtcacgtattcaaactcaaattgattcagctaaaaatgaagcaaacagtattttaacaaatgacaatcctcaagtatcacaagtgactgctgcgttaaacaaaataaaagctgttcaacctgaattagataaagcgatagcaatgcttaaaaataaagagaataataatgcattggttcaagcgaaacaacaacttcaacaaattgttaatgaagtagatccaacacaaggcatgacaacagatactgctaataactataaatcaaaaaaacgtgaagctgaagatgaaatacaaaaagctcaacaaatcattaacaatggcgatgccactgagcaacaaattactaacgaaacaaatagagtaaatcaagcgattaatgcaataaacaaagccaaaaacgatttacgtgctgataagtctcaattggaaaatgcttataaccaattaatacaaaatgttgatacaaatggtaaaaaacctgctagtattcaacaataccaagctgctcgacaagctattgagacgcaatacaataacgctaaatcagaagcacatcaaattcttgaaaatagtaacccttcagttaatgaagtagcacaagcattacaaaaagttgaagctgtacaacttaaagttaatgacgcgattcatatacttcaaaataaagagaataatagtgcacttgtcacagctaaaaatcaacttcagcaatcagttaatgatcaaccattaacaacaggtatgactcaagattctattaataactatgaagctaagagaaatgaggctcaaagtgctatcagaaatgcagaagctgtcatcaacaatggcgatgcaactgcaaaacaaatttcagacgagaaatctaaagttgaacaagcactagcacatttgaatgatgctaaacagcaattaactgcagatactactgaattacaaacagcagttcaacaattaaacagaagaggcgatacaaataataaaaagccaagaagtatcaatgcatataataaagcaattcaatcattagaaacacaaattacttctgctaaagataatgccaacgctgtgatacaaaaacctatacgtactgttcaagaggtaaataatgcattacaacaagtaaatcagttgaatcaacaattaactgaagcaattaatcaacttcaaccgctatcaaataatgatgcattaaaagctgcaagattaaatttagaaaataaaattaatcaaactgtacaaactgatggtatgacacaacaatctatagaggcttatcaaaacgctaaacgcgtagcccaaaatgaatctaacactgctttagcattaattaataacggcgatgccgatgaacaacaaattacaactgaaacagaccgagtcaatcagcaaactacaaacttaactcaagcaattaacgggttaacagttaataaagaaccattagaaaccgctaaaacagcgttacaaaataacatcgaccaggtacctagtacagatggtatgactcagcaatctgttgcaaattataatcaaaaactacaaatagctaaaaacgaaattaacacaattaataacgttttagcgaacaatccagatgttaatgcaatcaaaacgaataaagcagaagcggaacgaatcagtaacgatttaacacaagctaagaataacttacaagttgatactcaacctttagaaaaaataaaaagacaacttcaagatgaaattgatcaaggtactaacacagatggaatgactcaagattcagtggataattacaatgatagcttaagtgcagcaattatagaaaaaggcaatgtaaataaattacttaaacgtaatccgacagtagaacaagttaaagagagcgttgctaatgcacaacaagtcatacaagatttacaaaatgctcgaacttcacttgttccagacaaaactcaacttcaagaagctaaaaatagattagaaaacagtattaaccaacaaacagatactgacggcatgactcaagattcgcttaacaattataatgataaattagcaaaagctagacaaaaccttgaaaaaatatctaaagttttaggtggtcaacctactgtagctgaaattagacaaaatacagatgaagcaaatgcacataaacaagcattagacactgcacgttctcaacttacattaaatagagagccatatatcaatcatattaataatgaaagtcatttaaataacgcgcaaaaagataattttaaagctcaagttaactcagcacctaatcataatactttagaaacgattaaaaataaggctgatactttaaatcaatctatgacagcattaagtgaaagtattgcagattacgaaaatcaaaaacaacaagaaaattatttagatgcatctaacaataaacgtcaagactatgacaatgcagtcaatgcggctaaaggtattttaaaccaaactcaaagtccgacaatgagtgctgatgtgattgatcaaaaagctgaagatgttaaacgtacgaaaactgcgttagatggaaatcaaagattagaagttgctaaacaacaagcacttaatcatttaaataccttaaatgatttaaacgatgctcagcgacaaactttaactgatactataaatcactctccaaacatcaattcagtgaatcaagctaaagaaaaagctaatactgttaacacagcaatgactcaactgaaacaaactattgctaactatgacgatgaattgcatgacggcaattacattaatgcagataaagacaaaaaagatgcttataataacgctgttaacaatgctaaacaactgattaatcaatctgatgctaatcaagcacaacttgatccagctgaaattaataaagttacacaaagagtcaatacgactaaaaatgatctaaatggtaatgacaaattggctgaagctaaaagagatgctaatacaaccattgatggtttaacttatctaaatgaagctcaacgtaacaaagctaaagaaaatgtaggcaaagcttctacaaaaacaaatattacgagtcagttacaagattacaatcaattgaatactgctatgcaagcattacgtaacagtgtgaacgacgttaacaatgttaaagcaaatagcaattatataaatgaagataatggtccaaaagaagcttacaatcaagccgttactcatgctcaaacattgataaatgcacaatctaaccctgaaatgagccgtgacgtagtaaatcaaaaaacacaagcagtaaatactgcccatcagaatttacatggacaacaaaagttagaacaagcacaaagtagtgctaatacagaaatcggtaacttaccaaacttaactaatactcaaaaagctaaagaaaaggaactggtaaatagtaaacaaactcgtacggaagtacaagaacaacttaaccaagctaagtcactagatagttctatgggcacgttaaaatcattagttgctaaacaacctacagtacaaaaaacaagtgcttatattaacgaagatcaaactgagcaatctgcctacaatgattccattacaatgggacaaactataattaataaaacagctgatccagtacttgataaaactttagttgataacgcaatcagtaacatttcaactaaagagaatgcactgcatggtgaacaaaaattaacaactgctaaaacggaagcaattaatgcacttaatacattagctgatttaaacacacctcagaaagaggctattaaaacagctattaacactgctcatacaagaactgatgtaactgcagagcaaagtaaggctaatcaaataaatagtgcaatgcacacgttgagacaaaacatttctgacaacgaatcagtaacaaacgaaagtaattatattaacgctgaacccgaaaaacaacatgcctttactgaggctctaaataatgctaaagaaatagttaatgaacaacaagccactcttgatgccaattcaattaaccaaaaagcacaagcgattcttactactaaaaatgctttagatggtgaagaacaattacgtcgtgctaaagaaaatgccgatcaagaaatcaatacgttaaatcaattgactgatgcgcaaagaaatagtgaaaaaggtttagtcaacagttctcaaactagaacagaagttgcttctcaattagcaaaagctaaagaactaaataaggtgatggaacaactgaataaccttatcaatggtaaaaaccaaatgataaatagcagtaaatttatcaatgaagatgcgaacaaacaacaagcatattcaaatgcgattgcaagtgcagaagtgcttaaaaacaaatcacaaaaccctgaattagataaagtaacaattgaacaagcaattaataatattaattctgcaattaataatctaaacggtgaagctaaactgactaaagctaaagaagatgctgttgcttcaataaacaacctaagcggattaactaacgagcaaaaaacaaaagaaaatcaagccgttaatggctctcaaactagagaccaagttgctaacgttttacgtgattcaaaggcattagatcaatctatgcaaacattacgtgatttagttaacaatcaaaatgtaatacattcaacaagtaattattttaacgaggattcaactcaaaagaatacttatgataatgcaattgataatggctcgacatatataactggtcaacacaattcagaattaaataaatctactattgatcaaacgattagccaaattaacacagctaaaaatgatttacatggtgcagaaaagttacaaagagataagggaactgctaatcaagaaattggacaattaggttatttaaatgaccctcaaaaatctgctgaggaatccttagtcaacggttcaaatacacgttctgaagtagaagagcatcttaatgaagctaaatcattaaataatgcaatgaaacaattaagagataaagtagctgaaaagactaatgtcaaacaaagtagcgattacattaatgattcaactgaacatcaacgtgggtatgatcaagcacttcaagaagcagaaaatattattaatgaaatcggtaatccaacattaaataaatcggaaattgaacaaaagttacaacaattgactgacgctcaaaatgcgttacaaggttcacatctattagaagaagctaaaaataatgcgattactgaaatcaataaacttacagcattaaatgatgcacaacgtcaaaaagcaattgaaaatgttcaagcacagcagacaatcccagcagttaatcaacaattaactttggatagagaaataaatactgcaatgcaagctttacgagataaagtaggccaacaaaataacgttcaccaacaaagtaattatttcaatgaagatgaacaaccaaaacataactatgataattctgtacaagccggtcaaactattattgataaacttaaagatccaatcatgaacaaaaatgaaattgagcatgctattaatcaaatcaatacgactcaaacagcgttaagtggagaaaataaattacacactgaccaagaaagcacaaatagacaaatagaaggtttatctagtttgaacacagctcaaatcaacgccgaaaaagatttagtcaatcaagctaaaacaagaacagatgttgctcaaaagttagctgcagctaaagaaataaattctgctatgagtaatttaagagatggcattcaaaataaagaggacatcaaacgtagcagtgcatatatcaacgcagatccgactaaagttacagcttacgatcaagcactacagaacgcagaaaatatcatcaatgccacaccaaacgtagagcttaataaagctacaattgaacaagcgctatcacgcgttcaacaagcacaacaagatcttgatggtgttcaacaattagctaatgctaaacaacaagctacacaaactgtcaatgggttaaatagcttaaatgacggtcaaaagcgtgaattaaatctattaattaattcagctaatacccgtacaaaagtacaagaagaattaaacaaagcaactgaattgaaccatgcgatggaagctttaagaaacagtgttcaaaacgttgatcaagtaaaacaaagtaacaattatgtcaatgaagatcaacctgaacagcacaattatgataatgctgtcaatgaagctcaagctacaatcaacaacaatgctcaacctgttctagacaaattagctatagaacgtttaactcaaactgttaacactacaaaagatgcattacatggtactcaaaaactgatacaagaccaacaagctgctgaaactggaatacgtggtttaacgagtctcaatgaacctcagaaaaatgctgaagtagctaaagtaactgcagcaacaacacgtgatgaagtgagaaatattcgtcaagaagcaacaacattagatactgcaatgcttggtttacgtaaaagcattaaagataaaaacgatactaaaaatagtagtaaatatattaatgaggatcatgaccaacaacaagcttatgacaatgctgtaaataatgctcaacacgttatcgatgaaactcaaacaacgttaagctcagatacaatcaatcaattggcaaatgccgtaactcaagctaaatctaatcttcatggagatactaaactacaacacgataaagatagtgctaaacaaacgattgctcaattacagaatttgaattcagctcaaaaacatatggaagattctttaattgataatgaatctacacgtacgcaagtccaacacgatttaacagaagctcaagctttagatggtttaatgggtgccttaaaagaaagtattaaagataatactaatattgtttcaaacggtaattacatcaatgcggaaccatctaagaaacaagcatatgatgcagctgtacaaaatgctcaaaatataataaatggaacgaatcaaccaacaattaataaaggtaatgtcactacagcaacacaaaccgtgaaaaatactaaagatgccttagacggtgatcatagattagaggaagctaaaaataatgccaatcaaacaatcagaaatctatctaatttgaacaatgcccaaaaagatgcagagaaaaatctagttaatagcgcatcaacattagaacaagttcaacaaaacttacaaaccgctcaacaattagataatgctatgggtgagttacgacaaagtattgctaacaaagatcaagtgaaagcagatagtaaatatctaaatgaagatcctcaaattaagcaaaactatgatgatgcagttcaacgtgttgaaactattattaacgaaactcaaaaccctgaattacttaaagcaaacattgaccaagcaactcaatccgttcaaaatgcagaacaagctttacatggtgctgaaaaattaaatcaagacaaacaaacgtcttcgacagaactagatggattaacagatttaacagatgcacaacgtgaaaaactcagagaacaaattaacacttctaatagtagagatgatattaagcaaaaaattgagcaagcaaaagcactaaatgacgcaatgaaaaaacttaaagaacaagttgcgcaaaaagatggtgttcatgctaacagtgattatacaaatgaagattctgcacaaaaagatgcgtataataatgcacttaaacaagcggaagacattattaataacagctcaaatcctaacttaaatgcacaagacattactaatgctttaaataatattaaacaagcacaagataaccttcatggagctcaaaaattacagcaagacaaaaatacaactaatcaagccattggtaacttaaatcatcttaatcaacctcaaaaagatgcgcttatacaagctattaatggagctacatctagggaccaagttgcagaaaaacttaaagaggccgaagcgcttgatgaagctatgaaacaacttgaagatcaagtgaatcaagatgatcaaatttcaaatagcagcccattcataaatgaagactcagacaaacaaaaaacttataatgataaaatccaagctgcaaaagaaataattaatcaaacatctaatccaaccttagataaacaaaaaattgctgatacacttcaaaatattaaagatgcagtgaataatttacatggtgatcaaaaattagctcaatctaaacaagacgctaataatcaattaaatcatttagatgacttaaccgaagaacaaaaaaaccattttaaaccgttaattaataatgctgatactcgagatgaggtaaataaacaactagagattgctaaacaattaaatggtgatatgagtacacttcataaagtcataaatgataaagatcaaattcaacatttaagcaattacattaatgctgataatgataaaaaacaaaattatgataatgctattaaagaagctgaggatttaattcataatcatccagatacattagatcataaagcattacaagatttattaaacaagatagaccaagcgcataacgaattaaatggagaatccagatttaaacaggctttagacaatgctttaaacgacatagatagcttaaacagtctcaatgttccacaacgtcaaactgttaaggataacatcaaccatgtgacaactctagaaagtttagctcaagaattgcagaaagcaaaagagcttaatgatgctatgaaagcaatgagagatagcattatgaatcaagagcaaattcgtaaaaatagcaattatactaatgaagacttagctcaacaaaatgcctataatcatgcagtagataatataaataacattattggtgaagacaatgcgacgatggatcctcaaataatcaaacaagcaactcaagatataaatacagctataaatggattaaatggagatcaaaaacttcaagatgcaaagacagatgctaaacaacaaattactaactttactggtttaactgaaccacaaaaacaagcattggaaaacatcattaaccaacaaacaagcagagcaaatgttgctaaacagttaagtcatgctaaattcttaaatggaaaaatggaagaattaaaagttgcagtagccaaagcgtcattagtaagacaaaatagtaactatattaatgaagatgtctctgaaaaagaagcatatgaacaagctattgcaaaaggtcaggaaataattaattcagaaaataatccaacaataagtagtactgatatcaatcgtaccattcaagaaattaatgatgctgaacaaaatcttcatggtgaaaataaattaagacaagcacaggaaattgcaaagaatgaaatacaaaatctagacggattaaattcagctcaaataacaaaattaatccaagatataggcagaacaacaactaaacctgcagtaactcagaaactagaagaagcaaaagcaataaaccaagctatgcaacaacttaaacaaagtatagccgataaggatgctactctaaattctagtaactatctcaatgaagattctgagaaaaagttagcgtacgataatgctgtaagccaagctgaacaactcataaatcaacttaacgacccaactatggatataagtaatattcaagctattactcaaaaggtcattcaagcaaaagattcattgcacggtgcgaataaacttgcacaaaatcaagcagattcaaatttaataataaatcaatcaacaaatttaaatgataaacaaaagcaagcattaaatgacttaattaatcatgctcaaactaaacagcaagtggcagaaataattgcacaagctaataagttaaataacgaaatgggcacactaaaaacactcgtagaagaacagtcaaacgttcatcaacaaagtaaatatattaatgaagatccgcaagttcaaaatatttataatgactccattcaaaaaggtcgagaaatattaaacggcactacagatgatgttttaaacaacaataaaatagcagatgccattcaaaacattcatttaactaaaaacgatttacatggtgatcaaaaattacaaaaagcacaacaagatgcaaccaatgaattaaactatttaacaaatctaaacaattctcaaagacaaagcgagcatgatgagattaactctgctccttcaagaactgaagtttctaatgatttaaatcatgctaaagcacttaatgaagctatgcgtcaacttgagaatgaagttgctcttgaaaacagtgttaaaaaattaagcgactttatcaatgaagatgaagcggcacaaaatgaatatagtaatgcacttcaaaaagctaaagacattatcaacggcgttccaagtagcactttagataaagctacaattgaagatgctttattagaattgcaaaatgctagagaaagtttacatggtgagcaaaaacttcaagaggctaaaaatcaagctattgctgaaattgataatttacaagcattaaatcctggacaggttcttgctgaaaaaacattagttaaccaagcatcaaccaaaccagaagttcaagaagccttacaaaaagcaaaagaacttaatgaagctatgaaagcactgaaaactgaaataaataaaaaagaacaaatcaaggctgatagtagatatgtaaatgctgacagtggtcttcaagcaaattacaattctgcgttaaattatggttctcaaattattgcaactacccaaccaccagagcttaataaagatgtaataaatagagcaactcaaacgattaaaactgctgaaaataatttaaatgggcaatctaaattagcagaggctaagtcagacggaaatcaaagcatcgaacatttgcaaggattaacacaatcacaaaaagataaacaacatgatttaattaatcaagctcaaactaaacaacaggtagatgatatcgtaaataactctaaacaattagataactctatgaatcaactacaacaaattgttaacaatgacaatacagtaaaacaaaatagtgatttcattaatgaagattccagccaacaggatgcttataatcatgcaattcaagcagcaaaagatttgataactgctcatcctactatcatggataaaaatcaaatagatcaagctattgaaaatatcaaacaagcacttaatgatttacacggtagtaataaactatcagaagataaaaaagaagcttcagaacaactacaaaaccttaatagcttgacgaacgggcaaaaagatacgattttaaatcatattttcagtgcaccaacaagaagccaagtaggagaaaaaattgcaagtgctaaacaattaaataatacaatgaaagcacttagagattctattgctgataataatgaaattttacaaagtagtaagtacttcaatgaagattctgaacaacaaaatgcttataatcaagccgtaaataaagctaaaaatataattaatgatcaaccaacaccagtaatggcaaatgatgagattcaaagtgtcctaaatgaagttaaacaaactaaagataatttacatggtgatcaaaaacttgctaacgacaagacagatgcccaagcaacattaaatgcgttaaattacttaaatcaagcgcaaagaggtaatcttgaaactaaagttcaaaactctaattctagaccagaagtacaaaaagtagttcaattagcaaatcaacttaatgatgcgatgaaaaaattagatgatgctttaactggtaatgacgcaataaaacaaacgagtaattatattaatgaagatacttctcaacaagttaactttgatgagtatacagatagaggtaaaaacatagttgctgaacaaacaaatccaaatatgtctccaactaatattaacactattgctgataaaattactgaagctaaaaatgatttacatggcgtacaaaaactagaacaagctcaacaacagtccatcaatactattaatcaaatgactggtctaaaccaagctcaaaaagaacaattaaatcaagaaattcaacaaactcaaacccgttctgaagtacatcaagtaattaataaagcacaagctttaaatgattcaatgaatactttacgtcaaagtattactgatgaacatgaagttaaacaaacaagtaactacatcaatgaaactgttggtaatcaaactgcatataacaatgccgttgatcgtgtaaaacaaataatcaatcaaacatctaatccaactatgaatcctttagaggtggaacgtgcaacatcaaatgtaaaaacttctaaagatgcacttcatggtgaacgtgaattgaatgacaataaaaattcaaaaacttttgcagtcaatcacttagataacctcaatcaagctcaaaaagaagcattaactcatgaaattgaacaagcaactatagtttcacaagtaaataatatctataacaaagcgaaagctttaaataatgatatgaaaaaacttaaagatatcgttgctcaacaagataatgtgagacaatcaaacaattatataaacgaggatagtacacctcaaaatatgtacaacgatacaattaatcatgcacaatcaatcattgatcaagtagcaaaccctacgatgtctcatgacgaaatagagaatgcaatcaataacataaagcatgccatcaatgcactcgatggagaacataaattacaacaagcaaaagaaaatgcaaacttattgattaatagtttaaacgatttaaatgcaccacaaagagatgccataaatagattggttaatgaagctcaaacaagagaaaaagtagctgaacaacttcaaagtgctcaagctttaaatgacgctatgaagcatttaagaaacagcattcaaaatcaatcatccgtaagacaagagagcaaatatattaatgcaagtgatgctaaaaaagagcaatataatcacgcagttagagaagtcgaaaatattatcaatgaacaacatccaacattggataaagaaataattaagcaactaacggatgctgtaaatcaagcgaataatgacttaaatggcgttgaattattagatgctgataagcaaaacgcacatcaatcgatacctacattgatgcacttaaatcaagcacaacaaaacgcattaaatgaaaaaattaataacgcagttaccagagctaaagttgcggctattattggccaagcaaaaatactcgatcatgctatggagaatttagaagaaagtatcaaagataaagagcaagtcaaacagtcaagtaactatattaatgaagaccctgatgttcaagaaacatacaataacgccgttgatcatgtgacagaaatacttaatcaaacagtaaatccaactttatctattgaagatatagagcatgctatcaacgaagttaatcaagcgaaaaaacaactcagaggtaaacaaaaactttatcaaactatcgatttagctgataaagaattaagtaaattggatgatttaacatcacaacaaagcagttcaatatctaatcaaatatatactgctaaaacgagaacagaagttgcccaagcaattgaaaaagcaaaatcattaaatcatgcaatgaaagcacttaacaaagtatataaaaatgcagataaagtgttagatagtagtcgattcattaacgaagatcaacctgaaaaagaggcgtatcaacaagctataaatcatgttgattcaatcattcatagacaaacaaatcctgaaatggatccaacagtaatcaatagcataactcatgaactcgaaacagctcaaaataacttacatggtgatcagaaacttgctcatgcaaaacaagatgccgctaatgtaattaatggtctaattcatcttaatgttgctcaacgcgaggtaatgataaatacgaatacaaatgctacaacacgcgaaaaagttgcaaagaacttagataatgctcaagctcttgataaagctatggaaacactacaacaagtagttgctcataaaaataatatattgaacgatagtaaatatttaaatgaagattcaaaatatcaacaacaatacgatcgagttattgctgatgccgaacaactacttaatcagacaacaaatccaacattagaaccttataaagtcgatattgttaaggataatgtcctagctaacgaaaaaatactatttggcgcagaaaaactatcatatgacaaatcaaatgcaaatgatgaaattaaacatatgaattatcttaataatgcacaaaagcaatctataaaagatatgatttctcacgcagcattaagaactgaagttaaacaacttctgcaacaagctaaaacccttgatgaagctatgaaatcacttgaagataaaactcaagtagtgattacagatactactttgcctaattacactgaagcttcagaggataaaaaggaaaaagtagaccaaactgtatcacatgctcaagcaatcattgataaaataaatggctcaaatgtaagtttagatcaagtacgacaagcactagaacaattaactcaagcatcagaaaacctcgatggtgatcagcgagttgaagaagctaaagttcatgctaatcaaacaattgaccaattaacacatcttaattcattacaacaacaaactgcgaaagaaagtgttaaaaacgcaacaaaactagaagaaatcgctactgctagtaacaatgctctggcattaaacaaagtaatgggtaaattagaacaattcattaatcatgctgattctattgaaaatagtgataattatagacaagccgacgacgacaaaattatcgcttatgatgatgcactagaacatggacaagatatacaaaaatctaacgcaacccaaaatgaagcaaaacaagcgttacaacaattaataaatgcagaaacatcgttaaatggtttcgaaagattaaatcatgctagaccacgagctttagaatatattaaatcactagaaaaaataaacaatgctcaaaagtctgctttagaggataaagtaacgcaatcgcatgatttattagaattagaacatcttgtcaacgagggcacaaacctcaatgacattatgggtgaattagctaacgcaatcgttaataactatgctccaaccaaagcaagtataaattatattaacgccgataacctacgcaaagataactttactcaagctatcaacaatgcacgtgatgcactcaacaaaactcaaggtcagaacttagatttcaatgcaattgatacatttaaagatgatatattcaaaactaaagatgcacttaacggtattgaacgtttaacagctgcaaaatcaaaagcagaaaaactaattgatagtttaaaatttattaataaagctcaattcacacatgcaaatgatgaaattatgaatactaattctattgcacaattgtctagaatcgtgaatcaagcatttgatttaaatgatgcaatgaaatctttaagagatgaacttaataatcaagcttttcctgtccaagcaagctcaaattatataaattcagatgaagatttaaaacaacaatttgaccatgctttaagtaatgctcgaaaagtacttgcaaaagaaaatggtaaaaatttagatgaaatacaaattgagggactcaaacaagtgattgaggatactaaagatgctttaaatggtatccaacgtttatcaaaagctaaagctaaagcaattcaatacgtacaatctttatcttatatcaatgatgcacagcgtcatattgctgaaagtaatattcacaactctgatgatttatcatctttagcaaatacattatctaaagctagtgatttagataatgcaatgaaagacttacgagatactctagaaagtaattcaacttctgttccaaatagtgtgaattatattaatgctgataagaatttacaaattgaatttgatgaggcgctacaacaagcaagtgcaacaagttctaaaacttcagaaaatccagcaacgattgaagaagtattaggtcttagtcaagccatttacgatacaaaaaatgcattgaatggtgaacaacgtcttgcaactgagaagagcaaagatttaaaattaataaaaggattaaaagatttaaataaagcacaacttgaagatgtcacaaacaaggtaaattcagcaaatactttaacagagttatctcagctcactcaatcaacgttaaaattaaacgataaaatgaaattattgagagataagcttaaaaccttagtaaatcctgttaaagcaagtttaaattatagaaacgctgattataatttaaaacgtcaatttaacaaagctttaaaagaagctaaaggcgtattaaataaaaatagcggtacaaatgtcaatatcaatgacattcaacatcttttaacacaaatagataatgctaaagaccaattaaatggtgaacgacgtctaaaagaacatcaacaaaaatctgaagtatttattattaaagaattagatatacttaataatgctcaaaaagctgcaataattaatcagattagagcgtctaaagacattaaaataattaatcaaatcgttgataatgcaatagaattaaatgatgctatgcaaggtttaaaagaacatgtagctcaattaacagcaactacaaaagacaacattgaatatttaaatgctgatgaagaccttaaaatacaatatgattacgctatcaacttagcgaataatgttcttgacaaagaaaacggtacaaataaagacgctaatatcataattggaatgattcaaaacatggatgatgctagagcacttctaaatggaattgaaagacttaaagatgctcaaacaaaagcacataatgacattaaagatacgctcaaacgtcaacttgatgaaattgaacacgctaatgcaacatcaaattctaaagctcaagcaaaacaaatggtaaatgaggaagctagaaaagcgttttctaatattaatcacgcaacatcaaatgatttagttaatcaagcaaaagatgaagggcaatctgcaattgaacacatacatgcagatgaattacctaaagcaaaactagatgctaatcaaatgattgaccaaaaagttgaagatataaatcacttaattagtcaaaatccaaacttatcacatgaagaaaaaaataaactaatatctcaaattaataagttagtaaatggaattaagaatgaaattcaacaagctataaacaaacaacaaatagaaaatgctacaacaaaactagatgaagtcattgaaactactaaaaaattaattatcgccaaagcagaagctaaacaagtgataaaagagttatcacaaaagaaacgagatgcaataaataacaacactgatttaacaccttctcaaaaggcacatgctttagcagatattgataaaacagaaaaagatgcacttcaacatatcgaaaattctaattcaattgatgatatcaataacaataaagagcatgcatttaatactttagctcatatcattatttgggatactgatcagcaaccattagtttttgaactacctgaattgagccttcaaaatgctctagtaacaagtgaggtggttgttcacagagatgaaactatttcattagaatctataattggagctatgactttaactgatgaacttaaagtcaatattgtttcattaccgaacactgataaagtagctgatcacctaaccgctaaagttaaggttattttagctgatggctcatttgtcactgtaaatgttccagtcaaagttgtagaaaaagaattacaaatagctaaaaaggatgctataaaaacaattgatgttctggtaaaacaaaaaatcaaagatatagattctaataacgaattaacgtctactcaacgtgaagatgcaaaagctgaaattgaaagattgaaaaagcaagccatcgataaagtgactcattctaaatcgattaaagatattgaaacagtaaaacgaactgattttgaagaaatagatcagtttgaacctaaacgctttacgctaaataaagctaaaaaggatatcattactgatgttaatactcaaatccaaaatggtttcaaagaaattgaaacaataaaaggtttaacttctaatgaaaaaactcagtttgataaacaattaactgcactacaaaaagaatttttagaaaaagtcgagcatgctcataatttagtagaattaaatcaattacaacaagagtttaataatagatatgaacatattttaaaccaagcacatttactaggtgaaaaacatatagcagaacataaattaggatatgttgtagtaaacaaaactcagcaaatactaaataatcaatctgcttcttactttataaaacaatgggcacttgatagaattaaacaaattcaactagaaacgatgaattcaattcgtggtgcgcataccgtacaagatgtacacaaagcattgttacaaggtatagagcaaatcttgaaagtaaatgtaagtattataaatcaatctttcaacgattccttgcataactttaattatcttcattcaaaatttgatgctagattaagagaaaaggatgttgcaaaccatatcgtacaaactgaaacattcaaagaagttctaaaaggaacgggtgttgaaccaggtaaaatcaacaaagaaacacagcaaccaaaacttcataagaatgataatgatagcctattcaaacatttagttgataatttcggcaaaactgtaggtgttattacattaactggtttactttctagtttctggttagttttggctaaaagacgtaaaaaagaagaagaaaaacaatcgataaaaaattatcacaaagacattcgtctttcagatactgataaaatagatccaattgtaataactaagcgtaaaatagataaagaagaacaaattcaaaacgatgacaaacattcaattccagttgctaaacataagaaatctaaagaaaagcaattgagtgaaggagatattcattcaatccccgtcgttaaacgtaaacaaaacagtgataacaaagatacaaaacagaagaaagttacttctaaaaagaagaaaacgcctcaatcaactaaaaaagttgtaaaaaccaaaaagcgttctaaaaagtaa

SEQ ID NO: 3246 - DNA, 879 bp, Staphylococcus epidermidis
atgcctcaaagagtattgctcgttgatggaatggctttattatttagacatttttatgcaacaagcttacacaatcaatttatgtacaattctaaaggaattcctacaaacggcattcaaggttttgtaagacatatttttagcgctatcaaagaaatcgaacccactcacgtagcagtttgttgggatatggggcaagaaacattcagaaatgaaatgtatgatggttacaaacaaaatcgcccagcaccacctgatgaacttatacctcaatttgattatgttaaagaaatatcgcatcagtttggttttgtaaatgttggtaagcgtaattatgaagctgatgatattattggtagtttggcggaaacatattcacaagaacatgaagtttatatcattaccggagaccgagacttactccaatgcattaatcataatgtagaagtttggcttattaaaaaaggttttacaatatatcaacgttacacgcttgatcgttttattgatgaatatggactaaatcctcaacaattaatagatgtcaaagcttttatgggtgatactgcagatggctattctggtgtaaaagggataggtgaaaaaacagcaattaaattaattcaaaatcatggaactgtcgaaaatgtagtgaacaatttatcatcattaactcccgctcaacagaaaaaaataacaaataatttaaatcatctgcatttatcaaaatcactcgcagaaatatataccaaagttccaattgaaacagacaaactttttaaagagatgacatatgctcatacactaaatgagattttatccatttgtaatgaacatgaactatacgtttcaagtaaatatattgcaactcacctctaa

SEQ ID NO: 3247 - DNA, 3438 bp, Staphylococcus epidermidis
atggcaataaatgaacaattagatactttatataaattaaaaaaagaattggaaaaatctaataacagtcctttaattaataccattaatcaagtaattaaaaaagtttatttaaatcaatacaccgcaacatttgtaggtcatttttcagcaggaaaatcaacgttaattaatttgttattagaacaagatatacttccaagttctccaatacccacaacgagcaacacagctatcgtttcagtagccaaggaagacgaaatcattgccaacctaacgcaacaacaatatataaaattaaaatcgtacaacgatgttaaacaaatgaatcgtcaaaatgtcgatgtagaatcgatagaaattaattttccatcaaacaaatttaatctagggtttacatttcaagatacacccggtgttgactctaacgttgcaacacatcagtcgagcacagagcaatttatgtataccagtaacttattgttttacacagtggactataatcatgtccaatcggcgttgaacttcaaatttatgaaacgtattaatgaagctggtataccaatcgtttttgtgattaatcagattgataaacataatgaagaagaaattacatttgaaacttttaaatcaagagtcgaaaaatcaatcaaagactgggatatcaaacttcaagatacttattacgtttcaaaatttgatcatccacagaatgaaattgacaaactttcaaattttctagtatttatggatcaacatcgtgaatcaacaaaagactatgttaatagaaccattcaattcattaccgatgcacaatacacatacattcaaaatgaaatgcaatctattcttgacacccttcaaattaatgaagatcaattcgaggaggcatatattcaatttcaacaaaatcaagaagtcagcgcagaagcacaattgctcaatgactctaatcaattatttaattatttaaaacagaagcgcaaagatatattagataatgcttatatcatgacgtacgatatgcgtgagtctttacggaattatttagaaagcatggcaactgattttaaagtgaatggactttttaataaaaagaagaaaaaagaagaagaacaaatcaaacgacttaatgaggcgaccacccaattgcaagagaaagttaatcaacaaatacgacaaccacttcgtgaggatatgtcatttttaactagattcataaataaacatgctgtgaatgaaaaaatattaaatcaagattatgacgtcgttccgtcacttatatcagacctatatcaaactcaaacgagcattagcaacacatatgttttaacattttcagatgaagttataaaagctttgaataaaaagatagaaaatgagtcaacaccactatttgaagaagctgtcaatcatgtacaagttaatgaattatcgagtgatgaaaatgaagataggtataaatatgatagatacattgaactcaactcattaaaggattcgcttacatcccacaactacaaacattactatatccatttagatgattctttagataaattaattggaagaacagagactcattttgaacttaaacaagaaaattcgactgcttatcatcgtaatcatgagtcacaacatcgtaacgagtttgttacatcaaatcaagatattaagcgtgcattagatatcgttaaagatgtaccattatttgatcgtactaaacaagatatccacgataccattctgagactcgataaccaaataacaaaagttggtgtttttggtacatttagcgcaggtaaaagcagcttaatcaacgctctactaggtgaaaactatttagttagttctcctaatccaacaacagcggcaacgacggaattatcatatggtaaagagagtcaaatcacattaaaatcgaaagaacaattactagaggaagttaatcatgtactagaattttatgaaatatcgtttaacacattagacgactttattgagagtgatttagataagttaaaattgaaactagaaaagaaccaacttgcatttattagtgcaattgagaaacattatgaaatgtacacatctatgttagaacattcacttatacacacagtatcgcttgaagaaattaaaaaatggagtgccgaggatgagtatgctactttcgtgaaaactgtacaccttaagctacctttagattggctcaagggtaaaatcattattgattcactcggtttacattccaataatcaaagacacacgaatgaaactgaacaaattctcacttcttctgaccttattttgtatgtaacttacttcaatcattcatttacagataacgacaaagcctttatcgaacatatgaaagatatgaatcaattaaatgaaaatcaagcttttaaaatgataattaatgctgttgacctagctgaagataaacaggatatacaagctgttgaggattatgttgcagatgcactggggcaagttaacatacactctgaaatatatagtgtttcaagtcgtcaaagtttaaatgggaataacattggcataaatgaattaagagaaagtatacaatactttgcaaaggttgaatccagaacaattttagagcaacaaatgacttatcaattgcaacaaatgaatacgtcctttaaaaacatgattaaagattttcatgatgacaacgcaaaattgtcagcgagacaacataaattaaatcactataaaaatcaaacccggttaaatcaagagttgattgatacaactgcacaacgtacttttaatgaagtagaagaacaagtatatcatctaaatgaacggttaaaactacaacttttagatgaggttaaatctgtatttaatagtcagatgacacaaaataacgacttcaatgaggaaaagaaaatttcaactaaaatatatttagatcaaattcatcaacgcttattcttagaacaatcacttattacagaaaggattaaaaaatattttaattcacaactagaagaacaaatcataccagtcatgaaaaagttaaatcagattcatgttattataaatgcaaaatttaatgtggagccatcaatcgttgatacgccattacttcaaattgaacttaattcaatgttgcaatcactaccaaaacagttaactaaacgtaaaatagttaatccaaagtcacaaaaggatattcaagaacacatagctaatcaaactcttgaattattacaagatgatttgaactcattgcgtcgacaattaaatgattatatccacgagatgactcaacttgccgaacatcaatttcaaatgttggagacatccatccaacaacaaattgatgagttactttcattcactatcgatgatacattaatacaacaactagaattgaaaaccacacaattagataatattttatag

SEQ ID NO: 3248 - DNA, 639 bp, Staphylococcus epidermidis
atgaagactgttttgattgtaggcgcaaatggtagagtatctatcgaagcgacaaaaattttcttagagaactcaagatttaatgttgatttatttttgagaaatgcgcatcgtatacctgattacgcctctaatagaattaaagtttatgagggagacgctaaaaatattgaggatttggaaagtgctttaaacaatgttgatgttgttttcgcaagtttatcgggatcacttgataaacaagctgaaactatcgtaaaagctatggataacaaaaatgttaagagactgatttttgtagcagcacctggtatttatgatgaactaccagaaccattcaatcaatggaataaagaacaatttggcgaaaaattaaatcgctaccgcaaagcatctgatattatagaaaattcagatttagattacacaataatacgtccaggctggcttacagataaaaatgaaaatgtgtatgaaatcacagcaaagaacgaaacatttaaaggtactgaagtatcacgtaaaagtgtagcttctttagcagtacaaattgcaaaaaacccagaactacactctaaagaaaatattggtgtgaataaacctaatacagaaggtaataaacctgcttggttcaattag

SEQ ID NO: 3249 - DNA, 1137 bp, Staphylococcus epidermidis
atgtttcaattattagcagtatgtccaatgggattagaagcagttgtagctaaagaaatacaagaattaggttacgatacacaagtagaaaacggtcgtatcttttttgaaggtgatgaaagtgctattgttagatgtaacttatggttacgtaccgcagaccgaataaaaattgtaatgggtcgattcaatgctactactttcgacgaattatttgagcaaacaaagtcattaccatgggagacggtgattgacaaagaaggtaatttccctgttcaagggcggagtgtaaaatcaacattatacagtgtacccgactgccaagcaattactaaaaaagctatagtagaacgacttaagcatgctcatcaagaaaaaggatggctaagtgaaacaggagccaaatatcctgtagaagtagcaatattaaaagataatgtattattaactattgatactgctggttctggtctcaacaagcgaggttatcgcattgctcaaggtgaagcacctattaaagaaacattggcagcaagccttattcgtttagcaaattggaatggcaacacacctttaattgatcctttctgtggttcaggcaccattgctattgaagcatgtcttattgctcaaaatattgctcctggttttaatagagattttgtatctgaacaatggaatatgatgccacctaatatttatgacaaatttcgagatgaagctgatcaattggctgactatgataaagatatacaagtatatgcttctgatattgatccagaaatgattgaaattgcaaaacgtaatgcagaagaagttggtctcggagatattatacagttcaatgttaaagatgtgaatactttgtctattgataccgacatgcctgtagcgcttgttggcaatccaccgtatggtgaaagaattggcgatcgtgaagaagttgaagaaatgtatcgttatataggtacacttttgaaacaacatcctcatttatcggcctacatattaacaagtaacaaagaatttgaatacttagttaatcgaaaagcgactaaaagacgtaagttgttcaacggttatattgaatgtacgtactatcagtattggggtaaaaaacaaagtagtaaaaattaa

SEQ ID NO: 3250 - DNA, 339 bp, Staphylococcus epidermidis
atgtcagatgtttcattaaaattatcagcgaaagatatttatgaaaaagatttcgaaaaaactatggcaagaggctatagaagagaagaagtagacgcttttttagatgatatcattacagattatcaaaaaatggcagatatgaacaatgaagtagtaaagctttctgaagaaaatcacaaattaaaaaaagaacttgaggaattaagattacgtgttgctacatcaagaccacaagacaataaaaacttttcttcaaataactcaagcagtgcttcaaataatgtagatattttaaaacgtatttcaaaccttgaaaaagcagtattcggcaaataa

SEQ ID NO: 3251 - DNA, 567 bp, Staphylococcus epidermidis
atggttaaaactgtgtatattactggctataaatcttttgaactcaatatctataaagatgatgcgccagaagtatattatttaaagcaatttatagctcataaattaaaacatcttctagatgaaggtttagagtgggtattgatacaaggacaaatgggtatagaattatggtctgctgaagtagtgattgaattaaaaaaagactttccagatattaaactaggtataattacgccatttctaggtcatacacaacgatggaatgataagaatcaagctaagtatacaaatattatacaacaagccgattttactgagagcattcatcacacggagtatatgggagcctatcaatttaaacaagcggatcaattcatgcttgatcataccgattacactattttaatttatgatgatgaacaagaggcaagccctaaatactttaaggctatgttagttgaatttatggaaaaaacaaactatacttgtgatattgtgacgtttgatgaactcactgacttcatcaacgacttgcagtggtctcaagatcaaagtttcgaatga

SEQ ID NO: 3252 - DNA, 333 bp, Staphylococcus epidermidis
atgtaccagattattaaacaattgttagaggacattgatgaaatgaattatagatatcaacatgtaaaaattaatggcggttcattcgatttttataaagatgttgaaccttatgtcaaaaatattgataatcatttagaagcactcaactgttactcaaaaagcattatagaaacacaatatatgacccaacaaaagttagatattttgatattaaatatacaaaaactttctatcgattgtcatttccctagaacgagccgtaaattatttgtagaaaaacttaaaagtgcccagtacgatttaaaaaatattttatcgaattatgtttag

SEQ ID NO: 3253 - DNA, 627 bp, Staphylococcus epidermidis
atgaattatccaaatggtaaaccatactctaaaaataagcctttggacggacgtaagaattcgccattttcaagtaatattgaatatggtggacgaggtatgacacttgagaaagatattgaacaatctaatactttctatcttaaaagtggcatagcagttattcataaaaagccaactccggttcaaatagttaatgttcactatccgaaacgtagtaaagctgtgataaatgaggcttattttcgcactccttcaacaactgattataatggtgtctataatggatattacattgattttgaagctaaagaaactaagaacaaaacttcatttccactcaataatattcatgcacatcaagtagaacatatgaaaaatacatatcatcaaaaaggaattgtctttttaatgatacgttttaaatcgcttgatgaagtgtatcttttaccctattcaaaatttgaaaaatattggcaaagatacattaataatattaaaaagtcgataactgttgaagaaattcggaaaaatggttaccatattccttatcaatatcaaccaagattgaattacctcaaggcagttgataagttgatattagatgaaagtgaggaccgcgtatga

SEQ ID NO: 3254 - DNA, 2235 bp, Staphylococcus epidermidis
atgacggaaaataaagggtcttcccaacctaaaaagaacaataataatgggaagtccaatggaaaaaagaataggaatgtaaagagaacgattattaagataataggttttatgattatagcctttttcgttctattgctactcggtatcttgttgtttgcttattatgcatggaaagctccagcatttagcgaatcaaaattagatgatccaattccagcaaagatttacgataaaaacggagaacttgtaaaaacacttgataacggacagcgacatgaacatgtgaatatcaaagatgttcctaaagacatgaaaaatgctgttttagctactgaagataaccgtttctatcaacatggtgctttagattacaaacgtttatttggtgccattggtaagaacttaacaggtggatttggttcgcaaggtgcgtctacacttacacaacaagttgtaaaagactcattcttgacacaacaaaaatctatcggtcgtaaagcacaagaagcttatctttcttatagattagaacaagagtacagcaaagatgaaatattccaagtctatatgaataaaatttattattcggatggcgttactggaattaaggctgccgctaaatattacttcaacaaagatatgaaggatttaaatttagctgaagaagcttatctagctggtttacctcaagttcctaacctttataatatttacaacaatcctaaggaagctaataatcgtaaagatactgtgctttatcttatgcataaacataaccgtattaatgataaacaatatgaggatgctaagaagattgatcttaaagctaacttagttgaacgtactaaaaaagaacgtcaagtcactggaaatgaaaaaaatcctgagtatgattcttacgttaatttcgttcaatctgaattaatgaataacaagtactttaaggataaaaatttaggttcagttcttcaaagtggtataaaaatttatactaatatggataaagatgttcaacaaacgttacaagatcgaattaacaatggttctttctacaagaatgaagaccaacaagttggtgcaacaattctagatagtaaaactggtggattagttgcgatctcaggtggacgtaattataaaaatgttgttgaaagaaaccaagcaactgaccctcaccctaccggttcatcattaaaacctttcttagcttatggacctgcaatagaaaatatgaaatggtcaacaaatcatgcggttcaagacgaatcatcatactgggtagatggttctcaattcaagaactatgatactaagagtcacggaacagtttctatctatgatgcattgcgtcaaagtttcaatattccagctttaaaaacttggcaacaagttaaaagtcaagctggtaatgatgcacctcagaaatttgcatctaaattaggattggattatagtggtaaaattggaccttcagaagtattaggtggatcttcatcagaattctcacctactcaattagcttctgcttttgcagcaatagcaaatggtggtacttataataacgcgcattcaatacaaaaagttgttactcatgaaggagatacaattgagtatgaacatactagtcataaagctatgaaagactatacatcatatatgttagctgaaattcttaaaggtacatttaaagcatatggttcggcttatggacatggtgtgtcaggcgtaaacatgggtgccaaaactggtactggtacgtatggacaagaaatatacgaaaagtataatttacctgataatgctgccaaagatatttggattaatggtttcagtccagaatatactatgtcggtatggatgggcttcaataaggttaaacaatacggaacaaattcatttatcggtcattcagaacaagagtatccacaatacttgtatgaagatgtgatgtctagtatctcatctaaagatggtgaagatttcaaaaagcctaatgatgtacaaggaagttcacctgacagtctatctgtatcaggtcattctgataataatactactaaccgtagtgttcatggaagtagtgatacatcttcttcatcaaatggtggctctaactcagcatcaagtggaaacaactcgaatagttcgaatggtaccagtcaaggtaactcaggcaatgcatttacacgtctgttcaatttaaactctatattcgattataaagtttcataa

SEQ ID NO: 3255 - DNA, 333 bp, Staphylococcus epidermidis
atgattgaaaaacaggatttcaatcatatagaggaccaacttgatcaactagcaagtaataaacaactcaaaacaccagaagctagggaacttttagatagttatttcgatttaattattaattattttaaacaaataaataacatagatgaaattcattttaatcaactcgatacatatccagtagttccaatgaattttgatgaacgctatcattatatggttgcacgtaaacaccattttatgggctatcgtcaaatgaaaacattgaaatcagaattaataaaaatgaatgcatcttatctaattagaaagcaacgtcaacaaaaataa

SEQ ID NO: 3256 - DNA, 660 bp, Staphylococcus epidermidis
atgataagtaagaaaaaagcattacaaatgattgacgttatagcagatatgtttcctaatgcagaatgcgaattaaaccatagaaatgcattcgatcttacaatagctgtattattatcagcacagtgtactgataatctagtcaatcgtgtcactcaatcattatttagaaaatatcgaacacctgaagattatttaaatgtgagtgatgaagaattacaaaatgatatacgctctattggattatatcgcaataaagccaaaaatataaaaaaattatgccactctttaattgaacaatttaatggtcaaatcccacaaacacataaagaattagagagtctagctggagtggggcgtaaaacagcaaatgttgtaatgagtgtcgcatttggagaaccttctttagctgtcgatactcatgttgagagagtttctaaacgtttgggaattaatcgttggaaagatagtgtaagacaagtagaagatcgattatgtgatattatcccaagagatagatggaataaaagccatcatcaattaatattttttgggagatatcattgtcttgctagaaaacctaaatgtgagatatgtccgctgttatatgattgtagagaaggacaaaaacgacataaagcaaagataaaggaggcgtga

SEQ ID NO: 3257 - DNA, 687 bp, Staphylococcus epidermidis
atggatctaattcaattaaaaacaagacctgttgttataagacgagaattgtttgatcattattcagagttaggtttggatgaacaagatttagttattttgataaaacttttatatgcatctgaaacttctaataagcaaccttctattgaatttcttcaaaaaggatcaactatggaacctcgtcaaattacttccgtaatacaaaacttaattcaaagagaattattagaactcaatgttagtaaagacgaagaaggtaaattcactgaatacatgaatttggatcccttctatcacaaattaaatcaattattaaaacatcaatacttaaaacatgaggaacaagataaaaaagagcagtttaagcaattgtttcagatagttgagcaatcgttcggcagaccactatcgccgtatgaaattgaaacattaaatcagtggattgatgtcgatcaccatgacttatcagttatacaagccgctcttgatgaggcacttagccaaaataaacttagttttaaatatattgatcgtattttattaaattggaaaaagaataatgtgaaaacagttgacgattcaaagaaaataagagaacagtttaacaaaccaaaaatgaaacatgttgttaaaaaggtgcctaaatttgactggttgaatggagagaatcctaatgataagtaa

SEQ ID NO: 3258 - DNA, 1293 bp, Staphylococcus epidermidis
atgaaaactacgattaaacaagcgaaaaaacatcttaaccaagaagtaacaattggtgcttggttaactaataaacgttcaagtggtaaaatagcgtttttacaattacgcgatggtacaggatttatgcaaggagtagtagtaaaatctgaagtagatgaagaaacatttcaactagcaaaagatataactcaagaatcatctttatacatcacaggaacgattacagaagataatcgttctgatttaggctacgaaatgcaagttaaatcaatcgaaattgtacatgaagcacacgattatcctattacaccaaagaatcatggaacagaatttttaatggatcatcgtcacttatggttacgttcaaaaaaacaacatgctgtcatgaaaataagaaatgaaattatccgtgcaacatatgagtttttcaatgaaaatggcttcactaaaattgatccacctattttaacagcaagtgcaccagagggaacaagtgagttattccatacaaaatatttcgatgaagatgcattcttatcacaaagtgggcagttgtatatggaagcagccgcaatggctcacggacgtgttttttcatttggcccaacttttcgtgcagaaaaatctaaaacacgccgtcatttaattgaattctggatgattgaaccagaaatggcctttacaaatcatgcagaaagcttagaaatacaagaacagtatgtgtctcacattgttcaatctgttttaaatcattgccaattagaactcaaagctttagatagagatacaactaaactagaaaaagttgctacacctttccctagaatttcttatgatgatgctatcgaattcttgaaaaaagagggattcgatgatattgaatggggtgaagactttggtgcacctcatgaaacagccatcgctaatcactatgatttaccagtattcattacaaattatccaactaaaattaaaccattctatatgcaaccaaatccagacaatgaagatacagtattatgtgctgatttaattgcgcctgaaggttacggtgaaattattggtggttccgaacgtattaatgatttagaattattagaacaacgcattaatgagcacgaattggatgaggaaagttatagctattatttagatttacgtcgctatggtagcgtaccacatagtggttttggcttaggcttagagcgaacagtagcttggatttctggagttgaacatgttcgtgaaacatccccattcccacgtttacttaatcgcttatatccataa

SEQ ID NO: 3259 - DNA, 2709 bp, Staphylococcus epidermidis
atgggaatagcaacatttgcagttgttgatttagaaacaactggaaatcaactggattatgatgaaatcattcaaattggtattacgtttgtgcgtcagaatcaagtaattgatacataccattcaatgatacgtaccgatttagaaattccaccgtttatccaagccttaacttctatagaagaagaaatgttagtacaggcaccttattttaatgaggtcgcagatgacatttatcaacttatcaaagactgtgtttttgttgcacataatatctcatttgatcttaattttataaaaaaagcttttgaaaaatgtaatattcaatttaaacctaaaagagtaatggatactttagaattgtttaaaatcgcattccctacagacaaaagctaccagttaagtgcattggctgaatctcatcatataccattaaataatgcacatagagcagatgaagatgcaacaacaactgctaaattgatgattaaagcttttgagaagttcgagcaattgcatttagatacacaaaaacaactgtactatttaagtaaaaatctcaagtatgatctttatcatattttgtttgaaatggttagaaattatcaaactaaaccgcctaacaaccaatttgaacaatttgaacaaattatttaccgtaaacaaattgatttaaaaaaaccggctgtcaattttgatggtaccttaaaagatttatataaaaatgtcactcaatcattaaatcttacatatcggccacaacagttatacctagccgaaattatacttgatcagttgatgcatagtgataaggcaatgattgaagctcctttgggtagtggaaagtctcttgcttacctgcttgcagcaacaatgtataatattgagaccggtcgtcatgtaatgatttcaacaaatacaaaattattacaaagtcagctattagagaaagacataccattactcaatgatgttttagattttaaaattaacgcgtcattaatcaaaagtaaaaatgattatatatctcttggtcttatcagccaaattcttaaagacgatacaaataattatgaagtaagtattcttaaaatgcagttacttatttggataactgaaacaaatactggggacatacaggaattaaatcttaaaggtggacaaaaaatgtatgttgaccaaaaaattgaaacatacgttccagttcgtcatgatatccattattataattatataaaaagaaatgctcaaaacatacaaattggtatcactaatcatgcgcacttaattcattcagacagtgaaaacactatatatcaactatttgatgattgcatcatcgatgaagcacatagattgcctgactatgcgctaaatcaagttactaatgatttaaattattcagatgttaaatatcaattaggacttattggcaaaaatgaaaatgaaaaactacttaaagcagtagacaaacttgagcaacaacgtattttagagaaactagatattgcacctatagacgtttttggactgaaaataaatatcaatgagttacatgatttaaatgagcaactattcactacaatttataatattattcaaacatcagacgtttatgatgatgacattcataagtatcattacgtttatgactttgaaacgggtgagattttaaaagatttacgtgcaatcatagataaattaaataaaacgatagaaatttttaacggaatgaatcacaaaacaatcaagtctgtacggaaacaattattatacttacatgacaaatttaaacttatcgaacaaagtataaaagatcatcatacaagctttatttcaattaaaaatttagcacaaaaatcaacaatccgactcttagtcaaggattatgatgttaaagatatcttgacgaaacaagtactcgaaaaatttaagtctcttacatttatatctggcacattaactttcaatcactcatttaaagcatttcaaaattggtttaatgaagatatagactttaatacatttgaaatttcaacacctttaacatcatccaaccatacaaatgtttttgtgcccaatgatgttgaaacgtacaattataaaaatttagacgattatgtagcttcaattgtagactatattgttgaatacatcacagtgacacagtcgaaatgtcttgtcttatttacaagctataaaatgatgcatatggttcaagatttgttaaatgaattacctgagttagaagattatgtcattttaacccaacaacaaaaccaaaattataaaattgttcaacaatttaataactttgataaatctatacttcttggaacatcaacattttttgaaggttttgattttcaagccaatggccttaaatgtgtaatgatagctaaattaccatttatgaataaacataatattaaatactggcttatggattctgaattcacatcaacttttaaagattatgtattacctgatgctgtaacaaggtttagacaaggtcttggacgtcttattcgacacgaagacgacaaaggacttattgtgtcatttgatgatcgactagtaaatagcacatataaaagcttttttgctcaatcactagaacattttaaacaacgaaaaggtaatattaaacagtttaataaattactgaatcaaatacagaggtctatcgataatgagagtaaaagctaa

SEQ ID NO: 3260 - DNA, 972 bp, Staphylococcus epidermidis
atgtcaaaatatagtcaagacgtcattagaatgttgtatgaacatcaatcaaattacatatcagggcaatatattgccgatcaactcaatatttctagagcaggtgtcaaaaaagttattgacctattaaaagaagatggttgtgatatcaagtcaataaaccacaaaggccatcaactgaattcattacctgatcagtggtatagcggtattgtaaaacctattctcgatgaacttggcctttttaatcatctagaagtttatcacactgtagattcaacacaattaaaagcaaagagagcactcgttggaaataaagatacttttttaattttgagcgatgaacaaaccgaaggtagaggtagattcaatcgtaattgggaatcatctaaaggaaaaggcttatggatgtcactagtgctaagacctgacgtacctttttctatgatacctaaatttaatttatttattgctttaggtattagagatgctattcaacaattttcgaacgaacgtgtaacaattaaatggccaaatgatatatatattggtaataaaaaaatttgcggatttttaactgaaatggttgcaaattatgatgaaatagaagcaataatttgtggtataggtataaatatgaatcatgttgaaagtgattttgacgaggatattaaagataaagcaacaagtatacgcatgcattccgatagtataattaatagatatacttttttaactgcactattaactcaaattatacatcgctttgatcaatttttacatcaaacttttgagtcaattcgagaagaatatattcacgctacaaatatatggcatcgtcaacttaaattcactgaaaataatcatcaatttttgggggaagccatagatattgattcagatggattccttattgttaaagatgaaaaaggtcaattacatcgacttatgagtgcagatatagatttataa

SEQ ID NO: 3261 - DNA, 1203 bp, Staphylococcus epidermidis
atgagtcatgagatatttgaacaagcaaaacctattttaaaaaagattcaaaataaaggttttaaggcttatttcgttggcggatcagtacgtgattacatcatgcaacgacctatacatgatgttgatattaccaccagtgcaacgcctgacgaaatagaatctatattcgataaaaccataccagtggggaaagaacacggtacgatcaacgtggtctttcaaaatgacaattatgaaattactacattcagatctgaagatgaatacatcgatcatcgtaggccaagtgaagtgtattttgtaagagacttatatcaagatgttcaacgtagagattttacaatgaatgctatagcaatggatttaaattaccggttgtatgattattttaatggtcaacaagatataaacaatcgagtaattcgtactgttggtgtaccaagtgaaaggttttcagaagacgcgcttcgtatcattagaggattacgttttcaatcacaacttaattttcaaattgattcagacacattacatgcaatgtcttctcagatttcagatatacaatatttatccgttgaacgtgtagtagtagagcttaaaaaacttatcatgggaaacaatgttaaacaaagttttgaagtcatgcaaaacatgaaagcatttaattatataccttttttcaaatcatttgagatgtctcatcttcatatagatgagcccatcacatttgaactttggattgcaatcttaatcgtccaacaaccaaaagatatacaattaagcaccttgaaaatcagcaatcaagaaaaagcaactatcaaaaaatgggttacactcatccaaacattgcctaagatacagtcaaagcaatctttaataacattagtatatgattacaatttaaatgatattgaaatcctattatcattacatcatttgcttaaacaaaatgggcttacaacagccaatcatttaatcattaatgaaataagtattcgcgaagcaaatgaaaaattacctatccattgcagaaaagaattggcaataaatggtaaagatatactcaatcatacgaataaaaattcaggaccatggctaaaagatacacttagagaaatagaaatcgcagtcatatcaaatcaaatagtcaacactaaagaagaaatattagaatgggtggatgcacatgtcaaaatatag

SEQ ID NO: 3262 - DNA, 1143 bp, Staphylococcus epidermidis
atgaaaatcggtataacgtgttacccgtccatgggtggttctggcattattgctacagaactcggtattaaaatggcagaacgtggccatgaagttcactttattacctcaaacataccctttagaatacgcaaacctttacctaacatgacgttccaccaagttgaagtcaatcaatatgccgtattccaatatccaccatacgatattacattaagtacaaaaatttctgacgttatacaagaatatgatttagacatattgcatatgcattatgctgtacctcacgctgtatgtggtatattagcgaaacaaatgtcaggtaaaaacgtcaaaattatgacaacactacatggcactgatataactgtgttaggttatgaccatactttacaaaacgcgataaaatttggcatagaacaaagtgatattgtaacaagtgttagccattctctagcacagcaaacttatgaaattatcaatactaaaaaggaaatcatccctatatataattttgtaagggaaaatgaattcccaactcggcataatgaagaattaaaagattgttatggtatttcacctgaagaaaaggtattgatacatgtttctaatttcagaaaagtaaaacgtattgatacagtgattgagacatttgcaaaagttcatgagagtataccatccaagttgatacttttaggagatggtccagaattaatcgatatgcgacataaagcacgagaacttgatgttgaaacacacgtactctttttaggcaaacaaaatgacgtaagcgcattctaccaactatctgatttagtactactcttaagtgagaaagaaagttttggattaactctcttagaagcaatgaaaacaggcgtcttacctatagggagtcatgcaggtggtattaaagaggtcatcagacatgaagaaactggatttatagtagatataggggatagtacacaagctgcaaaatatgctattaaacttttatcaaatccagagttatatcaaaaaatgcaatcacaaatgctgaaagatattgaagcaagatttagttcagatttaattactgaccaatatgaaaactattatcgaaagatgctagaacaaggtgagaacaacaatgagtcatga

SEQ ID NO: 3263 - DNA, 318 bp, Staphylococcus epidermidis
atgaaatctatggagcaaatgcaacaagaagttgatgactatatcagtcagtttaaagctggttatttttctccacttgctaatctagcaagaatgacagaagaagttggagaattagcacgcgaaattaaccatcattttggagagaaaaaaaagaaagatacagaagaagataatacaattaaagctgaattgggagacaatttatttgttttactgtgtattgcaaactctctaaacatagatatgacagaaagctttaatgacacgatgaataagtttaatacaagagataaaaatcgctttgaaagaaaataa

SEQ ID NO: 3264 - DNA, 696 bp, Staphylococcus epidermidis
atgtctttaatatcaatgattatatatttcgtaatattaatggtcattccaatgtgggctcaacacaaagttaaatctaattatgaaaaatactcacaagtgagatccacaagcggtaaaactggtcgtgaagttgctgaagaaattttacatgctaatggcatttacgatgttgacgtcgttaaaggcgaaggtttcttaactgatcactatgacccaaataaaaaagttgtttgtttatctcctgcaaactacgatagaccatcagttgctggtactgcaattgcagcccatgaagtaggacatgcaattcaacatcagcaaggatacgcaccattaagatttagaacagcattagtaccattagctaatattggtagttctttaagctacattattattatggtaggtattgttttaacagctctcggtagtgtctttggctctacagttctatgggttggtgctggtttaatgtcacttgcagttttattctctatcgtgacattacctgttgagtttaacgctagttcaagagcgatgaaacaaataacagctttaaatatcgttaatgagaaagaatacaaacacgcgaaaaaagttttatctgcagcagcaatgacatatgtggcatctactgcagttgcgttagctgaacttgctcgtattatattaattgcaagatcaagtgattaa

SEQ ID NO: 3265 - DNA, 594 bp, Staphylococcus epidermidis
atgtatcaatggctttgggaaacttcactttatcaaaaatggttgatttcttttattttaatttgcaatatatttggtacgatatacggttatcattggtatagtagtcaattagctaacacaccaaattattttaaattatttgttccagatagtcccactgctacattatttttatgtttatcattattattcatactatttaataagcgttatgccctgattgacgctttagcttttataactctatttaaatatggtagttgggctgtaattatgaatattttgatgtttataaaaatgaatgatattgccataaacggacttatgttgctcatttctcacgcaattatgatattagaagctatctatttttatcctcgttttaaaatatctaaattggctggattgatgagtttcatatgggtgacgatcaatgacgtaatagattacatatacggacaatatccctactatgattttatcgccaaacatttaattgaagtaggggtattggcttatagtctcactatcatatcgtatattttatttttaaaattacaaaagtggttgaaagttaaaacatttgattaa

SEQ ID NO: 3266 - DNA, 564 bp, Staphylococcus epidermidis
atgaatgattctcttattcgtatcaaacaaaattttatagaatatattctgtttaactatcgttttaaatcaagaatcactgtgtgggtattaaattatttaaaggcaaatcaagataagctaaataatgtacatttcgtaaatagtaaaatcaataatcattataccttagaaattgcagaagtggatgcaactgcttctgcaattcaattgagcaaggataataaatcttatattaatacaaatcaaatttttaattatattgcaaatcatacattaagattagatatacaaatacattttgctaattgtcacatccgagaatctcgcttagatgatttaatattaatgcagctcatacattcacctagttattcatcttatgtacaagacttatattcaatttctatggataaaagaaaacaaacatttattattcaaaccttacaaaacaatattgatttaagtttacaaatgaatgaacctgattatttttatcaactcacacaaatacttaatgtattaaaatcaaaagatattcaatcaactttacatgaaaggtag

SEQ ID NO: 3267 - DNA, 1245 bp, Staphylococcus epidermidis
atggaagatatctacaaacttatagacgatatcaatctacaaaaaatagaaaacttagattctcgagtaaatgaggcattgagttcaaacaatgatgatgcattatttatacttggtgaaactttatataatttcggtcttacacctcaagggttagaagtttttagaacgttgtatcataaatacccagatgaaagtgaattactcatttactttatcgaaggtctcatgtctgaaaaccaaactgacgaagcacttgaatatttagcacaagtagaaccatctaccgaaaagttgatgctagaagccgatttataccaacaaataaatatgttagaagtagcaattgacaaattgcaagaagcattagatcttgaacctaatgatccaattattcacttcgccttagcagagctattatactacgatgggcaatacttacgagctacaagagagtatgaaacagtattagaaactggtgaatatgaagttaatggagtaaatattttttcgcgaatggcagattgtagtttacaaagtggtaattattcagatgctattagcttatttgatgaaattaatgaagaagagatgaattctgaagattactttaaaaaatcaattgcttatgaaaaaaacgatttaactcaagaagcaattaaaattatgcaaacattactttcaaaagatcctgattttatacaaggatatttttatcttcaatctctatttgaaaatgaaaaaaattatcctgatgctatagaaactggtaaggaaggattacgtttaagtcaattttacaaagaattaatggtttctacaggtagcttagaaattgagcatggagatgcaaatgaaggtgtagaattgctaaaacaagccttagaagtcgataatgcatatcatgaaccattgttgattttaagtgatttatatcgtaatgaagaagactatgaatcaattatacaattgttgacttatgtagatgaagaagatttagaccctattttcatgtggcatttagcatatgcatacggtcaagaagaacgagataaagaagcgcaacatttctttgaattagcatatccaacattacaaacccaagttgaatttttaagcgattattatttctatttattagaaattggacaaaaagaaaaagcaattttgattttaaatcaattattagaaattgatccaagcaatgaaaattggcatgacgagtcaatgagattgcaaatataa

SEQ ID NO: 3268 - DNA, 1302 bp, Staphylococcus epidermidis
atgaataacagtgaaataattaatattaatggaccactcaaaggtgaaatagaagtacccggtgataaatcgatgacacaccgcgctattatgttagcttcattagctaaaggcatatcaaccatttatgaacccttaatgggcgaagattgtcgacgtactatggatatctttaaactattaggtgtaacaattgaagagcaggacaattctatcataatcaattcaccaggatatcaaaatttcataacgccacaccaagtgctctatactggtaattctggtactactacacggttacttgcaggtcttttaagcggattaggcattgaaagtgtgttatctggtgatgtatctataggcaaaagacccatggatagagtgatgaaacctctgttaaaaatgaatgctaatatatctggaattgataaaaattacacaccacttataattaagccttcaactattaaaggtataaattatcaaatggaagttgcaagtgcacaagttaaaagtgctattttacttgctagcctattttcaaaagaagccacgacacttacagaatttgatgtaagtagaaatcatacagaaacattgtttgcacactttaacattcctatatcaattcaaggtaaaacaatccaaaccataccttatgcaattgaacatatacagcctagagattttcatgttccaggagatatctcatctgctgcatttttcatagtcgcagccctaattacgcccggtagtgacattacaattcataatgttggcattaatcccactcgttcaggtatcatagatatcgttaaacaaatgggaggaaacattgaattaagtaatgtaagcaagggtgcagaaccaactgcatcaatacatgtaaaatatacaccgaacttgaatgctgttacaattaaaggcgacttagttccaagggctatcgatgaattaccagttattgcactactttgcacacaagcttcaaattcttgtattatcaaaaacgcggaagaattaaaagtgaaggaaacaaatcgtatagatactactgcagacatgctaaatttacttggttttaatttacaacccacacatgatggacttattatacatccatcagagtttagatcaaatgcaactgtagatagtcaaacagatcatcgtataggaatgatgttagctgtagcttcactacttagttcagaaccactcaaaatagagcaatttgacgctgttaatgtttccttcccaggttttttacctaaactaaagcttttagaaaatgagggaaaataa

SEQ ID NO: 3269 - DNA, 1065 bp, Staphylococcus epidermidis
atggaacttaaaacatcatatgcaagtgataattatcccatcatcgttaaacatcacgcaattaactctttagaaagatacattaaaaatgaagaacaacgatttttcattatagataagcaagtctataatttatttgtagataaacttgaagctttggctcaaaaatttgatgctaaatgtatcgtaatcccttctggggaaacgtcaaaatcattcgaacattatcatcgtactattgaatatttactaagccatcaattaacacgtcaaacatgtattgttgccattggtggtggtgcaacaggagatttcgcagggtttattgctgcaactttacttagaggagtatcatttgttcaagtaccgacaactattttagcccacgattcaagtgtaggtggtaaagttggaattaattctgagcatggtaaaaatttaattggtgctttttatcgacccaaagctgtcatttatgatttagattttttagaaactctaccatattctgaaatactaagtggctatgctgaggtctataaacacgctttattaaacggtgagaaatcaacaaaaaatatcgaatctaattttacctcaaataaagttttacaagcgttaaaaaatctagattattatttatttgagggtataaaaacaaaactaaatattgttgttgaagatgaaaaagaaaaaggtaaaagaaagtttcttaatcttggtcatacattcggtcatgcaattgaatatgagcataaaatacctcatggtcatgcagttatgattggtattctttatcaatttattgttgcgaaccatttgttcgagacaaattataacattcaacactatattaattatatgaaaaaacttaaatatccattatctatcatcaaacaacttcattttgaagatacttaccattttatgcttctagataaaaaaaatgattacaatggtattcaaatggtcttacttaaaaatttagggaaaccagttgtcactcatgttgataaggatacacttttatcagctttcgaggaattacaatcttattttaagtag

SEQ ID NO: 3270 - DNA, 1167 bp, Staphylococcus epidermidis
atgagataccttacatccggtgaatcacatggaccacaacttacagtcatcatagaaggtgtaccagctaatttagaaattaaggctgaagatattaataaggaaatgtttaaacgtcaagggggatatggtcgggggcgtcgtatgaaaattgaaaaagatactatagaaattgtgtcaggcgtcagaaatggctttactttaggaagtccaataactttagtagttactaacgacgatttcactcattggagaaaaataatgggcgtcgcaccaattagtgatgaagaaagagaaaatatgaaacgtaccattacaaaacctagaccgggccatgctgatcttataggtggcatgaaatataatcatcgtgatttaagaaatgtgcttgagcgttcatctgctagagaaacagcagcaagagttgctgtgggtgctgtttcaaaaattcttttagaacaattagatatccacttatatagccgtgtagtcgaaattggtggtattaaagacaaaggtttatatgatgtagatatgttcaaaaataatgtagataaaaatgatgtacgtgtaattgacgaaaatattgcgcaacaaatgagagataaaatagatgaagcgaaaaaagacggagattcaatcgggggcgtagttcaagtaatggctgaaaacatgcctattggagtgggaagttatgtacactatgaccgtaaattagatggacgcattgcacagggtgttgtgagtatcaacgccttcaaaggtgtaagttttggtgagggatttaaagcagctgaaaaacctggtagcgaaattcaagatgaaattcattataatcaagattcaggctattttagagctacaaatcacttaggtggatttgaaggaggcatgagtaatgggatgcctataattgttaatggtgtcatgaagcctattcctactttatataaaccactaaactcagttgatattaatactaaagaagacttcaaagctactatagaacgctcagatagttgtgcagtgcccgcagctagcgtagtatgtgaacacgttgtcgcttttgagttagcaaaagcagtactcgaagagtttcaatctaaccacatggaccaactcgtagcacaaattaaagagcgtcgacaactcaacatagaattttaa

SEQ ID NO: 3271 - DNA, 450 bp, Staphylococcus epidermidis
gtggaacgcacatttttgatgattaaaccggacgctgtccaaagaaatttaattggtgagattatatctcgcattgaaaagaaaggtcttaagcttgttggcggtaagtttatgcaagtgcctatggaactagctgaaaaacattatagtgaacatgaaggaaaaccgttctacgacaagttaatttcattcattacttctgcacccgtttttgctatggtagtagaaggtgaaaatgctgtagctgtatctcgtaaaattattggaagcacaaatccaagcgaagcagctcctggtacaatccgaggcgactatggtttaaatctaggtcgtaatattatacatggttcagattcaacagaatcagcacaacgtgaagttaaattatggtttacaagtagcgaaattgctgattataaagaaccaagagaagattggctatacgaataa

SEQ ID NO: 3272 - DNA, 960 bp, Staphylococcus epidermidis
gtggcaaagttaaacattaacaacgaaataaagaaagtagaaaagcgacttgaagaagcaattataagttctgatcaaacattacaagaagcctcattccatttactatcttcagggggaaaaagagttagacccgcttttgttattttaagtggtcaatttggctctaacaacaaaccttcagaagacacgtatcgtgtagcagtagctttagaactaattcacatggctaccttagtccacgatgatgtgatagataaaagtgataaacgtagaggccgactcactatttcaaaaaaatgggaccaaagtacagctattttaacaggaaatttcttacttgctatggggctcaagcatttatctgaaatcagtgatactcgtgtccattcgaccatttctaaatcaattgttgatgtgtgtagaggagaactattccaatttcaagatcaatttaatagcaatcaaacaattactaattacttacgtcgtatcaaccgtaaaacagcacttcttattcaactgtctacacaagttggtgcgattacttccaatgcgtcaaatgacgttattcgtaaattaaaaatgatcggacattatataggtatgagtttccaaataatagatgatgtgctagattttactagttctgaaaagaaacttggtaagccggttggtagtgaccttatgaatggtcatattacattacctgtactattagaaatgcgaaaaaataagacttttaaagataaaatttcacaacttaatcctgacagtcctcaacatgcctttgaaacttgtataacaataattagacagtccgaaagcatagaacaatcaaaacaaataagtgaaaagtatttaaataaagcaatcaatttaatcgatgaattagaggatggtcctaataaagaactatttagaaagcttattaaaaaaatgggaagtcgaaataagtaa

SEQ ID NO: 3273 - DNA, 726 bp, Staphylococcus epidermidis
atggctgaaaatcaagctaaaaaagaacaagttcatacagtattccaaaatatttctcaaaaatacgatcgactcaacaacatcataagtttcgaacagcataaagtatggagaaaacatgttatgagtactatgaatgtacaaaaaggcagtaaagctttagatgtgtgttgtggtactgcagattggactattgcattaagcgaagcagtaggctcaaaaggccaagtaactggtcttgattttagtgaaaatatgcttgaggtaggtaaacagaaaactgcttcattggaaaatatccagcttgttcatggtgatgctatgaatttaccttttgatgataactcatttgattatgttactattggttttggcttacgcaatgttccggattatttgtcagcactcaaagaaatgcatcgagttttaaaaccaggaggcatggtggtatgtcttgaaacaagccaaccgacattgccattattcaaacaaatctatagtttatactttaaatttgtgatgccaatttttggtaaaatgtttgctaagtccaaagaagaatatgaatggttgcaacaatcaacatttaattttcctgacaaacaaacattgaaaggcttattcttcgaagcaggatttaacgatatcattgtacgtagctttacaggtggcgttgctgcaatgcaccttggctataaagaaaacagttctagcaaaggtgattaa

SEQ ID NO: 3274 - DNA, 579 bp, Staphylococcus epidermidis
atggaaacgacaataagcaaactaaacaaacatgtagaacaactgcttaagggcattaatgagtatgagcctattgaaatcaatagctctttaagtcatttattagatatgtactctatcccagatgaagctaagattgcttgcctcactattgatacatcaatgcgtcatttggacgctatcggtgataatcatctatctaagaaagcaatattaataggggacctattaagcgctcatttctatactctattagcaaatattcaagattccgcttttcaacttgcaatgagcaaggccattgttaaaatcaatgaagataaatcatcaattaatcaaaatgatctcactgataaagagttgaaagatgcgattctagatatagaaacactatttccatatcttacaattaaccattttggaagttctgttgataaaatcaaattattcgctgaattgacttctaaatataaagattaccatcctgagtatctgggtaagtttaacagatatgaaatagataaatatattcaagaaattagcaaaagttataaaaaaagaggtaatgaaaatggctga

SEQ ID NO: 3275 - DNA, 273 bp, Staphylococcus epidermidis
atgaataaaactgatttaattaatgcagttgcagaacaagctgacttaactaaaaaagaagctggttcagcagtagatgctgtatttgaatctatccaaaactcacttgctaaaggtgaaaaagtacaattaatcggtttcggtaactttgaagtacgtgaacgcgctgctcgtaaaggtcgtaaccctcaaacaggtaaagaaattgacatccctgcaagtaaagtaccagcatttaaagctggtaaagcattaaaagatgctgtaaaataa

SEQ ID NO: 3276 - DNA, 999 bp, Staphylococcus epidermidis
atgagaaaaattacagtttttggtatgggtagttttggtactgcattagctaatgtattagctcaaaatggtcatgatgttttaatgtggggcaaaaatgtagagaatgtagatgaacttaacacacatcatatgaacaaaaattatcttaaagatgctaaattagattcatctataaaagcaactgtagatttaaataaggcagtgcaattttcagatatctatcttatggcactacctacaaaagcaattagagaagtatcaaaagatatcgatcaattactcacatctaaaaagacttttattcatgttgctaaaggcattgaaaacgatacatttaagcgcgtatctgaaatgattgaggactctatctcttcagaacataatggaggaatcggcgtcttatcaggtccaagtcatgctgaagaagttgttataaaacaacctacaactgtagctgcatcatctaaagataataatgtgagcaaacttattcaagatttatttatgaacgactatttacgtgtttacacaaataatgatttagtaggtgtagaattaggtggtgctttaaaaaatattatagctatagctagtggtatcgttgccggcatgggttacggtgataatgcaaaagcagctttaatgacacgaggtttagccgaaatcagtcgacttggtgagaaacttggtgcagatccaatgactttcttaggtctaggtggcataggtgacttgatcgtaacttgtacgtccacacattcacgaaattacacacttgggtttaaattagggcaaggcaaaacagcagaagaagctttaaaagagatgaaaatggtggttgaaggtatttatacaactaaatcagtatatcatcttgctcaacaagaaggagtagagatgcctatcactaacgcattatatgaagttttatttgaagatgtccctgtaagtaaaagtgttagaacacttatggaaagagacaaaaaagcagaataa

SEQ ID NO: 3277 - DNA, 1311 bp, Staphylococcus epidermidis
atgactaaaccgatagtagcaattgtaggaaaaccaaatgtaggaaaatctacaatttttaatagagttgtcggcgaacgtatatctatcgtagaagatacgccaggcgttactcgtgatcgtatttattcatctggcgagtggttaactcatgaatttaacatcattgatacaggtggtattgaaattggagatgctccttttcaaactcaaatccgtgcacaggcagaaatagcaattgaagaagcagatgtcatcatttttatggtcaatgttagagaaggacttacacaaagtgacgaaatggtcgcacaaatgctttataaatctaagaaacctgttgtattagctgtgaataaagttgataatcttgaaatgcgtaatgatatctatgatttctattctttaggctttggagatccatatcctatttctggttcacatggattaggacttggagatttgctagatgcagttgttgaaaactttaataaagaatcagaagatccttatgacgaagatacgatacgtctttctatcatcggtagacctaatgttggtaaatctagcttggtcaatgctattttaggcgaagaacgtgttattgtgtctaatgttgctggtacaactcgagatgccattgataccgagtactcttatgatggacaagattatgtattgattgatactgctggaatgagaaaaaaaggtaaggtgtatgaatcgactgaaaaatattctgtattacgtgcattaaaagcgattgagcgttcagaagtagtattagtagttatcgatgctgaacaaggtataattgaacaagataaacgtgtagctggctatgcacatgaggaaggtaaagctattgtcattgtagtaaataaatgggatacagttgaaaaagatagtaagacaatgaaaaaattcactgatgatgttagaaatgaatttcaatttttagattatgctcaaatcgcgttcgtatcagcaaaagaagggctaagattaaaaacattattcccttatatcaatcaagccagtgaaaatcataaaaagcgtgtccaaagttctacactaaatgaagttgttactgatgccatctctatgaatccaacacctactgacaaaggtagaagacttaatgtattctatacaactcaggttgcaattgaaccaccgacatttgtagtatttgtcaatgatgttgaattaatgcatttttcttataggagatatttagaaaatcaaatacgtaatgcttttggttttgaaggaacacctattcatattattccaagaaaaagaaattaa

SEQ ID NO: 3278 - DNA, 1179 bp, Staphylococcus epidermidis
atgactgaagaattcaatgaatcaatgattaatgatattaaagaaggtgacaaagtcactggtgaagttcaacaagtagaggataaacaagttgttgtgcatattaatggtggcaaatttaatggaattattcctattagccagctttcaacacatcatatcgaaaaccctagtgaagttgtaaaagtcggtgatgaagtcgaagcatatgtcactaaaatcgagttcgacgaagaaaatgatactggggcatacattttatcaaaaagacaacttgaaactgaaaaatcttatgaatatttacaagaaaaactagataacgatgaagtgattgaagctgaagttactgaagtagttaaaggtggtttagtcgttgacgttggtcaaagagggtttgtacctgcttctctaatttcaactgatttcattgaagatttttctgtattcgatggtcaaacaatccgtattaaagtggaagaacttgatcctgaaaacaatagagtcattttaagccgtaaagctgtggaacagttagaaaacgacgctaaaaaagcttcaatattagattctttaaatgaaggcgatgttattgatggtaacgttgctcgattaactaactttggtgctttcattgatattggtggcgtagatggtttagttcacgtttctgaattatctcatgaacatgttcaaacaccagaagaagttgtgtcagtaggtgaagcagtcaaagttaaagttaaatctgtagaaaaagattctgaacgtatttctttatctattaaagacactttaccaacaccatttgaaaacattaaaggggaatttcacgaagatgatgttattgaaggtactgtagtacgtttggcgaactttggcgcattcgtagaaattgctccatccgtccaaggtttagtgcatatttctgaaatcgatcataaacatatcggttctcctaacgaagtattagaacctggacaacaagttaatgtaaaaatattaggtatcgatgaagataatgaaagaatttcattatcaatcaaagcaacgttacctaaagaaaatgtcattgaaagtgacgcatccacaactcaatcatatcttgaagatgataatgatgaagataaaccaacattaggcgatgtttttggtgataaatttaaagaccttaagttttaa

SEQ ID NO: 3279 - DNA, 648 bp, Staphylococcus epidermidis
atgagttcaattaatattgcactagatggcccagctgctgcaggtaagagtacaattgctaaacgtgtagccagtcgtctatcaatgatatatgttgatacaggagcaatgtatcgtgccattacatataaatatttacaaaatggcaaacccgaaaattttgattatctgattaataacactaaacttgagcttacttatgatgaagtaaaagggcaaagaatcttactagataatcaagacgtcactgattatttaagagaaaatgatgtaacacatcacgtatcttatgttgcttctaaagaaccagtgcgttcatttgcagtgaaaatacaaaaagaattagctgctaaaaaaggtatcgttatggatggccgagatattggtacagttgtattaccagatgccgaattaaaagtttatatgattgcatctgttgctgaacgtgctgaacgtcgacaaaaagagaatgagcaacgtggcattgaatcaaatttagaacaattaaaggacgaaattgaagcacgagatcactatgatatgaatcgtgaaatttcgccattacaaaaagccgaagatgctattacacttgatacaactggcaaatctatagaagaggtaacaaatgaaatattgtctctactttaa

SEQ ID NO: 3280 - DNA, 969 bp, Staphylococcus epidermidis
atgaaacgtctacttatcatacatactggtggcacaataagtatgtcacaagatcaaactaataaagtgataacgaatgaagaaaatccaatatcacaacatcaaaatatcattagtcaatatgcagaggttgacgaaatcaatcttttaaatataccctcgccgcatatgacaatttcgaatgttgtgcgattaagagacgaaatcattacatattctaaagaaaatatatatgatggatttgtcattactcatggaacagatacacttgaggaaacagcttttttaatagatttattaattgatattcaagagcctatagtaattactggagcaatgagatcatccaatgaaattggttccgatggtctctataattttatttctgctataagggttgcttcttcatctgaggctaatcataaaggtgttatggtcgtatttaatgatgagattcacactgctcgtaatgtgacaaagactcatacttcgaatattaatacatttcaaagtcctaatcaggggcctctaggtgtacttaccaagaatcgagtacaattttatcatcatccttacagacaaactacctaccaatatatcgatgtaaatttacgtgttccacttgtaaaagcatacatgggtatggaagatgatgtactatcattttattcacaacaacacgttgatggtatagtcatcgaagcactaggacaaggtaaccttccaaaaagttgtcttaatggactacagcaatgtctaaagaaaaacattcctctagttctcgtatctagatcattcaatggtattgttagtcctgtatatgcttatgaaggtggtggcgcagatttgaaaaataatggtgttattttttcgaacggtttaaatggaccaaaggcaaggctaaaattactagttggtttgagtcaagacatgactcaaaatcaattagagcgatatttcgaagagtaa

SEQ ID NO: 3281 - DNA, 987 bp, Staphylococcus epidermidis
atgcaaactattgaaagcatcattataggtggcggtccatgcggattaagcgcggcaattgaacaaaagaaaaaaggtattgaaacattagtaattgaaaaaggtaatgttgttgaatcaatctataattatccaacacatcagacttttttctcatcaagtgataaattaagtatcggcgatattccttttattgttgaagatagtaagccaagacgtaatcaagcgcttgtatattatagggaagtcgttaaacatcatcaacttaacatacatccattcgaagaagttttaacagttaaaaaaataaacaataaatttgcaattacaactacaaaaggtgtatatgaatgtaaatatttaactgttgctacgggttattatggtcaacataacactttagaagcggaaggggcagaattaccaaaagtattccattactttaaagaagcacatccgtattttaatcaaaatgttgttattattggaggcaaaaactctgctgttgatgctgccttagaattagaaaaagctggtgctaatgtaactgttttatatcgtggcgaacagtaccctaaagcaattaaaccatggatattacccaatttcgaatcattagtcaatcacgaaaaaattacgatggaatttaatgcgacagtaaccaaaattaccgatcattcagtgacttatgaaaaagatggtcaacttatagaaattgataatgactacgtttttgctatgattggttatcatccagattacgatttcttaaaaacaataggtattgatatccataccaatgaatatggaactgctcctgtttataatcgagaaacattcgaaacaaacgtcgaaaattgttatatagctggtgttattgctgcgggtaatgatgcaaatactatttttatcgaaaatggtaaatatcatggtggtgtcattacacaaagcattttgacaaaaaaacaaacacctcttgaaacatag

SEQ ID NO: 3282 - DNA, 1428 bp, Staphylococcus epidermidis
gtgattgaattaattaaaatggaagggatgatagttgtgtctaataataattttaaagatgatttcgaaaagaatcgtcaatctattaatccagacgaacatcaaacagaattaaaagaagatgataaaacaaatgaaaataaaaaagaagctgactctcaaaacagtttatctaataactcaaatcaacaatttcctccgagaaatgcccaacgacgaaaaagacgcagagagacagcaactaatcaaagcaaacaacaagacgacaaacatcaaaaaaatagtgacgctaaaactacagaaggttcattagatgaccgttatgacgaagcacagttacagcaacaacatgataaatcgcaacaacaaaataaaactgaaaaacaatcacaagataatagaatgaaagatggaaaagatgcagctattgtaaatggaacatctgagtcaccagaacataaatcaaaatcaacacaaaatagacccggccctaaagctcaacaacaaaagcgtaaatcagaaagtacgcaatcaaaaccgtcaacaaacaaagataaaaaagcagctacaggtgctggaatagctggtgcagctggtgttgctggtgttgctggtgcagcagaaacatccaaacgtcatcataataaaaaagataaacaagattctaaacactcaaaccatgagaatgacgaaaaatctgttaaaaatgatgaccaaaagcaatctaaaaaaggcaaaaaagcagcagtcggtgctggcgcagctgcaggagttggtgcggctggtgttgcgcatcataataatcaaaataaacatcataatgaggaaaaaaattctaatcaaaacaatcagtacaatgaccaatcagaaggtaagaaaaaaggtggtttcatgaaaatcttgttaccacttatagcagccattcttattctaggtgcaatagcaatattcggtggtatggctctaaataatcacaacgatagtaaaagtgatgaccaaaaaatagcgaatcaaagtaagaaagactcagataaaaaagatggtgcgcaatccgaagataacaaagacaaaaaatctgatagtaacaaagacaaaaaatctgattctgataagaacgcagatgatgactctgataatagttcctcaaatcctaacgctacttcaactaataataacgataatgtagccaataataactcaaattatacaaaccaaaatcaacaagataatgcaaaccaaaatagcaataatcaacaggcaactcaaggtcaacaatcacatacagtatacggtcaagaaaacttatatcgtatcgccatacaatattatggagaaggaactcaagctaacgtagataaaattaaacgtgcgaatggattaagcagtaataatattcataatggtcaaacattagttattcctcaataa

SEQ ID NO: 3283 - DNA, 1380 bp, Staphylococcus epidermidis
ttgctgaaagataatttaaaggaatggtttggttttgatgaatttaaagaggggcaagaagaaattattgatagtgtccttcatggaaggcatacacttggaattttaccaactggtagcggtaaaagcttatgttatcaactccctacatatatattagaaaaaccgacattaattatatcaccactcatttcgcttatggatgatcaagttatgcaaatgaagttaaaaggtgaaacacatgttgcatgtgtacattccggcatggacgaagtagaaaaaagagacaatattaaacgactaagtaaaagtcgatttatttatttaagtccagaatatatactgcaacctcataattttaagtacatcgctcatatcaactttggattaatagtattagatgaagcgcactgtttatcagagtgggggtatgattttagacctcactatgctttagttggtaaaattattcatcattttaattcagcaacagtgttagcactaacagctacagcaccacctcaattagaaactgatttatctcacattttatcactcaaattaaatgtagttcaaaaaagtatgaatcgagaaaatattagcttacaacactataattttaatgatgatgaggggaagattgaatggctgttaccatttttatctaattctgggcctacaattatatatgtttcttctaaaaaaagatgtttagaactagctcgaatgatttatgactcaggatatctaacaggtatatatcatggagatttaagttatcaggaacgccaaacagttcaacaacagttttttaataatgacatccccgttatagtagcaacaagtgcttttggaatgggaataaataaaaaagatattcgtacagtcatacattttcatttatcatcttcaccatctaactatttacaagaaattggtcgtgctggtagggatggtaaacaaagtcaagccattagtttatttcaacctgatgatagttttattctagaaacactactattcactgatattatcacagatgacgatattacaatgtttgagacgggaaaccacttaccagatgaaaaggaaaaaattttaagtactttaaatatacaattcacatttagccaacttaaagatatatttcatcaatcatatcaacgtaagcgactaggttatatgagaatgatgggctatactaatttagatcaatgtcgacgtaaatacttactagaattttttggcgaacatcctcaaagtccaaaacaatgttgtgatcaagattcaagattagagcctattcagatattgaatcgtaaaaaggtgaaaagaaaactaagttttaatgaaaaattatataatttgttcgaaacctag

SEQ ID NO: 3284 - DNA, 939 bp, Staphylococcus epidermidis
atgagtcatgcatttaactacaaaaccaataaaagtatctataatattttaacaggcaagaagtcacaccaaacgtttttcgatgcgtcaagccaacaacttttgtcattatatcatagtttacctaacttaaagtattcaacttttgagcaatttatactccaaaaggatgattttaaaaaatcaattcaagtaaaaatacatccacaatacacttatgatagtctcactcaaacctttagttgcatacaattacttatccaaacgttatctcatacacgcaaggagtcaaatacatttattccaatcgttcaaaatacctatatacaacaaagggttaaacaactttatcatcaggtcattgaatcaaatcaagtatcaaatactatagacgaaatatatttattatttgagaatttaaataataaatataaccatacatttcttcattattatttacaaggatatgaagaatccatgtatactagacaacaaataagtttaattgagggtataccacaatcagaattatttgaacgagaaatgaatgaactgattgacatattgaatcaattaaaagattcaacgaaatatccaatactttctcaagctatcattctttcaccattactaacaaatacatacttaagctatcaaaagttaaaatctggtctcaatttaaaagaaattgctcaattacaaaatgtaaaacttaacacaattgaagatcatattctagaaatgtatattaaaggttatttgatagactatacattatttataaataaaaaagatattctcgaatttataaactactatcaaaaacatcgcggtgaacgattaaaattttataaagaacattttactgattggacttactttcaaattaagttagttatagtaggaatagaaagaggtgatttaattgctgaaagataa

SEQ ID NO: 3285 - DNA, 249 bp, Staphylococcus epidermidis
atggcaaaatatacaatcgttgatatggatacatgtatagcatgcggtgcttgcggtgcagctgctccagatatatatgattacgatgatgaaggtattgcatacgtaatccttgacgataaccaaggtactgctgaagtgcctgaagagttatatgaagatatggaagatgcgctagaaggttgtcctactgactcaatcaaaattgaagacgaaccatttgatggtgacgcactgaaatttgaataa

SEQ ID NO: 3286 - DNA, 540 bp, Staphylococcus epidermidis
atgcaacaaaacaaacgtttgattacaattagtatgttaagtgcggtagcgtttgtgttaactttcatcaagtttccattgccatttataccaccgtatctaactctcgattttagtgatgtaccgacgttattagcaacattcctcttaagtcctattgctgggattatcgttgcactcatcaaaaatattttaaattttctattcaatataggggatcctgttggaccagtagctaactttttagcaggcgtcagctttttgctatcatcatactatgtttatagaaaaagaaaaaataatcgttctttaatttatggattaattacaggtacaatcgttatgactattgttttgagcatcttaaattattttgtgttacttccattatatggaatgatatttaatttaggtgatgtgcttaataacgtaaaaattgttattgtgtctggagtcataccttttaatttaattaaaggcataatcatttccattatatttgtgctgttatttagaagattaagacatatcatcaaataa

SEQ ID NO: 3287 - DNA, 1767 bp, Staphylococcus epidermidis
atgaaccgactaaatagtgttgttataaaactgtggttaactattattttaatagtagcgacagttttaattttattaagtgtttcattaatcacttttatacaatattactttacgcaagaaacagaaaatgcaattaaagaagatgccaaaagaattagttcacttgttgagaagtctcataacaaaacattagctatccaaaatagccaaacactcattgatggtgatggaccgggtggcctcattattatgaaagacatgagcgagaaaccagactcatcgtataaagacactaaaaaacaaatgtttaatgaaataaaaaagagtactaaatttaaaaaagtgtttaaagaaggtgagtatgaaactcaaaatattacaataaaaaataaaggtaattctcaatcttatcttttgctaggatacccaatgaaagctcaaaaaggtgctcaaagccattatagtggtgtttttatatataaagatttgaaatctatcgaagatacaaataatgctattacaattattatattaataactgctattatatttactatagcaagcacaatatttgcattctttttatctaatagaataacgaaacccttacgtcaattaaaaacacaagcacaaaaagtttctgaaggggattatagtcaaatttcaactgtcgctactaaagatgaaataggtgatttatcacgtgcatttaacaacatgaacgtagaaattcaagaacatatcaaagcaatttcttcatctaagaatataagagatacattattaaactctatggtagaaggcgttctaggcattaataatcaacgtgaaatcatattgtcgaacaagatggctgatgatattatgcgtcacattgatgatttttcaaaagaatctattgaacagcaaattgaagcaacatttgaatcacaacagaatgagtatttagaattagaaattaatacaaggtactatgtatttatctccagttatatagatagaattcaaacaaatggtagaagtggtattgtcatggtcatccgtgatatgacaaatgaacataatcttgatcaaatgaaaaaagattttatagcaaatgtatcacatgaattacgtacgccaatctctttattacagggttacactgagtccatagtagacggtatagttaccgaaccagatgaaatacgtgactcattagcaatcgttttagatgaatctaagcgacttaatcgtttagtcaatgaattactaaatgtagctcgtatggatgctgaaggattatcagttgagaaggaattacaacctattcaacaccttcttgataaaatggaatctaaatatcgcatgcaaagtgaagaattaggtttaacaatgacgtttgattctaataatgacgaacaattatggaactatgatatggatagaatggaccaagtgttaactaatttaattgataacgcaacaagatatacacaagctggtgattctataaagatttctattgatgaagattcagatttcaatattttaacaataactgatacaggcactggtatagcgccggaacatctgaaacaagtatttgaccgtttttataaagtggacgctgctcgaaaaagaggtaagcaaggcaccggattaggacttttcatttgtaaaatgattattgaagaacacgggggacgtattgatgttgagagcgaattaggcaaaggtacttcatttattattagactacctaaatcaaaacaaattagttag

SEQ ID NO: 3288 - DNA, 726 bp, Staphylococcus epidermidis
atgactaacgaaattttaatcgttgatgatgaagatagaattagaagattacttaaattatatttagaaagagaatcttttgaaattcatgaagcaagagatggtaaagaagcctacgagcttgctcttgaaaacaactatgcgtgcatcctcttagatttaatgcttcctgaaatggatggaattgaagttgcctctaaacttagagaacataaagatacacctatcatcatgcttactgcaaaaggtgaagaaacaaatcgtgttgaaggatttgaatcgggagcagatgattatattgttaagcctttctcacctagagaagtagtattgagagtaaaggcgttattaagacgtacacaaactgcaaacactgagcaaagcgaaccgcatgcacgcgatattattgaatttagtcatctagtgattgataatgacgctcatcgagtccttgcggatgatcaacaagtgaatctaacacctaaagagtatgaattactcatctatttagctaaaactccaaataaagtatttgatcgagaacagttacttaaagaggtttggcattacgaattttatggggacttgcgtacagtagacactcacgtcaaaagacttagagaaaagttaaatcgagtatcaagtgatgctgcacaaatgatacaaactgtgtggggtgtcggttataaatttgaggtaaaacctagtgatgaaccgactaaatag

SEQ ID NO: 3289 - DNA, 738 bp, Staphylococcus epidermidis
atgagtaaagaacaagagagattacaaaaaagaatcgctaatagcggatatacatctcgtcgaaaagcagaagtacttatcactgaaggacgagttaaagtcaatggacaaactgtaacagaattaggttccaaagtgatgccatcagatttagttgaagttgatggtattaaaatcgaacaagaagacaaaatttatattttattttataaaccaactcaagtcattacaagtgtctctgatgatcgtggacgtagggtggttacggattactttgatgatctagaatcacgtatttatccggttggacgattagattatgacacatctggagttttattattaactaatgatggagaatttactaatttgatgacacatcctcgatatcacattaaaaagaaatacgttgctaaattaaaaggttatttaatgagagaggaaattaagcaacttgaaaaaggaatagaattagaagatggttacacacaaccagcacaagttaaaataaaaaagcaagataaagaaaaaaatacgactttagttgaaattacaattagtgaagggcgaaatagacaagttagacgtatgtttgagtatttcggtcatcaagttaataagttaacaagaattcaatttggccctatagatttaaaaggtttgaacgccggtgaaggaagagttcttacaccacatgaagtaaaaatattaagacatttggcagaaaacggtaaataa

SEQ ID NO: 3290 - DNA, 543 bp, Staphylococcus epidermidis
ttggataatattgcaatacttgaggcattactatatacttctggcgatgaaggattagaacaaaaacaaattattgacatattagacatcaacctcaatcaattagaagatttagttagtaaatatcattcacatggcttaacaattcaaagatacggctcaacttatgtacttacaacaaaaaaagaaacttctacatacatagaacaattagtcaaagaaaagtctaaaatgaaattatcccaagcagcaatggaaacactctctattattgcatataatcaaccgctgactcgtggagatatagaaatgattagaggaattaattcggatggagctgtaaagactttaatcgctaggggattagtagaagccaaagatgttgatcattctagaagccatcatttaataaccacagatttatttctaaatgtatttggaatcgaaaacttagatgcattacctactacagaagaagatgaagcagaaatggatgaattctttagtaatttagttaaccaaaaaggagagtcaaatgagtaa

SEQ ID NO: 3291 - DNA, 732 bp, Staphylococcus epidermidis
atgtatgaagtaaaactcgatgcatttaatggtccattagacttattattgcatctaattcaaaaatatgaaattgatatttatgatatccctatgaaagccttaactgaacagtacatgcaatatgttcatgcgatgaatcagctagaaattaatgttgctagtgaatatttagttatggcatcagaattactaatgattaaaagtaaattactattgcctcaaacgagcatcgaagaagatatagaagaggatcctcgtgaggatttagtaggaagacttattgagtatcaaaactataaagaatataccgaaatattaaatactatgaaagaagaacgcgatctttattttactaaacatccgacggaccttactcatttagagacaaatgaatcgtgggatcctaatcaaacgattgatttaactgaattgattgtagcttatcaaagagttaaaaatcgagttgaacttaacactcctaaatctgtagaaattaaaaaagaaacatttacgattcaacaagctacagcacaggttaccgaacgattaaaacaacatgaatcgtttaactttttcagtttatttacatttcatgaaccggtcgaacaagttgttactcattttttggcaattttagaaatgtcaaaatcaggaatagttaatatcaaacaaactaaacaatttgatgacattgatataattagaggagtgaactatagcattggataa

SEQ ID NO: 3292 - DNA, 525 bp, Staphylococcus epidermidis
atggatcaatcattaatggattattattatcaatttcataagcatcaacattacttcctatgtcatgatattttagaagatgcttggaaatcacaaaatactttttcaaaacatgatgcagtagtaagtctcattttgtttgcaacagctaattatcactatcgtcgtgggaatttaaaaggcgcattaaaatcttttgaaaaagctttattaactattaaccacgctaaagatgacactcaattacaccttaatatcaatgaatttaaacaacttattgtgaaaatgattgaagcagtaaaattacaaaaacaatttactccgttacaattacctattgaaccagagtttcagacacttattaaacgtaaatatccggattatttgtttacttctcaaataattaaggaaccttatattgttgatcatcatattaaacgtgacagaactgaagtgataaaaaatagagaacgtgctctattccatagacagtatcgaaacaaaagcaataaaaaagaccagtaa

SEQ ID NO: 3293 - DNA, 888 bp, Staphylococcus epidermidis
atgaatactatcattgaagaatatttaaatttcattcaaattgaaaaaggattaagtaacaatactataggagcgtatcgaagagatttaaaaaaatataaagattatcttgaagataacaagatttcacatatcgattttattgatagacaaattatccaagagtgtcttggacaccttatagatatggggcaatcttcaaaatctctcgcaaggtttatttctacaataagaagctttcatcagtttgcattacgcgaaaaatatgctgctaaagacccaactgttttaatcgaaacgcccaaatatgaaaagaaattaccagatgtgcttgaaatagacgaagtaatagcattactggaaacgcctgatttaactaagaataatggatatcgtgatcgtacgatgttggagcttttatacgccacaggtatgcgtgtaactgaaattattcaattagatgttgaagacgtaaacttaatgatgggatttgtaagagtgttcgggaaagggaataaggaaagaatcgtccccttaggagataccgtcatcgaatatttaactacatatatcgaaaccgtaagacctcaattactcaaacaaaccacaactcaagcgctatttcttaacatgcacggaaagtctttatcaagacaaggcatttggaaaatcattaaacaatatggtttgaaagctaatatcaataaaacgcttacaccacatacattacggcattcatttgcaacacatctcttagaaaatggtgctgatttaagagccgtacaagaaatgttaggtcactctgatatttctacaactcaactttatacacatgtatctaaatcacaaattagaaaaatgtatacgcagtttcatccaagagcttag

SEQ ID NO: 3294 - DNA, 450 bp, Staphylococcus epidermidis
gtggaagaacgattaaatcgcgtgaagcaacaattacaacaatcttcatataaattgactccacaaagagaggcaactgttagagtattaattgaaaatgaaaaagaccatcttagcgcagaagatgtgtacttaaaagtcaaagataaggctccagaaataggattagctaccgtttatagaactttagaattactagctgaaataaaagtgctagataaaataaattttggtgatggtgtagctcgttttgatttaagaaaagaaggagccaagcatttccatcatcatcttgtttgtatggaatgtggtaaagttgaagaaattgaagaagatttattacctgaggttgaaaatcgtgttgaaaatgagtttaatttcaagattttagatcaccgtttaacgtttcacggtgtatgttctgaatgccaagccaaaaataagcaataa

SEQ ID NO: 3295 - DNA, 543 bp, Staphylococcus epidermidis
atgagattaaacgaaaaaacaatcgatagaacagttatatataatggtagtattattgatttagaagtacatgatgttgaattacccgatggtagcacatctaaacgtgaacttgtatttcatcatggtgcggtggcagtgtgtgcaataactcctgaaaatgaagttttattagttaaacaatttcgtaagcctgcagatcaaccacttttggaaattcccgcaggcaaattagaaaagggtgaagatcgtaaagaagcggctattagagaactacaagaagaaacaggatatattgcttcagatttgcaatttgtcactaatatgtatgggtctcctggattttcaagtgaaaaactttctatttacttcacagaccaattaacggttggagaaaccaatttagatgatgatgaatttgtggagcttcacaaagtacctttaagtcaaatcgattcattgttaaaagataataaaattgaggatgccaaaacaatcattgcattgcaacatctattattaaattataatcattctaaataa

SEQ ID NO: 3296 - DNA, 909 bp, Staphylococcus epidermidis
atgcaaaaaaatattctaaaaagtggcatcgaaatttctgaacttgggttaggttgcatgagtttaggcacagattataaaaaagcgcaacctattattgaaagtgcaattgataatggtattacgtattttgatactgcagatatttacgatcaaggagttaatgaagagattgttggtaaagccttaaaaaaatatcaaaatcgtgatgacatcgttatcggaactaaagttggaaatcgattaactgacgatggacatatgacgtgggatccttcgaaaaaacatattaaagaaagtgttaagggatcattgaaacgattaggattaaatcatttagacttatatcaattacatggcggaacaatagatgatcctctagacgaaactattagtgcatttgatgaattaaagcaagaaggatatattcgtgcatatggaatttcatctatacgccctaacgtgatagactattatcttaaaaatagtcaaattgaaacacttatgtcccagtttaatttaatagataatcgccctgaaagtcttattaatgacgttcatgataagcaagttaaaattctagcacgtggccctgtatttaaaggtttattaacttcaaaaagtgttgatgttatagatgaaaaatttaaaaacggtgtgttagattacactcaagatgaattaggtagcacgattgcttctattaaagaattggaaagtaatttaaccgcgttatcatttaaatatttaacttctcatgatgctatggggtcaattattgtaggagctagtagcgttgaacaacttgaagagaatgtccgcaattattataaagaaatcagtttagatcaaatcaaatccgcacgtaatagagttaaagatattgaatatacacaacatttgaaataa

SEQ ID NO: 3297 - DNA, 726 bp, Staphylococcus epidermidis
gtgataggtaaacactttattataactggagcaacgagtgggttaggttttgcaataaccaatgaattacttcaaagaggggcccatgttactatacttgcaagaaatatagataagttcaatcgaatcaaagaaaactattttaaacctgaacatatcaatgtgattaaatgtgatttaatgcaacgaaaagatattgaatcattacaaaaatttttaaatacacctataaatggtttcatctacagttcaggtgttggatattttaagtctataagtgagcattcaactcgtgaagtagtagaaacttacgaggttaatcttacaaattttaatttgttatacaaagtgattcaaccacaattagtaaaagcagcatatatcgttggtatatctagtcaagctgctcttgtttcacaggctaatgcggcacattacggtgcatcgaaagcagggtttagcgccgttcttaatgcattgagattagaacaaccggaattaaaagtgctcaatgtacagcccggtccaatagatacaccattccaaaaaaacgcagatcctactctaaagtattttaaaaattatagacacatgatgatacaacctcaacaacttgccaagcaaatagtggaaggaataatactaaataaaattgaaattaatcaaccattatgtccacgtacactagaaaaattatgtccaaatctatttaaaaataaagtttaa

SEQ ID NO: 3298 - DNA, 816 bp, Staphylococcus epidermidis
atgaaacttgtattttatggtgctggtaatatggcgcaggcaatttttactggaattattaattccaacaatttaaatgcaaatgatatttatttaactaataaatccaatgaacaagcattaaaaagctttgcagaaaaattaggggttaattatagttatgatgatgaagcattactcaaagatgccgattatgtatttttaggtacaaagccccatgatttcgaaaatttagctaatcgtattagagaacacattactaatgataataggtttatttctataatggcaggtttatctattgattatattcgtcagcagcttaataccaataatccattagctcgtattatgccaaatacaaatgctcaagttggacattcggttactggaataagtttttcaaataattttgatcctaaatctaaaaatgaagtggatgaattaatcaatgcatttggatcagttatagaagtctccgaagaacatctacatcaagttactgcaattacaggaagtgggcctgcatttttatatcatgtatttgaacaatatgtaaaagcaggtacagaattaggtttagaacgaaatcaagtcgaagaatctatacgcaatttaattattggaacaagtaaaatgattgagcgttcagacttaagtatgtctcaattaaggaaaaatattacatctaaaggtggtactacacaagctggacttgatgcactatctcaatatgatattgtatcgatgtttgaagattgtttaggtgcagctgtgaatagaagtatggaattatcacataaagaagatgaataa

SEQ ID NO: 3299 - DNA, 921 bp, Staphylococcus epidermidis
atggaagttacatttttcggtacaagtgctgggttaccgacgaaagagagaaacacacaatccattgctttaaatctagaaccatattcaaattcgatatggttatttgatgtgggcgagggaacacaacatcaaattttaagacactctattaagttagggaagatagatcatatttttataacacacatgcatggtgatcatatttttggtctccctggacttttaacaagtcgttcgtttcaaggtggagaaaataaaccccttactattatagggcctaaaggtattcaaaattacatagaaacatctttacaactttctgaatcgcatttgaattatccgattacctatatcgaaatcaatcaacaattagcgtatcaccacaatggttttactgtacaagctgaaatgcttaaccatggcataccttcattcggatatcgtattgaagccccaatcacgcctggtacaatcaacgtagaggccttgagaggtattggactagagcctggtccaaaatatcaggaagtcaaattacaagaaacgttcgaatataaaggattaatttacaattcggatgattttaaaggtaaagctaaacctggtccaattatcagtatatttggtgatacaaaaccgtgtgaaaatgaatatgaattagcaaagaactcagatttaatgattcatgaagcaacttacattgaaggagataagaaacttgctaataattaccatcatagtcatatagacgatgtatttaatctaattaagcaagctaatgtaaataaaagtcttatcactcatatcagtaacagatataacattgatgaagttacatcaatatacaatgagttatcccttgatcaaacttctccacatttttatttcgttaaagattttgatactttcaaaatataa

SEQ ID NO: 3300 - DNA, 1485 bp, Staphylococcus epidermidis
ttgagtactaaacaaaaacacattccttgtttgattacaatattcggtgccacaggagatttgagtcatagaaagctatttccttctatattccatttatatcaacaagacaatttagatgaacatattgctattattggtataggacgtcgcgattataataacgaacaatttcgcgaccaagttaaagcgtcaattcaaacttatgttaaagatacagatagaattgatgagtttatgacgcatgttttttatcataaaactgacgtgagtgataaagaaagttatcagtcattacttcaatttagtgagcgactagattcagaatttgctttaggtgggaatcgtctgttttacttagcgatggcaccacaattttttggagtgatctcagattaccttaaatcttctggtcttactcaaactacaggatttaaacgcttagttatagagaaaccatttggcagtgatcttaaatctgctgaatcattaaataatcaaataagacgttcgtttaaagaagaagaaatttatcggatagatcactatcttggcaaagatatggtgcaaaatatagaagttttgcgattcgcaaacgcgatgtttgaacctttatggaataataaatacatttcaaatattcaagttacatcatcagaagtattaggtgtcgaagatcgtggtggctactatgaatctagtggtgcacttaaagacatggtacaaaatcacatgctacagatggttgctttacttgcaatggaagcaccgataagtttgaatagtgaagatatacgtgcagaaaaagtcaaagtacttaaatctcttagacaattaaaaccagaagaagttaaaaagaatttcgtgcgtggtcaatatgatcaaggcaatatagatggtaaacaggttaagtcatatcgagaagaagatcgcgtagcaaaggattcggttacaccgacatttgtatcgggtaaattaacaattgataactttagatgggctggagttcctttctacattagaacgggtaaacgtatgaaatcaaaaacgatacaagtcgtagtagaatttaaagaagtacctatgaatttatattatgaaactgacaatttactagattctaatttgctagtcattaatattcaaccaaatgaaggaatttcattgcatttaaatgctaaaaagaacattcaaggaattgatactgagccagtgcaattatcatacgcaatgagtgctcaagataaaatgaatacagttgatgcatatgaaaacttattgtttgattgtcttaaaggtgatgcgactaattttacacattgggaagaattaaaatctacttggaaatttgtagatgcaatccaagatcaatggacaatggttgaaccatgtttccctaactatgaagcgggtacaaatggacctcttgaaagtgatcttttattaagtcgtgatggaaatcattggtgggatgatatccactaa

SEQ ID NO: 3301 - DNA, 882 bp, Staphylococcus epidermidis
ttggacgttatcaagcaaatacaacaggcaattgtatatattgaggatcgtttgttagagccttttaatttgcaagaattaagtgattacgttggtctttctccgtatcatttggatcaatcttttaagatgatagttggtcagtccccagaggaatatgcgcgtgcacgtaaaatgacaatagcagcaaacgatgtagttaatggagctagtcgattaatggatgttgctaagaaatatcgttatgcgaattctaatgatttcgcaaatgattttagcgattttcatggtatctcacctattcaagctacaacaaaaaaagatgaattaaaaatacagcaacgactgtatataaaattatcaacgactgaaaatgcaccctatacatacagacttcaagagactgatgatatttctttagttggctattcaagatttattcctactgagcaattatcaaatccatttaatattccagattttttagaggatctattagtagatggttatattaaagaacttaaacgttataatgatacgagcccgtatgaattatttgtagtcagctgtcctctggaacaaggtttagaaatatttgttggtgtgccgagtgaacgttacccttcacatcttgaaagcagatttttacctggtcgccattatgcattgtttaatttacaaggtgaaattgattatgctacaaacgaggcttggtattatattgagtctagcttgcaacttactttaccttatgagcgaaatagtttatatgttgagatttatccacttgatatatcatttaatgacccgttcactaagattcaattatggttgcctattaaacaagaaatctatgatgtagatgaaggttatcaaaattaa

SEQ ID NO: 3302 - DNA, 1656 bp, Staphylococcus epidermidis
atgaaaagaaattggtggaaagaagcagttgcatatcaagtatatccacgaagttttaatgatagtaatggagatggaataggtgatctacctggattaattgaaaaattagattatctagaaaatttaggaatagatgtcatttggttaagcccaatgtatccatcaccaaacgatgataatggatatgatattagtgactacaaaggcattatgagtgaatttggtacaatgaacgattttgatcaattgttatcaagcatacatcaaagagggatgaaattaatattagacttagtggttaatcacacatcagatgaacacccttggtttattgaatcaaaatctagtaaaacaaatgcaaaaagagattggtatatttgggctgatcctaaaccggatggatctgaacctaataactgggaaagtatctttaatggttcaacttgggagtttgacgaatcgactaagcaatactatttccatttatttagcaaaaagcagccagatttaaattgggaaaatccagatgtaagacaagctgtgtttgaaatgatgaattggtggttcgaaaaaggtattgacggatttagagttgatgccattactcatattaaaaagaattttgaagcaggagatttacctgtacctgatggcaaaaaatttgctccagcatttgatgtagatatgaatcagccaggaatacaagaatggctccaagaaatgaaagataaatcgttaagtcggtatgacattatgactgtaggcgaggctaatggtgttactcctaatgatgctgaagaatgggtaggagaagaaaatgggaaatttaatatgatattccagtttgaacatcttggtttatggagtactggcgatacgaaattcgatgttaaatcctataaacaagtcttaaatcgttggcaaaagcaactagaaaatgtaggttggaatgctttatttatcgaaaaccatgatcaaccacgtcgtgtttcaacctggggtgatgataaaaattattggtatgaatcagcaacgagtcacgctactgcctactttttacaacagggcacaccttttatttaccaaggtcaagaaataggtatgactaactatccatttgaaagcattgaaagtttcaacgatgtcgcagttaaaactgaatatcaaatagtcaaaaaagaaggtggagatgtcaatcaattactagataaatataaaatggaaaaccgagacaatgcaaggactccaatgcaatggaataattctatcaatgctggattcactactggtaagccatggtttcatgtaaaccctaactatacagaaattaatgttaaacaacaactaaatgataagttttcgatactttcttattataaagcgttaattcaactaaaaaaatctgatttgatttacacctacggtaagtttaatatggtcgatgctgaaaataagcaggtttttgcatatacacgcacatttaaaaacaatactgtattaattgtagctaatctcacaaatgaagtatcagaactaaacctaccttttgaattagatatttcatctgtagatataaaattgcataattatcacttaaatgatataaatttagaccatattaaaccttatgaatcattcgtcgttgaaatataa

SEQ ID NO: 3303 - DNA, 1407 bp, Staphylococcus epidermidis
atgacacaacaaattggagtagtgggtttagcagtaatggggaaaaacctagcttggaatattgaatcacgtggttatagtgtttctgtttataaccgatcaagacaaaaaactgatgaaatggttaaagaatcgcctggaagagaaatttacccaacatactcattagaagaatttgtagaatctttagagaaacctcgtaagattttattaatggtaaaagctggacctgcaacagatgccactatagatggtttattacctttattagacgatgatgatattttaattgatggtggtaatactaattaccaagatacgattcgtcgaaataaagctttagctgaaagtagtattaactttattggtatgggagtttctggtggagaaatcggcgcactcacgggcccttctttaatgccaggtggtcaaaaagatgcttataataaagtcagcgatatcttggacgcaattgctgctaaggcacaagatggtgcttcatgtgtaacttacattggccctaatggtgcaggacattatgttaagatggtacacaatggtatcgaatatgctgatatgcaattaattgctgaaagttatgcaatgatgaaagatttattaggcatgtcacataaagaaatttctcaaacttttaaagaatggaatgctggagaacttgaaagttatttaatagaaattacaggtgatattttcaataaattagatgatgacaatgaagcacttgtagaaaaaatattagatactgcaggtcaaaaaggcacaggtaaatggacttcaattaacgcactagaattaggtgttcctttaacaatcattacagaatctgtatttgcgagattcatctcatcaattaaagaagaacgtgttactgcttctaaatctttaaaaggacctaaagcacattttgaaggcgataaaaaaacattcttagaaaaaatacgtaaggcactttatatgagtaaaatatgctcatatgcacaaggtttcgctcaaatgagaaaagccagtgaagataatgagtggaatttgaaattaggcgaattagcaatgatttggcgtgaaggttgtattattcgtgcacaattcctacaaaaaattaaagatgcctacgataataatgaaaacttacaaaacttattattagacccttacttcaaaaacattgttatggaatatcaagatgcactacgtgaagtagtagctactagtgtatacaatggcgtgccaacacctggtttttcagcaagtataaattattatgatagttatcgctcagaggatttacctgcaaacttaattcaagcacaacgtgattactttggcgcacatacttatgaacgtaaagaccgtgaaggtattttccatacacaatgggtagaagaataa

SEQ ID NO: 3304 - DNA, 1125 bp, Staphylococcus epidermidis
atgattaatcaaaaacgtttattagattgttttctagaattagtgcaaattgattcggaaacagggcacgaagaaacaattcaaccttatcttaaagatacgtttgaaaaaatggggctccatgttattgaagatgaagcttcaaaaaataatagattaggtgctaacaatcttatttgtacgttaaaaagtaatataagtcatcagaatgtgccgaaaatttattttacaagccacatggatactgtcgttccaggaaaaaacatccaacctgtagtaaaagaagatggatacgtttatagcgatggaactacgatactcggggcggacgataaagccggtcttgcggcaataattgaagcgattaaacaaattaaggaatcaaatttgccacacggacagattcaaataattattaccgtgggagaggaatctggattagtaggtgctaaagcaatagatactcgccttcttgatgcagatttcggctatgctgtagatgcaagtaaagatgttggaactactgttatcggtgctccaactcaagtaaagatttatacaactataaaagggaaaaccgcccatgcaagcacacctaaaagaggtattagcgcaataaatattgcatcaaaagcaatcagtcgaatgaaattgggacaagtcgatgcattaacaacagccaatataggtaaatttcacggaggttctgccactaatattatagctgatgaagtcactttagaggcagaagcacggtcacatgatgatcaaagcattaataaacaagtgaaacatatgaaagagactttcgaaacgacagcaaatgaattaggcggtcaagctgaagtgttagttgaaagaagttatccgggatttgaagttagtgaagctgacaaagtaacacaatatgctatatctagtgcattagccctcgggctaaaaggtgatacttgtattgctggtggtggttcagacggcaacatcatgaatcaatatggcattccttctgtgattttaggagtaggatatgaaaacatacatactacttcggaaagaatagcaataaaggatatgtatatgctcacaagacaaataataaaaattattgagctagtagctgaataa

SEQ ID NO: 3305 - DNA, 978 bp, Staphylococcus epidermidis
atgcttaagttaaatccctataaaataggatttagaactgtcaaaactgctgtgggaatgactttaggagtaatcatatgtaaacttctaggcttagataattatgcatccagtgctattttagttgtattgtgcataaagcacactaagatgcattcagtacaagcaattttatctcgactagtttcatgtttactcatattatttttaggttcagcaatttttagtcttttaggacaacatgcatttgttttaggtttaattgttttgctgtttattcctttgacagttgttctaaatgtgcaagaaggtgttatcactagttgtgtcatattattacatgtctttaacgccaaaactattaatgggcaccttattttaaatgaaataatgctattaatagtgggcttaggtatagcatttctaatgaacttaatgatgcctagtttagataagaaattgaatcattttaagcaggatatagaaaatcaaataactgaaatatttaatatttttagtcaagcctgctcaatgcgtaatgatcatttaaatattaaatttgattcattacttttaaatattaaaaaagcaaaatcacttgcttttagagatgttaaaaatcactttgtacgaaacgaaaattcattttatcattattttgatatgagagaagaacaagttgaattattaaaacgtatgacatcgttattagaaagaataaatacagatgatcctatactcgaaaagatttcacaattaatgtatgaaattggaagtaacgtaaatagcaatgattatacggctctaagactacattcactttatgaaatacgtttatctctcgatgatttaccattaccgactactcataagactttaaattcccgagcacatattattcaaattctaaatgaactagaagaatacttaaatattaaatctcaatttggttctttaaaattgcatagtgaaatataa

SEQ ID NO: 3306 - DNA, 438 bp, Staphylococcus epidermidis
atggatttaaactttgatttatatatgaatgatgttgttgaacaagcacgaaacgaaattgagcatgctggttatcaacaattaacttctgctgaggatgttgatcaagttttacaacaaaaggggacatctttagtcatggtaaattccgtatgcggatgcgcaggtgggattgcacgtcctgcagcggcacatgcattacattatgataaattacctcaacgattagttacagtatttgcaggacaagataaagaggcaacacaacaagctagagaatattttgaaggatatgcaccctcaagtccatcttttgctttgattaaagatggtaaaatcaccgagatgattgaacgacatcagattgaaggtcatgatgtaatggacgtaatcaatcagttgcaagcattgtttgataaatattgtgaagaaagataa

SEQ ID NO: 3307 - DNA, 1320 bp, Staphylococcus epidermidis
ttggatataaaaatgcctaagcttggtgaaagtgtgcatgaaggtacgattgaacaatggttagtatcagtaggagatcatgtagatgagtatgaaccattatgtgaagttattacagataaagtaacagctgaagtgccttcaacaatttctggaacaataacagaattagtggttgaagaaggacaaactgtcaatattaacacggtgatttgtaaaatcgattcggaaaatggtcaaaatcaaacagaatcggcaaatgagtttaaggaagaacaaaatcagcattctcaatcaaatgtaaacgtgtcacaattcgaaaataatcctaaaactcatgaaagtgaggtacatacagcctctagtcgcgcaaataacaatggacgattttcaccagttgtctttaaattagcttctgaacatgatattgatttaacacaagtcaaaggaactggttttgaaggtcgtgttactaagaaggatattcaaaatattattaacaatccaaacgatcaagaaaaagagaaagaatttaaacaaacagataaaaaaaatcattcaatgaaccatggtgactttttacatcaatcctcaactaaaaacgaagactcaccattatcaaatgaacgtgtcgtaccagttaaaggtattagaaaagctatcgcacaaaatatggttactagtgtcagcgaaataccacacggttggatgatggttgaagctgatgcaacgaatttggttcagactagaaactatcataaagctcaatttaaacagaatgagggttacaatttaactttctttgcgttttttgtaaaagctgttgcagaggctttaaaagtaaatccattactcaatagtacatggcaaggagatgaaattgttatccacaaagatattaatatctctattgctgttgcagacgatgataagttgtatgtgccagtcattaaaaatgcagatgaaaaatcaattaaaggtatcgcgcgtgaaatcaatgatttagctactaaagcaagattaggaaaattagcacaaagtgatatgcaaaacggtacatttacggttaataatactggttcttttggttctgtttcttcaatgggaatcattaatcatccacaagctgccattttacaagtagaatcagtcgttaagaaacctgtagttatagatgatatgattgcaattagaaatatggttaatttgtgtatttcaatcgatcatcgtattctcgatggtgttcaaacgggaaaatttatgaatcttgttaagaaaaaaatagaacaatattctattgaaaatacttctatttattaa

SEQ ID NO: 3308 - DNA, 984 bp, Staphylococcus epidermidis
atgactaaattatcatacttagaagctatacaaaatgcacaagacttagcactaaatcattttagtaatgcatttatacttggcgaagatgtaggaaaaaagggtggcgttttcggcacaaccaaaggattacaaagtaagtatggtgatgaacgtgtaattgatacacctcttgcggaatcgaatattattggtactgctattggtgcagcaatgctaggtaagagacctattgccgaaatacaatttgcagatttcattttgcctgctacaaatcaaattataagtgaagcagctaaaatgagataccgttcaaataatgactggaattgcccactgactatcagagcaccttttggtggtggagttcatggtggattatatcattcgcaaagtgttgaaagcatttttgcttcaactcctggattaactattgttattccttcatcaccttatgatgctaaaggtcttctattgtcctctatagagtctaacgatccagtcttatactttgaacataaaaaagcatatcgttttctaaaagaggaagttcccgaaacatattatactgtacctctaggtaaagcagatgttaaaaggccaggcgaggacatcactgtattttgttacggattgatggtgaattactgtttacaagctgcagatattttggcaaatgacggcatcgatgctgaagtagtcgacttaagaacagtttatccactagataaagcaactatcattgaacgctctcaacgtactggtaaagttcttcttgttactgaagataatctagagggaagcattatgtctgaagtatctgcaattatagctgaaaactgtctgttcgatttagatgcgccaatcatgcgattagctgcaccggatgtcccatctatgccattttcaccaacattagaaaatgaaattatgatgaacccagaaaagatacaggacaaaatgcgtgaactcgcacaattttaa

SEQ ID NO: 3309 - DNA, 999 bp, Staphylococcus epidermidis
atgatagattacaagtcagcaggccttacagaagaagacctcaaaaaaatatataaatggatggacttaggaagaaaaacagacgaaaggctatggttactcaatcgtgcaggtaaaattccatttgttgtcagtggtcaagggcaggaagcaactcaaattggtatggcatatgcaatgcaaaaaggtgatatctcatcaccttattatcgtgatttagcatttgtcacttatatgggaatttctccattggatactatgttatcagcttttggaaaacgtgatgacattaactcaggaggtaaacaaatgccttctcattttagtcacaaagaaaaaggcattttatctcaaagttctccagtagccactcaaataccacattctgtcggtgctgcattagcacttaaaatggataacaagccaaatattgctactgcaacagttggagaaggcagttcaaatcaaggtgactttcacgaaggtatgaactttgctgcagttcacaaattacctttcgtctgtgtaataattaacaataaatatgcgatatctgtaccagattcactacaatatgctgctgaaaagttatcagatcgtgcattaggttacggtatgcatggaatacaggtagatggaaatgacccaattgcagtatacaaagcgatgaaagaagcaagagaacgagcgctagcaggtgaaggtccaacattgatagaagctgtcacttcacgtatgacaccacattcatctgatgatgatgatacatatcgtacaaaagaagaaagagacctattgaaacaagaggattgtaatataaaatttaaaacggccttactcgatcaaggcatcataaacgaaaattggttgagtcaattggaaacagagcataaagaactcattaatgaagctactaaatctgctgaagcagcaccatatccttcagaagaagaagctttgacatatgtttatgaagagggaggtcaacaaaatgactaa

SEQ ID NO: 3310 - DNA, 1422 bp, Staphylococcus epidermidis
atgtcagaaaaacaatacgatttagtcgtgttaggtggtggtacggcaggatatgtagccgccatcagagcttctcaattaggaaaaaaagtagcgatagtagaaaaatcactcttaggtggtacgtgtttacataaaggatgtatacctactaaagcacttttaaaatcggctgaagtcaatcatactattaaaaacgcgcatacatttggaattgatgtcaatcattttaaaattaatttccctaaaattttagaacgtaaagatgctattgttaagcaattgcatgaaggcgtcaatcaactgatgaaacatcatcatatagatatttataacggtattggacgaattatgggaacatctatattttctcctcaaagcggtacaatttctgtggaatatgaagacggcgaatcagatatactccctaataaaaatgtgcttatagctactgggtcgtcaccacagtctcttccgttcattaaatttgaccataaacaaatactatcgagtgatgatatcctaaggttaaatacactaccacaaagattagcaatcataggtggaggtgttattggtttagaatttgcatctctgatgaatgatttaggtgctgatgtagtagtaatcgaagcgaatgacagagttcttcctaccgagagcacacaagttgcgtcattactaaaagaagaattaactaatcgaggcgttacattttacgaaaatattcaattgaccaaagatcattttaaccaaactgataagggtgtaactattaatatttcagatgagcccgtccaattcgataaagtacttgttgcaattggtagaaagcctaatacaaatgatattggtttaaataacactcaaattaagacttctgatgctggtcatattattacaaatgcttatcagcaaactgaagataaacatatatacgcagcaggagattgtatagggcaattacaattggcacacgtcggttcaaaagaagctatagttgcagttgaacatatgtttgattgttctcctatacctatcaattatgacctgataccaaaatgtgtttatacaaacccagaaattgcttcaattggtaaaaatttagaacaagcaaaaaaagcaggcatcaaagcaaaaagtatcaaagttccttttaaagctataggaaaggcaataattgaggatgtaacccaatcaaaaggattttgcgagatggtagttaacaaagatgacgatgaaatcataggtcttaatatgatagggccacatgttacagaattaataaatgaaatttcattgttacaatttatgaatggctcatctttagaacttggtttaacaacacatgcacatccttcattatccgaggtagtcatggaattaggtttaaaagctaatggtcaagcaattcatgtatag

SEQ ID NO: 3311 - DNA, 1677 bp, Staphylococcus epidermidis
atgttacaaaccttatcaataaaacaatttgccattattgacgaacttgatataaacttttctgacggtctaacagttatgagtggtgaaactggctcaggaaaatctattattattgatgccattggacagttaatcggtatgagagcttcttctgattacgtcagacatggtgaaaagaaagcaattatcgaaggtatctttgatatagacgagagtaaagacgcaattaatatactagaatcattagctatagatgttgatgaagattttttattagttaaaagagaaattttcagttctggtaagagtatttgtcgtattaataaccaaactgtcactctacaggacttaagaaaagtgatgcaagaactgcttgatattcatggtcaacatgaaacgcaatctttacttaagcaaaaatatcatcttcaactattagatgattatgcagacaatcagtattcagatttacttaatcaatatcaactttcttataaccaatataaaaataaacgtaaagaattagaggaattagaatccgcggaccaggctttattacaacgattagacttaatgaaatttcaattagaggaactaaccgaagcttcactgaaagaaggcgaagtggaccaacttgaatccgatattaaaagaattcaaaactccgaaaaattaaatctagctttaaacaatgcacatcaagttctaactgatgaaagtgcaatacccgataggttgtacgaattaagcaactacttgcaaacgattaatgatatcgttccagaaaaattcgtaagattaaaagaggacattgatcaattttactatatgctagaagatgcaaagcatgaaatttacgacgaaatggctaacactgaattcgatgagcaagttttaaatgagtatgaatccagaatgaatttacttaataatttaaaacgtaaatatggtaaggatattactgaacttattgcttatcagagtaaacttgcaaatgaaattgataaaatagaaaactatgaacaaagtacatcacaattaagggaagaaattaaaacgctttatgacgaagtgatagatataggaaaaaaactttctcaagaacgtaggcgtgtagcgagagagttaagggaccatattgtttctgaaatacaaaatttacaaatgaaagatgctaaccttgaaatttcgtttaaaccattagatgaacctacaattgaaggtattgaatttgtggaatttttaattagtccaaatcgtggtgaaccacttaaaagtcttaataaaatcgcttcaggcggtgaactttcaagaattatgctagctctaaaaagtatatttgttaaatcacgcggccaaaccgcgattctttttgatgaagttgactcgggtgtatctggtcaagcagcacaaaaaatggctgaaaaaatgcgagatattgctcaatatatacaagttatttgtatttcacacttacctcaggtagcttcaatgagtgaccatcatcttctaataagcaaggcatccaatgccgatagaactacaactcaagtcaaagaattgaaagatgaaaacaaaatagatgaaatagcacgtatgatttcaggagcaagtgtgactgagctcacgagagaaaatgcaaaagaaatgattaagcaaaatcacaatatttaa

SEQ ID NO: 3312 - DNA, 453 bp, Staphylococcus epidermidis
gtgccaaaaaagtcagtgagacatataaaaataagagagataatttcaaatgaacaaatagaaacacaagatgaactagttaaacgtttgaatgagtatgatttaaatgttacacaagctactgtttcacgagatattaaagaattgcaattaattaaagttcctgcacctacagggcaatatgtttatagtttaccaaatgatcgtagatatcatccattagagaagttgggtagatatttaatggattcatttgtaaacattgagggtactggtaatctactagtacttaaaacgcttcctggtaatgctcaatccattggtgctatacttgatcaaattgattgggatgaggtacttggtacaatttgtggtgatgatacatgcttacttatttgtcgagacgaagaagcgagtgaagaaatcaaaactcgaattttcaatttattataa

SEQ ID NO: 3313 - DNA, 867 bp, Staphylococcus epidermidis
atgaataaattaataaatataattaatacatcactgaataagtcaatacaatcatcaccattaaaaactaatttagaagaaagtatgaaatattcattaaatgctggtggtaaaagaatcagaccagtcatattattattaacactaaaaatgcttaacaaagattatcatcaaggactaaatagtgctttagcattggaaatgattcatacttattctttaattcatgatgatttaccagcaatggataatgacgattaccgtagaggaaaattaacaaatcataaagtttatggtgaatggaaagccattcttgctggtgatgcattattaacaaaagcttttgaattagtttctaatgatactaccattgaagatagtgtgaaagtaagtattatacaaagactttcaaaagcaagtggacatttgggaatggtgggtggccaagcgcttgatatggaaagtgaagggaagtcaattcgtttagaaactttagaatcaattcatgaaactaagacaggcgctttactaaatttttcagttatggccgcggtagagattgctcaagtagaacaaaatactgctaagaatttagatgaatttagtcatcatttaggaatgatgtttcaaattaaagatgatttactggatgtgtatggtgatgaatcaaaacttggcaaaaaagtaggcagtgatatagtaaatcataaaagtacttatgtttctttacttggaaaagaaggagcagaagaaaagttaaacaatcatcaatatcttgctatgaactgcttaaatcaaatttctgatcaatatgatacttctgaattaagtgatattgtagatttattctataacagagaccattaa

SEQ ID NO: 3314 - DNA, 231 bp, Staphylococcus epidermidis
atgagtaaagaaaagcaaagtttcgaagaaatgatgaaagaacttgaaaatatcgttcaaaaattggataatgaagcagtttctttagaagaatccctcgatttataccaacgtggtatgaaactatctgctaattgtgattcaactttaaaagaagcagagaaaaaagtgaatgaattaatgcaagaagaagttggtgataaaggaaatgaagaaactacagatgaataa

SEQ ID NO: 3315 - DNA, 1338 bp, Staphylococcus epidermidis
atgactgaatatttaagtgtttctgcactaactaaatatataaaatataaatttgaccaagatcctcatctacagtcagttcttattaaaggagaattatctaactttaaaaagcattcaagcggacatttatattttaatgtcaaggacaaagaaagtgtcatcagtgcaatgatgtttaaaggaaatgcttctaagttaggctttgagcctaaagaaggtgatgaggttttaattgaagctcgcgtttctgtttatgaaagacgaggaaattatcaaatatatgttaataagatgcaactcgatggtattggtaatttataccaaaagcttgaactactaaaaaagaaattgaaaaaagaaggctattttaatcaaagtaacaaaaaactcataccaaagtatccaaagaaaatagcggttttaacagcgagcacaggtgcagccattagagacatacatagtacgattaacaatcgttaccctttggtcgaacaaattcaaatcagtacccttgttcaaggcacgcaagctagacaagatataatagaaaagattcaatatgctgattcattagatgttgatacaataatagttggacgtggtggtggttcaattgaagatttgtggaactttaatgaagaagatgttgttaaaaccatctttaattgtcaaacacctattatatcagctgtaggtcatgagactgattttacattgagcgattttgtagcagatgttagagctgcgacacctactcaagctgctgttatagcaacacctgatcaatatgagttattacaacaaattaaacagtatgaatatacattatcaagatatataaaacaatatatcgaacatcagaagaaacaacttaatcacatatcatcatattacaaatttaagcaaccgagtttattgtacgatcaacaaattcaaaaacgagatgaattagaaagacaattaaatcatctattaaatactaaagttgaaaagtcaaaacatcacctcaagttacttcaacaaagttttaattttaaaaatttaaatcagcagattactcaggaaaagcaatctatttatcaattgcattctagattgtccaaaataatgtccaataacattactaatttaaaaacagtgctaaaaaacaaattagaaagtcttaataatttaagccccaccaatacgatgcttagagggtacgcaattgtcaataaagacaatgaagtggttacaagcacacataaattgaatgaaaacgaccaaatatctttaacaatgaaagacggaagtgtcgatgcaacggttaagaaagtaaggtgtaatgatgagtaa

SEQ ID NO: 3316 - DNA, 390 bp, Staphylococcus epidermidis
atgagtcgtaaagatgcaagagtacaagcttttcaaactttatttcaacttgaaataaaagagacagatttaacaattcaagaagcaattgaatttattaaagatgatcattctgatttagactttgattttatatactggttagttactggagtcaaagatcatcaaatcgttttagacgaaacaattaaaccccatttaaaagactggtctatcgatcgtttactgaaatcagatcgtattattttaagaatggcaacttttgaaatattgcacagcgacacacctaaaaaagtagttgttaatgaagctgtagaactcacaaaacagtttagtgatgatgatcattataaatttgttaatggtgttttaagtaatataaatgattaa

SEQ ID NO: 3317 - DNA, 363 bp, Staphylococcus epidermidis
atggtcaatgtagcagattattctcaatctaatttaggaaaaattgaaatagcaccagaagtattatctgttatcgcatccattgcgacatcagaagtagaaggtattacaggccattttgctgaactaaaaaaaacaaatctagagaagattagtcgaaaaaatttaaacagagatttaaaaatcgaagctaaagaagacggaatatacattgatgtattttgttctttaaaacatggcgtaaatatttctaaaactgcaaatcaaattcaatcagcaattttcaattcaattacgacaatgacagctattgaaccacagcaaattaatattcacatcagaagtatcgtcgcagaaaaataa

SEQ ID NO: 3318 - DNA, 1359 bp, Staphylococcus epidermidis
atgaaaaagattttaatcgctaatcgtggtgaaatcgcagtaagaataataagagcggcacacgatttaggtattcaaacagtagctatatactcagaaggtgacaaagatgcattacatactcaaattgctgatgaagcatactgcgtcggtcctactttatcaaaagattcttatttaaatataccaaatattttatctatcgctacttctacaggatgtgatggtgttcatcctggatacggctttttggctgaaaatggtgattttgctgaattgtgtgaagcatgccaattaaaatttattgggccaagctatcaatcaattcagaaaatgggaataaaagatattgctaaagctgaaatgattaaagccaatgtacctgtagtaccaggaagtgaaggacttattcaaagtatagatgacgctaaaaaaatagctaaaaaaatcggctatccagttatcatcaaagccacagcaggtggtggtggaaaaggtattcgggttgctcgtgatgagaaagaacttgaaactggttaccgtatgacacaacaagaagctgaaaccgcgttcggaaatggtggtttatacttagaaaaatttatagaaaactttagacatatagagattcaaattattggcgatacttatggaaacgttatacatttaggtgaacgtgattgtacaattcaaagaagaatgcaaaagctcgttgaagaagcaccctcaccagttttaagtgaagataaacgccaagaaatgggtaatgctgcaattagagccgcaaaagctgtaaattatgaaaacgcaggtacaattgaatttatatatgatttagatgataaccaattttatttcatggaaatgaatacacgtattcaagttgaacacccagtaactgaaatggtaacaggagtagatttagtaaaattacaactcaaagttgctatgggtgaggcgttaccttttaaacaagaagatatttccattaacggtcacgctattgaatttcgaatcaatgctgaaaatccttacaaaaactttatgccatcaccaggcaagattacccaatatcttgctccaggcggttttggagtgagaattgaatcagcatgttatactaattatacgataccaccttactatgactccatggtggcaaaacttatagttcacgaacctacacgtgaagaatcaattatgacaggcattcgtgctttaagtgaatatcttgttttaggtatcgacactacgattccattccacttaagacttctaaataatcatatttttagaagtggggaatttaatacaaaattcctagaaaagtataatattatggacgataataaccaatag

SEQ ID NO: 3319 - DNA, 468 bp, Staphylococcus epidermidis
atgaactttaaagaaataaaagaattaatcgaaattcttgatcaatctagtttaactgaaataaatattgaagataataaaggtagcgtagttaatttaaaaaaagaaaaagagactgaaatagttacaccgcaagttactcaacaaccaactcaaccgataaatcatacgcataatgaaacacaacaaaagccatcacatagctctaaagatgaacaaagtagtgataatgaatacaataccattaatgcaccaatggttggtacattttataaatcaccttcaccagatgaagaagcatacgttcaagttggagataaagttacgaatgaaagtactgtttgtatattagaagctatgaaattatttaatgagattcaagccgaaacaacaggtgaaatcatagaaattttagtagaagacggacaaatggtagagtatggccagccgttatttaaggtgaaataa

SEQ ID NO: 3320 - DNA, 1131 bp, Staphylococcus epidermidis
atgatgagttatctttttaataattacaagcgtgacaatatagagtttgttgatgctaatcaaaatgaattaattgataaagataataatgtctacctagatttttcgtcaggtataggtgtgacaaatctgggttttaatatggaaatttaccaagcagtttataatcaactgaatttaatatggcattcacccaatttatacctaagtagtatccaagaggaagtggctcaaaaattaattggtcaacgagattatttagctttcttttgtaatagcggaacagaagcgaatgaggcagctatcaaactcgcacgtaaagctactggtaagtcggaaattattgcttttaaaaagtcttttcacggcagaacgtacggcgcaatgtctgcaacaggacagaagaaaattacagatcaatttggtccggttgttcctggattcaaatttgctatttttaatgattttaattcatttaaatcattaacttcaaataatactgctgctgtaattatagaaataattcaaggtgaatcaggagtactacctgctgattctttatttatgaagcaattaaatgagtattgtaaacaaaaagatatccttataattgtagacgaggttcaaacgggcataggtagaaccggtaagttatatgctcatgaacattatcaattgtctccagatatcatcacattagctaaaggattaggtaatggccttcctattggagcaatgttaggcaaaaaaaatttaggtcatgcatttggctacggttctcatggtacaacattcggtggaaatagattatcattggctgctgcaaaccaaacgctttctatcattaatgatgctgatttgctgaatgatgttcaatcaaaggggcaatttcttattgaaaacttaagaaaaagtttagtaaataaaagaaatgtaattgaagtacgtggtgtaggtttaatggtaggaatagaggtcactaatgatcctagtcaagtagtgcgagaagctaaacgtatggggttaatcattttaacagctggtaaaaatgtgattaggttattaccgccattgaccatcactaaaaaacaattagaaaaaggtatagaaatattaactgaaatcatttga

SEQ ID NO: 3321 - DNA, 738 bp, Staphylococcus epidermidis
atgaaaaacatcatcgtaattaagctcggtggtatagctatagaaaatttaaacgacgcatttatacaacaaattaatgcttggcaccttgaaaacaaaaaaataattattgttcacggtggcggccaagtcatcagtaatttattaactaaaaacaatcattcaactattaaaattgatggcatgagagtaactgctaaaaatgatttacctatcatatatgatgctttaattaacatagttggccatcaacttttagaaagacttaaagaatctaatttagaattttttcaattcaaagaaaagataaaagaacttgtaagcgccgaatttttaaataaaaatatctatggttacgttggtaaagttaaagaaatcaacacgatgctattagaaaaaatgttatcacgcgacataataccaattatcactagtttgggtgtaaatgagcaaggggagtatcttaatgttaatgctgatcatctcgccaccgcaattgctaagaaactaaaagtcgaaaaattagtatatatgactgatgtccctggtgtaattgaaaaagataaaacgcttgctactcttacaattaatgaagcaaaaacaaaaattgaaaataaaataattacaggcggaatgatacctaaaattgagagtgcaatccaaacattagaatctggtgttgaatcgattttaattgcaaataatttacaaaaaggaacaatcataaggggtgattaa

SEQ ID NO: 3322 - DNA, 1194 bp, Staphylococcus epidermidis
atgaatataattaagggaaatattgcaagtcctcttggattttcagctgatggtctgcacgctggctttaaaaagaaaaaattagactttggttggattgtttcagaagtacctgcaaatgtagctggtgtatttacaactaataaggtcattgctgcaccattaaaattaacaaaaaacagcatcgaaaaaagtggtaaaatgcaagctattgttgttaattcaggtattgctaattcttgtactggtaaacaaggagaaaaagatgcttttaaaatgcaacaactggccgcaaataaattacaaattcaaccagaatatgttggtgtcgcatctactggtgttattggaaaggtgatgccaatgtctattctaaagaatggcttttccaaactagttaaaaacggtaatgctgatgactttgcaaaagcgatattaacaacggatactcatacaaaaacatgcgttgtaaacgaagaatttggtagcgatacagtaacgatggcaggtgtagcaaaagggtcaggaatgatacatcctaatttggctacaatgctagcatttataacctgtgacgctaacatctcatcacaaacattacaacaggctttaaaagatgtggttgaagttacattcaatcaaatcactgtagatggtgacacttcaacaaatgatatggtgcttgtgatgtcaaatggatgtacaaataataacgaaattaaaaaagacagcgaagactactataaatttaagcagatgcttctatatattatgaccgatttagcaaaaagtattgcaagggatggcgaaggtgcttctaaattaatagaagtcacggttaaaggtgcaaaagaatctagtgctgcaagaatgattgctaaaagtgtggtgggttcaagtttagtaaaaaccgcaatttttggcgaagatcctaattggggtagaattattgctgctgcaggttatgctaaaacatattttgatattaatcaggtagacatttttataggtaggatacctgtattaataagatcctcaccagtaaagtacgataaagaagaaattcaagaaataatgagtgctgaagaaatatcaattcagcttgaccttcatcaagggaattgtgaaggtcaagcatggggatgtgatttatcgtatgactacgttaaaatcaacgcactatacaccacttag

SEQ ID NO: 3323 - DNA, 1026 bp, Staphylococcus epidermidis
atgcatatttctatagtaggtatcacaggctatacaggactagaattgttaagattagcacttaatcaccctcatgtaacagtttcatcgattcatgctacaaaagaagtgggagtgcaaatttctgatatattccctcatttgaaaggtatttttgataaagaaattcaggttttcgacagtgaatttattatgacacattcagatttggtattttttgctactccgagtggcgttgcaaaagatttatccaaaaatttcgttaaaaataattttcctgttatagacttatcaggtgaccatcgtttatctccagatgtttatctcaaatggtataaaaaatcaccgtgtactgttgatatacaaaagcgttttacatatggtctctcagaagtaatgaatattagtcatcgcaatagatttattgctaaccctggttgttatgcaactgcaactgaattagcgctatatcccttaatcagcaatcatttaatccgtgttgattctataattgttgatgctaaaagtggtcttactggagctggtaaaaaattaaatcagtcatcgcattacgtaaatgtaaacaataattatgtgacgtataaacttaataaacacaaacatattcctgaaattgtacaaacgttgcagttttttaacaaaagtttacagaatattcagttttcgacatcgcttattccggttaatagaggtattgttgcaactatatacacacggcttgaaaacggagttaaaataaatcaaatagaatctacctacaaggatgtatataaaaataagcctttcataagaattaaagatggattaccacagttaaatgaagtaataggaacaaattacactgatattggttttgtttataacgaaaccacgggtgttttaacaatttcatcagttattgataatttaattaaaggtgccgctggacaagcaattcaaaacatgaatctgatgtttaatttcgacgaaactgatggtttaattttggcgcctttatatatctaa

SEQ ID NO: 3324 - DNA, 558 bp, Staphylococcus epidermidis
atgatttcagtaaatgattttaaaacaggtttaacgatttctgttgataacggaatctggaaagttattgatttccaacatgtcaaaccaggaaaaggttcagcttttgttcgttctaaattacgtaatttaagaacaggtgctattcaagaaaaaactttcagagctggcgaaaaagttgagcaagcaatgatcgagaatcgtcgtatgcaatatttatatgctgatggcgataaccatgtattcatggataacgagacatttgatcaaatcgaattacctggtgactacttaaaagatgaattaaattacttaaaagcgaatatggaagttcaagttcaatcttatgaaagtgaagttattggtgttgaattaccaaaaactgtagaacttgaagttactgaaactgaacctggaatcaaaggtgatactgccactggcgcaacaaaatctgcgactgttgaaacaggttatactctaaatgtacctttatttgtaaatgaaggtgacacactagtgataaatactagtgatggaagttacatttctagaggataa

SEQ ID NO: 3325 - DNA, 1062 bp, Staphylococcus epidermidis
atgaataaattaagaaaagttctagatatcattgaacataagcacttagatgcaatcatagtattatcagattataatagacgttatctttcagattttactggtacaagtggtgcactaatcataacacctaaaaaacaatatcttattactgattttagatatatagaccaagctacagaacaggcacaggattttgaaattataaatcgaaaatcaagtttgatttctgaaattaaatccatattagaaagagaaaatttatcaaatattggttttgaaggtcatttaatcagttatgatacttatgttgaacttaataaaggattaattactttaataagcatatctaatgaaattgataagattagagaaattaaaaataaggaagaaattcagctcattcaaaaagcggctaagatagtagatcaaacatatgaatatatcctcactcaagtaagtatcggaatgacagaacgagaaattaaagctaaattagaaagtaagatgttagaattaggcgcagatggcccttcattcgacacaatagtggcttcaggttaccgaggtgcgttaccgcatggtgttgcaagtgataagcgtattgaaaagggtgatatgattacattagattttggtgcatactatagaggatattgttcagatattacgcgcacgtttgcaataggagaaccggatccaaaactcaaagaaatatttaatatagttctaacttctcaaaagaaagctattgaacaaatcaaaccaggtatgactgcaaaagaagcagatgctatatctagagagtatatttcatctcacaactatggtgagcagtttggccattcacttggtcatggtatcggccttgatattcatgaaggtccactattatctcaaaatagttcagatgaattaaaaataaataactgtgttactatagaaccaggcatatacattgagggattgggtggcgttagaatagaagatgacattcttattacagaaaatggatgtcatgtctttactaaatgctcaaaagaccttattattttagagtaa

SEQ ID NO: 3326 - DNA, 561 bp, Staphylococcus epidermidis
atgaaaaagttaatattaatagttggtgcgagcagtttgcttatgggttgtggaagtcagaacttagctcctttagaagataaaacgactgagttacgtgatgataatcatcaattaaaacttgatattcaagaacttaatcaagaaattggcgaacataaatctaaaatagccgcccttaaacaagataaagaaaatactaaagaggcttcatctaataagttaaaaataaaaaatttaaaagcatcatctgattattacgactctattgcaaaaaccattaaagattatagagatattgaatcaaaagttaataaaaataataataaagtagcgattcaaagaaaattagatgacattttaaatgatattgacggtactttcattaaatataaagaatctgtagactctgaatcacaatctgaagaagataagaaaaaagaaaaagaaatacgtcaacttaataaagacttatcttcagcattcaatacaataaaaaaaggatatgaaacgaaagataataaaaaaatagaaaaaggtcaaaaaaacttgcaacaataa

SEQ ID NO: 3327 - DNA, 219 bp, Staphylococcus epidermidis
atgcgcaaattcatcttttatttaatattagcgatagctgcatttggtttaatgatgaatcttgatgagtttttattttcgattatgaaagccattattagttttgcaattatagctttaattatttatattatatactatttcttctttttaacagaagatcaaagaaagtataaaaaagcacttcgtaaatataaaagacaaaaaagaaagcaataa

SEQ ID NO: 3328 - DNA, 831 bp, Staphylococcus epidermidis
atgactgaaatatggaattttataaatactggaagcaaaaatccttattataatatggcaatggacgaagcgttactaaattttgtatcgcgtggagaaatcgatccagttataagattttatacttggaatcctgcaacactctcaataggctactttcagcgtctccaaaaagaaattgatattgataaagtaaaagaaaagggctatggcttagtaagacgtcaaacgggtggtagaggcgtgttacacgataaagaattaacatatagcgttattgttcctgagtctcatccaaatatgccttcaactgtaactgaagcttataaaattatttcacaaggattattagaaggttttaaaaatttaggttttgaaacttatttcgctatcccccgttctaaagaagaacgagacaaattaaagcaaccacgaagttcagtatgttttgatgcacctagttggtatgagcttgtagtagaaggcagaaaaattgcaggtagcgctcaaaccagacaaaaaggtgtcattcttcaacatggttcaattttacaagatatagatatcgatgatttatttgatatgtttaaatttaaaaatgaacgactaaaagcaaaaatgaaagaaaattttgttcaaaaagctgtagctattaatgacatttcaaatcaacatattacattaaatgaaatggagaacgcctttgaggcaggttttaaaaaaggactgaatatagattttaaacctctagaattaacggaaaaacaattagaggaagtacaagaactcgaagataaataccgctctgaagcatggatgtaccgtaaataa

SEQ ID NO: 3329 - DNA, 387 bp, Staphylococcus epidermidis
atgagtatctctttgtacattgcaattggtattattgttattatcattgcatatatgattatccaacaaattcttaataagcgagctgtaaatgaattagaccaaaatgaattccataaaggtttaagaaaagctcaagttattgatgtgagggaaaaagtggattatgattatggacatattaatggtgcacgtaatattcctatcacagtatttaagcaacgatatcaaggactaagaaatgaccaacctatttatttatgtgatgctaatggtatagcaagttatcgtgctgcacgtatattaagaaaaaatggatataaaaatatttacatgcttaaaggcggttacaaaaaatggacaggtaaaataaaatctaaaaagtaa

SEQ ID NO: 3330 - DNA, 141 bp, Staphylococcus epidermidis
atgtccgttcgagagataaataaagccaaaagagaactagaatttgtactaatggcacttaatataagaaaagtaacagttcaacgagctaaaaataatcaaaaaaattataaaaagacaatttctatattttttcaatag

SEQ ID NO: 3331 - DNA, 1509 bp, Staphylococcus epidermidis
atgattagtaaatcaagtcctttaatatttgaaagatccaaaaaagatagatatgcgtattcattaccacaaaatgacattgagaatatcagtattgcttcactcttagatgataagtatattcgtaaacataaggctgaatttcccgaggtttcagaattagatttagttagacattataccgaactatcaaataaaaatttcggggtagatactggattttacccattaggttcttgtacgatgaaatataatcctaaaatcaatgaaaaggtagcccgtatttctggttttagtgaatctcatcctttacaagaagaagaacacgttcaaggttctcttgaaattatatatagtttacaagaagaattgaaggaaattactggtatggatgaagttaccctacaacctgctgcaggtgcacatggtgagtggactgctttaatgattttcaaagcttatcatgaaaaaaatggacaaagccatcgtgatgaagtaatagtgcctgattcagcacatggtactaatcctgcttccgcctcatttgctggatttaaatcagtaactgtaaaatctaatcaacgtggggaagttgacatagaagatttaaaaagagtagtaaacgataatacagctgcaatcatgttaactaatccaaatacactaggtatatttgaacagaatattattgaaatagggaaaatcgttcatgaagcaggaggtttattatattacgatggagcaaatttaaatgctattttagataaagtacgtcctggtgatatgggctttgatgcggtacatcttaatttgcacaaaacattcactggtcctcatggcggtggtggaccaggatcaggaccagttggagtagtagagaaattagccagttatctacctaagcctatggttataaaagataacgataggtataaatatgataatgatattccaaattcaattggacgagtaaaaccgttttatggaaatttcggcatttatttaagagcatatacttatatcagatcaatgggagccaatggtttaaaagaagtatctgaagctgccgttcttaatgcgaattatataaaatctcgccttaaaaatcactttgaaattccgttcaatcaatattgtaaacatgaatttgtattaagtggaactttacaaaaacaatatggtgtcagaacattagatatggctaagcgactgttagattttggtgtgcatccacctacaatatattttccactcaatgtcgaagaaggaatgatgattgagccaacagaaactgaatctaaagaaacacttgattactttattgatgcgatgattcaaatcgctgacgaaacaaaaaatgatccagataaagttttagaagcaccacatacgactataattgatcgattagatgagaccactgcagcacgaaaaccaattcttaaatttgaagaacttaaggacgaaaagtataaagaacacacaaatattgattctgaagataattaa

SEQ ID NO: 3332 - DNA, 1347 bp, Staphylococcus epidermidis
ttgagtcatcgttatataccattaacagaacaagataaaaatgaaatgctaaatagtattggggcaaaatctatttccgaattatttgatgatatacctacagatattttattaaaaagaaatttaaatattgccgaaagcgaagcggagacgatattacttagaaggttaaatcgtctcgcagctaaaaatacaactaaagaaacacatgcaacatttctaggtgcgggcgtttatgatcattatactccagctgttgtcgatgcaatgatttcaagatctgaattctacaccgcatatacaccttatcaacctgaaatttctcaaggtgagttacaagcaatttttgaatttcaaacactcatttgtgaattaacagatatggatgtagcaaattcttctatgtatgatggtatgactagttttgctgaagcatgtatattggcactaagtcatacgaaaaaaaataaaattgtagtttcaagtggactacattatcaagctttacaaattctacacacatacgccaaaactcgtgatgaatttgaaataattgaagttgaccttaaaggtactattactgatttagagaaattagaacaacttatcgatgacaacacagcagctgtcgctgtccaatatcccaatttttatggttctattgaagatttagaacaaattaataactatataaaggataaaaaagctttatttatcgtatatgccaatccactttctttaggattactaacacccccaggtacattcggggcagacatagtagtgggagatacacagccttttggtattcctacacaatttgggggtccgcattgtggatactttgctacaacaaagaaattaatgagaaaagtacctggtcgattagttgggcaaactcaagatgacgaaggtaatcgtggatttgttctcacgttacaagctagagaacaacatatccgccgtgataaagcaacttctaatatttgttcaaatcaagctttaaatgcacttgcatcttcaatagcaatgtcagctttaggtaaacaaggtatttatgaaattgcagttcaaaatcttaaaaatgccaattatgccaaaaataagtttgaagaacatggttttgaggtactaaaagcacaatcttttaatgaatttgtagtcaaatttaatcaaccaataaaaaatattaatcttaaattagcagaatatggatatattggtggttttgacttaggtgaagtatctgatgattttaaaaaccatatgttagtagcagttacagagttaagatctaaagatgaaatcgatgattttgttacgaaagcaggtgagttaaatgattag

SEQ ID NO: 3333 - DNA, 1092 bp, Staphylococcus epidermidis
atgacaacagatttgaaaaaaacacctttatatcaaaattacgttgatagtggtgctaaaattgttgagttcggaggatgggcaatgcctgttcaattctcaagtatcaaagaagaacataatgcagttagatataatgttggtctttttgatgtaagtcatatgggagagatagaaattagtggtaaagatgcagaacaattcatacaatacatcctttctaatgatacaaatcttctaacaaatgataaagcaatgtatagtgcgttatgtaatgatgaggggggcatcattgatgatttagttacatataaacttaatgaaaaccactacttgcttattgtaaatgcagccaataccaataaagattatcaatggattaagaagcatagctctaattttactgtagatgtgagcaatacttcagacaaatacggccaattagctattcaaggtcctcattcaagagcattaataaatgaattagtggatatagatgtaagccatatggcaatgtttgaattcaaacagaacgtacaaatctttggtaaatctattattctttcgcagtctggttatactggagaagatggctttgaaatttactgtaagcaagaagatactaaggatatatgggagcaattattagaatacgatgttacaccatgcggtttaggtgctcgtgatacgctaagacttgaagcaggattacctttacatggtcaagatttatctgaatcaattactccttatgaaggagggatagccttcgctgctaaaccgttaattgaaaatcattttattggcaaatccgtactcaaagctcaaaaagaaaatggttccgagcgtagaacagtaggtcttgaactattaggtaaaggcattgctagaacaggttatgacgtactagatgaaaatagtaatgaaattggtttcgttacatcaggaacacaatccccatcttctggtaaatctatagcacttgcaataatagatagagatgcatttgaaatgggcaaaaaagtaattgtgcaaatacgtaagcgtcaagttgaggcaaaaatagttaaaaaaaatcaaattgagaaataa

SEQ ID NO: 3334 - DNA, 513 bp, Staphylococcus epidermidis
ttgaagagtattcaagtgcctattattttagttggtttcatgggaactggtaaaactactgttggaaaatatctttcagatttatataatttaagttatgtggatttagataattttattgaagtaaatgaatgtaaatctatacctgatatatttaatgatatcggagaaaaaggatttagatcattggagactagatacctaaaatcttgtctcaatactttcgatattatttcaactggaggaggtattatagaagatacgaattcattaaagctcttaaaaaatcaaaagcatgtagtttggctagactgtgacattgaaatcattttcaaacgagttaaaaatgattcacatagacccaatgctaaaagtaaaaatcttaaccaacttgatgccttgtattcttcaagactttcaagatataatgaaatcgcattcatgaaagttgatagtgcacagagtgtttctgaaatttgcactttaattaaaacaaaattattaagcgattga

SEQ ID NO: 3335 - DNA, 462 bp, Staphylococcus epidermidis
gtggggaggataaagcatttaatacgcgaacatgtatttcaatttaatataaaagcatttacttacatcgaagcattatttgctttatttgtgactactttaattctcgctttattacctactatacttaaattgacttcgttttatcttaatactgctcaaaataacgaagatattcaatttgaattttttagaagagatttacttaaagagaaaatgacgactcaaaacaattatgagatagaaaatgcatatacaattaaacttaagaaagataaagatgttattagatatatttataaaaaccgtaaaatttacaaaaacattaatcaaaaaggtaatattacattgttaaatcacgtcttgtctactcgtatattaaaaacgaacgataatatagtaaaattattaataacaacaggagaaacgaacgatgaacacaaagaaatcctgtttatatag

SEQ ID NO: 3336 - DNA, 294 bp, Staphylococcus epidermidis
ttgtcaaaatataaatttaaagggtctttaattattgatgcattgctagccttttttatagttagtacaataacaatgattttaatatctatgttttcaaacttaaacaatcagtatcttatcaatttaaataatataaaaatcaagcaaatcatgataactagccttcaacactataaaaagaaagaactttatcaaggggttgtaatagaaaattatgaaatacaattattcaataataaaatatgtggggaggataaagcatttaatacgcgaacatgtatttcaatttaa

SEQ ID NO: 3337 - DNA, 438 bp, Staphylococcus epidermidis
ttgccaattaaaaacattaaagcatttagtttagtcgagatgatttttactttatttattatcagttgcttgttgataacaactttatggtcacgaagcctgttcgacattcagctaattgatgaagaatatgaaattaaacaattaataacaaaatttaattactataaatctaaagctattagcaacaacgaatcaataactttattattttttaataattcaaatagagtacaagtaattgaagaaaatggagataaatatagttttaaacttaataaaggcaaagtgattaatatagctaaaattcaaacattaaattttgataaaaatggaaatataaatcattttggatcgctcattttacaatataattcacatgcttatagattaatcttccatattgaaaaggggcgtttgagatttgtcaaaatataa

SEQ ID NO: 3338 - DNA, 318 bp, Staphylococcus epidermidis
atgaaaacattgaaattattgaaaaaaacacgagcatttaccttgatagaaatgcttttagtattactaataataagtttattgttaatacttataattccaaatattgcaaaacaaacatctcatattcagtcaactggatgtgatgctcaagttaaaatggtaaacagtcaaatagaagcctacgctttaaaacataatcgcaccccttctaatattgatgatttggtttcagatggttttataaaagaaggacaaaaaacatgtaaatccggtcagacaattagtattgcaaatggagaagcagttgccaattaa

SEQ ID NO: 3339 - DNA, 1068 bp, Staphylococcus epidermidis
gtgaagaagttgtcgataaatacatttaaatataagaggaataaatatcttactgaaatacaatcaatagacttactacagagattacaacagcttttaagtcacggattcactttatatcaaagttttaaatttttaaactcctattttaaatataaagaacgaacaataaataaaaagattatccaacatctacaaaacggtgctacatgttatgatattttaaaaataatagggtatccagaattagttcttcttcaaataaaatttgctgaaaactacggtaacattgaggaggctctcgttgatactgttcaatatatgaaaagaaatctgaaagctaaaaaacgactcatcaaaaccttacaatatcctgttgcattaatttctatcttcttattcatattaaccattttaaatataactgtcatacctcaatttcaacaactttatgagactatgaatgttaaattatcaacatttcaaaatctactaactcttattattacccgtcttcccaaactaactttcatttttatctttattagtggtatagcattttttatcacttataaattctactattatctaccaattgagaaaaagttaaaatctattttaaaaatcccaatgattaatacgtattataaaatatatagaacttatcaactttccaatcaactttctttattttacagaaatggtacaagtcttcaacaaattgtccatatatatcgtaatgagcaagataacgattttcttaaatttctgggtgattatctttttaaagaagctaataaagggctcccgttacctgttatattaatgaatttaaaatgttttcaaaatgatttgattaaattcatagaacaaggagagaaaaatgggaaattagatatagaattaaagttatacagtcaaatgctattacaacaatttgaagaaaaagtgttaaaacaaacaaaatttatacaacctatcatcttctttatcttgggaatttttattgtatctttatacttagtcattatgcttcctatgtttgaacttatgcaaacaataaaataa

SEQ ID NO: 3340 - DNA, 975 bp, Staphylococcus epidermidis
ttgaaaattttatttgaacagattatcaatcatgcaattaagcaagaagcaagtgacatacactttataccatgtgaggaacacactataattaagctaagaattaaagatgagctcacaatatatgatagactttcatttccaatttataaaaaattacttatatacatgaagtttcaatctggcttagatgtatcaacacagcatagagcacaaagtggtagatatagttataagatgaagcatttatattatttaagaatctctacattacctttatcattaggcaatgaaagttgtgtaattcgtatagtacctcaatacttccaaactacacgagaatcatatgaatttaaagattttaaacactttatgaaaaagaaacaaggtctacttttgtttagtggaccaactggctctggcaaaagtactttaatgtaccaaatggtcctttatgcacatcaaaaattgaatttaaatgtaatatcagttgaagatccagttgagcaaatacttaatggaatcacacaaatatcagtcaatgaaaaggcaggtataaattatgaaagctctttcaaagccattttaaggtgtgatccagatgtaattttaattggtgaaatcagagattctaccgtagctaaatacgtgattcaagccagtttaagcgggcatttagttttgtcaacaatgcacgcgaatgattgcaagggagcattattacgattattagaaatgggtatttctgtccaagagttgtgccaggcaatcaatttaatttctaatcaaagattaatcactactactacaaattatcgtcaactagtatcggaattaatgtttcaaagccaaataaattatttttttgaacataatcattctttacctaaaaatttcacaaaattagctacacatttaaacaaaatgtctaaagaaggtgttatatgtgaagaagttgtcgataaatacatttaa

SEQ ID NO: 3341 - DNA, 624 bp, Staphylococcus epidermidis
atgcgaatttcaaatttaacattaggaatagttgatactaatacgtatttcattgagaatgaagaaaatgtaatattaatcgatccctcaagtgaaagtcaaaaaataataaaaaaattaaatcaaatcaataaaactttaaaagcaattttattaacacatgcacactatgatcatatcggagcattagatgatattattgaaaaatatcaggttccagtttatatgagtaaagatgagtttgattttttaactgatccagataaaaatggctcatctaaatttacacaatatggtttatctaaaatagaaagtcacgcaaatcccttaagtttatcagaaggtcctgcagagattgaaggatttaaatttaaagtattacatacgccaggtcattcgccaggtagtcttagttttgtttttaatgactttgctgttgttggcgatactctgttcaaaaatggtatcggtcgtacagacctttataagggagattatgaaacattaattgattcaataaaagataaattatttgaattagagggtgatatgccacttttccctggacatgggccttacactacagttgacgatgagcaactcaatccgtttataaatggttaa

SEQ ID NO: 3342 - DNA, 327 bp, Staphylococcus epidermidis
atggcaattgttgatgtagtagttattccagtaggaacagagggacctagtgtaagtaaatatatagctgaaatccaaacaaagttaaatgaatttaaacaacaagggaaaattgattatcaattgacaccaatgaatacattaatcgaaggtgatttgaaagacctttttgaggtgattcaagcgattcatgaattaccttttgataaagggttagatagggtttgtacaaatattagaattgatgatcgtcgagataaatcaagaaaaatgaatgataaattaaaatcagtacaaaaacatctagaccatagtggtgaattataa

SEQ ID NO: 3343 - DNA, 987 bp, Staphylococcus epidermidis
atgacagatattattttagctgctgatataggcggaacaacttgtaaattggggatatttgacaaggatttagaacaattgcataaatggtctattgatactgatacaagtgaccacactggtgagttacttttaaaaaacatttataattcttttactgaaaagattgcagaatataaatatgattttaacaatgtagttggagtcggtattggtgttcctggacctgttgattttgatactggagttgtatacggagctgttaatttacattggcccgatagtgtaaatgtaagagaaattttcaaacaatatgttaattgtccagtttatgttgataatgatgctaatgttgctgctttgggagaaaaacataaaggtgccggcgaaggtgctgatgatgtagtagccattactttaggtaccggactaggtggaggtataatttctaatggagaaattgtacatggacacaatgggtctggcgctgagattggacatttaagagctgattttgatcaacgttttcaatgcaattgtggtaaatcaggttgtatagaaacagttgcttctgctactggtgtagtaaatttagttaatttctattatcctaaattaacgtttaaatcatcaattttacaacttattaaagataaccaagtaactgcaaaagctgtatttgatgcagctaaagctggcgatcaattctgtatatttataactgaaaaagtggcaaattatatcggttatttatgcagtatcattagcgttactagtaatccaaaatatattgttctaggagggggcatgtctacagccggacttatccttatagaaaatattaaaactgaataccgtaatttaacttttactccagctcaaaataatactgagatagtacaagctaagttagggaatgacgctggtattactggtgcagctgggcttatcaaaacatatatcatagataaagagggtgctaaataa

SEQ ID NO: 3344 - DNA, 201 bp, Staphylococcus epidermidis
atgacacgaaaaattaaaagtttttatgacgtgttacaattacttaaaacatatggtttcattatatattttaaaaatccagatgatatgtatgaaatgatgatacaagagattaaatccttatatagttatcaattgttaacgaaggatgaatatctaaattgtatactgataattaatcaaagaaggaatgaaaagtaa

SEQ ID NO: 3345 - DNA, 1461 bp, Staphylococcus epidermidis
atgaatattaataaactttattggaaggctttatactactggattaggtatcttaattataatgtaatttatcgtgataaagaggacgatgaaatatggttgtctcataagagaaaacattcaattgttgtatttagaaaagatgtcacatctacccaagagattaggtttgataaatcaaaaattatggaacgacctgaagaaatacaacaattcatcggttatatacctgaatcttatgaattttattattttacggataaagagctttcaaaagaaaatttaaatgaagaaaaaccaattaaactgaaatttaaaattataagcaatgagcaaagcttaaattcactccctataaactttttacttttaaaaatgctaattaataatgaagataaaaggacttaccttcattacaaaagaaaagttttaacacaaaatcttgttgataaacatatgcaacgttttacccctattacatatacacttatcttaattaatattgtgatatggttatgtatgattttatacttaaatcgattttctgatgttaaactattagaagtaggtggacttgttcattttaatgttgttcacggagaatggtatagacttatttcgtcaatgtttttacattttaatttcgaacacattttaatgaatatgctctctctatttatttttggtaaaattgtcgaatcaatcattggatcatggcgaatgctaataatttatataatatccggattatatggaaattttgtttctctatcatttaatacgactacaatttcagtcggtgctagtggagcaatatttggtctaattggttctatttttgtgattatgtatttaagcaagaattttaataaaaaaatgattggccagttattaattgctttggttgttttaatcgttttttcactttttatgtctaatattaatataatggcacatttaggtggatttatcagtggtgtattaattacattaataggctattatttcaaaacacaacgctctttattttggtcatttttgattgtatttttacttatattcatcattttacaaattagaatatttactataagtgaggataatatctatgataaattaattcgggatgaaatgattaaaggtaattatagcgaagcaaaaaatgttgtaaaacaaacacttaataataattacgccgatgatgaaacatattaccttagtggtttgattactgcaactaagagttcgcaagcagaggccgtatcagaatgggaaagaggtttaagaaaatttccaaattcaggtgtacttaattatgaattagctatagctaatcgttctttaagtgatgataaaaaggctttaaaatatataaaaaaagctgtagcaattaatcctaataataaaaaatatgttaatttaaaaaaagagttgagtaaatctaatgacacgaaaaattaa

SEQ ID NO: 3346 - DNA, 552 bp, Staphylococcus epidermidis
atggataaaaaaggactacgtagaaatataattaaaaagatgaaatcttacgacaaagaacaaaaatatttggctgatgaatggttggctaagaaattatatcaaagtgaagcttatcgcaaagctaacacaattggttttgttttatcgatgcctcatgaagttaatacatatccaattattactcattcgctaaacaataataagaaaatttttgttcctgaaacaaattatcaacagcaagacatgacttttaagcaactattatcaattgaggatatcgagaaagatagcaaaggtatttatcattctatttccccagtcggtacaacgaataaaatggacttagttgtagtaccgggggttgcatttgacaaattgggctatcgaataggatatggtggtggttattatgaccgattcctgagccaacataaatgtaatacagttagtttactatacgattttcagttagcccaattcaatatagaaccacacgatcaacctgtagagcaattaattatttatcacaataaagtggtggaggaataa

SEQ ID NO: 3347 - DNA, 150 bp, Staphylococcus epidermidis
atgcgcgtaaacgttacattagcttgtacagaatgtggagatagaaactatatctcaacaaaaaacaaaagaaataatcctgaacgtgtagaaatgaaaaaatattgttcacgtgataacaaacatactttacatcgtgaaactaaataa

SEQ ID NO: 3348 - DNA, 2040 bp, Staphylococcus epidermidis
atgaataaaagaatcaatttcatatttggatttatagtatttatctttgctatagtcgtattgagattaggttatttacaaatagcacaaggatctcattacaaacaattaatcaaaaacgatgaaaacataactgttaatgaatcagtaccaagaggccgaatactagatagaaatagcaaagtactagttgataatgcttcaaagatgtctattacatacactagaaaccgtaaaacatcacaaaaggaaatgttaaatactgctaagaaactgacagatttaattaaaatggatacagataaaattactgagagagataaaaaggatttttggattcaaatgtatccgtcatctgctaaaaagttaatgagaaaagaacaattaatgttagaggatggcagtatttcacaagaccaatttgatacccaacttagagataaaataggaaaaaaacaattaaaacagttaactaaaaaagatttgcaagttttagcaatttatcgggaaatgaacgctgggtcaactctagatcctcaaacaattaaaaatgaagacgtaagcgagaaagaatatgcagccgtatcacaacagctttctaaattacctggtgtaaatactacaatggattgggatagaaaatacccatacggtgatactttaagaggcatatttggagatgtgtcgacttcgactgaaggtatacctaaagaattaactgaacaatatttatcaaaaggttattcacgaaatgatcgggtcggtaaatcttatcttgaatatcaatacgaagatgttcttaaaggcacgaagaaacaaatgaaatatacaactgataaatctggaagagtaataagttcagaagtacttaatcctggctcaagaggtcatgatttacaattaactatagatattgatttacagaaaaaagtagaatctttattagaaaaacaaatttctaaattacgtagtcaaggtgctaaggatatggacaatgcgttaatggttgtccaaaatcctaaaaatggagacattctcgctattgcaggaaagcaaattgataagcaaggtaaactcaaagattatgatatcggcaactttacagctcaatacacagtaggttcttcagtaaaaggaggaacattattagctggataccaaaataaagctattaatgttggagaaactatggtagatgagccattaaaattccaaggtggtttaactaagcgttcttattttaataaaaatggtcatgtatctatcgatgataaacaagcacttatgcattcatcaaacgtatacatgtttaaaaccgcacttaaattagcaggtgacccctatacttcaggtatgtcattacctaataatatagcagatgctggtcgtaaattgcgtaaagggttaaatcaagtaggtcttggcttaaaaacaggtattgacttaccgaacgaaacgccaggccaaatagaacccttaactaataatcctggtaactatttagacttagctattggacaatacgacacatatacaccacttcagttgtcccaatacgtatcaactattgctaatgatggctatagaattcaaccacatattggattgtctatttatgaatctactaataaagatgaaactggtccattaaaacgtaaaattaagggtaatgttttaaataaggtaaataactcaaatgacgaaattaaagaagttcaagaaggcttcaaaatggctttcaatgaaaagcaaggtacaggttatgctagttttagaaatactgtagtaccttcagctggtaaaacaggaactgctgaagtttttcaagacggagaacctagagttaactcaacatatatcggttatgcacccgtcgatgatcctaaattatctttttcaattgtctatacaaatcaacctgttccaccaccttggttaaatggtggagatttaggtagagacgtaatcaactactattttaaagataaggataataaaaaagatgactctcaatctaataacgaagagaaagaagattaa

SEQ ID NO: 3349 - DNA, 600 bp, Staphylococcus epidermidis
atggcttttgaattaccaaatttaccttatgcatatgatgcattagaaccacacattgacaaacaaactatggaaattcatcatgacaaacatcataacacatatgttacaaaattaaattcagcagttgaagggacagatttagaagctaaatcaatcgaagaaattgttgctaatttagatagtgtgccatctaatattcaaacagctgttcgtaataatggcggtggtcaccttaaccattcattgttctgggaactattatcaccaaattctgaagaaaaaggtgaagtagtagataaaattaaagaacaatggggttctttagatgaatttaaaaaagaatttgcagataaagctgcagcacgctttggttcaggatgggcttggttagttgtaaacaatggacaattagaaattgttacaacaccaaatcaagataatccaattactgaaggaaaaacaccaattttaggtttagatgtttgggagcatgcttattatcttaaatatcaaaataaacgcccagattatatcaatgcattctggaatgttgttaactgggaaaaagttaatgaattatataatgcaactaaataa

SEQ ID NO: 3350 - DNA, 420 bp, Staphylococcus epidermidis
atgaatacaaatgatgcaattaaagttttaaaggaaaacggacttaaatatactgataaacgtaaagatatgctagatatctttgttaaagaggataaatatttaaatgctaaacatattcaacaacaaatggataaagactatcctggaatatcatttgatactgtatacagaaatcttcatttatttaaagatttaggcattatagagagtaccgaattagatggagaaatgaaattcagaatcgcatgcacaaatcatcaccatcatcattttatttgcgaaaattgcggagaaactaaagtgattgatttttgtccaatagaaaagattaaaagtcaattacccaatgtaaatattcatactcataaattagaagtgtatggtatttgtgaagaatgtcaacgtaaagcaaactaa

SEQ ID NO: 3351 - DNA, 849 bp, Staphylococcus epidermidis
ttgatagatgcgttattaaattttgattttattagatattctttgattagcggtctgcttattggctttatcgcaccattaataggtgcatttattgtagttcggagactatctttaattgctgacgctttaagccacgtgacattaggtggtatttcctttggtatgtttttgcttaccattattcccgttttctcagtaataaaccctatgtggtttggtattctttttgctgttattggagcgttattaattgaaaaattaaggacttcgttttctaattatcaagaaattgcaattcctattataatgagcgctggtattgctctaagtgctatttttatttctctagcagatggttttaatcaagaaatcgtaggcctactatttggatcaattagtgcagtaaatattagtgatttaactacaattattatcattacaataattgttctcatatttattgttttattttataaagaattgtttattttatcatttgacgaagaatatagtaaggtcataggtataccaaagtggattcaatttttatttatagtaattgttgctatggtaatatctgcatcaatgagagttgtaggtatattattagtaagcgcgttaataactcttcctatagcaatttcaatgagaataactaaaggatttaaacaattaatagcattaagtgttatattaggagaattatctgtaattctaggattaattatagctttttatatgaatatatcacctggtggcgtcattgttgtactattggtattaatgctcatactaacgatgattattcagaagttaaaaattaagtttaaaaagggagtcgtttaa

SEQ ID NO: 3352 - DNA, 783 bp, Staphylococcus epidermidis
atgacaacaccagtttttgaattacgaaatttagattattatttcgataataagcatgtattagagaacataaatatcaaaattaatcagggagaatttttagcaattgttggtccgaacggggcaggcaaatctactttactaaaagttatactagggctattgcctatacaaaagggcgagataattgttgatggaaaaccatttaaaggtaataaatcttcattgaaaattagctatgtttctcaaaaagcttctgccttcaatgcaggtttcccagctagtgtaaaggaagttgttttaagtggtctgactaaaacaaaaaaattatttcaaagatttaataaaaatgactatcaaaaagtcacaaaggtattagagagattaaatatatctcatttaataaataaaaatatagctgaactatctggtggtcaacaacaacgtgtacttattgctagagcacttatttcagacccaagtgtgctagtgttagatgaacctacaaacggaattgatgcaaaacatgtaagcaaattttacgatacacttgataaattaaaaaaacaggggattacaataattttagtcactcacgatattggcgttgtagcagataccgctactgaagtagcatgtttaaataaacatcttcatttccacggttccacagaagcatttaagtctttagatgaagttgaaatttcaaaaatttatggtcatcctattcaatttgttgatcatcaacacaaccgaacatgttgtaatgagggaaatgaataa

SEQ ID NO: 3353 - DNA, 891 bp, Staphylococcus epidermidis
atgttaataggatcacatgtttcaatgagtggcaaaaaaatgctgcaagggtcagcagaagaagcacataaatatggtgaatctacatttatgatttatacaggtgcgcctcaaaatacaagacgtaaaaatattgaagatttaaatatcgaaaagggccagcaggcaatgaaaacatatggcttatcaaatatcgttgtacatgcaccatatatcattaacattgcaaatacaaccaaacctgaagtatttaatttaggagtcgactttctacaaaaagaaatcgaaagaactcaagcgctcggagcgaaagatattgtactgcatcctggagcgcatgtcggagcaggtgtagataaaggaattcaaaaaattattgaaggacttaatgaagtactcacacatgataatgatgtaagaatagcacttgaaactatggcgggtaaaggaacagaagtagggagatcttttgaagaaattgctcaaataattgatggtgttacacataatgatcgcttatcagtatgttttgatacgtgccacactcatgatgccggttataacgtcaaagaagatttcgatggtgtactagaaaaattcgacagcataattggaatagatcgaattaaagtagtacatgttaatgacagtaaaaacctaagaggtgcacagaaggatcgtcacgaaaatatcggctttggtcatattggctttgatgcacttaattacgtagtacatcatgatacttttaaaaatattcccaaaatattagaaactccatatgttggtgaagataaaaaaaataaaaaaccaccgtataaattagaaatagacatgttaaaatcacaaaaatttgatccagaactcaaaaacaaaattttaactcaataa

SEQ ID NO: 3354 - DNA, 1347 bp, Staphylococcus epidermidis
atgtcaaaacatccatttgaacactttaatttagatgagaatttaattgaagctgttaaaaatctcaattttgaaaaaccgactgaaatccaaaatagaatcataccgagaattcttaaaggaacaaatttaataggacaatctcaaactggaactggaaagtcacacgcttttcttttaccattaattcaacttatagaaagtgacattcaagagccacaagccatcgtagtagctccaacacgtgaacttgctcagcaactatatcaagttgctatgcatttagtaaaattcaaaaaaggtataaatgtaaaacttttcattggtggtaccgatttagaaaaagataaacaacgatgtagccatcaaccacaactcattattggtacaccaacaagaattaatgatttagcacattcaggttatcttcatgcacatttagcgtcatatttaattatagatgaagctgatttaatgattgacctcggtctcattgaagatgttgaccatattgcagcgagattagatgatgaaaatgctcatctagcggtatttagtgcaacaatacctaaatcattacaaccatttttaaataaatatttaagtcaaccagaatttgtagaagttgatggcaaagctcataataaagaaaatatcgaattttatctaattcctacaaaaggttctgctaaggtagataaaacattggaattgatagatatattgaatccttatctatgtattattttctgtaacagtcgtgaaaatgccgatgaattggcaaacactttaaataaagaaggaattaaaataggtatgattcatggtggtttaacaccaagagaacgtaaacaacaaatgaaaagaataagaaatttagattttcaatttgtcattgcaagcgatcttgcttctagaggaatagatattgaaggcgtaagtcatgttattaatttcgatgtacccaatgatatcgatttcttcacacatcgcgtaggtcgaacaggaagaggtaattataaaggtgtagccattacattatatagtcctgatgaagaaagtaatattactcttattgaagacagaggttataaatttgaaaatgtagatattaagaatggtgaattaaaaccgataaaggcatacaatatgcgtaaatcaagacagcgcaaagatgaccatttaacaaatgaagttaaacacaaagtaagaagtaaatcaaaacgtaaagttaaaccaggctataaaaagaagtttaaacaagaagttgaaaaaatgaaacgtcaagaaagaaagcagtatagtaaaaagcaaaatagacaaaaacgaaaaaataataaaggatag

SEQ ID NO: 3355 - DNA, 1101 bp, Staphylococcus epidermidis
atgaaaattagtgaactgatggaagttttaaataatcacgttccatttcatcaagctgaatcatgggataatgtaggattattaattggtaatgataagttagatattacaggtattctgacaacactcgactgcaccgatgatgttgttaaccaagcaattgaacttaataccaataccatcattgctcatcatccacttattttcaaaggagtaaaacgtatcgttgaagatggatatggtagtataattcgtaaacttatccaaaataatatcaatcttatagcattacacactaatcttgatgtaaatcctaaaggtgtcaatcgaatgttagcggatcaaataggtttagagaacatatcaatgattaatacaaatagctcatattattacaaagttcaaacttttatacctaaaaattatattgaagatttcaaagacagtttaaacgaacttggattagctaaagaaggtaattacgaatattgtttctttgaaagtgaaggtaaagggcaatttaaaccagtaggtgatgcaagtccttatatagggaagttagatagtatcgaatatgttgatgaaataaaacttgagtttatgataaaagacaatgaattagaaataactaaacgtgttattttagataatcacccatacgaaacaccagtttttgattttattaaaatgaacaaagaaagtgagtatggattagggattattggacaattaaaccaaactatgactttagatgaattttctgaatatgccaaaaaacagctcaatataccgagcgtacgatatacaggtcaacatgatagtccaattaagaaagtagctatcataggtggttcaggtataggatttgagtataaagctagccaacttggagcagatgtttttgttactggtgatattaaacaccatgatgctttagatgctaaaatccaaaatgtaaatttattagacatcaatcattatagtgagtatgttatgaaagaaggattaaaagaattattagaaaaatggttatttaaatatgaaaatcaatttccaatatatgcttctgaaatcaacacagatccatttaaatataaataa

SEQ ID NO: 3356 - DNA, 690 bp, Staphylococcus epidermidis
atgattaaccttaaccaaagattatcaattgtatgctcatttattaaaagaggaacattggctgatattggctcagaccacgcatatctacctatatatgcaattcaaaacgacttatgcacaaaagcaatagcgggagaagtgattcaaggaccttataaggctgctaaaagaaatattgcaaattatgaattaaatcaacaggttgatgtacgtctaggcgatggtctaagcgttataaactcagaagaccaaattgataatataactgtttgtggtatgggagggccattaattgcaaaaatattaaacgatggaaaagataaattagttaaccatccaagactcatactacaaagcaacatacaaactcaagcattaagacaaactcttaataaactttcatatgaaatcgttgatgaaagaatcattgaggaaaagggtcacatatatgaaatcgtggtagctgagtttaataataacttagttaaattaaatatattacaagaaaaattcggaccatttttacttagagaatgtaataacatttttcaaaaaaaatggcaaagagagttagaagcactgcgtgatataaaatcccaattgaattcaacatcacatcatgagagactaaaagaaatagaagatgaaattaacttaatacaagaggtgttaattaatgaaaattag

SEQ ID NO: 3357 - DNA, 1107 bp, Staphylococcus epidermidis
atgtctgacaaccaagttaaaattaaaaagcaaacaattgatccgactttaacactagaagatgttaaaaaacaattaattgataaaggaaaaaaagaaggtcatttaagtcacgaagaaatcgctgaaaaactgcaaaattttgaaatggactcagatcaaatggatgatttcttcgaccaattgaatgacaatgacattacacttgttaatgaaaaagatagttctgacacggatgataaaatcaatcctaatgatttgagtgcccctcctggtgtcaaaatcaatgacccagtgcgtatgtatttaaaggaaattggtagagttaatcttttaagtgctcaagaagaaattgagcttgcaaaaagaattgaacaaggtgatgaaattgctaaatcacgattagctgaagcaaacttgcgtttagttgttagtattgctaaacgatatgttggtcgtggaatgttattcttagatttgattcaagaaggtaatatgggcttaattaaagctgtggaaaagtttgattttagcaaaggatttaaattttcaacatatgccacttggtggattagacaagctattacacgagcaattgctgaccaagcacgtacaattcgaataccagtacacatggtagaaacgattaataaattgattcgtgttcaacgtcaattattgcaagatttaggaagagatccagctcctgaagaaattggagaagaaatggatttaccaccagaaaaagtcagagagattttaaaaattgcacaagaacccgtttcattagagacgccaattggtgaagaagatgatagtcatttaggagatttcattgaggaccaagaagctcaaagtccatctgaccatgcagcatacgaattgttaaaagaacaattagaagatgttttagatacacttactgatagagaagaaaatgttttacgtttacgttttggtttagatgatggacgaacaagaacactagaagaagttggaaaagtattcggtgtaacacgtgaaagaattcgtcagattgaagcaaaagctttaagaaaactaagacatcctagtcgaagtaaacgtcttaaagatttcatggattaa

SEQ ID NO: 3358 - DNA, 1797 bp, Staphylococcus epidermidis
ttgcgtatagatcaatccgtcattgatgaaataaaaaataaaactgatatattagatttagttagtgaatatgtaaaacttgaaaaaagaggacgcaattatatcggtttgtgtccttttcatgatgaaaaaacaccctcatttacagtttcagaagataaacaaatttgtcattgttttggatgtaaaaaaggtggtaatgtttttcaatttacgcaagaaattaaagacgtatcatttgttgaagctgtaaaggacttgggtgaacgagttaatattcaagttgatatcgggcagaaccaaacaaattcctcgacaaaaattgcgtctgatgagttgaaaatgattgagatgcatgaactcattaaagattattatcattatgctttaatgaaaacagttgaaggtgaggaagccctaaattatttacatgaacgcggctttacggatgaccttattaaagaaagagaaattggatatgcacctgataactcacatttttgtcatgattttcttgaaaaaaaaggatatgatatagaactagcatttgaagcgggtttgttatctcgtaatgaagagaatttcacatattttgatagatttagaaatagaattatgtttccattaaagaatggacaaggacgaattgttgggtattcaggacggacatatactgatcaagaaccaaaatatttaaatagtccagaaacacctattttccagaagcgtagaattttatataatttaaataaagcacgtaaatttattcgaaagcaagatgaaattattttattagaaggtttcatggatgtaattaaatcagattatgctggtttaaaacaagttgtcgctagtatgggtacacagttatcacaagaacatattacttttttacaaaaactaacgcaaaatgtaacattaatgtttgatggtgattatgctggtaaagaagctactctaaaaactggacaagcactgttgaatcaaggcttaaatgtgtatgtggttcaactaccttcaggtatggatcctgatgactatattagaaaatatgataacgaacaattcttaaaatttgttcaacaagacaaacaatcatttgtgctatttaaagttaaaatgtatcaaaatgagattaatcataatgatcttgcatacgaaaaacattttaaagaaactgtgcgagacctttctttagtcaattcaggtatcattcgtaataaacttattcaaaacatagctgatatatttaaagttaatccagaaaccattcaatatgagttagatgcaacttatcaacatcagatgtcgtcgaacacttatcccacttttcaagatgagccaagcaaacaacaattaatactcggtcgtctgactaaaaatgagaaagcagaaagagctttaattaagcatttaacgaaagataaagatacttttttgaattattatcaaaaaattgtgccagaagactttacaaatagctatttaaagcgtatatttagttatttgtacgactattattcaaaaaatgattattatacaattagcgatatgatgcaatatattgaatctaatgaattgagagaagttcttattgaattagatcaatatcatctaaatgatgaaccttatgaaaacgaaatagaggactatattcaaattattaaaaataataataacgaagattccttagaaagtttgaattataaattaagggaagcatcgcgtattggagattcagaattacaaaaatattatttgcaacttatcgttaacaaaaataaaaatcgaatgtaa

SEQ ID NO: 3359 - DNA, 819 bp, Staphylococcus epidermidis
atggataatataaagataattgttgcctctgattcaattggtgaaactgcggaactcgttgcaagagcaggcgtttcacaattcaaccctaaacaatgtaagcatgaattccttcgatatccatatatcgaatcatttgaaaatgttgatgaagtgattcaggttgctaaagatacgaatgcaatcattgtttatacattaataaaacccgaaattaaaaagtatatgatatcaaaagtcaatgaacatgcattgaaatctgttgacatcatgggtccactaatggaattgttatcgaattctattgaagaaacaccttattatgaaccaggaatggttcaccgattggacgatgcttattttaaaaagattgatgcaatcgaatttgctgttaaatacgatgacggaaaagatcctaaaggattgccgaaagcagatattgtgttacttggcatttcaagaacatcaaaaacacctttatctcaatatttagcacataaaagctataaagtaatgaatattccaatagtacctgaagtgactccaccagacggtttatttaatgttgatccatcaaaatgtattgcgttaaaaattagtgaagaaaaattaaatcgtatacgtaaagagagattaaaacaattaggattaggtgacaaagctagatatgcaactgaagcaagaattcaggaagaattagattactttgaaaagttagtcgataagattggttgtcctgttattgacgtttcagataaagccattgaagaaacagcaaatgatattattcattttatcgaacaaaataaatcgaaatga

SEQ ID NO: 3360 - DNA, 492 bp, Staphylococcus epidermidis
atgtctggttttatagaggcacgtcctcgagtaggttatttctattctggtaaatctaaaaataaaatcataaacgaaaaattacgaaaatatgttgtaaaagattatatgtcgcatcctgttgtcataaaagaaaacatgactgtttatgatgctatatgtaccatctttttagaagatgtcagtacattatttattacaaatgagaataacgattttgtaggagtatgttctaggaaagacttacttcgtgcctcaatgattggtgaggacatacatacaatgcctatcagtgtaaatatgactagaatgcctcatgtttcatatttaaaagaacaggaactcgttatttatgctgcaaatcaaatgattgataaagagatagattcattaccaattgttagacctaaagaaaacgacaaatttgaagtaataggtcgcatctctaaaacaacaatcactaaattattcgtttcattatttaaagaatag

SEQ ID NO: 3361 - DNA, 1392 bp, Staphylococcus epidermidis
atggttaaaaatatggatacaattgtacaacttgcgaagcatagaggatttgtattccctggtagtgatatttatggtggattatcgaatacatgggattatggtccgttaggtgttgaattaaaaaataatattaaaaaagcttggtggcaaaaatttattacgcaatcaccttacaatgtgggtattgatgctgcgattcttatgaatccaaaaacatgggaagcatcaggacatttaggaaattttaatgatcctatgattgataataaggacagtaaaattcgttatcgtgcagataaattaatcgaagattatatgcaaaatgaaaaaggtgacgaaaactttatagcagatggcttaagttttgatgagatgaaaaaaattatagatgatgaaggaattgtttgtccggtcagtaagactgcaaactggaccgatatccgtcaatttaatcttatgttcaagactttccaaggtgttactgaagattctactaatgaattatttttacgacctgaaacagctcaaggtatttttgtgaactataaaaatgttcaacgttctatgcgtaaaaaattaccttttggtattggtcaaattggtaaatcattccgtaatgaaatcacaccaggaaactttattttcagaacaagagaattcgaacaaatggaacttgaattcttctgtaaacctggcgaagaaattgagtggcaaaattattggaaaacttttgcaagtgaatggttaacagatttaaacatctcagaagacaatatgcgccttagagatcatgatgaagatgaattatcacactattccaatgctactactgatattgaatataaattcccatttggttggggtgaattatggggtattgcgagtcgtacagactatgatttaagacaacatagtgaacattcaggtgaagattttaaatatcacgatcctgaaacaaacgaaaaatacattccttattgtattgaaccatctcttggtgcagatcgtgtgactttagcatttttatgtgacgcgtatgctgaagaaggtgttgaaggtagtaaagatgcacgtacagttatgcacttccaccctgctttagcaccatataaagcggcagtattaccattaagtaaaaaattatcaagtgaagctattaaaatttttgaacaactaagctctagctttgcaatagactttgatgaatcacaatctattggtaaacgttatcgtcgtcaagatgaaataggtacaccatattgtattacttttgattttgattcattagaggacaaccaagtaacagtgcgtgacagagatagtatggaacaagtacgtatgccaatatcagaacttgaaacatttttagctgagaaagttaaattttag

SEQ ID NO: 3362 - DNA, 756 bp, Staphylococcus epidermidis
atgaaacaaaagggcatcattatcaaatctgttgattatggtgaatcagacaaaattattacaattttaaatgaatacggagctaaaataccactaatggccagacgagcaaaaaaagttaagtctggacttcaagcaaatacacagcttttcgtatatggcttatttatatataataaatggcgaggcatgggaacactaaattctgttgatgtgattaatcaacattatgaactccaactcgacttatttgaaagtagctatgcatctttatgtgctgaaacaattgaccgatcaatggaagagaatgaggtttcaaaatataattatgacttacttcaatttgttctttccaaaattaacgaaggaacccctgcacaattaatgtctgtaatcgtcttattaaaaaatatgtctaaatttggattcacagcttcatttgatcactgtgcaattaccggcattcaagatcaatcaaaacttatagcgtatagttttaaatttgacggtgctatttcagaatctgcattatatcaggatcaacatgcttttcatctctctaatcgcaccttatatcttcttaatatcctgcagcaattacctataagtaagatgaatcatttaaatattcagcaagacatattaaatgaaatgtctgaactacttatcatgctttatcgtgagtatgctggtatgttttttaaaagtcaaaaattaataaatcaattaaatagattagaaaaagattcattgtaa

SEQ ID NO: 3363 - DNA, 900 bp, Staphylococcus epidermidis
atgacagaacataaatcaggatttgtttcaattatcggtagacctaatgtaggtaaatctacctttgtaaacagagtaataggacataaaattgctattatgtcagataaagctcagacgactagaaataaaatacaaggtgtgatgacaagagatgatgctcaaatcatctttatcgatacacctggtatccataagcctaaacataaattgggagattacatgatgagagtagctaaaaacacactttctgaaattgatgctattatgtttatggttaatgtaaatgaagatataggtagaggagacgagtatataatggaaatgctaaaaaacgtcaaaacacctatatttttagttttaaataaaattgatttggttcatccagatacattgatgccaaaaattgaacaatatcagtcatatatggattttacagacataattccaatttctgctttagaagggttgaatgttgatcattttattgatgtattaaaatcttttttaccagaagggcctaaatattatcctgacaatcaaatttcagaccatcctgagcaatttgtggtgagtgaaatcattagagaaaaaattctacatttgactagtgaagaaattccacatgcaattggtgtcaatgtcgatcgtatgattaaagaggatgaagatagagtacgtattgaggcgacaatttatgttgaaagagattcacaaaaaggtatagtaataggtaaaggtggtaaaaagcttaaagaagtgggtaaacgtgcacgtagagatatcgagatgttacttggctcgaaagtttatcttgaattatgggtgaaagtacaacgtgattggagaaataaggttaattttataagacaaattggatatgttgaagatcaagattaa

SEQ ID NO: 3364 - DNA, 405 bp, Staphylococcus epidermidis
atgagttatcaatcacactactttaaagaagtccgagaggcacaaaaaaatgcttacgcaccatacagtaactttaaagttggtgcttatttaaagacgaaagatggtcgatgtttttatggagcaaatgttgagaacgctgcatatcctatgggaatatgtgcagaaagatcaagtttagtaagcgctatatcagaaggttatcaaccaggtgattttgaatccattacagttactgtcgatgctgataaaccatcatccccatgtggcgcatgtcgccaggtgatgatggaactttgtgataaagatatgcctgtatatatgaccaatcaaaacggagatatgatagaagctacagttgatgaattattaccattaggattttctggaaaggatttaaattaa

SEQ ID NO: 3365 - DNA, 249 bp, Staphylococcus epidermidis
gtgttaaatattgatcgtatagattggatattaatcatcgtagctataggacttgttttaagttttgaagctattaatacctcaattgaatttgttgttgacctaattacaactgactatcatgaatatgcaaaatacgctaaagatatagctgcgtttagtgttgtcatcgtttcaatcgtttcaatatgtattgggttaatcgtttttttaccatatatattagaaatatttaagggaggaatgtaa

SEQ ID NO: 3366 - DNA, 468 bp, Staphylococcus epidermidis
atgtttactatagattttagtgaccatacaggtctagtagaaacgtcttggtttgaccaaatagatcaattattaacattcgctaagaagaaagaaaatattcataatgatgccgaattgtcagtaacttttgtagataaagatgaaattcaaaatataaataaagtatatcgcgacaaagataaagttactgatgtcatctcatttgctctagaagaagatgaaccagaaatagatttcaatgactttgatataccacgtgttctaggtgatattattatatgtagagatgttgccaaagaacaatcagaaagctacggacactcatttgagcgtgaattaggatttttagcattacatggctttttacatttgctaggatatgatcatatgaatgataatgatgaaaaagaaatgtttggtcgacaagatgctatactaaacgaatttggtctaactagaaattaa

SEQ ID NO: 3367 - DNA, 948 bp, Staphylococcus epidermidis
atgccaggaataattcaaattgacgatattaatcaatctcaagctttaataggaaataacgatgaaaacctaaaagcgattgaagcacattttaatgtcgtaatacatgctagaggtcaagaaattgctgttaaagatgaaaaaatagagcatgttgaaaaagcagaattagttctaaagaatttacttaaagtaattgaattaggtaatacaattacgcttaaagatgtagaagctgctataaaaatggccgacaataatacaattcatcatttattagatttatacgatgaagaaattacaaaagatgcttatggtaaaacaattcgtgctaagactatgggacaacgtatatatattaatgctatgaaacgtaatgatttagtatttggcattggtccagctggaactggtaaaacctttttagcagtcgtatatgcggctaaacaactacgtaaaggatctgttaagcgtattgttctaacgagacctgctgttgaagcaggtgaatctctaggatttctaccaggcgatttaaaagaaaaagtagatccatatttaagacctctttacgatgggttaaatactgttttaggtagagagcaaactcaaagactcatcgaacgaggtgtaatagaaattgcgccattagcatatatgagaggtagaaccctagatgatgcatttgttatattagatgaagctcaaaatacgacacatgcacaaatgaaaatgtttcttacccgcttaggatttggatcaaaaatggttgtcactggtgatcaaactcaaatcgatttaccaaaaggtgtaaaaagtggtttgaaagaagcggtaaaaaaactaagtggtgtcagcggcataagtatcatgaaaatggatcaaagtgatgtagttagacatccacttgtaagtaaaattattaatcgttatgaaggagttgaataa

SEQ ID NO: 3368 - DNA, 684 bp, Staphylococcus epidermidis
atgaatattggcattatcattttcatcatatctgtgataattacaggtgttagcgcattacgagataaaagtcacgaggacagacaaaatcaaagacccaatcaaaaaacctcaaacgagcaacatcaagaaggtggtttctttgaaaaattagaaaaaacttttcaagaaattagtgacgaattaaatgatgaacctgaaaaaaaacagagtaaaccttttgaaacttcattaccaccactgaacgaagattggaatgaaaatgaaaagaaaaaaacatcacatcataaagaaaaacaaaatacttcacaatccaaacgtcaaacaacgtctactcatgaacatcaaaatatccctcagccagataaaacaacatcaagagatgataattatgaaaaacttaagcaagaacttgaacaagatgtaactaaaaatttaattgacgtacgtaaagaaattgataaagaaaaagaaaagcaacttgttatgattgagaggaaagctcaagacattatcaacgataaatatctttcagaaagaacaaaacgatatagaataaaacaactactaaattctaggaatgttgagaaaaacatgtcgcgctctgcttttcaatatgatagtgatgaagttattaatggtattatttggtcagaaattttaaataaaccaaaacagctttaa

SEQ ID NO: 3369 - DNA, 990 bp, Staphylococcus epidermidis
atgtttagtattggttttataatcattgcagtcattatagtagttgcactactcattctgttttcatttgttccggtcggattatggatttcagcactagctgctggagtacatgttggaataggcacacttgtggggatgcgtttaagacgggtttcaccaagaaaagttatcgcacctctgatcaaagcgcataaagctggtttaaacttaactacaaatcaacttgagtctcattacctagcaggcggtaatgttgatcgtgttgtagatgcaaacattgcagcacaacgagcagatatcgacttaccatttgagcgaggcgctgccattgatttagcaggtagagatgtattagaagcagtacaaatgtcagttaatccaaaagttattgaaacgccatttattgcaggtgtagcgatgaatggtatcgaagttaaggcgaaagctcgtattaccgtacgcgctaacatagcaagacttgttggtggtgctggtgaagaaacaatcattgctagggtcggagaaggtatagtatctacaattggttctagtgagcatcatacagaagtgctcgagaatccagataatatctcaaaaacagtactaagtaaaggtttggactctggaactgcattcgaaattctatctatcgatattgccgatgttgatattagcaaaaacatcggtgctgatttacaaacagaacaagcacttgctgataagaacattgcacaagctaaagcagaagaacgtcgcgcaatggctgttgcttctgaacaagaaatgaaagcgcgtgttcaagaaatgagagctaaagttgttgaagctgaatccgaagtgcctttagctatggcggaagcattaagatcaggcaatattggagttaaagattattataaccttaaaaatattgaagcggatacaggtatgagaaatgcaataaataagcgcactgatcaaaacgatgatgaatcaccacaacaataa

SEQ ID NO: 3370 - DNA, 711 bp, Staphylococcus epidermidis
atggataacttacatctaatacatatgctatttatggcaaaacctttaaatggaatgaattgggttgaaaaccttgcacagtttatcactcaaccttttgtttctcttattttcacttgtattatatttattggctttttataccaactatattcaaagcgcataaacttaatgggaataatagcattacttgctttactacttttatttttagcattcctaattaatggcgatgtcaatgtgatgtcagtattactgtttacaattggcctcatactactgattgttgaattatttgttataggcgctgtaataggtattattggtattattctaataacactaagtattattatacttggtgacaatattttattaatgcttggaaatgttatagttgcattaatattatcaattgtagaatgggtgattttagtgaaaatattcaatagaaaaattccatttttagataaagttattttaaaggattcaacaaattctgaagcaggttatcgttcacatgacgaccgctctcatcttgtaggaaaaactgcacatactgttaccgatttaagaccagcaggaattataacttgtgacaatgatcgaatagacgcagtatctgatggatcatttattttacgtaatcgacaagttaagattcttgaagttgaaggtacacgtgttgttgttagagaaatcgaaaaataa

SEQ ID NO: 3371 - DNA, 177 bp, Staphylococcus epidermidis
atgtctaaaacagtagtacgtaaaaatgaatcactagaagatgctttacgtagatttaaacgttcagtatcaaaaagtggaactattcaagaagtacgtaaacgtgaattttacgaaaaaccaagcgtaaaacgtaaaaagaaatctgaagctgcacgtaaacgtaagttcaaataa

SEQ ID NO: 3372 - DNA, 1347 bp, Staphylococcus epidermidis
atgtcaacagttgcgtttcacacattaggttgtaaagtaaaccattacgaaactgaagcaatttggcaattatttaaagatgcaaattatgaaagagtagaatttgaaacaaatgctgatgtatttgttattaatacatgtacggtgacaaatacaggggataaaaaaagtcgtcagataataagaagagctattagacaaaatcctgatgcagtcgtttgtgtaactgggtgttacgcacaaacatcatctgccgaaattatggaaatccctggtgttgacatcgttgtaggtactcaagaccgacataaattgttagactatatacaacaatttcaggacgagagacaacctattaatggtgtaggcaatatcatgaaaaatagaacttatgaagaattagaagttccttactttactgatagaacacgtgcttcattaaaaatacaggaaggctgcaataatttttgcacgttctgtattatcccgtgggcacgtggattgatgcgttctagagatccagaaaaagtagtagaacaagctactcaacttgttaactctggttataaggagattgtattaacaggtattcacactggtggttatgggcaagaccttaaaaattataatctagcacaattgctaagagatttagatactattgaagggcttgaacgtatacgtatttcttctattgaagcaagtcaacttactgatgaagttattgatgtcattggaaactcaaataaggtggtacgtcatttacatataccgctacaatctgggtctgatgatgtgttaaaacgtatgagacgtaaatataccatggcacatttttcagaaagattgacaaaattacatcaagcattacctgatttagcagttactagtgatgtaatcgttggtttccctggagaatctgaagatgaattccaagaaacttacgatttcatcgtaaatcatcatttttcagagttacacgtattcccttattctcctagaataggaacgcctgctgcaagaatggacaatcaaattgatgaagaaacaaaaaatgttcgtgtacacaaactaattagtctaagtaatcaattagccaaagaatatgcttctaaatttgaagatgaagttttagaagttatacctgaagaaatgggtgaagaaccacatacacttgttggctatgctgacaattatatgaaggtaagatttgaaggagatgactcattaataggtcaaatagtaaaggtcaagatagttaaagccaattatccaattaatgaaggcaaagcaatacgtgttgttaaacatgcaacgaatcaatctgaaaaagaagtacttgtttaa

SEQ ID NO: 3373 - DNA, 738 bp, Staphylococcus epidermidis
atgaatcaaagcgctgatgaaaatcagtgcttttttattgaaaacaaagaagactatcatcatatcgtgaatgttatgcgctataaagaaggacaaaatattattgtcactttttcagatgaaaatgtattcaaatgtaaaattatttcaataaacgatcaatcgattgaaattaaattagtagaaaagcaacaaattaacactgaactacctcagaacattacaatatgtagtggtttaatcaaagcagacaaatatgaatggatgatacaaaaagcaactgaaatgggggcaaatgagtttatagctgtagctatggaacgttctgtggtcaagctcaatgattctaaagtagaaaagaaattatcgagatggcaaaaaattataaaggaagctgcagaacaaagttatcgtttaacaataccaaatataaaatttaagtcgaatttaaaagaaatttatggtatgataagtcaatatgactatgttcttatagcatatgaagaacaagcaaagcacggtgaattaagtcaatttaagcaaacaattaaacaatttaagacacaggatcgtgttttaatcatatttggacctgaaggtgggctatcagatagtgaaatttcattattcggtgatgtaagtactatagttggattaggtccacgtatcttgcgtgctgaaactgcacctctttacgctttaagtgcagtaagttatgaaaaagaattattggggtga

SEQ ID NO: 3374 - DNA, 939 bp, Staphylococcus epidermidis
atgaattggatggaactctcaattgtagttaatcacgaagtagaatacgatgttacagaaattcttgaaagttatggctctaatggagttgtaattgaagattcaaatattttagaagaacaacctattgataagtttggagaaatttatgacttaaaccctgaagactatcctgaaaaaggagttcgattaaaagcttactttaatgagttcacttataatgaaaacttaaaatccaacatcaattatgaaatattaagtcttcagcaaattgataaaacaatttatgattaccaggaaaaacttattgccgaagtagattgggaaaatgaatggaagaattattttcatccatttagagcttcaaaacaatttacgatagtaccaagttgggaatcatatgttaaagaaaatgataacgaattgtgcattgaattagatccaggtatggcttttggaacaggtgatcatccaacgacaagtatgtgtttaaaagcaattgaaacttttgtaaaaccaactgattcagttatcgacgttggaacagggtcaggcattttaagtattgctagtcatttacttggagttcaaagaataaaggcattagatatagatgaaatggctgtaaatgtggcaaaagaaaactttaagaaaaatcattgtgatgatgcaattgaagcagttccaggtaatttattaaaaaatgaaaatgagaaatttaatatcgttattgcaaatattcttgctcatattattgaagaaatgattgaagatacttataatactttaattgaagatggttattttatcacatcaggtattattgaagaaaagtatcaagatatagaatcacaaatgaagcgtattggtttcaaaattatttcagtagaacatgacaatggctgggtttgtatagttggtcagaaagtgagtggataa

SEQ ID NO: 3375 - DNA, 1122 bp, Staphylococcus epidermidis
atggccaaaagagactattatgaagtcttaggcgtaaacaaaagcgcttctaaagacgaaattaaaaaagcttatcgtaaattatcaaaaaaataccatccagatataaataaagaagaaggcgcagacgaaaaattcaaagaaatctccgaagcatatgaagttttaagtgatgaaaacaaacgtgcaaattatgatcaatttggtcatgacggaccacaaggcggatttggaagtcaaggctttggtggcagtgactttggtggatttgaagatattttcagctcattctttggtggcggttcacgtcaaagagatcctaatgcacctcgcaaaggtgatgaccttcaatacacaatgacaataacatttgaagaggctgtattcgggacaaaaaaagaaatatcaataaaaaaagatgtaacatgtcatacatgtaacggtgatggggctaaacctggtacaagtaaaaaaacttgtagctattgtaatggcgctggtcgtgtttctgttgaacaaaatactattttgggtagagtgagaactgaacaagtttgtcctaaatgtgaaggtagtggacaagaatttgaagaaccatgtccaacatgtaaaggaaaaggtactgaaaataaaacagttaaactagaagtaactgttcctgaaggtgtagataacgaacaacaagttcgtttagctggagaaggttcacctggtgttaacggaggaccacatggtgacctatatgtggtgttcagagttaaaccatccaatacatttgaacgtgatggagacgatatctactataatctagatattagcttttcacaggctgcactaggtgatgaaattaagatacctacattaaaaagtaatgttgttttaaccattccggcaggtacacaaacgggtaaacaattccgacttaaagataaaggtgtaaagaatgttcatggttatggctacggggacttatttgtcaacataaaagtggttacaccaacaaaattaaatgaccgtcaaaaagaattattaaaagaatttgctgaaattaatggtgaaaatataaatgaacagtcatctaatttcaaagatagagcgaaaagattctttaaaggagaatag

SEQ ID NO: 3376 - DNA, 1830 bp, Staphylococcus epidermidis
atgggtaaagtaattggaattgatttaggtacaactaactcttgtgtttctatcttagaaggagatgaaccaaaagtaattcaaaacccagaaggtgcacgtactacaccatcagtggttgcatttaaaaatggtgaaactcaagtgggtgaagtagcaaaacgacaagctatcacaaaccctaacactgtacaatctattaaacgtcatatgggtacagattataaagtagatattgaaggtaaatcatatacaccacaagaactttcagcaatgattttacaaaatttaaaaagcactgcagaaaactatttaggggatacagtagacaaagctgttatcactgtccctgcttatttcaatgatggtgaacgtcaagcaactaaagatgctggtaaaattgcaggcttagaagttgaacgtattatcaacgaacctacagctgctgcacttgcttatggtttagataaaactgaaacagatcaaaaggttctcgtatttgacttaggtgggggaacatttgacgtatctattctagagttaggcgacggcgtatttgaagtattatcaactgccggagataataaacttggtggcgatgacttcgaccaagtgattattgattatcttgtttcagaattcaagaaagagaatggtgtagatttatcacaagataaaatggcattacaaagattaaaagatgctgccgaaaaagctaaaaaagatttatcaggtgtttctcaaactcaaatttcattaccattcatttctgctggagaaaatggcccattacacttagaaattagtttaactcgttctaaatttgaggaattagctgattcattaatcaaaaaaactatggaaccgactcgtcaagcattaaaagatgctggtttatctacttcagaaatagatgaagttattttagttggtggttcaacacgtattccggccgttcaagaagctgttaaaaaagaaattgggaaagaaccacataaaggtgttaacccagatgaagttgtagcaatgggtgctgctattcaagctggtgtaatcacaggtgatgttaaagatgtagtattacttgatgttacgccattatctttaggtatcgaaattatgggtggacgtatgaacacattaattgaacgtaatactactattccaacttccaaatcacaagtttattctacagcagctgacaatcaaccagcagtagatattcatgtattacaaggtgaacgtccaatggcatctgacaacaaaactttaggaagattccaattaactgacattccacctgcaccacgtggtgtacctcaaatcgaagtaacatttgatatcgataaaaacggtattgttaacgttacagctaaagatttaggtactaataaagaacaaaacattacaatacaatcaagctcatctctatctgatgaagaaatcgatcgcatggtgaaagatgctgaagaaaatgctgaagcagataaaaaacgtcgtgaagaagtagacttgcgaaacgaagcagatagtctagtattccaagttgaaaaaacagttaaagacttaggcgaaaatattagcgatgaagataagaaaaatgctgaagagaaaaaagatgcacttaaaacagcattagaaggtgaagacatcgacgatattaaagctaaaaaagaagaacttgaaaaagtaattcaggaattatctgcaaaagtttatgaacaagctcaacaagcacaacaacaaggccaagaagaacaaggttctcaagatagcactgttgaagatgcagactttaaagaagttaaagatgacgaagataaaaaataa

SEQ ID NO: 3377 - DNA, 633 bp, Staphylococcus epidermidis
atgtcagaaaaagatcagtcagtgaataatactgaggaagatttcaatgtagaaactgaagacaatcagaatgatacaaatattgaaaactcagtatctaacacagataatagtgaagctaatgctagcgattcagaaaataattcagaagaaagtatcaaggatgaagagtcagagtctcaagatactaaaattaaagaattagaaaagcttgcaaatgacaatgaagaaaaatatttaagattatatgctgaattcgaaaattataaacgtcgaattcaaaaagaaaatcaaattaatgctacttataaagctcaaggtgttttaactgacattttaccgtctatagataatattgagcgtgcactacaaattgaaggtgatgatgaatcgttcaaatcacttcaaaaaggagtgcagatggttcatgaaagtttactaagagctttaaaagacaatggtcttgaagaaattttagctgaaggtaaggaattcgatcctaatttacatcaagctgtcgttcaagatgacaatcctgattttaaatcaggagaagttactcaagaattacaaaaaggatacaaacttaaggatcgtgttttaagaccatcaatggtaaaagtaaatcaataa

SEQ ID NO: 3378 - DNA, 978 bp, Staphylococcus epidermidis
atgattacaaaaagacaattaagcatccttaatgctattgttgaagattatgttgattttggacaaccgattggatctaaaactctaattcatcgtcatcacttggatgtgagtccagctaccattagaaatgaaatgaagcaacttgaagaaatgcatttcattgagaagacacacacatcttctggaagggtgccatctgaatcagggattagatattatgtcaatcgccttttagaacaaacatctcatcaaagtcaaaacaaaattcaacgtttaaatcaattattaattgagaatcattatgatagttcgactgcactcacaaactttgcacacgaattatctatgaaatctcaatatgcaacgttggtagtccgccctaatcataaacaagatgttataaatgatatacatcttattcgtgctaacaaccatttgattattttagtaatggtattttcctctggacatgttgaaaatatacattttgtatcacatgctcaactaaataatattaatttaaataaaatagcaaactttttgaccgaacatttcagttttaatcgtaaagtactaactcaaaacattgagtcttactttagtcaaaaagaagagctattacttgcaaatgaagtagttgagatgataaatttacaaattggtaatcaaagtaatagcatttatatgggtggaaaggttaaacttattgatgcgttaaatgagtccaacgtttcatctattcaaccgattcttcaatatatagaatcaaataaaataactgaattattagaagatatatcaacatctcaaatcaatgtccgaattggtaaagagattgatgatagtttaagcgatatatcaattgtgactagtcagtatcattttgatgagtcactaaaaggtcaaattgcagtaatcggaccaactgcaatgcattatcaaaatgtaattcaattattaaaccgtatatggtag

SEQ ID NO: 3379 - DNA, 1125 bp, Staphylococcus epidermidis
gtgaatgtaaaaagtgcatatattcatattccattttgctatagaatttgtacttattgtgatttcaacaaatactttatcgataaacagccagttgatgaatacttagacgcacttattagcgagatgcaagttaaaaataatagagaccttgaaacaatgtatgtcggaggtggtacaccgacagccttgaatatgagacaacttgagaagctacttagagcaattaatcaaacatttacaattagcggagaattttcttttgaagctaatcctgatgagttaacttatgaaaaagttgcacttttaaaacaatatggcgtaaatagaatatcgatgggtgtacaaacatttaaacctgaattattaaaaattttaggcagaacccataaaactgaagatatatatgatgctgttagtcatgcccgaaaggcaggtattgaatcaataagtttggatttaatgtatcatttaccacaacaaactatcgacgattttaaagacagcctggagcgtgccattgcattggatattgatcatatttcaagttatggattaattcttgaacctaaaacccagttttataatttgtatagaaagggacatttaaaattaccaaatgaagatttaggggcagaaatgtatcggtttttaatggagcgtatgaaaaactcaccatttcatcaatatgagatttctaattttggtaaacttaatcatgaatcaaaccataataaagtatattggttaaatgaagaatactatggctttggtgctggtgcaagtggttatgtaaacggtgtacgttacacaaatcttaatccagtaaatcattatattaaagcgataaatgaagggaaaaaaccaatactatctgaaacgtctcctacttataacgaaagaatggaagaagaaatgtttcttggtttaagaatgaatcaaggtgtgagtaaaagccgttttaagaaaaagtttaataaattaatcgatgaggtgtttggtgaaactattaaagatttgaggtgtaggggactcataaaagaagaaggagaatttatatctttaaccgaacgcggaaaagttataggtaacgaagtttttgaagcatttttactaaactcataa

SEQ ID NO: 3380 - DNA, 1824 bp, Staphylococcus epidermidis
atggataagcaagaacgatacaatagaagagaaaatattagaaatttctccattattgctcatatagaccatggtaaatcgacattagctgatcgaattttagagaatacaaaatcagttgaaactcgagaaatgcaagatcaattacttgactctatggatttggaaagagaacgaggcatcactattaaactaaatgctgttcgattaaaatacgaagctaaagatggagaaacttacacatttcatttgatagatacaccaggacatgtcgactttacatatgaggtttctcgctcattagctgcatgtgaaggtgcaattcttgtagttgatgctgcccaaggtatagaagcacaaaccttagcaaacgtttatttagcattagataacgatttggaacttttgccagttgttaataaaatagacttgcctgcagctgagcccgatagagttaagcaagaattagaagatgttataggtatagatcaagaagatgtagtacttgcaagtgctaagtcaaatataggtattgaagaaattttagagaaaatagttgatgttgtaccagcaccggacggtgatccagaagccccacttaaagcacttatctttgattcagaatatgatccatacagaggagtaatatcttcaattcgaattattgatggtgttgttaaagctggagataggattaaaatgatggctaccggtaaagaatttgaagttacagaagtcggaatcaatacacctaagcaactaccggtagaagaattaacagttggtgatgtgggttatattatcgcaagtatcaaaaatgttgatgattctagagtaggtgacacaattactttagctgaaagacctgctgacaaaccgttacaaggatataaaaagatgaatccaatggtattttgtggtctattccctattgacaataaagactataatgacctaagagaagctttagaaaaattacaacttaatgacgcatccttagagtttgaaccagagtcttcacaagcacttggttttggatacagaactggatttttaggaatgttacatatggagattattcaagaaagaattgaaagagaatttggtattgaactcattgcaacagcgccttctgttatctatcaatgtatcttaaaagatggttctgaagtttcagttgataatccagcacaaatgcccgaaagagataaaatagaacatatttatgaaccatttgtcaaagctacgatgatggtgccgaatgattatgtaggtgcagtgatggaattatgtcaacgtaaaagaggtcaatttataaacatggattatcttgatgatataagagttaatattgtttatgaaattccattatcagaagtagttttcgatttctttgatcaacttaaatctaacacaaaagggtatgcttcttttgattatgaatttattgagaataaagaaagtaatcttgttaaaatggacatattactgaatggagataaagttgatgctctaagttttattgtccatagagattttgcatatgaaagagggaaagcgcttgtcgaaaaattaaaaacattaattccacgacaacaatttgaagtgccagttcaggcggctattggtcaaaaaattgttgcacgaacaaacattaaatctatgggtaaaaatgttttatctaaatgttatggtggagatatcagtcgtaaacgaaaacttttagaaaaacaaaaagcaggtaaagctaaaatgaaagcagtaggcaatgtagaaattccgcaagatgcatttttagcagtattaaaaatggacgatgaataa

SEQ ID NO: 3381 - DNA, 252 bp, Staphylococcus epidermidis
atgccaaatattaaatctgcaatcaaacgtgtaagaacaactgaaacagctgaagaaagaaatatttctaagaaaaacgctatgcgtacagctgtgaaacgagctaaaacagctatctctactgatgctgaaaacaaagatgaattattaagatttgctatcaaacaagttgacaaagcatctcaaagtaatttaatccattctaataaagctgaccgtattaaatctaaacttatgtcagctaataaataa

SEQ ID NO: 3382 - DNA, 975 bp, Staphylococcus epidermidis
atgagcaacaatatcttcactgtctacggtgaagtaccagaattagtcgaaaagaaaacaaaagaaattgtaaatgattatctaggacaagagatagatgactttaattatgtaaaatacaacttgtatgagagtgacctaactccgattattgaagagacacttactatgccttttttctcaaataaaaaagcaattgttgtaaagaactcgtatgtttttacaggggaaaaattttctaaagatttaaatcacgattctgacgagcttataaaatttttagaaaaatatgatggtgaaaatctcattatctttgaagtgtatcagcctaaactagatgagcgcaaaaaactcacgaaaacgttgaagaaaaatgcacaacttaagaaaattgaacaaatgtctgaaaaggaattaaagcattggattaaaaatacactaaacaataattataaagatattaagcaagatgctcttgaattatttattgaattaactggtgttaactataatattgtttctcaagaattagaaaaattaattttattcataggtgagagacctataattaataaagaagatatcgatttaattattaatagaagtttagaacaaaatgtatttctactaactgaatacattcaaaaaggtaataagaataaagctatacaattagtcaatgatttaatcattatgaaagaagaacctataaaattactggcattaattactagtaattatagattatattatcaatgtaaaattcttagtcaaaaaggctatagtgggcaacaaattgcaaagactgtaaatgcacacccttatagagtaaaactagcactcaatcaatcccgacattataaactagaaagtttgtttaacatcataaacgcttgtgcagagactgactacaaactaaaatcatcttatatggataaacaactcattttagaattattcatactatctctataa

SEQ ID NO: 3383 - DNA, 2217 bp, Staphylococcus epidermidis
atgttttacattgctcttgcttttttggtaggggtactttggataaaattcaaagtaatctctatctccttaatattaactcttttgttactaattatgataaaaaggcttaatattataatactattattaatgtttatttcagctataagttcattttttttaataagttcctataaccaaactgatattaaaaacttaaatagtttatatagtgaaccgtttattgatgattttgttcgtttcaaatcttttacgcttaaatcaacatactatactggcatattaaattataaaaataaagactatagatacttttacaaaatattaaagtcaaatttcaagcaagatttaactcataaaagttgtcgagttaaaggagaatttaaattcgaaaaagagttgtccttgttggatatttcaacagttcaatttaagtcttgccaagaaaacaatattttcactcctatatatcatcatcaaaattatatcaccaaaataattcataaatctggggtcacgcatcctgaaagaatattagcgttgataacaggtgatacctctctaattgatgaatattacaaatctaacatcaaagatataggtatttaccatttactagctataagtggtacacatgttggtacaattattgtcctcgtttatcaactgttagtacgtttaaatatacctctagttctcattaaaggtgtaactattttactattattaatctacgctgtttatactggatttgtacctagtgccatgcgtgccatttcaattgcaatcattatacttatgttgccaatccattttaggaaaagttctatacatgtgctttcatttatatttgtgttaatgattctcttaaatcctcaatttataaatcacattggttttcagttctcttttttgataagtttatttattatattggcaaaaccatatataagtgctttaaaaccacttaaatgtttgtttattattagttttttggctcaattaggttcaattgtaattaatacctatcattttaatcaatttcaatggataggtttgctatctaattttatatttgttccattctattcttttatattatttccttcggtcattatctactttattttaattcacttttttcaacatagcttcctattaaatacttatataaatatgctttttaaaattcatgactggctagttcaattatttttaaatttaaatcatttaaagtggtacattcctaaattaaaccaatatagtttacttattttgattatactaacgttaatttttctttacatacttgtctatagagggtttgttacatccgtactaagttttttaattgttttaatcatttttacacatttaattagaccacattatgccgagttaacactttttgatgtgggtcaaggagatagcattttattcaaaacaaagtcaaataaaagtgttttgattgatacaggaggtaaaagaaatgaaaatgtaagttttaaacataataatattgccaaatataaaattttaccaagtattaagaaaaagggtattaccactataaattatttagtaattacacatcctcatgccgatcatatgggtgaattaatatattttttaaataatattaatgtgaataatctcgttttaaatattgaaagtttcccattagaattacttaaagaggttacgacaaaatgcaaggaaaaaaagataaatatcttggatgtaaatcaagttaaaaaaatagatattgataatagtaagataagctttttaaatagttttataccattaagtgatgataaaaatgaacattccattgttacattaattgaatataacggcattaatattctactgatgggagatgcaactgttaataatgaagacattctaatgaagagatataatttaccaaaaatagatattctaaaagttggtcatcatggaagtaggacaagtagttcgaaattatttattaaagatatagaacctaaaatcagtcttatatctagtggtaaaaataataagtatcatttacctaatttggatgttattcaaagattaaaatattatggtagtaaagtttttgatactcaagacaacggggaattaactataaatttagatgaagaagtttacatagtctaccgtgataatttaaatcaaaagagtttagctagagaaagtgtatcgtaa

SEQ ID NO: 3384 - DNA, 462 bp, Staphylococcus epidermidis
atggaacgaattaaatgggaagaatacttcatggctcagagtcatttactggcattaagatcaacgtgtaaaagattatcagttggtgctacaatcgtaaaggataatagaataatagcgggtggatataacggctcagtagctggagaagtgcactgtattgatgaggggtgcttaattgaagatggacattgtatacgtactatacatgcagaaatgaacgcactactacaatgtgcaaaacagggtgtatcaacagaaggagcaacgatttacgttactcatttcccttgtttaaactgtacgaaatcaataatacaagcaggtatcaaaacgatttactatgcacaagattatcataatcatgactatgccattaaattattgaagcaatcaggaattgaatataaaaaaattccgttttcacctgaatatgttgctcaatatctgactcaagaataa

SEQ ID NO: 3385 - DNA, 603 bp, Staphylococcus epidermidis
atgttaacaacattctttttttacttactcaatgataacaataatgatttgatacagaatagtcaggaaagacaatctaaaatatctaaccagcaaataaaaaatagcaaaaagttaaataaaaaagaagtgtctattcaaaaagataatacaaaagaaactaaaatatttatcgatattaaaggtgctgttaaacatccgaatgtatatgaaatggcttcttcgaatagagtcattgatgctttaaataaagcagaggtattaaaggatgcagacttatcacaattaaatctttctgaaaaattagttgatcaaaaacttatctatgttcctaaaaagggtgagaatagtatgaaaatcaactcacagcaatcaacattgaattcgagtgacgtaaaaatcaacacgaatcaacctttaaatttaaactctgctactgaagaacaattgaaaaacataccaggaataggtccaagtaaagctaaagaaattttaaattacagagaacaaaatcatggatttaatagtatcgatgacttaatgaaaataaaaggattcggaaagaaaacatttgaaaaactgaaagaacattttactatttaa

SEQ ID NO: 3386 - DNA, 720 bp, Staphylococcus epidermidis
atgaatcaatatgaagatatgagtttagtatatgacaaacttactcaagatcaaccgtatcattcgtggtttaatattgttgagcatttcttaccttctgatagtcatgatttgttagatattggttgcggtactggcaacttaacacaattactaacgtcactaggtgaagtcactggtatggatattagtgtagatatgttatcaatagctagacaaaaaacaaatcaagtgaagtggatcgaaggtaatatgactcactttaatttgaacaaaaaatttaatatgattacaatattttgtgattcactgaattatttagaaacattaaatgacgtaaaaatgacattcgaaagagtgtatcaacatttaaataaaaatggtgtttttatttttgatgtacatactgttcataaaatgaaaacattatttaataataaaagttatattgatgaatctgataatgtttttgtaggttgggatgcaatatgtggggatgaaccattaagtgtttatcatgaaatgactttctttgtatcacagcaaaatggattgtatcaacgctttgacgaatcacattatcaaagaacatatgaggaacaaatttatcgaaatttactaaaagatgttgggtatcatagtgttaagacttttacagactttaacattcacagtcatgaagaagatgcccatcgcttgttttttgttgctaaaaaataa

SEQ ID NO: 3387 - DNA, 354 bp, Staphylococcus epidermidis
atgaattcagaagaattattaaatattgctgtcgaagcggcagagaataagaaagcagaagatattatttctctcaatatgaatgaaattagtgatatgacagattattttgtagtctgtcacgggaacaatgaacgtcaagttcaatccattgctagatctgttaaagaagtggcacataaacatgatattgacgttaaacgtatggaaggctatcaagaagctcgatggatacttattgatttagcaaatgtagttgttcatgtttttcataaggatgaaagaagctattacaatttagagaaattatatcaagatgcacctattaaagaatacggtcaggcagtattttag

SEQ ID NO: 3388 - DNA, 585 bp, Staphylococcus epidermidis
atggagataagtagagctaaagaactagtaaaagaaaaactgcctgataaacgttatcaacattcattacgagtggcggatacagcagttaagttagcagaaatatacgatggtgatatcaaaaaagctgagttggcaggtatattacatgattactgtaaatacgaagacttaagtacaatgtatcaaattgttagacaatacgaacttgaaagtgatttgcttagctatggtggagagattcttcatggaccagtatgtgcggcacttatgaagcatgaatttgatgtaaatgatgaagaagttttacttgctataaaatatcatacgactgggcgtcaacaaatgactaaaacagagaaacttgtttttattgcagactatatagagcctggtagaaaaacgcctggagttgaagaaattagagatatggcatacaatcaaggtagcttagataagacaatttatgagatttctaagcgtactgtattatttttaatagaaaaggatattactgtatatggcgccacaattgcgtgtttaaattattataattatagcgatgaaagaataaaggatgattaa

SEQ ID NO: 3389 - DNA, 576 bp, Staphylococcus epidermidis
atgaataaaaaaatcgttctctttggcggtcaatttaacccgattcacactgctcacttagcagtagcaagtgaggtttatcatgctattaaaccagatatatttttctttttgcctagttatatggctcctttaaagcatcataatacacaattatattctgaacatcgagtgaaaatgatacagctcgctattaaggagattggatttggtgaaatttgcactactgatttagatagaaaaggtccaagctatacgtatgaaaccattttgcatctcaaagaaatatatcataatgcacagttatactttattattggaacagatcagtataatcaattggataagtggtataaaattaatgaattaaaaaaacttgtaacctttattgtagtgaatagagaaactgataaccaaaatgtaagtaaagagatgatttctataaagatacctcgaatagatataagctcaacaatgattagaaatagagtgagaatgaaccaatctataaaagttttagtacctaaaagggtagagaattatattaaagaggaggggttttatggagataagtag

SEQ ID NO: 3390 - DNA, 294 bp, Staphylococcus epidermidis
atgttaactggtaagcaaaaaagatatttacgtagtttagctcataacattgatccaactttccaaataggtaaaggtggtattaatgaaaatatgattcaacaaatttctgaaacattagaaaagagagaattaattaagattcatatattacaaaataattttgatgataaaaaagatttagcagcaatagtatctcaacaaacgcaaagtgaattggtacaaataatcgggtcaatgattgtgttatataaagagtctgaagaaaataaagaaatcaaattgccacaatga

SEQ ID NO: 3391 - DNA, 810 bp, Staphylococcus epidermidis
gtgaaatttgcagtaattggaaaccccatttctcattcattatcgccattgatgcatcatgctaattttcaatctttaaatttggaaaacacgtatgaagcgataaatgtaccagttaatcaatttcaagacattaaaaaaataatttcagaaaagagcattgatggattcaatgttactattccacataaagaacgtattattccgtacctagatgatattaatgaacaagcgaaatctgttggggcggtaaatacagttttagttaaagatggtaagtggattggttataatactgatggaattggttatgttaatggtttaaaacaaatatatgaaggtatagaagacgcttatatattaattttaggtgcaggtggagcaagtaaaggtatagcaaatgaattatataaaatcgttcgtccgactttaacagttgcaaatagaacgatgtctcgttttaataattggtcgttaaatattaacaaaataaatttaagccatgcagaaagccatttagatgaatttgatattataataaacactacacctgctggtatgaacggcaatacagattctgtaatttctttaaatcgtttagcttcacatactttagtaagtgatattgtttataatccatataaaacaccaatactaatagaagctgaacaaagaggtaatccaatctataatggtcttgatatgttcgttcatcaaggtgctgaaagttttaaaatttggactaatctagaaccagatataaaagcaatgaaaaacatagtaattcaaaaattgaaaggagaattatga

SEQ ID NO: 3392 - DNA, 1101 bp, Staphylococcus epidermidis
ttgaatgaaatactaaaatgtattggatgtggtgcacccctacagtcagaaaataaagacgcacccggctatgttccagaacataatatgtttcgagaagatgtcatctgtagaagatgttttagattgaaaaattataatgaagttcaagatgtgggtatggaaagtgaagattttttaaatctacttactggactatctgaaaaaaaaggaattattgtcaatgtagtagatgtgtttgattttgaagggtcattcatcaatgcaatacaacggattgttggtaataaaaaaattatattagtggcaaataaaatagatttattacctaaacaaattaatcatcgacgtgtaaaagaatggttgagaaaatctgctcgtaaatatggattagaagcagaagatgtcgttcttatttctgcaaataaaggttgggggattgatgaattattgcaatctataaaccatgtaagaaataaagatgacgtatacattgtaggtacaacgaatgttggaaaatctacattaattaataaattaattgaacagagtgtgggagaaaaagatgtagtaactacatcacgctttccaggaacaactttagatatgatagatattccattagacgaaaaatcatttatgtttgatacaccaggtatcattcaatcacatcaaatgacaaattatgtatctgaaaatgagttgaaaatcattatacctaaaaatgaaataaagcaacgtgtgtatcaacttaatgaaaaacagacattatttttcggaggattggcacgcattgattatgtatctggtggtaaaagaccacttgtttgtttcttttcaaatgatttaaatattcatagaactaaaaccgagaaagctaatgatttatggaaatcccaattaggcgcattgctttcaccgcctcaagatgcacaacaatttaatcttaatgatgtaaaagcagtaagactggaaactggtaaaactaaacgtgacatcatgatatctggtttaggattcataactattgatgctggtgcaaaagtgatagttcgtgttccaaaacatgtagatgttattttaagaaattcaattctttaa

SEQ ID NO: 3393 - DNA, 528 bp, Staphylococcus epidermidis
gtgggaatcataaaaaaattatttatgccaaatgcatatgtgaaatcaatatttgaaattgatatagaaaaacttgccgatagtggtgttaaaggtatcataactgatttagataatacacttgttggttgggatgttaaagaacctactaagggtgttaaatcatggtttgctaaggctaaagatttaggaataactgtcacaattgtgtcaaataataataaaagtcgagtatcaagtttctcaagtaatttaggtgtagattatatattcaaagcacgtaaaccgatggggaaagcctttaagatggctattaaaaaaatgaaaattcaaccgagagaaaccgttgttgtaggagatcaaatgcttactgatgtgtttggtggcaattgtaatggtttatatacaattatggtagtacctgttaaacggactgatggattaattacaaagtttaatcgattaattgaaagacgattattaaatcattttagaaaaaaaggttatattaaatgggaggaaaattga

SEQ ID NO: 3394 - DNA, 687 bp, Staphylococcus epidermidis
atgataggaattattggagcaatggaagaagaagtgacgattttaaagcgtaaattgaatgatatgaatgaaataaatattgcgcatgttaaattttatgttggcaagctaaaccacaaagaggtggttttaacacaaagtggtataggtaaagttaatgcttctatctcaacgactttgttaatagaaaaatttaatccagaagtcgtcattaatactggatcagcaggtgcactagatcaaacactatctattggagatatattagtgagtaatcatgtattatatcatgatgctaatgctacagcgtttggttatgaatatggacaaatacctcaaatgcctaaaacttatactactgatcctactttgttgaaaaaaacaatgcatgtattagaacaacaacaactgaatggtaaagtaggtatgattgttagtggtgatagttttataggtagctcagaacagcgacaaaaaattaagcaacaatttccagaagctatggctgtcgaaatggaggcaactgcaattgcgcaaacatgttatcaatttaaagtaccatttatcgtaactagagctgtttctgatttagcaaacggtaaagccgatatttcttttgaagaatttttagataaagcagctttatcatctagtgagacagtttcattattagtagaatcattataa

SEQ ID NO: 3395 - DNA, 1245 bp, Staphylococcus epidermidis
atgggggaaaatacaaaacaagatttcaatcaaaaaggacaaaattttaaattcacaaaaaaacatagacgattattatatggttcagtttttttaatggctacatcagctattggtccagcatttctgactcaaactgcagtgtttactgcacaattttatgctagttttgcatttgcaatattaatttctattattatagatataggcgctcaaataaatatttggagaatattagtggtaactggattacgtggacaagaaatatctaataaagtattacctggacttggtactattatctccatactaattgcatttggtggtctcgcatttaacataggtaatattgctggtgcaggtttaggtttaaatgcaatgtttggtcttgatgtaaaatggggtgctacaataacagctatttttgcgatacttatctttgttagtagaagtggtcagaaaataatggatgttattagtatgattctaggtatcgtaatgattttagtagtcgcttatgtcatggttgtttcaaatcccccttatggagatgcattagtacatacatttgcacctgaacatcctttcaaacttatattacctataattacattagttggtggtacagtagggggttatattacttttgcaggtgcacatagaattctagattctggtataaaaggtaagtcataccttcctttcgtaaatcgatctgctgtagcaggtattttaacaactggtgtcatgcgcaccttattgtttttagctgtactaggtgttgttgtaactggcgttacgcttagttcagaaaatccaccagcatcagttttccaacatgcattaggtcctataggtaaaaatatttttggcgtagtaatatttgcagcagcaatgtcctcagtaattggttctgcatatacaagcgcaacatttttaaaaacactacacaaatcgttactcaataaaaataatcttatcgttattacatttattgtaatttcaacttttgttttcttatttattggtaaaccggtgagtttacttataatagctggtgcgattaatggttggattctaccaatcacattaggtgcaattctcattgcaagtaggaaaaaatctatcgttggtaattaccaacacccaacatggatgcttgtttttggtattatagccgtaattgtcacaataatgactggtatcttttcattacaagatttagcaagtctttggaaaggttaa

SEQ ID NO: 3396 - DNA, 753 bp, Staphylococcus epidermidis
ttgaaaattgatttaaattgtgatttaggagaagcttttggtaactatacattcggtggagatcagcacattttaccattaataacttctgctaatattgcttgtggttatcatgcaggtgatgaagatgttatgaatgaaactgttcaattagcgaaaaaaaataatataagtattggagcacatccgggtcttcctgatttgaaaggctttggtcgtcgtaaaatggatcttactccaaatgaaatttataacttagttatatatcaattaggtgcgttaagtggcttttgtaaaatcaatcatgtaaaaatgatgcatgttaaacctcatggtgccctttatcaaatgggggctagaaataaagaaattgcacatgcaattgctcaagcagtttttgatttcgactcaaatctaattttcgtcggcttagcgaatacattacttatttcggaagctgaattagtggggcttaaggtagcttcggaagtatttgctgaccgtcgttatgaagatgacggacaattggtaagtagaaaaaaaaccgatgccactatcactaatactgacgaagcaatccaacaagcattaaaaatggttttggaaaataaagttgtaagtaaaaatggaaaaatcatcgatttgaaagctgatacaatttgtgttcacggagatggaaaacacgcattagaatttgttacgcaaattagaaatgaattaatgaaagaaggcattgatattcaatccttatag

SEQ ID NO: 3397 - DNA, 1362 bp, Staphylococcus epidermidis
atgatgtatcgatgtttgattgcaaatagaggcgaaatagcagtaagaattataagagcttgtagagagcttaacatagagacagttgccatttatgcaaaaggtgatgaaaatagcttacatgtaagtttagccgatcaagcaatatgcataggtgaagcaaatccattagacagttatttaaatattgatcgtattatatctgctgcaaaagttacagaatcaaacgtaattcaccctggctatggtttcttatcggaatctacgaattttgcgaaagccgttgaagacaatcatatacattttattggacctagtaagacaactatggaaatgatgggggataaaattactgccagacaaactgttaaacaagcaggagtacctgttataccaggttctaatgatgctgttcaaagtgtagatgaaattaaattattatccaaagaaataggatttccagttgtactaaaagcagctagtggtggtggtgggaaaggcatcagaattgttaaagaagcatctcatttggatcaggctttgaaagaagctaaaagtgaaggacaaaaatattttaatgatgagcgagtgtatgtagaggcgttcataccagtagcaaaacatgtagaagtgcagattatcggagacggtaaaaataactatgttcacttaggtgaacgcgattgttctgttcaacgaaagaatcaaaaattaatagaagaagcgccttgtgctgcattaactgaagaaagaagaacaagaatatgtggcgacgcagttaaagtagctcaagcttcaagatatcgtagtgctggaacaatagaatttttagttacagaagatgcacattattttattgaaatgaatgctcgtattcaagttgaacatacagttacagaaatgcgtgctgatagagacctattacaagctcagttatatttattaacacacggtgaattaccattcactcagaaagatattttatttaatggtcatgtaattgaggcgcgtataaatgctgaaaatcctgaaaaaaactttttacccactccaggaaaagttaataaattacacttaccacaaggatttaatatacgtgtagattctttactttacacaggttatcaggtttctccttattatgattcacttgtagctaaagtgattgtaaaggattctaatagacaaactgctattaataaattaaaagttgcgttagatgaaatggtcatcgaaggttttactactacagctgactttttatatgcggttttaaattatccaatatatgcaaaaggcgatgccagtaaagtagatataaaatttcttgaaaaacatcaaatcattaaagaggtgaaatga

SEQ ID NO: 3398 - DNA, 441 bp, Staphylococcus epidermidis
atggatattaaaaaaattgaggaagtcattaaattggtaaaagctaatgatgtaaaaaaatttaagtataaggactctcataatgaaatagaacttgattttactaatggagcatctcaacaacattcgcaacaatcatctcaagatattcaacaagagaatattaaatccttagatgaaaagcaagagtccatatcaaatgaccagcaagagattaaatctcctatggttggaacatttttcttacaagatagtaaagaactaacagaacctaagattaaagttggcgatactgtaactgaaggagatattatcggttacattgaagctatgaaagttatgaatgaagtaactacggatgttactggtgaggtcactgaaatattagtagaacatggagacaatgttgaatatgatcagctactagtcagagttaaatag

SEQ ID NO: 3399 - DNA, 1005 bp, Staphylococcus epidermidis
atgagtattaaaattttaaagcctggcctgttttcaacaattcaagatataggtagattagggtatcaggatttaggattttctgaagcaggtgcattagattactatagtttatctattgcccaaaaacttatcggaaatcatggaccagcaattgaatatactttagtaggtcctaatatagaatttttaacagacaatacttttgccattgtcggtggtgattcagaaccgaaacttaatggtaacaaaattgacttattaactgtttatcatgtaagaaatggagaccaattagacattggtcaaatcactgaaggagcaagaggatatattgtttttggacacccacttaaaattaataaagtggctcaaagctattctacacatgttagaagtggaatgggcggatttaaaggtcgtgcattaaagaaatacgatgttattgcaactcaagtaaatcataactataaaactaatttaggaaaaacaattgatttctcatctatacctgataataattacatacacgtcattgaaggacctcagatcaatgaatttgatgaagaaacgatagctaaattcgtaaatagcgatttcaaaatttctgatcaatcagatcgaatgggatacagattaaaaggtaatacagtagcacctaaaaatagtgctgatatcatttctgaacctgtcgctttgggaagtattcaagtacctaacgatggtaatcccattattcttttaaatgataagcaaacaattggtggttatacaaaaattgcaacggtaacacaattagatttaagaaaattagcacagatgaagcctggagacattatacagtttaaatggataactgttgaagaagcttcaaaaaagcttaaagaatttaatactaaatttgaacaattattaaagcgttttgatgagcaaccattgtttaacctaaatcaacttagacatacttctaataaaatcgcagaaataattaaggaggatagataa

SEQ ID NO: 3400 - DNA, 732 bp, Staphylococcus epidermidis
ttgaggacacaatttattaatgaacaaacaatgatgatttactttgaaaatgaaattagtgaatcaactttcaaaaaggtacaacaaacaattcaatatataaaatcgaaaaatttatctgaaataacaaacatgataccttcatatcgtgctattctaatttactttgataattcggggataaacggaactgaattattagaaaatttagaactcgatgaaaattcgaacagtagaaaacaatcacattttaaacagcgtatcattcatatacctgtattatatggtggagattttggtccagatttatcagaagtagctaacgttaataaattaagtcaggaagaagttattcaaatacatacacaacaaccttatctaatctatatgcttgggtttatgccgggtttcccatacttaggtggattggatgctaagttgcacacacctagacggtctgaacctagaatcaaaattaacgctggttctgttggaatagcaaataatcaaacaggtttatatcctatggactcacctggtggttggcagataattggtcgcacaccaataaaagtctttgatttaaataggacaccaatgacgttatatgaagctggtgattacatacaattttatagtataaattatcaagagtttgaaaaaatatcaaacgatattaataaaggaaaatttgatatagataagtgggtgacatatcaagatgagtattaa

SEQ ID NO: 3401 - DNA, 159 bp, Staphylococcus epidermidis
atggcacttgatataaggaaagtaacagctcaacgagcagaaaataatcaaaaatttataaaaaagacaatttcgatatttttcaatagaaattgtccttatttacttatcttggaactttatgtcccagcctacttaatgctcgatgatattatttag

SEQ ID NO: 3402 - DNA, 2406 bp, Staphylococcus epidermidis
atggcaaaacaaaaacttgtaatgattggtaacggcatggcagggttaagaacgatagaagagattttagaacgttcaccatcacaatttgatattactattattggaaaagaaccttatccgaactataacagaattatgttatccaatattttacagaagaaaatgaccgtcgaagatacgattatgaattcttatgattggtatcaagagaataatattgaacttataaataatgatccagtggaaaaagttgataaagaaaacaaaatagttactacttctaaaggtattgaagtagagtatgacatttgtattttcgctactggatcaaaagcttttgtattacctataccgggttcaaatcttcccagtgtcattggatggcgaacaattgatgatacaaataaaatgattgaaattgcccaaacgaaaaaacgtgcagttgtcattggtggaggtcttctaggcttagaatgtgctagaggacttctagatcaaggaatggaagtgacagttcttcatttagctgattggctcatggaaatgcaattggatcgtaaagctggagacatgcttaaagcagatttagaaaagcaaggtatgaagattgaacttcaagcaaattctaaagaaatcattggtgataaagatgttgaagccattaaattagctgacggtcgggtgattgaaacagatttagtagtcatggctgttggtatcagaccttatactgaagttgctaaagatagtggattagatgtcaatagaggtattgttgtaaatgattatatgcaaacatctgattctcatatttatgcagtcggtgaatgtgccgaacatgatgggaaagtttatggtttggtggcgccactctatgaacaaggtaaagtgctagcagattatttaactggtaaagaaacaaaaggttataaaggatctactactttcacttcacttaaagtatctggttgcgatttatatagcgcagggcaaattgttgaagatgaagatatccatggtgtagaaatctttaatagtgtcgacaatatttacaaaaaagtgtatttaagtcaaggtcaagtcgttggtgctgtcttgtatggtgatactgatgatggatcacgattttataatatgatgaaaaaacatgaaacgcttgaagattatacacttgtttctttattgcataaaggtgatgaagatgcggggacatctatcgctgatatgtctgatgatgaaacgatttgtggatgtaatggtgttgataaaggaacaattgtcaatgctataacaactaaaggcttaacgtctgtagatgaagtaactaaagcaacaaaagcaggtaattcatgtggtaagtgtaaaggtcaaattggtgagttattacaatatacattaggtgacgactttattgcagcaaaaccaacaggtatttgtccatgtactgatttaacaagagaccaaattgtaactcaaatcagagctaaaaatctcaaaacatcaaaagaagtacgacacgttcttgatttcaaagataaagatggttgtcctaaatgtcgaccagcaattaattattatttaaatatggtttatccttttgaacatcgagatgaaaaagactctcgcttcgctaatgaaagatatcatgcaaatatacaaaatgatggtactttctcagtgatccctcaaatgcgcggtggcgttacagatgctgatcaacttattcgattaggggaagttgctaaaaagtataacgtaccacttgttaaagtaacaggttcgcaacgtgtaggcttatatggattgaagaaagaagaattaccacaagtttggaaagatttaggaatgcgttctgcttctgcttatggtaaaaagacgcgttctgttaaaagttgtgttggtaaagagttttgtcgttttggtacacaatacacaactcgactaggaataagacttgaaaaaacatttgaatatattgatacccctcataaatttaaaatgggagtatcaggttgtccgagaagttgtgtagagtctggtgttaaagattttggtgtcatatctgttgaaaacggctaccaaatatttatcggaggtaatggtggcactgatgttactgtaggtaaattgttaacgacagttgaaaccgaagatgaagtgattcaattatgtggtgccctcatgcaatattacagagaaacaggtatttacgctgaaagaacagcaccatggttagaacgtatgggctttgaaaatgtcaagaatgtcttattaaatcaagaaaagcaaaaagaactgtatttaagaattatggaagccaaaaaagctgttgagaatgaaccatgggaagctattgttgaaaataaagaagcacaaaaaatctttgaagttgagaaggtgtaa

SEQ ID NO: 3403 - DNA, 315 bp, Staphylococcus epidermidis
atgaaagctaaagaaaaggttaaggttacaacaatgaatgaaatgattcctcaaataggcaaaaaagtcgttgtaaacgaaaaagaaataggtatttttctcacagataatggtgatttatatgccattggaaatatatgcccgcataaagaaggaccgttgtctgaagggactgtaagtggtgattatgtttactgtccgttacacgatcaaaaaatagctttaaagactggagaagtacaacaacctgatacaggatgcgtagaaacatatgaagtagaagttattaatggagatatttacttatgtctataa

SEQ ID NO: 3404 - DNA, 936 bp, Staphylococcus epidermidis
atgtctataacttatcctggcacagtttatctaatcggtgcaggaccaggtaatccaaacttactaactaaaaaagctgaacggttaattagagcagctgacgtgattttatttgatcgtctcgtgaatcctttcatcttacagtatgcttcttctcaaacaaaagtgattaatgtaggaaagaaaccttattgtaaacacattcaacaagatgagattaatcaaaaaattgttgaagcagccaaacaatatcgatgtgtggtgagactaaaggggggcgatcctgcgatttttggtagaattacagaagaagtacaaacattagaaaatcatcatattcattatgagattatccctggtgtgacatcagcaagtgctgctgtagcaactatgaatatgggattaacgatgcgttctatcgcaccgagtgtgaccttctcaactggtcattttaaagattcggttaatcacgatacggatattaggaacttgattaatggtggcactttggctatttatatgggcgtaaaaagattaggtcaaattattaaacaaattgaatcatatacaaatgaagactattccattgcaatagtgtttaatgcatcctgctacaatgaaaagattgttataggtcatttaagtacaattgaagaacaattggcttcccaaaaactagaaggtcatccaggcatatgcattttaggtaatatacttgatgacactaatcgtactttgttgaataataatgagattgacaaaggtaatctatatttaatcaagggagataaagagcgtgcaatttcaaaggctgaaactttatatgatgaaggaatccaatgtctgattgattttgaccatagctaccacatttctcaacaaaacatgtataacgaaatgattaaacacaaaagtattaaaacaatatatgtataa

SEQ ID NO: 3405 - DNA, 3684 bp, Staphylococcus epidermidis
atgggaaaatttggattgaatttctttaagccgacagaaaagtttaatggaaattggtcggtattagagcataaaagtcgagaatgggaaaagatgtatagagaaagatggagccacgacaaagttgtgagaacgacgcatggtgttaactgtactggatcatgttcatggaaagtatttgtcaaaaatggcgtaattacatgggaaaatcaacaaattgattatccaagttgtggacctgatatgccagaatttgagccaagaggttgtccgagaggtgcatcgttttcttggtatgaatatagtccgttaagagttaaatatccttatattagaggtaaattattagatttatggaccgaagcgcttgaagaacaaaatggaaaccgaattgcggcatgggcatccatcgtagaaaatgaagaaaaagccaaacaatataaagaagcaagaggtaaaggtggacacgtcagagcaaattggaaagatgtcacagatattattgcagctcaaattttatataccataaaaaaagatggaccggatcgtattgctggatttactcctattcctgctatgtcgatgattagttatgcttcaggtgcaagatttattaatttgttaggtggagaaatgttaagcttttacgattggtatgccgatttaccacctgcttctccacaaatttggggtgagcaaacagacgtgccagaatccagtgattggtacaatgcttcatacattatgatgtggggatcaaacgttccattaacacgtacacctgacgcacattttatgactgaagttagatataaaggggcgaaagttatttcagtagcacctgattatgctgagaatgttaagttcgccgatcattggcttgcaccacatccgggtacagatgcagcgattgcacaagcaatgacacatgttattttacaggaatattatgaaaatcatccgaatgatatgtttattaactatgctaagcaatattctgatatgccgtttgtcattatgttagatgaagatgagaatggctataaagcaggtagattcttgcgtgcttctgatttagggatgtcaggtgaaaataatgaatggaagccagttattcaagacaaattgagtcaacaattacttgttcctaatggcacaatgggccaacgctgggaagaaggtaaaaaatggaatttgaaacttgaaacagaggacggtacaccgattgatccaatgttatcaatggctgaaagtgactatcatgttgaaacgattcaatttccatactttgatagcagtggtgatggcatctttgagagacctattgcaacgagaactattcaattagctaacggagagaaagttaaaatcgctacggtttatgatttaatgacgagtcaatatggtgtccaacgttttgaacacgaactagaagctacatcatatgatgacgcatcttctaaatatacgcccgcttggcaagaacaaattacaggtatcaaaaaagagttagtgacgaaagtggcaaaagaatttgcacaaaatgctattgatactggtggacgttcaatgattattatgggggctggtatcaaccattggtttaactcggatactatttatcgttcaatacttaacttagtactattgtgtggatgtcaaggtgttaacggtggtggttgggcacactatgttggacaagaaaaatgtcgaccaattgaaggatggaatactattgcatttgctaaagattggcaaggtcctccacgtttacaaaatggtacaagttggttttatttcgctacagatcaatggaagtatgaagaatcaaatgtagataaattgaaatcaccattagctgaaaatattaagcatcaacatccagctgattacaatgtaacggctgctcgtatgggttggttgccttcatatccacagtttaataaaaacagtctattgtttggagaagaagctaaagatgaaggtgatgattcaaatgaagctatcctacaaaaagcgattgaatcagttaaaaataaagatacacaatttgcgatagaagatccagatttaagaaaaaaccatcctaaaacattatttgtatggagatctaatttaatttctagttcagctaaaggacaagaatactttatgaagcacttgttaggtgcgcgctctggtttaatggcagagccaaatgaagatgataaaccagaggaaattaaatggcgcgaggatacagaagggaaacttgatttattagtatcacttgatttcagaatgactgcaacgccattatattcagatatcgttttacctgctgcaacttggtatgaaaaacatgatttatcttctacagacatgcatccatttattcatccatttaatccagcaatcgacccattatgggaatcgcgttcggactgggatatttataaaactctaagtaaagctgtttcagaaatggccaaagattatcttccaggtaaatttaaagatgttgtaactacgccattaggacatgattctaaacaagaaatttcaactgaatatggtattgtaaaagattggtctaaaggagaaattgaaggtgtgccaggtaaaacaatgcctaatttttctatagtagagcgagactatacacaaatttacgataaattcgttactgttggtccaaaactagaaaaaggaaaaataggtgcccatggggtgagttatagcgttagtgaagagtacgaagaacttaaaagtatggttggaacttggaatgatgataatactacttcagttaaaaatgatagaccgagaatagatacagcgagaaaagtagcagatgtcattttgaatatatcctctgctacaaacggcaaattatcacaaaagtcatatgaagatttagaaaatcaaacaggtatggaacttaaagatatttctaaagaacgtgcttctgaaaagatatcatttttaaacattacttctcagccaagagaagtgattccaactgcagtattccctggctctaataaagatggaagacgctactcaccgtttacaactaatgtggaacgtttagtgccatttagaacgctaactggacgtcaaagttattatatagatcatgaggtattccaacaatttggagaaagtttaccggtatataaacctactttacctccaatggtatttggtgctcgtgataaaaaagttaaaggtggacaagatacattagtgcttcgataccttacacctcatggaaaatggaacattcattcaacttatcaagataatgaacgcatgttgacattgtttagaggtgggccggttgtatggatttcaaatgaagacgcagctgaccatggcattaatgataacgactggttagaagtatacaacagaaacggagttgttactgccagagctgtaacatctcatcgtatgcctagaggcacaatgtttatgtatcatgcacaagataaacacatagagacacctggttctgaaattactgatactcgtggaggttctcataatgcacctactcgtattcacttgaaacctactcaattagtaggaggatatgcacaaattagttatcactttaactattatggaccaattggaaatcaaagagatgagtatgtagctgttagaaaaatgaaggaggtcaattggcttgaagattaa

SEQ ID NO: 3406 - DNA, 1554 bp, Staphylococcus epidermidis
ttgaagattaaagcgcaagttgcaatggtattgaatctagacaaatgtattggttgtcatacttgcagtgtgacatgtaaaaacacatggacaaatcgacctggtgcagagtatatgtggtttaataacgtagaaacgaaaccgggcgtaggatatccaaaaagatgggaagaccaaggacaatataaaggtggttgggtgctaaataaaaaaggaaagcttgaattaaaatctggtaatagatggtcaaagattgctttaggtaaaatcttctataatcctgacatgccactcattcaagattattatgaaccgtggacatataactatgaacatttaaccaatgccaaacaaggacaacactctcccgtggcgacagcacactctttaatttcaggtgatagattgaatcttaaatggggaccaaactgggaagatgatttagctggaggccacataacaggaccagaggatccaaatattcagaaaatagaagaagatattaaatttcaattcgatgagacatttatgatgtatttaccaagactatgtgaacactgtttgaatccaagttgcgtagcatcttgtccatcaggagctatgtataaacgagatgaggatggtatcgtactcgtcgatcaagaagcctgtcgtggttggagatactgtatgactggatgtccgtataaaaaagtatattttaactggaaaacgaataaagctgaaaaatgtacattttgtttcccacgaatcgaagctggtatgccaaccgtatgttcagaaacttgtacaggacgtatgagatatttaggtgttttattatatgacgcagatcgtgttcaagaagcggcttcagctaaagatgaaaaagacttatacgaaaaacaattagacctattccttgatccatttgatgaggaagtcattgctcaagctgaaaaagatggaataaatcaagaatggatcacagcagctcaaaactcaccagtgtataaattggcaatagaatataaaatggcctttccattgcatcctgaatttagaactatgccaatggtatggtattgtccacctttaagtcctattatgagttatttcgaaggtgaaaatgcaggtcaaaatccagacatgattttcccagctattgaagaaatgcgtttacctattcaatacttagcaaatttattaactgctggcgacacagaacctgttaaagagggcttacaaaaaatggcgatgatgcgaagttatatgcgttctcaaataacaaaccaacctttcgatacatctaaattagaacgattaggacttactgaaagacagatgactgaaatgtatcgcttactaggtattgctaaatatgaagatcgttttgttgtgccttcttctcataaagaaacatatttagatacttataaagcgcaaggaagtcaaggttatggtggagagtactttggctctaattgtgaaggttgtggtgttgcagttcaatcaggtaaaactggacaagaaatttataatgaaaatttctatggagggatcttccgtgattaa

SEQ ID NO: 3407 - DNA, 576 bp, Staphylococcus epidermidis
gtgattaaccttgaacaattaagtcaataccaagatagcttaggctatcttggtcaacaaatgaattttccagaaaaaatgacatttcacccaaaaatatttgaagaaaccatttctaagtctcatcctggctatgaagaattgcttgcatatagagaaatcatgatgaattatactttgtcagaaattaaagctatctatacagatacatttgattttagtaaaaaacacccactctatatgacatttaataaatttgacacgcaaaaggaacgtggacaaatgctagctaaattgaaggttttatacgaaatgtttggactaaaaatggttgataatgaattatctgattttcttccattgatgctacagtttttgcaagttgctgattttaaaaatgatagtcgagcacaggaaaaccttcaactagtcattatgattattgaagatggcacatatgaaatggcaaatacccttgctgaaaacaataatccctatgcatatgttgtcagtgcattaagaaaaacgttaaaagcgtgtatcatgcctttgaaagaggtggaaaatcatgcttaa

SEQ ID NO: 3408 - DNA, 678 bp, Staphylococcus epidermidis
atgcttaatcaatttgtatgggttatttatccatatttatgtttagcaatatttgttattggacatatcgcaagatataaatacgatcaattttcatggacagcaaagtcgagtgaaatgattgaaaagaaacaattaaaatggggaagtttactttttcatttaggtattattccggtgttctttggtcatgttgtgggattattgattcccgctaattggttagaggcgataggtgtaaataatcatatctatcatataggtgcagtttatataggtagtgtttttggtataataacattaataggaatgttgttgctaactttaagacgactatccatcaaaaatgttagacgattaagttcattttcagatatattcgtgaatctcgttttgttgattattttaataatgggttgttattctacgcttgtaaccaatgcgattcaacctgaatttgattatcgtcaaaccattgcgatatggtttagacatttattcatgttttctccaaatgctgacttaatgttaaacgtgccttggtcgtttaaactgcacatattattagggtttacagtatttgcgtgttggccatttactcgtttagtacatgtttggagtgtaccactgtcttatatgaatagaagatacattgtttatcgcaaaaacaaaatttaa

SEQ ID NO: 3409 - DNA, 453 bp, Staphylococcus epidermidis
gtggaaccagaatctttaaaacataatcaacatttacaaatgaatttagataagttgagagcgcaagagggttatgattttggtggtatcgctttatatgattatcatcacacttcatcaccaattaaatggcaatatgtttcaggtaatacaaatgatagatataaacttatcattttgagaaagggtagagggcttgctggaatggtgatgaaaaccggtaaacgtatggttattgctgatgtagatacagctttatctccagaagagaaagttaaatttccaatcattcttagtgagtcattgacagctgtagttgcagtacctttatggttagaaaattcaatgtatggcgttttactattaggtcaaagaaatcatcagccgttacctcagtcattggaccaacttaatattgaaaaacaaatcggtatttttacagaaataaactag

SEQ ID NO: 3410 - DNA, 1035 bp, Staphylococcus epidermidis
atgttggagcaaactgatttaagtttagagcaattacttaagaattattatgaaaccacgaacgagaaaattgtatttgttaataggtatggaaaaattattgctatgaatgacgcagcaaaagatattttaactgaagaagataattataatgctatgacaaatgcgatttgtcatcgatgtgaaggatactctaatgaatatgatgtacaatcgtgtaaagattgttttttagaaacaacgcaattacaacattcaaatttccaagtatttatgaagacaaaagataacgaaattaagccttttacagctatgtatcaaaatattgatgaacaaagaggtattagtgcatttacattacagaatgtggcgccccagattgaaaggcaagaaaagatgtatcaacaaaaaatgttacatcgttcaattcaagcacaagaaaatgaacggaagcgtatttctagagaattacatgatagtgtaatacaggatatgctcaatatagatgttgaactaaggcttttgaagtataagcataaggataaagtgttagctgaaacatctcaacgtatagaaggactattatcacagcttattgatgatattagaaatatgtctgttgaattacgaccttcttctctcgatgacttaggtattgaagcagcttttaaatcatattttaaacagtttgaagaaaattatggtatgcatattaaatatgattcgaatattaaaggcatgcgttttgatagtgaaattgaaacagttgtgtatcgtgtagttcaagagggggtatttaatgctctaaaatatgctggggttaatgaaattgaggtaagtacgcatagtgatggtaagcagcttgtagcagaagttgtggatcgaggtaaagggtttagtttaaatcatcaccctaaaggctctggacttggattgtacgggatgagagaacgtgcagatttagttaacggtcacgttaatatagagacacatattaatagaggtactataattacattagatataccgatttaa

SEQ ID NO: 3411 - DNA, 657 bp, Staphylococcus epidermidis
gtgaaaatagttatagcggatgaccatgcagttgttaggacaggattttcaatgatattaaattatcaagaagatatggaagttgttgcaactgcagctgacggggttgaagcttaccaaaaagtgttagaacatcaaccagatgttttaatattagatttgagcatgccaccaggagagtctggcttaatcgcaaccagtaaaatttctgaaagttttcctgaaactaaaattttaatacttacgatgtttgatgacgaagaatatttatttcatgtgttaaaaagtggtgctaaaggatatattttaaagaattcacctgatgagcaattaatattggccgtacgtacagtatatcaaggtgaaacttatgttgatatgaaattgacgacgtctttagtcaatgagtttgtcaatcaatctcaaacggatgaagtgtcatcctcttcagatccatttaaaattttatcgaaacgagagttagaaatattacctcttatagctaaaggctatggcaataaagatattgcagaaaagttgtttgtatcagtaaaaacggtagaagcacataaaacgcatattatgacgaaactaaatttaaagagtaaacctgaattagttgaatatgccttaaagaaaaaattattagaattttaa

SEQ ID NO: 3412 - DNA, 1164 bp, Staphylococcus epidermidis
atgaacatgaaaaagggtgtttctcagcttacgttacagacattgagtttggtcgctggctttatggcttggagtattatttctccattaatgccatttatttcacaagatgttgatatttctccgggacaaatatctgtcattttagctattcctgttattttaggttctgtactacgtgtgccatttgggtacttaactaatattgtaggagctaaatgggtgtttttctggagttttattgtattattacttccaatttttcttttaggtcaagctcaatcacccggtatgctaatgctatcaggattctttctaggaattggtggcgcatttttttcagtgggtgttacttctgtacccaaatacttttcaaaagacaaagttggtctagcaaatggtatatatggtgtaggtaatattggtactgcagtatcctcattttgtgccccagtgttagcaggtgcaattgggtggcaaaatacagttcgtagttatttaattattcttagtatatttgcaattttaatgtttcttttaggagataaaaatgagcccaaagtgaagattcctttgatggctcaagtcaaagacctatctaagaattataagttgtattatttaagtttgtggtattttattacttttggagcttttgtggcttttgggatttttttaccgaacttcctagttgatcattttagtattgataaagttgatgcgggtattcgttcaggtatatttatagcactagcgacgttcctgagacccgttggcggagttataggtgataaatttaatgcagtacaagcgcttatcatcgacttcgtgataatgattattggtgcacttattttaagcttatctagtcatattgttctgtttacaataggctgtttagcaattagtatctgtgcgggtataggtaatggtttaatatttaaattagtaccttcatacttttctaaagaagcaggttcagcgaatggtattgtatccatgatggggggactaggtggtttcttcccaccactagtgattacttttgtgacgagtatcactggttcaagtcatctcgctttcttcttcttagctatatttggtgtaattgctcttattacaatgattcatttaaataaaaaagaaaaagctgttcgtatataa

SEQ ID NO: 3413 - DNA, 447 bp, Staphylococcus epidermidis
atgtatgtagagaatagttatttgagcaaacaattatgttttttattttatgtttcctctaaagaaatcatcaaaaaatatacagattacctaaaagagtatggtcttacatacacaggttatattgtattaatggcgatagaagatgatgagaaacttaacattaaaaaactgggcgaaagagtcttcttggattctggcacgctaacaccattattaaaaaaattagagaaaaagaattatgtcattcgaactcgtgaagaacaagatgaacgtaaccttcaaatttctttgacagaacgtggcaaggatattcaaaatgttctttctgatatttcacaaagtgtttttaatgaatttaatattactcaagaagaaacccaaaatttagttgaagacttgcaaaattttgtaacgaaaaattttgataaaacagtggaaaagtga

SEQ ID NO: 3414 - DNA, 630 bp, Staphylococcus epidermidis
ttgacacgtatcaatgattttaacgaagtgcttaacagcagaaaatcagtaaaagtatttgacgagaattataaaatttctcgagaagaaatggatgaaatcattactaaatcaacacaagcaccttcatcggttaatatgcaaccatggagaattgctgttgtagaaagcgatgaaatgaaagaaaaagttaaagaatcatttggatttaattccagacagttaactacatcctcagctatgttaattatttttggagatttacaaaactacgaaaaagctgaacagatttatggcgatgctgtagaacaacaattgatgacggaagatatcaaagtacaactgttagattggatattaccttattataaaaacttatctagagaaggcatgaaagatattgtgaatatagatagtagtttaatggcaatgcaattaatgcttacagcaaaagctcacggttacgatacaaaccctattggtggtttcgataaagaaaatattgcagatattatcggttatgattctgacagatatgtgccagttttagcgattgctataggtaaaaaagcacaagatgcacacgattcagtgagacttccgattgatgatgtaagggaatttttataa

SEQ ID NO: 3415 - DNA, 366 bp, Staphylococcus epidermidis
atgagtaagaaacaagttatttttagggtaatcattattttgattatctctctaatattagcaattgcatttttcttcggactcaaagcttatcaaggtcataaaaatcttgaactgattgatagctatatgagcgaccatcatcttaatgataaagtgaaaaaagacaaaacatcatatagcactaaaaagggactatactataaagaagtcgttttcaaagatgaacctaacgtgacatatgtgattcaacctatcagtacttcaaaaggaatattcattgaaggttttgatagcgaaacgaagaaaagtattaaaaaagcaaaacatagtgattttgatcaaaaatataaaccttctaaataa

SEQ ID NO: 3416 - DNA, 1281 bp, Staphylococcus epidermidis
atggctctattcaagaaaaaaataagtctaccaacgcaagtaattattgctttggtactcggtgtcatcgctggtctattactatatggacaagatgatgttgcaaattatattaagccatttggtgatgtattcttaaatttaattaagatgatcatcattccgattgtattttgttcattagccttatctatttcaaatttaggggattctaaaaaggtaggaagctatggatggaaagcaatcctttatttcgagattattacaactatcgccataggtttaggtcttatcattggtaatctattcaaaccaggttcaggtctagatccagataaattacctaaaggcgatattactaaatatcaatcatctgcacattcagcagaacaagcgactacttatggtaatcatcttatagatacattagttcatattgtgccaacgaatttatttgaatctatggcaaaaggtgagttattaccgattatctttttcgcagtattttttggattaggattagctgcgataggagaaaaagcagaacccgttaaaggattcttaaatggtactttagaagctgtattttggatgatcaataaaattttaaaattagctccaattggagtatttgcatttatttgtacgacagtaatgacttttggtgcttcagcattaattccattatttaaattactagttgttgtagtatttgctatggttttctttgttatcgtagtgttaggaattgttgcaagaatggttggaataagtattttttcaatcatgaagatacttaaaagtgaattgttacttgccttttctacttcaagttcagaagcagtattgccgattatgatgaagaaaatggaacgttttggttcgccaaaagatgttacttcatttgttatccctatcggttattcatttaatttagatggctcagctttatatcaatctatagctgctctatttgttgctcaaatgtataatatacatttatcattaactgaacaacttgtattaatggccacacttatgattgcttcaaaaggtatggctggggtgccgggcgtatctattgtagttttattaacaacattaagttctatgaatataccagcacaaggtcttgctttaattattggcgttgatcgtttattagatatggtgcgtacatgtgttaatgttattggtaatgcactctcaacagttgttattgctaaatgggaaaacgtctatgataaagagaaaggtcaaaactacttaaattcaatttaa

SEQ ID NO: 3417 - DNA, 1893 bp, Staphylococcus epidermidis
gtggatactataaatcttgtagaaaaacgtttttttgatgttgccagattgtatgacattagctttaataataaatcaattaaggatatagatgttggaaatttatctggtcaaataatgaagctaaaatttaataaagaaataaaaaatacagaatatgaattgttaatgaaaataaaaaatattatttcagatattcaaatatataatgataatgtcagtaaaaataatttaaatacttacatagactatctaaataactatcgtaaaaaaaagagtactaatacgcataatcattttttaaatacaattagtaatataagctcatcttccaagacatcaattgttaattctgaagaatttaataaaatgaatgaatatttacatgtaaaaagacccattgaagaacatttacattatgcattagaaaatttaaaaaataaagatagagggataatctttttagtaggatctgttggtgacggtaaaagccatcttttatcgtattttaataaaatacaacctcaactattatcagacgtttatatttacaatgatgctactgaaagtgataatccatataaaacagctgttgaaactttagccaataagttagcaagttttgataataaagaaataaataaaatagtaatagctataaatattggaatgttacataacttaaggaaatatttattagaacataaatgttatttgaaaataatcgaagctataaaccaaagtaatatatttggtactgaaggaatgtctaaaagtaatttcaatgaaaatgatgtaacagtactatcattcttaaatgaaagtcaatttcacattgaaaatggtgaaatttatagtgaattttataacagaattttcgaaaaaatatgctctgcaaatgaaaataatcctttttatcaatctttcctaaaagatgatggttttaaaagaaatgaacctatatatcagaattaccaactaattttaaataaagaaatacaacaagcaataattcatttactagtaaaaattcaaattgaaaataaaaggattatatctactagagcattgttaaatttaattcatgacattatagtgccagataaagaaatgaaagaaaatgattcatttttagtcaatctattatttaataactatggaaaatcgactttattatctactataagtttacaagatccaattacaattcaagattcacacttagatgaattaaatatagagatatataatgcatttaatttacaacaaaaatgtaaagaattatttgaagaagaggactttaaaaaaattcaaagttatctttacttactagatgggttatcacataaaagaaaattcgaaatgattgttaggttgcattatctttttaattataaaaaatatgagaacaattctttttttaaatatataaatttaattgaaaatattaataatgatgtgaagttaaagaaagatatattaaataaaataattcaaacaatatatcaatggaaaggtagtcctaaaaagggatttatttataatgaaagtttaaaaccctctaccaagataagaattggattaaaatttgaaccaaaagtgttaaatgtagaagtaacaaataagttaactctgattttcacttttgaagtccaatcaaaagaatatcaaattgaagtagattacattttatatttattgatgttgaaaattgaaaacggatatgttcttaaagaaaaagataaattagaagcagtcatgttttctgaattcgttgataatattatcaataatttagagtctaataaggaaacgataataaatataccaagtactaatgaaacatactctttgagtgaagggtttttaggatatcaaatagaggaagtgtaa

SEQ ID NO: 3418 - DNA, 1356 bp, Staphylococcus epidermidis
atggtagatgctagtcaaaaactaattaagttacttaatttagatagtggaaaacctagttttaaaagaacatttaattttaaacttttcccattttttacaagaaatccagaaagagctaaatttgataatggatttactcctgttttaggtgcaattgtaaggcacagtttgaatttaaaagttgaatattctatagatgattataatattgaaaaattgtatgaaaatgtagacagtgttaatggtatcgatgatgaaaaaaagattcctattttaaatcgaatatttggttttgagaatattaagtcacttagacatccatacttattaaattattatccactaagtcaaggtaaggataaacgcggagagatggatatcgcattatacttaaatagtatatttgatttaaaaaacaatgcaatttggaatcaatttgtaggagacaagaaatcaaataacttggctgaaaagctaatattggactcagtagaagagattaaagaagtagaagaaagaaatatatttaaatcaattttaaatgatatattcattgagaaaaatgaagatttggaatatttattgaaaaataaagattttgcattaaaaaatttagataagttttttgccttttattattttcaattcatattgcaaacagcgttaaatatagatcgtataagaaatgtgaaggaaggagttaaattatatcctctttattatacacttgagtttgaaaaaataacttctagtagaattactaatacaaggggatataacttaattaaagaaataaataaatatacactcgtaaatgagaatttattgggctatctcaacatattgatacgtgaaataaataaagatgaaaacttttacacatttacagatatttttaatttaaattatgaaaaacaattagaccttaatcaagaattgaaaatagtattaagtgaatataaaaaagtattaaaaaaagaagaagaaatagaaattaatttagaaaacaacattgaattattaaaaaaatggcttgctgaagatattaccaatgaaacaatatctaggtatcatttatcagtagaagagattggcaaattaatgtttttaaaaaacagaggtagtttaggtaaaaccttatctttgaaaaaagatatgattattttacttaccgcacttattgttaaagatgagaaaaaactaataaaagatgtatttatggaatttgaaaaaagaggagtatattttgatagatatactaaagaagaaataatgattttttacgaaaaaatgaatattctagataaaaaaagtgatagtggagaggttaagtatgtcaaaccagtactataa

SEQ ID NO: 3419 - DNA, 5208 bp, Staphylococcus epidermidis
atgtcaaaccagtactataaatttttaaatagagaattattaaagtatttcaaagacagtcaaataagacctggggatagatattttttaatattaaatagtgatgatgagttagataatctgaaaaaagctatattaaatagtaatgatgaaataataggtaaatttaaatcaaatgaatttgattttgaaactatatattataattttaacggtatgaaagctatctttgtttttgcaaacgatggtataacgcatgatttcttagttactattagaaataaagtttctcttcaaaaagatgaatggcataattcaattgttgtttttatgattaaagaagacttagatagtataactggaggtgcactagatttatctaaaaagggcgcaccttttcatacagcatccttaagaaaaaatttaaagcatatacttgaaaatagtcaaaataatcttgaagattatgaaaaaagaattttagattttatagttaaaaacaaatttgatgatgaatttgtaaaatatacgctcatggattttgaggcagtatttagtattattgaacagggaaaaatagctaaagaagattattataatttaggagtgtttaaagataaacaattaaaatctttcaaaggtaagcaagtcgaagcaagattagaagaaaataaacagttatttgattctgttcaagcaatacatgataggggaaatgtgaaagaacaacttgaagaaaaatttgccggtaaaactattaatgatttaacaagtgatgagtggtataacactgattttgaatctgttaaacgtagtaaagaatctgcagatgagttaaaaagagtaaaactagactttttagaagatgaattcttaaatcagtttgataattctatcgaagtttgggacaaagcttctggaaaaactaaggtgaagatgcgagaaagaaatattattatcttcaaaaatcaccaacgattaaaggaaattaaactgccatttagtaaaaatacagatttaaatgcaaactttgttattaaaagaggtataaaattattaaatttaaccaataaaagccaaaaaattgaaagtaactttaaaacaagaaacagaagtaatttagtgtttgatagttctaatttaaatgagaacgatgaatttttctttgaatttacatataagcatgataatcaaaattcactatctttcaagtttagaattttaatagtaaattttgatagcagtttaatagagaatatcaaaacaagatataaattaaaatacgactcaaaaagtaaattggtagaaataaatttagatagtaatgagaatatcgttacttttaataatgataatcaagaagtacaaaaagtttatgaatgtgaagaagaacattctttatctaactattcaagctttgattttacaccattaattaacaaagatgaagatcatatatatatatatatatttattaacaatataaattataaaattagattaaatgacatagctaataaacctatgcccgtatcaagtttaaatttgattcgttatgtttatgagcaaagagattctatgaaagtaaaagataacctagtgagtcatggaactgatgaatattatttgtataaaaactttagaaacgtaatagaaatagaaaatgaaatgatatataacaaatattcacatggtgaaatcattgatgatgaattttatggatatcaattagatttaagtcctgaaattatagaagcttatcaaacattttgtaacttaattattgataaacaaacagtacctagcttaatttactatgatgaagacgtaagagaagcagggttaagatattgtgaagcggttgaaaatgagctatatagattacctgataatgaaaaagtcattgacaatagtatattaaatatccataaacttggattagtttatcacggaaaaaatatctactttacgtcgttacatcctcttttaataagatatgagatagagaagacaatgcaacttaaagaaaacaaaattaatgaaaaagtatttagaaaatataaccctattggtttattgccttatttcgttgacagtaattcgaattattatttctctaatttttcagaagaaagttcaagatggataatttataaaccgtatgaaacaactaataaaatgagttctgaaaaaacgcgaattattattaaatctagattaaatgattttaagcaacactttaaatatttatttagtgtaaatcctcaattttctcttaaaacaaagtatgtagaagtcaacgattataaagtcattttacaaggaacaattgaatttttacttaatgaaataaaagatgctaaatcgttacatgaagtgaatccgatagatatttatataagtaaaattgataatttagaccttatgtatgagttatataatttgaaaaattacaatgagctacaagatttatatgaagtgtttatacctagtaaagtgaagaaaaactatgaagaagaagacattatagacgctattaaggataaaataaatgttttcgtagataatgaaaaagggctatatcatattactttttataactttaatcaaaaacctcaatttagtacgaataatttaaaagaaattaatgcttcagtaaccgataaaggattactttcaagtattagttacactaaattaggaaaaacgtatctttcaggttttggaatagctggtataaaagattcaacatctttaattaatagtgcgacactttggaatagcttcattgcaagcaatcaaaatcatcaattaaatcctttcaaacataacgaaggtatagtaaacaatgttataagtcttgaaaataaaaatttagaagaaatatttgataatacaaattgggttacttttttagacccctcggtagatttatcttatttcaatagtgaccaatatgatttatatgttattcactataatgatcaaacatcgtcctttaattatgagtctattactgttactaatgacactcatcaatatagtagtgttttaaaagaattcttaacaaaagtgaatgtaaattatactccacataatattgagaatataatcagatcattcaatatacttaatggggaatggttgttatcagtaataggtaatagaagttctaaaaatgttactaaagattattcagtgcgtgaaaaactaagtattatatctgcttataaacaagtattagctattttagataatgaaaaaatcaaatggatacctatttcattagaggagattattagggttagtagacaacaaggtttagaagcaagttcggatattttttctgctaaagaattagggtataaagggactatttcagatgatttattatttatcggactagaaatttccaatgatacttttaaaattcatattatgcctgtggaagttaaagtaggttcaataaacagtaacgttattgaaaaagcaaaagaacaagtaaatcatttatttaatctacttaatgaagaactaataaaaactactaataaatatttagcacagaattactatagacaatttttcttaaacctatactttgggaatgttaagaagtttatagataatggagtattgcaagataatgagttaatcaatatttatgacagaagagcagagattttaaacacgaatgttgaatttactgctgaacttaatttgcattacggaaagggattattagtattatttgatcaagataataattatagaaaacttattttaaataatgaacctaaagttatagagctaaacttgccagaattagatgcttatatagactccgaaaaagaattttcaactgtgaaaaaagaaatacacaataatgaaaaaggtattgatataagtaaacttcttactaatcaagaactacatgacaatcaagatatgagtaagttgactactgaagagaatgagaaaagtgacaccgatgaaaatagggttgatgtatcgttaccaaacgataaaaaaaagccagatggtatagttaaagcagatgaaataaaagaattgaataatgatattaatcttgaaagtataagaatcttacttggtaaaataaaaggtagtaatcaggatttatattgggaattcggacattctaaattacctaatcgtcacttattaatcagtggtaaatcgggtcaaggtaaaacttatttcatgcaatgtttattgtatgagatggctcgaaatcatctagatagcttaattgtagattataccgacggatttttagagacacatttagaaccagagtttaaaaataaattggataaaagaattgaaacgaaatttgtttttaaagataaattaccaatcaatccatttaaaaaatatgatattgatttaggtggattttctgtaccagaagaaaatgatgatattgctgatagagtagttcaaattgttgattttgtatttaagctaggtattcaacaaagtagcttgttgaaagaaacgataaaatcaggattagatatatatggggatagttttacatttactaaattaaaactaattttatcaaatgaagagaataccaatgcgattagtttaattggtaggataagtaaactattagataaagatccttttgtttataatgaaactgaattttcttggtcaaaagtctttaacaataaaggtaaagtaaatattatgcaacttaaaggttttgttcctgatattcaaaagataataacagagtttttactttgggacatatataattataccgaaagagaaggtaataaaaactcaccaataccagtattattagatgaaatgcaaaatttaaatcataaagaaagctcaccaacaactaaaattttaaaagaaggaagaaaatttggttggtcgtcttggttagctactcagtctattagttctataaaaaataacaatggagatatttccgctctatttaatgctgcacaacaaatacattttgctccccctgaggatcaaataccgtttatcagtaaaaatattgcaactaatagtgatgagcgtagaagaattgaacaaaaactttcaaatttaaacaaaggtgaatgtattgttaatgggtattcaaaaattaatggtgagctaaagagagtggtagaaaccataaatgtaactcccttagaatatagatattaa

SEQ ID NO: 3420 - DNA, 351 bp, Staphylococcus epidermidis
atgaaaaataaaaaaggattaggtataggccttatcgcagttatggttattgtatgtattgtactagtaatcatgatgttcgtgggtggtaagaaagattcatactacggtattatgaaagatagcacgactatcgataaaatgattaatacgaaaaatgaaaagattgaaaaaaacgtagaattaccaaaagatgctaatgtgtcagttaataaagaagattttgtcatgctttttaaagatgaaaagactggaaaaattactaaagttaagaaagttgatcacgatgacgtacctcatggtttaatgtcaaaaatccatgatatgggtaatatgaaacacggaatgtag

SEQ ID NO: 3421 - DNA, 423 bp, Staphylococcus epidermidis
ttgaataaacaacaagtgacaagagcaatagaaaaggtattaagttcttcaaaaattggtgtcctatcaactgcacatcataataaacctaatagcagatatatggtcttttacaatgatgacttaaacttatatacaaaaacgaatatcaattcactaaaagtcgaagaaatagaaaataatcctgatgctcacattttattaggctataacgaaacaacaaataatagctttgttgaaatagatgccactatagaagttgtcaaagatcaaaaagttattgattggttatgggaaactcaagacaaaacatttttcaattcaaaagaagatccagaattatgtgtactcaaagttataccgcgttcaattaaattaatgaatgatgatgaactagatacgccagttacaattgagttataa

SEQ ID NO: 3422 - DNA, 2034 bp, Staphylococcus epidermidis
atgttttcacttacaaatgacttaaaaatcacaataaatggtgaaacaaaagatttaggtaatcatatagctatcattaatcaatctgacatctattttattaatagtgcttcgaatctcgtattactttctattccagttatttatttttatagtaaagacaataaattttttaaatgttattttgacaggcatttattacaatcaagcagttttgttaaaacaattattttacaagctattcaacatttaataaaaggagaaaatcaagatgagcaatccatctctaaaataatacagacgcttctaaaagaagcagtcattcgatataagaaaaaatatattcctcaaattgcagttaatcattcagtgtttactgaaggattaacatttattcattcaaaagtatcacagtcactctcactacgagaagtagctcaacattgtaatatatctgaatcttattgttctaacctatttgcaagatatcttaatatgaattttaaagattattttacaagcttaaaagtgattgactctataaaaaggctactttcatctgaggactcgattaacgctatttcagaacaatctggatttagtagtcataccaattttacaaatcaatttaaaaattatttaggttgtagcccaaaacaataccgaacgcttaactctaagttagaccccttaccttcgataagttttagtgatactgacttttcacaatatattgaattaattaatcaatttgagtttagtgatcatttggctactgaaacaactgaaagagatatcaatgaattttatcctcaagatcagactaaaaactctaaagcgtttatacgttttcaaaatttcaacgaattatttcaatttgtttttaatgaatattacaacattgatcttacctccatgccacaagctgtaatttttatcaatgatattactgatatttcgacgcgagaggtgaactttaatttattaaatcgatgctttgaaaaattattcgaaaaaaatataggtttagccatgagattaacatctacaaatgaatttgaatctatcaaagaaataattttattatttcttaatagccaccaagattataaaatgaacaaaaaaatggttaaatttatgttagtctttgatactgagagtttgtcagtgaacgatatacatttatgccatttaaaaattaaaaataaaaataaggctattcgttatagtataactgttgaaggattactacaccaaaattcttctattgatctaacttatgatatgatgaagcgattgaatttcgattactattttatagacattgaaaatctagaaaccaaaaactcattaattaccaaacgtaaatcgtacttacattcgtccacacactttgaaaattataaacaatttatattagattctggtataccttcaactaaatttgtttacaataatttatctttaaagtgttttaaatatacaaacaatggtacttatccacttcaattatctgaccttgtttgtcatttagtcgcattaatgcgttacgggggtggtgtaagttatcaactgatagaagatgagagcccttttattgccttatttaatcgttatggtagtcctctacctctcatgcacctctataaattaattgaatcatttttaaatgaacctttagagatagccaacaattttttaatgagtcgcaaagatggtaactatcactttttattatttaataaaataaatgatcgttatctatctgatagtcaacagcgctacgtatttaaaaatacattatcaaccaactcattaattattattaaaacgttaaatcatgagcatggcgcaattcaaaatcttctaccacaaactaaacaacaattttatattgaacgtagtattcttgatgaacttgataaatcaaatcaaccaaaaacagaattagctatacaacatgaccatcatcttcctttccaagtcaccttaaaacacgatgaagtcaaatatatttgttttaaaccttcttaa

SEQ ID NO: 3423 - DNA, 114 bp, Staphylococcus epidermidis
atggtacatttaaaacgtgcatcgatgttgattcttgatgttgaaataaaatgtttaactttcatcaaaactgcccatatacaaatgtttattcatcttaatttaaaaaattaa

SEQ ID NO: 3424 - DNA, 378 bp, Staphylococcus epidermidis
ttgaaagaacgcggaaaaatagaaaaattgtggcgtgaggaaaaatatcgtgtgttatttcatgatcaaaatgcatatcattcgataagaacgttactaaaatcacctaccacattggatgaagtggaagaacatattgcgcacgctttaaccattacaccgaccaaaggctcagtcatcaatgctttcgaacatatgtgggggtacttcaaaaaacaatgtacacaatatgaaaaacaacatagtcgagaattaaaggagttgtatattgaaaatcaaattgactattttgaactgttgtcttttttaaaaaatttagcagataaatatgctgtcgagtacttacaacaaagtactatactcaatattacaaactga

SEQ ID NO: 3425 - DNA, 1446 bp, Staphylococcus epidermidis
atgagttataaaaaatctgctgaagaaatacttaaagcaattggcggtgaagaaaatttagatgcaatggcacattgtgcaactcgattacgtttagtactgaacgatgagagtaaagtagatgaagataccttgtctaatatggacgtcgtcaaaggaacattctctacaggtggtcaataccaaattattataggttcagggacagtaaataaagtatttaatgaattagaaaaaataactggaaaagaagcatctacgacttcagaagttaaagataaatcatctaagcatatgaatcctttccaaaaatttgtgaaaatgttatctgatatctttgttcctattattccggctattgtagctggtggtttgttaatgggattaaataatattttcacagctaaagatttgttctatgatggtaaatctatcatagatgtgcatagtcaattttctggcttggctgatatgattaatatattcgcaaatgcaccttttacgttattaccaatacttattggttttagtgcagctaagcgatttggtggcaatccttatttaggtgcagcgctaggtatgatactcgttcaccctggattgatgagtgcatatgattttccaaaagctttagaagcaggaaaagctattccacattgggatgtctttgggctacatattaatgaagttggttatcagggacaagtattacctatgctcgtagcaacatatattttagctacaattgaaaaatggttacgtaaggttattccaactgtgttagataatttattgacgccattattatcaatttttattacagcatttataacatttctatttgtagggcctgtcactcgtcaattaggttattggttatctgatggattgacttggttatatgaatttggtggagctattggtggacttatatttggtttattatatgcgccaatcgtcattacaggaatgcaccatagctttattgcagttgaaacgacattaattgctgatgcgactaaaacaggcggctcatttatcttcccaatcgcaactatgtcaaatattgcccaaggtggcgcagctttagctgcattctttatcattaagcaaaataaaaaattaaaaggtgtggcttccgcagcgggtatttcagctttactaggaattacagaaccagcaatgtttggtgtcaatcttaaattgagatatccatttataggtgctgttgcaggatcaggtataggtgctgcttatatttcattcttcaaagtaaaagcgatagcgcttggtacagctggattacctggatttatatctataaatcctacacacgctggttggttacattacttaataggaatgctaattgcatttgttgtttcagttgtcgtcactttagtactatctcgaagaaaagcaaataagacagctgttgaatcataa

SEQ ID NO: 3426 - DNA, 948 bp, Staphylococcus epidermidis
atgattacagcttataaacacgcacttcatcatccttcacaaattattgaaactgaaatcaatcatagcgcttcatggataaatgtagtagaaccagatagagaagaaattgaaggtttgatggaattttacaatatacctgaggattttattcgagatccgttagactctgaagagagcgcacgtattgaatatgacgaagatacgggatactcgctaattattattgacttacctatcgtcaattctaccaatcgacgtgtcttgtcctttgtgaccatcccattaggcattattattggaaatggtatcgttatgactgtttgcgatgctgaaaatgaatttttagaaaactttgctaaacaagaagatattaacttaaaatttcacagtcgatttgcacttgaaatactaacaacaatagctaatcactacaatagaaatttaagattgcttaataaatctaggattcgtattgaaagagaactcaaaaataacattacaaacaaacagctttttaaactaatggaagtagaaaaaagtttagtatacttcttagctgcactaaaaggtaacgatacaattattaaaaaactctttcgtcttcctgcaatcaaacgttttgaagaggatgaagagctacttgaagacttggtgatagaaaacaaccaagctattgaaacaactgaattacatcaacgaatacttgaaagtatcacttcttcgtatgcttcattattatctaatgatatgaataacatcatgaaaacattaacgttgtttacggttcttttgacccttcctacacttgtctttagtttctttggtatgaatgtacccttaccaattgatgatcatagttacgtgtcttggattattgttgtaggaatttcacttattctagtagctatcgttagtatctttttatggaaaaaacaaaaattataa

SEQ ID NO: 3427 - DNA, 1245 bp, Staphylococcus epidermidis
gtgttaaaaataatgtctaaatttagtgctacgttagttattatgtttttaataactttatcgcctatttttcaatatcaagcttctgcacatgcgactttagaaaaatcaacaccacaacagcaagggattattaaacacaaaccagaagtaatcaagttagagtttaatgaacctgtgaataccaaatactcaagtgtgaccttatttgatgataaaggtaaaaagattaaagaccttaaaccaatcacaactggatggtcacagacagtcgtattttcatctgatcaaattgttaatgggacgaatacaattgaatggcatacggtatctgcggatggacatgaagttggagatacgtttgaattttcagttggaaaagtgacggctaaagatgtagatacatcttctcctttttatgaacagtctaaattttggtttggattattaagatatgttacagaaggtgcaacctttctacttattggattgttttggttaaatggtattgctaagaaacgagggttaagacaatttaatgtgttacccaagcaatcaggaattgcatggattatggctatgtcagtactcgtgagtctcgttgtttacatgatgacactcacatctgatatattagaagatattttatcatttaaattagaagtgataatgcaatttccatatatattaagctctatttcactaatcattttgtttatacttttcatattaaaggatatggaaaaaatatggtactggcttatttcaataattatgattgctgtgataagtatgtctggacacgtgtggtcacaacaagtgccattatggtcaatcatcataagaacaattcatcttatagggctaacgttatggttaggttcactcgtatatctcatttgttatgctattaaagtgaaaactgatcagttgacgaatgtaagacgcatgcttttaaaagttaatatcattgctgtgattatgctcgtttttacagggattttaatggctattgatgaaacgaatattttaacactttggaataacatcaaagcgtggtccatatatcttattataaaaattgtgggaacaatgacaatgatgctgctaggtttgtatcagacgatgcgagctttgaaacagcgccaacaggtcaatcgttatgcgcttatatttgagttgttaatcggtattattttaatttttgcaggtattatgatgagtcaaatgaatatacctagttaa

SEQ ID NO: 3428 - DNA, 588 bp, Staphylococcus epidermidis
atgttacgcaagttactaccactgacattaatagtgttttttggtttaggattttttaagtttgcagatgcacatgtcacactgaatccaaacgaaagcgaacctgagtcgtatgataagtacgatgtacgcgtaccagttgagcaaaatgatcatacagtgaaggtagaattagatgtgccgaagggattaaacgttgagactgttaaacctgtccaaggttttgaacatcatttttcgaaagataaaaagggaaatattaccaaagttacttggacagctactggtaaaggtattggtccacacgaatttattgagtttcctattgtagtggcaaatcctaaagaagaaggaaagttcaaatggaatgctattcaaacttatgataatggagatgtagttagatggactggtaaagaagatagcgaacacccagcaccaactacaactgtaaaaaaaggagcaaatccaaatgacacgcattttgactcaagtcaaggtgattcaatcgctttatggatagttgctatcttggcaataattatttcattgattgcattatttaaacaagcgcgttctaaaaagtaa

SEQ ID NO: 3429 - DNA, 417 bp, Staphylococcus epidermidis
atgcgtagattattatactcttttttattttatatggtcataggcttattaagtggcttttattacagagaattaactaaagcacatgactttgtgggtgacacgcaattgtctttagtgcatacacatacacttatcttaggcatgtttatgtttttactcttattaccacttgaaaaagtatttaaattaagtagttactacttatttaattggttctttttcgtgtatcatttaggtgtgttaatcacgatttcaatgatgacagttaaaggtacattccaagttattggtaaaaaattttcacctgaaatgtttgcgggatttgcaggcataggtcatacaggtatgcttgctgggttactgttactatttttcttattaagacaggctattcttacagaacctaaaaaataa

SEQ ID NO: 3430 - DNA, 402 bp, Staphylococcus epidermidis
atgactaagattcactttgaagcacccagtcccgaggattactgtaatttaagagctaatgctggaatgagtagtaaatcgattgaagcggcaataaaggggcttccacatgcatgttttaatgtgaccctttatgagaatgatatgttgattggaatggggcgagtgattggagacggtggcacagttttccaaatcgtcgatattgctgtgaaagatacatatcaagggttgggtcatggaatgacaattatgcaagaaataatgaagtatattgagagtgttgctgaagaaggtacatatgtgagcttgatagcagattatccggcagatcaattatacgagaagtttggatttaaaagtactgagccctattcaaaaggtatgtatatcaaatattaa

SEQ ID NO: 3431 - DNA, 315 bp, Staphylococcus epidermidis; identical to SEQ ID NO: 2614

SEQ ID NO: 3432 - DNA, 1161 bp, Staphylococcus epidermidis
atggaaatgtcagaaaggctagcttcaattcctgatagttactttggcaaaacaatgggccaaaaagttgaacatggtcctttaccacttataaatatggcagttggaattccagatggagaaacgccaaaaggtattatcaatcatttttcagaggcgctatgtattccagaaaatcaaaagtatggtccattccacggcaaagatgcctttaaacaagcgattgttaacttctatcaaagacattacgatgttgaattagacaaagaagatgaagtttgtattttatatgggactaaaaatggtctagttgcattacctacttgtgttgttaatcctggtgaaatcgtacttttaccagatccgggatatacagattatttagcgggggtcatgttagctgatgctaagccactccctttaaaattgtcgccaccaaattatttgccgaattggaatactataaatgctaaagttcttgagaagactaagctaatttatttaacatatcctaataatcctaccggttcgacagccacacaagatgtttttgatgaagcaattcatcgctttaaaggtactcaaacaaagatagttcatgactttgcatatagtgcttttggatttgacgccaaaaatccaagcatattagcttctaataatgcaaaagatgttgctatcgagatattctctttatctaagggctataatatgtcaggctttcgtgttggttttgctgttgggaataaaaaaatgattcaagcgttaaagaaatatcaaactcatacaaatgcaggtatgtttggagcgcttcaagatgctgctacatacgcactcaatcattatgatgaatttttagaaaagcaaaatgaaatatttagacgtagacgtgataattttgaatcacaactacaacgtgcacatttaccgtttgttcactctaagggaggtatttacatttggttacatacacctccgggttatgatagtgaagcattcgaacagttgttattaaaagaaaagtcaattttagttgcacctggtaaaccatttggtgaaaatggtaatcaatatgtgagggtttcattggcgctcgatgataaacaattagaagaagcggcgaatcgcttagcacagttacggtatttgtatgaaagataa

SEQ ID NO: 3433 - DNA, 999 bp, Staphylococcus epidermidis
atgactaaaattaaattaatgggtgtcagagaagaagatgaaccttacattgaaatgtggtcacaacaacatgaagtggaggtagagatgtcgaaagaacagttaactgaagacaatgtccaatctattgaaggatttgatggactatcactgtctcaaacattaccattatcagaaacaatttataataaattaaatcaacttggaattcggcagattgctcaacgaagtgctggatttgatggttatgatttagagttagcatctaaatatggtcttattatatctaatgtgccttcctattcacctcgaagcattgctgaatttaccgtgactcaagccatcaatattgtacgtcactttaatcatgttcaaagaaaaatgagattgcatgattttagatgggaggcatcaattttatctcaatctatcaaagatttaaaggtagcggttattggcacgggacatattggtggcattgttgcacaaatattctcagaaggatatctatgtgacgttgtagcgtatgatccatttccaagtgaacatgtgaaaccttacgttacctataaacaaagtataaatgaggctattcaagatgcagatatcgtcacaatacatatgccgtcaacacagtataacaactacctgtttaatgaaaatatgtttcaaatgtttaaaaagggtgctgtgtttgtaaattgtgctagaggatccttagtagataccaaggctttgttatctgcaataaatcaaggtcaaattaaaggtgcggcacttgatacttatgaatatgaggttggcgtatatacgacagatagaagtgaagacggtttgaatgacccacttttagaggaattaattactagagaagatattattgttacacctcacatagcattttatactgaagcggcaattaaacatctgatttttgatgctttagatgcaacaatggaagtattaaatactggcacgacacagttaagagtaaattaa

SEQ ID NO: 3434 - DNA, 210 bp, Staphylococcus epidermidis
atgatgacacaaaaaatcataaaagttgaaggtatgagttgcgaacattgtagaaacgccgtagaatcggcactagctaaactaaatggcgtatcaagtgctgaagtaaatttagatgaaaatcatgtacgcgttgagtataatgattcaaaagttacatttgacaatatgaaagaagcaattgaagaacaaggttatgatgttaaataa

SEQ ID NO: 3435 - DNA, 2385 bp, Staphylococcus epidermidis
atggcgaatacaacgttgactttggatattattggtatgacatgtgctgcgtgctcaaatcgcattgaaaagaaattgaatcgtatgaatcatgttcaagctaaagtgaatctgactactgagaaagcaactatcgactatgagtctgacgattatcatctcgaagattttgtagagcaaattcaaagtctcggctatgatgttgctgttgagcaagtagaattaaatataaatggtatgacatgtgctgcatgttctaatcgtatagaaaaggttctgaatcaaacgcaaggtgtacaacaggcaacagtaaatttaactaccgaacaagcacacatcaaatattaccctagtgctacgaacacggaagcattaattaaacgtattcaaaatattggatacgatgctgaaactaaaacttcatcaaaagcgcaatcaaatcgtaaaaaacaagagttaaaacataaacgcaataaattaatcatttcagctattttatcattgccactattactagtaatggtggtgcatatttcaccaatttccattccatccattttggtcaatccttgggtacaattaattctttcaacacctgtccaatttattattggttggcaattttacgttggcgcgtataaaaatttgcgaaatggttcagctaacatggatgtattggttgctgttggtaccagtgccgcatatttttatagcatttacgaaatgatgatgtggctcacacatcaaacacatcacccacatttgtattttgaaacaagtgctattttaattacgttaattcttcttggtaaatatttagaagcacgtgccaaatcacagactaccaatgcattaagcgaattgttaaatttacaagcaaaagaagcacgtgtaattaaagaaaataaagaaattatgcttccacttgataaagttaaagtcggagatactttactaattaaacccggcgaaaagatacctgtagatggcaaagtcactaaaggagatacttccatagacgaatccatgctaactggtgagtctatacctgttgaaaaaagtagtggcgattcagtgattggatctaccatgaataaaaatggttcaatcatgattgaagcaactcaagtaggtggtgatactgcattatcacatataattaaagtggttgaggatgctcaaagttctaaagcaccgattcaacgcttagctgatattatttctggatattttgttccgattgtggttagcattgcggttattacttttatcatatggattatattcgttcaccctggacaatttgaacctgcacttgtttcagcaatatctgttttagttattgcttgtccctgtgcacttggtttagcaacacctacatctattatggtgggtacgggacgcgctgcagaaaatggcatattattcaaaggaggccaatttgtagaacgcacacattatgttgatacaatcgtgctagataaaacaggtacaattactaatgggcaacctgtagtaactgattatgttggtgacaatgatacattacaacttttagcaagtgctgaaaatgcttcagaacaccctcttgctgatgccattgttacttatgctaaaaataaaggtcttaatttacttgataatgacacttttaaatcagttcccggacatggcattaaagctacgattcatcaacaacaaatccttgtaggcaatcgcaaattaatgaatgattacaatatatctattagtaataaattaaatgagcaattaaatcactatgaatatttaggtcaaacggcaatgatgattgccgtggataatcaaattaatggaatcattgctgtagctgatacagtaaaaaatgatgctaaacaagctataaaagagcttagaaatatgaatatcgacgtggttatgctgactggtgataacaatcgaacagctcaaaccatcgcaaaacaagttggcattgaacatgtcattgcagaagtattgcccgaagaaaaggcacatcaaatctctttattacaagacaaaggtaaacaggttgccatggtcggcgatggaattaatgatgcgcctgcacttgtaaaagccgatattggaatggctataggcactggagctgaggtagcgattgaagctgcagatattacgattcttggtggtgacttgctattagttccaaaagctatcaaagcaagtaaagctacgattaaaaatattcgacaaaatttattttgggcatttggatataacgtagctggcatcccaatagctgcttgtggtttattagcaccttggattgctggtgctgctatggcattaagttctgttagcgtagttacgaatgccttaagactgaaaaaaatgaaactatag

SEQ ID NO: 3436 - DNA, 207 bp, Staphylococcus epidermidis
atgagaaaaatacttaagggaattatattatcattaataatcatcggcttaatcaaaacgttcaatgaatacgatgttatacattgtgcaaatcattatttcgaacaaatcaaaagtggaaaaatgattgaagatatcaaaattgaccatttcaataattatcataatattaattttgaaaacctaaatccttctgactttttctaa

SEQ ID NO: 3437 - DNA, 870 bp, Staphylococcus epidermidis
gtgaatttattaaaatttcacaacaaaatcaaaggatatactcaaaatagacaacctggtattgaagcggatatggaacctaaacccattgcagaattagaagaatataaagcagcaggaaagttagaaaataaagttgctctaataacaggaggagattcaggtattggacgtgcgatagcaatactatacgctaaagaaggggcaaatgttgctattggttattatgacgaacatcaagatgccaaagacactgttaatcgacttcaagaaattggtgtaaaagctaaagcttatgcccatgacttaaaagatgaaaagcaatctcaaaagttaatcaaagacgttataaatgacttcggtggtttaaatatattagtaaataatggtggcgtacaatttccacgcgatcattttgaagatatcactccacaacaagtgaaagaaagttttatgacgaatatttttggcatgatgtttttatcccaggcagcagtaccttacctatctgaaggagatacaattattaacactacaagtgtaacagcatatagaggatcgggacatctcattgattattcagctacaaaaggtgccatagtatcgtttactcgttctcttgctactactttaatggaaaagggaattcgggttaacgccgttgcgcccggcccaatctattcacctttaattcctgcgacatttgatgaagagaaagtagaacatcaaggtggcgaaacgccgatgggccgtcgtggacaaccagcagaacttgcaccttcttatgtcttcttagcaacacatgcagatagttcctatattactggtcaagtcattcatgttaatggtggcgattttatcacatcttaa

SEQ ID NO: 3438 - DNA, 1545 bp, Staphylococcus epidermidis
atggtagtacctttcaaaaatgaacctggtattgacttttcagtacaggcaaatgttgagcgttttaatgaagaattaaggaaagtaaaagcgcaactaggacaagatataccacttgtgattaacggtgaaaaacttactaaaaccgatacttttaattcagtgaatcctgcgaatacatcacagctcattgcgaaagtgtctaaagcaacgcaagatgatgttgaaaaagccttcgaatcagcaaatcatgcgtatcaatcatggaagaagtggtcgcataaggaccgtgcagaactattgttacgtgtagcagcaattatccgtcgtcgaaaagaagaaatttccgctattatggtttatgaagctggcaagccttgggatgaagcagttggagatgcggctgagggtatcgattttatagaatattatgcaagatcaatgatggaacttgcagatggtaaaccagtattagacagagagggtgaacataatcgttatttttataagcctattggtacaggagtgacaattccaccatggaattttccatttgcaattatggctgggacaactttagctcctgttgttgcaggtaacactgtattattaaagcctgctgaggatacagttttgactgcttataaattaatggagatattagaagaagcaggtttaccacaaggtgttgtaaattttgttcctggtgatccaaaagaaattggagattatttagtcgaccataaagagacacattttgtcacatttacaggatcccgagctacaggcacacgtatttatgaacgtagtgctgtagtgcaagaaggacaacagtttttaaaacgtgttattgcagagatgggtggcaaaagtgcgatagttgtagataataatgtagatactgatttagcagctgaagcaattgttacatctgcttttggtttctctggtcaaaaatgctctgcgtgttctcgtgccatagtccatcaagacgtgcatgatgaaatattggaaaaagcaattcaattaactcaaaaattaactttaggtaatactgaacagaacacatttatggggccggtaattaatcaaaaacaatttgataaaattaaaaattatattgaaattggtaaaaaagaaggaaagctagagactggtggcggaacaaatgattctaccggttatttcattgaaccaactattttttccggactacaatctgcggatcgtatcatgcaagaagaaatttttggaccagtcgtaggatttattaaggtcaaggattttgatgaggctatcgaagtagcaaatgatactgactatggtttgacaggcgccgtaattactaatcatcgtgaacattggattaaggctgtgaatgaatttgatgtaggtaacctttacttgaatagaggctgtacagctgcagtagtgggttatcatccatttggaggattcaagatgtctggtacagatgctaaaacaggaagtccagattacttacttaatttcttagaacaaaaagttgtttccgaaatgttttaa

SEQ ID NO: 3439 - DNA, 228 bp, Staphylococcus epidermidis
atgattagtgtaaacaatggagtaaaaaataaaaaatatagagtgaagcatatagggatttcaaataaaaatatgttgtatcgtttaggggcattaggcttaaatattggaagtgaaattagcatcaaacagaaatgtttactcaacggtcctagcgttgttgaagtaaatggtcaacatttaagtttacgacaacgtgatgcacgactcataacattagaggagtag

SEQ ID NO: 3440 - DNA, 1995 bp, Staphylococcus epidermidis
atgactcaaagttactgtattcttggaaaccctaatgtaggcaaaacatcattatttaatgcgttaaccggttcttacgaatatataggtaactggagtggcgtaaccgttgaaaagaaagtaggaaaattgaaagataatgtaggtgatttagttgatttaccaggcatttatgatttatcgcctatttctaaagatgagacggttgtcacagattatttaatgtcaacatcgttcacaggaatgattaacattattgacgcatgtcagcttaaaagaaatcttaatcttactatacagttgatggaactcaacaaacctatgattattggtttaaatatgatagatgttgcaacacaaagaggtattaaaattaactatcaggcattgatgagaaaattaaaaataccggtatttccaattgttgcaagaaaggcaaaggggacacataatcttttaggagagcttaattatttagaaccacatcaacgtcgtgcatttaagattaattatggaactgaaattgaaactgcaattcaacaaatttgttcaattatcaaacaagataatatgtatccaactgaacgtttacgttttatagccatacagtatttaatagacaatgttcaaatttatcaagaactcgacgccatgactttagaacagttagagcccattaagcgagggttgagtaacgcgacagaacaatcaacacgacaaagaattgaagctgtgcgaaatgattacattaatcagctattggaagatatcgtagaatatcccgaagaggataaacaattctttacttcaaaagtggatcgattattattaaatagatatctaggtatacctatatttttaggcattatgtggcttatttttcaaacaacctttacatggataggaacaccattatctgatcaattagacgcttttataagtggtcctttatcagaatggattaaatctgttatgaatacattacatattacgtcgtttcttcaagatcttattacagatggaattatcgctggtgtgggttctgtattggtatttgtaccacaaattgttgtgttattcttctttatttctttattagaagattcaggttatatggcaagaatagctgtattaatggataaaacaatggaatctataggtttaagtggaaaatcatttattcctatgattattggatttggatgtaatgtaccaagtattatggcagcaagaagtatagagaatgagaaagaacgtttgattacaatattggttgcacccttcatgtcatgttcagcacgtttaccggtttatgcactttttgtaggagcgttcttttcagcacatcaatcactagttgtattaagcttatatattttaggtatagttgtcgctttactagtgagtacgttattgaataaattgatattaaaagataaccagtctgtttttattgtggagttaccgacataccgtgttccatcatttaaaacactttggcgcagtacttgggaaaaagcaaaaggttttgtcaaaaaagcaggtacctttatttttggtggttcagtcgttatttggacactcacatacatcggtccgcacggtgttaatgtaccaattaatcaaagttttatgcatatgattggtcaagggtttgcgaatttaattgcacctttaggatttggctcatggcaggcaggagcgactttaatacctggctttcttgctaaagaagtgattatcagttctatggctattttatactcttctagcgaaagtggtttaacacaagtcattcaacagcaattcaccccactctcagcttatgcattcatgatttttattttactttacgttccttgtatctcaacagtcgcaacgattcgtaaagagacaagttcttggaaatggacattattagcggttgtttatccaatagtaacagcatatatattaacgttcatattctatcaaattagtcaattatttatataa

SEQ ID NO: 3441 - DNA, 183 bp, Staphylococcus epidermidis
atgtttattttagtcaatacaatattgttcatagcgatttttggttatacagcaatgacattagtaaaattctttaaacgttcaaaagaaggtgattgtggtgggtgtaaatctaattgcaaatgcgatacgaatccttcacctcataaaaataaattaaatattccacatattaagtcatag

SEQ ID NO: 3442 - DNA, 465 bp, Staphylococcus epidermidis
atgaagggtagcaaaaaattaaatgaattactagaagataatcataagaaactaaaaaaattatttaagtatgatcataaaaaggcattggcgtttacaccagaggatagagaaaaagttaaggataagtttggtgtctatgtgattttcgatgaggaaaaaccagtgtttgtaggtcaaactggaggatactcatccacacatcaacctattaatagtgatttgtatacaaaattaggacaatacaattcacattcagaaacaggtacgactaaatttagaaaagcttttgctcaaaataaagacttaaatcaaaaccatttaaaagacattactgcagataattacggcttcactttccaatatataaaagtaaaagacgaacctgcgttcattaatgttttagaaattctagcattagaatatgcaaaaaataagaggtatgaactttataattttcaataa

SEQ ID NO: 3443 - DNA, 519 bp, Staphylococcus epidermidis
atgtatcagtcaatgtatgactcgcccgtcggcttattgcaattaatttcaaacgatggcatctcgttgtcacatgtcttatatcccaatcaacatttgaaaggaattaaaacaaaggatactttagatatttttaaagatactaaagcatggttaagagagtattttaaagggaattatcctgagataaaagtaccgttagcaccaaaaggcactgattttcaacagaaggtatggaatgaacttcagacaattcgttatagagaacttaaaacatatggagagattgctaaaacagtaggtcgagcaatgaataaaccagcaatgtctgctcaggctgtaggaggtgctgttgggagtaatcctatttctatacttataccatgtcatcgagtggttggtaaggatggaaatttaacaggatatggaggtactttagataacaaaataaaattattaaaattggaagaaatagatatgacacatttatatagacctaaaaaaacaacgaaaccttga

SEQ ID NO: 3444 - DNA, 1167 bp, Staphylococcus epidermidis
atgaatataggtatagataaaataagtttttatgtacccaaatattatgtagacatggctaaacttgcagaagcgcgccaagtcgatcctaataaatttttaattggaatcggtcaaactgaaatggctgtgagcccagtgaaccaagatatcgtatctatgggagccaatgctgctaaagatattataacagaagaagatagaaagaatattggtatggttatagtagcaactgagtctgcgattgataacgctaaagcagcagccgttcaaattcaccatcttttaggtattcaaccctttgcaagatgctttgaaatgaaagaggcttgttatgcagcaacacctgcaatccaacttgccaaagattatctagctcaacgccctaacgaaaaggttcttgtcattgccagtgatacagctcgttatggtattcgttctggtggtgagcctactcaaggtgccggtgcagttgcaatgatgatttcacataacccaaatattttaaaacttaatgatgatgccgtagcatatactgaagacgtttatgatttctggcgtccaacgggtcatcaatatcccttagttgctggtgcattgtcgaaagatgcctatatcaagtcattccaagaaagttggaatgaatatgcacgccgccataataaaacactcgctgatttcgcttcattatgtttccatgtaccattcaccaaaatgggacaaaaagctttagattctattattaatcatgccgatgaaactacacaagaacgtcttaactctagttaccaaaatgcagttgattataatcgttatgtcggtaatatttacacagggtccttatatttaagtctcatctctttattagaaacacgtgatttaaaaggcggacaaacgattggtctctttagttatggttctggttctgtaggcgagttctttagtggaacattagtagatgggttcaaggaacaattagatgttgagcgccacaaatctttattaaataatagaatagaggtttctgttgatgaatatgaacatttctttgagcgcttcgatcacttagaattgaatcatgaacttgaaaaatcaaatgaagatcgtgacattttctatttaaaatctattgataacaatattcgcgaataccatatagcagaataa

SEQ ID NO: 3445 - DNA, 1278 bp, Staphylococcus epidermidis
atgaaaagtttagataaaggatttagacatttaacacgaaaagataaattaaaagaacttgttgaatacggttggctagaggatgaaaactatgaaatattacttaattatccgttaattaatgaggaagtcgctaacagtttaattgaaaatgtcattggtcaaggtgcactaccagtaggattattacctcaaattatagttgatggtaaagaatatgtagtacctatgatggtagaggaaccgtcagtcgtagcagcagcaagttatggcgcaaaactcgttaatcaaagtggaggatttaagacgatttcaagtgaacgtctaatgattggacaaattgtctttgatgatgtagatgacacaggctcattagctaactcaatatatcaaattgaatcacaaattcatcaaattgctgatgaggcttacccttctattaaagcaagaggtggaggatatcaacgtattgaaatagatacatttcctgatcaacaattattatctttaaaggtttttgttgatactaaagatgctatgggtgccaatatgttaaatacgatattagaagcaatcactgcacatcttaaagttaaattttcaaatcaaaatgttttaatgagtattttatctaatcatgcgacagcatcagtagtaaaagtacaaggagaaatagatattgaagatttacatagaggagagagaagtggcgaagtggtagcgcaacgtatggaacgagcgtcagttcttgcacaagtagatatacatcgtgctgcaacacataacaaaggtgtgatgaatggtatacatgctgtagtattggctacaggcaatgatacaagaggagttgaggcaagtgctcatgcatatgcaagcaaagatggtcattatagagggatagctacttgggaatatgatcgctcacgtaataaattggttggaactattgaagttcctatgactttagctacagtaggtggaggtacgaaagttttacctattgctaaagcctctttagatttgctcaatgttgaaaatgcacaggaactagggcaagttgttgctgctgttggattagcacaaaatttctccgcatgtagagcgctagtgtctgaggggatacaacaaggacatatgagtttacaatataaatcattagcgattgttgtaggtgcaaaaggtgaagaaattgcgcaagtagctgaagcgctcaaatatgaatcacaagctaatactgctaaagctcaagaaatcttgatgaatataagagaatcataa

SEQ ID NO: 3446 - DNA, 435 bp, Staphylococcus epidermidis
atgaaatttaaaaaattattatcacgtattattatcgctacaatgattacgtttactggaacactctcatatcaagctattgaacaaacgcatatttcacatgctgcttcacataattattatggtaaaaaacaatgcacttggtgggcatttaaacgtcgtgctcaattaggcaaacctgtatcaaatcgatggggtaatgctaagaattggtatagcaatgcacgtcgatctggttatgcaactggacataagcctcgcaaatacgctgttatgcaatcaacaagaggctattatgggcacgtagcagtagttgaaaaagtatataagaacggaaaaatcaaaatttctgaatataattataatgtgccattaggctacggcacacgcattattagtaaatcgtctgcacgaaactataattatatttattaa

SEQ ID NO: 3447 - DNA, 216 bp, Staphylococcus epidermidis
ttgagcttttacgaatttatgcaaaatttccttggtgatgacacgccattaggtgaattggttgattggattaatcaagatatcaatttccctaaagacgtgaagagccaaaacgaaatcttgacatattttcgaaatcatccatgtccggaaaacataccagtggcgagtatcaaacgggcactagctgttttcaaccaattcactaaagtataa

SEQ ID NO: 3448 - DNA, 885 bp, Staphylococcus epidermidis
atggatataaaacacatgaaatactttgttgaagttgtcaaacaaggtggtatgacaaacgcttcaaaatctttgtatattgcgcaaccaactatcagtaaagcaattaaggatatagaagcagagatggctgtccctttatttgaccggagtaaaagaagtttagtacttactgatgcaggtaaaatttttttcaagaaatgtcaagaaatcatcgcactatatgataatttgcccactgaaattaatagtttgtatggtttagaaacaggtcatatcactattagtatgtctgcagtgatgagcatgcgtaaatttattggtgtattaggagactttcatcaactttatccgaatatcacgtacaacttaatcgaaagtggtggtaagacaactgaaaatcttatactcaaagatgaagtggatattggtgtgacaacattgccagtagatcatcaaaaatttgaatgtatatctttaaacaaagaagaactgactgtagttttaaataaagaacatcctttagcacaaaaatcttctattaaaatggaagaattagctgatgagaacttcattttatttaatgaagatttctatctcaacgataaaattattgaaaatgcgaagaatgcaggattcgtgccgaacatggcctcacaaatctcacaatggaatgtgattgagaatcttgtcattaatcaattaggtatttccatattgccagccactatagcacaattacttaatgatgacgtcaaaattgtacgtttggaaaatgcacatacaacttgggagcttggtgtcgtttggaaaaaagataaacgtttaagtcatgcgacaaataaatggatagaatttttgaaagaaagattatctgaagaataa

SEQ ID NO: 3449 - DNA, 393 bp, Staphylococcus epidermidis
atggaaaaagcaaaatttgtcattaagttaatacttcaacttgcccttatcatgcttattacttttataggcactgaagttcaaaaattacttcatatacctctagcaggtagtattgtagggctaatgcttttcttcctattgttacaatttaaaatcatacctgaatcatggattaatgtaggagcagactttttacttaaaacaatggttttcttctttatcccatcagtggtaggaattatggatgttgcatctaatatcacgatgaattatatattattctttattgttattataattggtacatgccttgtagcactttcatcaggttatatcgctgaaaaaatgctagaaaaaaacaatacacgtaaaggaactgatcactcatga

SEQ ID NO: 3450 - DNA, 690 bp, Staphylococcus epidermidis
atgaatgaatacttacaagcagttctaatgattttattaaccatcgttttatattatatttccaaaaagattcaagataaatataaaaatccactattaaatccagctcttattgcatcaattgcaataattattgttttattggtttgcggagtaagttataaggggtatatgaaaggtggtacctggattaaccatgttttaaacgctacagttgtatgtcttgcatacccactttatcaaaataaaaagaaaataaaaaaatatttaacaattattttcacaagcgtgttgactggtgtagttctcaattttgtgttagtatttacaacgttgaaaatctttggttattctaaagacacaattgttaccctattacctagatcaattacagcagcagtaggtatagaggtttctcaagagttgggaggaacagatacaattactgtgctctttatcataactacaggtttaatcggcagtattttaggttcaatgctgttacgtatgggaggttttaaatcttccattgcgcgaggactaacttatggaaatgcttctcacgcatttggtaccgcaaaagcattagagcttgatattgaatcaggagcgttcagttcaattggtatgattttaacagcagtcattagttctgttcttataccagtactgattttattgttttactaa

SEQ ID NO: 3451 - DNA, 1740 bp, Staphylococcus epidermidis
atggcacaaattaaagcaaatgaagcattagttaaagcattacaaacttggaatattgatcatttatatggtattcctggcgactcagtagatgctgttgttgatagcttacgtacggtcagagatcaatttaaattctatcacgtacgtcatgaagaggtagcgagtttagctgctgcaagttacacaaaaatgacaggtaaaattggtgtagctttaagtatcgggggacctggtattgtacacttattaaatggtatgtacgatgctaaaatggataatgtacctcaacttattattgctggacaaacaaatagtacattattaggtacaaaattcttccaagagacaaacatttctaaaatggttgatgatgttgctgtatatcaccaccaaattcaaaaaggtgataacgtatttgaaattacaaatgaagcaattcgtacggcatacgagaaaaaaggtgtctctgttatcatttgtccgaatgacttattaactcaaaaaattaaagacactacaaatcgtgcagttgatacaactaaaccaaaaccagtttcaccaaaattcaaaagtattaaaaaagcagctaaattaattgataaagctaaaaaaccagtaatgcttattggtttaggtacacaacacgctaaagatgaattacgtgaatttattgaagctgcaaaaattccagttattcacacattacctgcaaaaacaattttacctgatgatcatccttatagtattggtaacttaggtaaaattggtactaaaacatcttatcaaacaattcaagatgcagacttactaattatggctggtacaaactatccgtatgttaactatttacctaagaaaaacattaaagctattcaaatcgatacgaacgaagaaaatattggtgcacgctttaaaattaatgtaggtattttaggcgatagtaaagttgctttccatcaactaactgaaaacattaagcatgttgcaaaacgtccattcttagataagacattagaacgtaaagcagtttgggataaatggatgaaacaagatttgaataatgacaattcaccattacgtccagaacgtttaatgaaagcaatcaatgctaacttaaaagatgatgcaattatctcagcagatgttggtacatctacagtatggtctacgcgttacttaaacttatctgtaaataataaattcattatttctagttggttaggtactatgggctgtggtttaccaggtgctatggcagctaaaattgcttatccaaaccgtcaagcagtagctatcacaggcgacggtgcgttccaaatggtaatgcaagactttgctacagctgttcaatataacttaccaatgacaatctttgtattaaataacaaacaattgtcattcattaaatatgaacaacaagctgctggtgaattagagtatgccattgatttctctgatatggatcatgctaaatttgctgaagctgctggtggtaaaggctatgttgtgagagatgtaagtcgtcttgacgacatcgttgaagaggcaatggctcaagatgttccaacaatcgttgacgttcatgttgatcctaatgctgcaccattaccaggtaaaattgtaaacgaagaagcatttggttacagtaaatgggcttatagatcaattactgaagataaaaacttagactttgatcaaatcccaccaatctctgtagcagctaaacgtttcttataa

SEQ ID NO: 3452 - DNA, 2028 bp, Staphylococcus epidermidis
atgtttaaaaagctatttggtcaaatgcaacgtatcggtaaagctttaatgttaccagttgctattttaccagctgcagggttgctattagcaattgggactgcgtttcaaggcgaagcgttacaacattatcttccatttataaaaaatgatattgttcaacaaatcgctaatatgcttacaggtgctggtggtatcatatttgataatctacctattatctttgctttaggtgtagcaattggtcttgcaggtggagatggtgtagctgctattgctgcatttgttggttttatcattttaaataaaacaatgggtgcattcttgcatgtaaccccaggtaaattatcagatccatctaatggatacgcaaatgtattagggattcctacacttcaaacaggtgtgttcggaggtattattataggtgcactagcggcctggtgttataacaaattctataatattaccttaccatcatatttaggattctttgcaggtaaacgttttgtaccaattatgatggcaacaacatcttttattttagcttttccgatggcaattatttggccaacgattcaaaacggtttaaatgcgtttagtgaggggttattagattctaatacaggtttagctgtatttttatttggatttattaagcgactattaataccatttggtttacatcacattttccatgcaccattctggtttgaatttggttcttggaaaaatgctgctggagagataattagaggagaccaacgtatttttattgaacaaatccgtgaaggtgctcacttaacttctggtaaattcatgcaaggggaattcccagtcatgatgtttggattaccggctgcagcattggctatttatcaaacagcaaaacctgagaataagaaagtagttgcaggtttaatgatttctgctgcattaacatcatttttaactggtattactgaaccattagaattctcattcttatttgtagcaccattcttattcgtaattcacgctgtattagatggtttatcattcttgacactgtacttgttaaatgtacatttgggatatactttctctggaggatttatagattatgtcttattaggcattctacctaataaaacggcatggtggcttgtcattccagtaggtattatttatgcagtgatttactactttgtatttagattccttattgttaaatttaactataaaacaccaggtcgtgaagataaaaaatcaacagtaacaactacatcagctagtcaactgccattcgatgttttgaaagcaatgggtggtaaagaaaatattaaacatctagatgcttgtattactcgactaagagtagaagtaaatgaaaaatcaaaagttgatgttgccggtcttaaatcattaggcgcttcaggagtacttgaagtcggtaacaatatgcaagccattttcggtcctaaatctgaccaaatcaaacatgatatggctaagataataagtggagaaattacaaaaccaagtgaaacaacaattgatgaagaagtgtcagatgagcctgcacatgtggaagatattgtagaaacagaaatttacgcacctggacatggcgagataattccgttatctgaagtacctgataaagttttctctgaaaagatgatgggtgatggtatcggatttgtaccagattcaggagaaattgtagcaccattcgatggtacggttaaaacaattttccctacaaaacatgcgataggattggaatctgatagtggcgttgaagtgttaattcacattggtatcgatacagttaaattaaatggtgaaggttttgaaagtttagtaaatactgatgaaccagtaacacaaggtcaaccattaatgaagattgatttagaatacttaaaagaacatgctccaagtattattacaccagtaatcataacaaaccaagaagacaaaatattaacaattgaagatgtaaaacaagtcgatcctggtaaagcgattatgacaattaaataa

SEQ ID NO: 3453 - DNA, 759 bp, Staphylococcus epidermidis
atggatgacttgaagcaaaatcaatcttttaacgaaaaacctaaaggtaataaaataattaatattttgatattcatcggaatgattttattaattcaaatacctattggcgtttcactaatagctttaccattctcagtgaaattcagtcagttaacatctatcgcattaagtatgttaataactggtatagcactattaatcatatggttagttaggaattattatttgagtcatacatatgaaagacaatatcaatcaatgaggggtaaagatatctttattaatattggttttctgatattatcaatggtttttagtattctaagtagtgtattaatggtcatatttactggcaacgatactacagctaatgagaaagaaatcaatgaaagtttagatctgcttttgcaaaaagaccatttaccacatatttcaattgttgtaactgttgttttaatgatatgtattataggtccgtatttagaggaattactctttcgtggaatatttaaagaaacattatttatgaaatatcgattttggctaccattcattatatcttctattatttttagttcacaacatttatcgacaaatatattttcatatgcaatttattttctaatgggttgtgtattataccttgcctataacagaagacgtaatatcaaagatagtatgatggttcacatgttgaataattctgtttcaacattaccgatatttgttggttatatatggctatactttagatag

SEQ ID NO: 3454 - DNA, 1053 bp, Staphylococcus epidermidis
atgaaagcttatgaatacttaaaacctggtcatgcacaacttacggataaagagaagccaacaattacgagcagtactgacgctattattcgcatagttaagacgacaatatgtggtacagatcttcatatcgtaaaaggagatacacctgaagttcaatcacatacgacactaggtcacgaaggtattggaatcattgaagaaattggtgacaacgttaacaacttcaaagttggagataaagtgattatctcttgcatttcatcatgtggcaaatgctactattgcaaaaaaggtatctatgcacattgtgaaaacggaggaggatggatattaggacatttagtgaatggtactcaagcagaatatgttaaagttcctttcgcagataattctttatatcacgccccttcaaatttaaaagacgacgcccttgtaatgttatcagatatacttccaaccggttatgaaattggtgttttaaaaggtaaagttaaacctggctgtacagtagccattgtaggtgctggtcctgtaggtttagcagcattacttacagcacaattctattcaccttcaaaaattattatgattgatttagatgataatagattagaaactgctaaagaactaggggctacacatttaattaactctaaagagactgaaaccgcaattaaaaaggtaaaatcgttaaatccacgtggtgttgatgttgctattgaagctgtcggaattccacaaaccttcgatctatgtcaaaatttaattggtgttgatggtacgattgctaatgttggtgtgcatgggttacctgtacaacttgatatagacaaattatggattaaaaatattcacgtaactaccggtttagtttcaggaaatacaactgaagaattacttgaagcgttaaaaagcaaaataatacaaccagaacaactcgtcacacattatagtaaactgagtgaaatcgaaagtgcctatgatttatttagaaatgcaacagatcataaagctattaaattaatcatagaaaatgatatcacaatttaa

SEQ ID NO: 3455 - DNA, 327 bp, Staphylococcus epidermidis
atgtatgagaatttacaaaatattgaagagttttatcgatttataaatgtacatgatttagctgttgttcatattatgagagataattgtacagtatgtcatgcagtattaccccaaattcaagatttactaaaggactatccgaaagcacaattaggtgtgattaatcaatctaatgttgaagagattgccggagaactttctatttttacagtacctgttgatttaattttttttaatgggaaagaaatgcatagacaagcacgttttatcgatatgcaatcgtttgaaaaacaattgtatatgatgcaaaatgccattgattaa

SEQ ID NO: 3456 - DNA, 849 bp, Staphylococcus epidermidis
atgaagaagcaacagaataaagtccatatgattaatatatctttatgccttatagggacattacttattgcaatcgcagtaaatagttttgttataccgggcaatttaggtgagggtggttctataggcctttcattaattctgaattatactctaggtatttcacccgcactcagttccttcatcattaacgcaatattaataattgtaggttggaaatttcttagtagaacgacagcgatttacactgctataacaatcaccgcaagttcaatctttcttgatttaacgcacacattcggattaggtattcatgataattttattaactcaatttttgcaggtttaatgttgggaatcggttctggcttagtcatcacagctcatagtacattaggtgggacatctgtcattgcacgtattatttcaaagtatagtgagataaaaacgtcacaagcgttactcattttagatgcaatcatcgtgttatcatttatcgttgtattacctataacgaatgtattatataccattgtgatgctatttattgttgagaagtctatgtcttttgttgttgaaggatttaatcctaaaaaagctgtgacagttatttcaaaatataataaagaaatcagtgctgatatatatgaaatgactggaagaggggcaaccttattaagtggtaaaggtgcttaccaaaaaagtgatacagaggttctctatgccgtggtatcccaaaatcaagttggagcaataaaaaagattgttaatgccaatgatgaaaatgcctttttagtgattcatgatgtgcgtgatgtcttaggtaatggttttattaatattaaataa

SEQ ID NO: 3457 - DNA, 981 bp, Staphylococcus epidermidis
atgtttaaaaagattgctactataataggttcgacattatttggtacagttttattcgcaaaagtgaaagaaaagcgtagttataaaagttttttacaagagaaaatgattagaatgtcaggaatgaaaaagacatttgaaagtgtagatgatgccaaaaaggcattgaatgaaacgaaatatcaaactgcaggtaaatatagtggaaccacatatgaatttaagcataaagttcaaattagagattactatggttctttagtctatgttgttaatgatcatggtcttccagatcaacgcacggtcttatatgtacatggcggcgcatggttccaagatcctttggagagtcattttgaatatttagacttactcgttgatgcgctcgatgctagggtaattatgcccgtatatcctaaaataccacacagagattatcgtactacatttgaattattaacaaaaatatataagcgattattgactaaaattgataaacctgaaaacttagtcattattggagattcagccgggggacaaattgcattagctttcgcacaaatgttaaaaaaagagcaactcagtcaacctggccatattgttcttatttcaccggtgcttgatgcgacatttaagaatccagaagcaagaaaatatgaaaaagaagatccaatgcttggtattgacggcagtaaatatcttgtagagttatgggctggtgatacaccattagatgactataagatgtctccaatgaatggtgatttagaaggcctaggacatattacacttactgtaggaaccaaagaaacattatatcctgatgcagttaagttctctcatatgctgaatgagcaaaacattaagcatcagtttataccaggatacaatttatttcatatttatcctttattccctatcccagaacgccaacgctttttagaacagcttaaaaaaatcattgtcacaaaagagttataa

SEQ ID NO: 3458 - DNA, 318 bp, Staphylococcus epidermidis
atggagaagtcagttaaacttgctgttggcatctatctagcaattattttaattatttgtagtatttacctcgcatttatacttattggaagcttaaatggtaaagacatgagtaattctgttctagatactgatcactctcgtatcaacaatacttcaagaaacagtaacgaagatgttacgtcatcaaataatgagtcaaacgatacaaaagcacactcattttcaaactctgaatataaagctgtaaacataaacgaagcatataaaaataataaacatattaaaaaagcgaattcgagttatcaatactactga

SEQ ID NO: 3459 - DNA, 1158 bp, Staphylococcus epidermidis
ttgttactcattatagcgtgtgttgcgcttattctctggctaggaattaaagagaagaagcgtcatgcaaatcgacttgaaaaaattccattgcgcattaacataaatggaattcgtgggaaatctacgattactcggatggtttatagtgttctacgtgaggaccagtatagagttattggtaagacaacaggaacagatgcacgaatgctttattggtttacggaaaaggaatatccagtaatcagaaaaccacaaggcgccaacattggagaacaacgagatattattcgtaaggtggttaaacaaaaagcaaatgccctagttaatgagtgtatggctgtaaatccagattatcaaattacctttcaaaatgatttagtaaaagcaaatatcggtgtaattgttaatgtgatggaagaccatatggatgtcttaggaccgacacttaaagatgtagctcaagcatttactgcaacaattccatataacgggaaattagttgtaatgaaagatgactatactagtttctttgcaaaggaagctaaaaaacgtaattcagaactcattgttgtagataaagatgtcataccagaatcatatttacggaagttcgattatttagtatttcctgataatgtagctattgtgttaggaatagcgcaagcagttggtgtagatgaagaaactgcattacaaggcatgttaaatgcaccagccgatccaggagctgttagaattaaatatttccatgcaaatcgcacaaaaaatgtatttgttaatgcattcgctgctaatgaaccacagtctacaaaagcgattttgaataaagtggaatcatataaatatccatacgataagaaaataatcattctcaattgtcgttctgacagggttgatagaacacaactctttgttgataactttttaggtgaagtcgattacgatgttctcatttgtacaggaaaaagcacacaaatggtgacacagttcatggaaacaatgccagaaaaaacatatatcaattatgaaggacgagactttgtagagattgaaaaaggtattctacatgaagctgagaatgcacttgtattttgtgtaggaaacatccacggcccgggtggtagaatagcggaattcatagaagggatagaataa

SEQ ID NO: 3460 - DNA, 453 bp, Staphylococcus epidermidis
atgataggttcagaattatatttctccttattcgtaggtgtcgtactcagtttgatatttgctgagaaatttgggattaatccagcagggttagtcgttccaggttatttagctttgatttttgatcaaccgattatgttgttatcagtattaatcattagttgcttaacttattttatcgtaagtaacggtattagtaagtgggttattttatatggtagaagaaaattcgctgccatgatactgacaggaatggtgattaaatttatatttgatctcttgtacccattgaccccatttgaaatggttgaagtttcaggtataggtgttgtcattcctggtattattgcgaatacaattcaaaaacaaggtgtagtcattacactttcaacaacaatgttattaacatgtattacatatatcatcttatttttatatagttttattaattaa

SEQ ID NO: 3461 - DNA, 1074 bp, Staphylococcus epidermidis
atgacaaagaaaaaacgtttatcgcctagtgagtggttgcttaaacaatctaaaagacataaaaggaaaaatacactttacacggcaattgtacttttagtagcgttagttctactcatatttgctgttaattcaatacaagtagaacctgtaaaaagtgatactagagacaaagatagcattcgtctcacatatttaggtaacgtcactttaaataaacatattcgacaaactaacttacatgatgtttttaaaggtattcaagatactctagatcatagtgatttttcaacaggttcattaatagtaaatgatttttcaaaaaatcaaaaagataacataaataaaaatattgaaaatatcatgtttttacgcaagcataatgtaaaaagtgttaacttaatcaacgaatctatggataatattcaagcgacagcaatgatgagaaaaatagattcccaagcaggttataattttttaacaggtaatggttcaaatccaattaatagtaaaactgtacaacaagacattaaaggtaaaaaaatagctaatgtttcatttaccgatatcgaatctaactatactagctctttaaaaaacacaacttcaattagtttagatccagatatattttatcctttaataaaaaaattaaaggaaaataatgattacgtcgtagtcaatgtagattgggggatacctaatgaacgaaatgtaactacacgtcaaaaagaatatgcgcatgcgttagcgaatgctggtgcagatgtcattattggtcataatacagttattcaaaaagttgaaaattataagcgaacgcctattttttatagtttaggtaacacaacgtctgataacttcttatcaaaaaatcagaaaggaatgattgtacaacaagactggaaagattcgcataatcagttccatatcacaccaattcaatcaaaagatggaaaaatctctaaagataatatgaacaaaatggatcatattcgattcaaaaataatattaaagataaatcaattgatttaaagtctgatcaaaatggaggttatacttttgaatattaa

SEQ ID NO: 3462 - DNA, 162 bp, Staphylococcus epidermidis
ttgaatattaaaaagcattggttaccaattgttgtaatcattcttgtcgttgttatctttttattagttactttcgctagagcaaatgaaggtttagataattatgagcaacatgaattaaataatggtgaacagcaatatctttcaaaaggggcaagctaa

SEQ ID NO: 3463 - DNA, 1605 bp, Staphylococcus epidermidis
atgaatatatataataaagtgacattatctgtcattttagttataacaattatcatttcgttcctcttttatttttatacaacagagaaaaaagtggacaaagataaattgtatgaaaacaaaattacaaatcataaacaagcaggtaaacctaagaattatggtgtcgcatctaataataaaatagctacgaaagtcggaaataagattattgaagatggtggaaatgcggttgatgcggcaataggtgtctcttatgcacttgcagtgacagaacctcattcatcaggactaggaggtggcggtgcgacacttacatatagtggtaaagagaatgaaacacctaaagcttatgaatataaaacgatgtcttcatatgaatataaagaaggcgacaaaattggagttcctggcttagtgagaggattacacgatatgcacgagaaagaaggaaaaatggatgagaaaaagattttagattacgtcattccgctcgctaaagatggttttgaggtagattcagaacttgaaagaagtttaaaattatatggtcgtgatattgatcataactcaccattctataaaggaaataaaagtgttcgcgaaggagatattgtaaaacaagataaactcgctaatacattaactaaaatcaaagataaaggtcctgattacttctatgaagatattggtaaaagtgtttcaaaacaattagataataaattaactgaaagagatttcaaagaatttaaaacagaagaaaaagaagcggtaagtactgattataagaataatcaagtgtattcagcacctaatcctttaggtggcacattaatgcttcaaggattgaaaattgatgaaaaagaaaatgtagacaatatggatcgcaataattttatcacagcaatgattaaatcacgtgatgtcatgtataagaatagggacatagttaatggcaatgagcctagtaatgaacaacatctaactgatgattatttacttggtgaacttaacaaagttaatattggtgaaaacacagataatggcagtgattttaatcaaattagaacggataatacaagtacaacccattttgtagttattgataagaatggtaagttagcaagtacgactaatacactatctagttacttcgggacaggagactatatgaaagagggcttctatatgaataactctttaggcgactttagtaaggataaatcaagtcctaatcatggtgaacctcacaaggcgcctagatcatatatttccccgtcagtaatcgttggtcctaatttctatatgggtattggtacaccaggtgggaacaaaattccaacaattcttaatgaagtgattgtcgattatttaaacagtgatggttcattacaagaatctattaataaaccaagattttataatgacggcggcacgatattttacgaaaatgctatgactgatgaagatataaatatctttaaaagtcttggttatggtgtaaaagaaaagcacaatgatccaaactttggtagtgtccaaggtgctgtttatgataaagataaaaagactgtagatgtcggtcatgatgtaggtaaccgttaa

SEQ ID NO: 3464 - DNA, 882 bp, Staphylococcus epidermidis
atggactttatagctattttaatcggattagggccactattaggttggggattatttccaacgattgcttctaagtttggtggacgtccagtcaatcaaatctttggcgctactgttggtactttgattttcgcaattgttctagcactatttaaaggtatcggtttaccaggaggtatggcattagtattttcgctcatatcaggtgcaggatgggcatttggtcaaattattacttttaaagcgttcgaattagtaggttcatcaagagcgatgccaattactactgcatttcaattacttggtgcatcattatggggcgtttttgcgctgggtaactggccaggtataacaaacaaaatcattggatttctagctttactcgtaattcttataggtgcacgtatgactgtatggactgaaacaaaacaacaagaatatagtaaaaatctaagaagtgcagtgctcttattacttgtaggtgaaattggctattggatatattctgctgcacctcaagcaacggatattggtggttttaaagcatttttacctcaagctatagggatggtcattgtggctgttatctatgcgttgatgaatatgtctaaaggtaatgcttttaaagagaaagtaagttggcaacaaataatatccggatttttctttgcatttgctgctttaacttatttaatttcggcacaacctaatatgaatggtttagcaacaggatttgttctatctcagacatctgtagtattagcaacgctaacaggcatttttttcttaaatcagaaaaaaacatcaaaagaattaatgattacaattgtgggattagttcttattttagttgcagcatcaatcacagtgtttattaaataa

SEQ ID NO: 3465 - DNA, 405 bp, Staphylococcus epidermidis
atgaagaaaacagcagtattaaatagtcacatttcaagcgcaatcgccacactaggtcactatgagttattaacgattaatgacgcaggtatgcctatacctaatgatgacagacgtatagatttagcagtgactaagtcattgccacgttttattgatgtgttggagacagtgttaactgaaatggaaatacaaaaagtatatttagcagaagaaattaaaactgcgaatgcacagcaattaaaagcaattaagaaattaatcaatgatgacgtagaaattaaatttattgcgcattctgagatgaaagaaatgttaaaatcctctttaaataaagggaatatacgtactggtgaaatcacccctttttctaacattatcctagaatctaatgtgactttttaa

SEQ ID NO: 3466 - DNA, 924 bp, Staphylococcus epidermidis
atgaataaaaataaagtgattgtaattggatcaacaaatgtagataaatttcttaatgttaaaaggtttccaaaacctggtgagacgttacatattaatcaagctcaaaaggagtttggtgggggcaagggagccaatcaagccatagcagctagtagattagcagcagatacaacatttatcagtaaaattggtaaagatggcaatgccaactttatattggaagatttcaaaaaagcaggtattcatacacaatatattttaacgtcagaaagtgaagaaactgggcaagcatttatcactgttgatgaagcaggacaaaatacgattcttgtttacggtggtgcgaatatgacattaagtgcaactgatgttgagatgagtgcagaagcgtttattggtgcagactttgttgtagcgcagcttgaagttccatttgaggcgatagaacaagcatttaaaattgctcgtaagcaaaatatcactactgtattaaatcctgcaccagcaattgaattgcctaagtcacttttagagttaactgatataattattccaaacgaaacagaagcagaattattaacaggtatttcaatcaataatgaaagtgatatgaaagaaacagcaacatattttctcgatttaggtatatctgcagtattaattactttaggggagcaaggcacgtattgtgcatatcaagaacaatacaaaatgattcctgcttgtaatgtaaaagcagtagatacgacagcagcaggagatacatttataggtgcttttttaagtgagttaaataaagatttgagcaatttagaatcggctattcgacttgcaaatcaagcgtcgtctctaacagtacaacgaaaaggagcacaagcttctataccaacacggaaagaagtagaggcagaatataattaa

SEQ ID NO: 3467 - DNA, 1131 bp, Staphylococcus epidermidis
atgaaagttttagtagccatggatgaatttaatggaattatttctagttaccaagctaatagatatgttgaagaagcggtagcaagtcaaattgaagatgcagatatcgttcaagttccactatttaacggtcgtcacgaattattagattcagtctttctttggcaatcaggaaataaatatcgtgtgagtgcgcatgatgctgacatgaaagaaaccgaagcaatatatggacaaacggatagtggtatgactattatcgaaggtcacttatttttaaatggcaaaaaacctattcaacatcgatcaagttacggtttgggagaggttataaaagcagcattggacaatcatacagaacatcttgttatttctttaggtggaataggaagttttgatggcggtgcaggcatgttgcaagcattgggtgcaacattttatgatgatgaagcacaaattgtcgatatgaggaaaggtgcatatttaataaaatatattagacgtattgatttatcaggtgttcatccacaattaacaaaggtaaacattcaattaatgtcagatttctcaagtcgattgtatgggaaaaaaagtgaaatcatgcaaacatacgaatcattagatttgtctcaaaatgaagcagccgagatagataatttaatttggtattttagtgaattatttaagaatgaattgaaaatagcaatgggaccaatcgagcgcggtggtgctggaggtggtatagcagctgtattaaatagtctctatcaagctgagattttaacaagccatgaattagtgaatcaaatcacacatttagaaaacttaattcaacaggcagatcttattattttcggagaaggtttgaaagaagaagatcaaattctagagactacaacaatacgtatagcagaacttacccaacaatacagcaagccagctattgcaatttgtgctacaaatgataaatttgatttgtttgaatcattgaatgttacagcaatgtttaatacatttattgatatgcctgattcatatacagattttaagatgggtattcaaatcagacattacacagtacaagcactaaaattattgaaaacgcaaataaacttaccgctttcatcctaa

SEQ ID NO: 3468 - DNA, 321 bp, Staphylococcus epidermidis
atggctattaagctgagttcaattgaccagtttgaacaagtattagaagaaaataaatatgtttttgtattaaaacacagtgaaacttgtccaatttctgcaaatgcgtatgatcaatttaataagtttttatatgaaagagacatagatggttattatctaatcgttcaacaagagcgtaaactatctgattatatcgcagagaaaacaaacgtaaaacacgaatcaccacaagctttttattttgtagatggtgaaatgaagtggaatgcagaccacgatgatattaacgtttctcaacttgctcaagctgaggaataa

SEQ ID NO: 3469 - DNA, 891 bp, Staphylococcus epidermidis
atgaaaaaactactatttatcataacagttatcattttaaccatagttgtatccgcttgtggaaatgaatcaaaaagagatattaaacaatttgaacgtcaatataaagaaattcatcaaaaacaacacagtgtagaaaaagttatggataaaataccattaaaagagttagataatttaagtaaaactgataccactgataaaaataaaaaagaatttcgtgcacttcagcaggatattaataactatttgatacctgagtttaaaaaatataaaaattccactcaacatttaacagcagatactaatgaggttaagcacttgaaagaggattatctaaaaactgttgaaaataaagagaaatctatatatgatttaaaagaatttgtagatttatgtaatcgctcaattaaagataatgaagatattttggattatactaaattattcgagaaaaatagaactgaagtggagtctgacattaataaagcacaaaataaagaagatgcaagtcaacttaaatcaaaattagaagaaaataatcaacaattaaaagatactgctaaaaaatatttaaattcttcaaataatgattctgattcagcgaaagaagcaatcaaaaatcatatttcaccacttattgacaaacaaattacggatattaataaaacaaatatttctgataatcatgttgataatgctagaaaaaatgcaattgagatgtattatagtttgcaaaattattatgatacgagagtagatacgattaaaactagcgaaaaattagctcaaattgatgttgatcgattgccaaaagagggaaaagatatatcagaaatggataaatcgttcaaaagagaatttaaaaaaataaaagaaagtgtaaattaa

SEQ ID NO: 3470 - DNA, 528 bp, Staphylococcus epidermidis
atgtacgctaatgtccaaccttttattaaaaatgaatctgtgaaacaatttacatatgaatataacaaagtgaaagacgtattgtttactattttagattctcctattaaatacactcagcatatcggtggtacctgtcattttaattatcaaactgagcccattttagatatacttgttggtgtaaataacttgcacgatattacttcactagatgaaaagcgcctaaattatgctggtttttatcgtttgcaccattcttacaagaaaaaagttgtcatggcacgttttaataatttaagtgaattaaaacaagaagtaagattacatattattcaaatggaaacttctcttttcaaacaatatcaaacagtcaatcatttactacacaacgataaagcaatagcagaatggtttgcaagtaagaaaaatgaaattgtgcaacatgctaaaaagatacgtgaatatgagtctcaaaaacaaaatttgtttgagaaattatataaggaatctaatttgttatcgtaa

SEQ ID NO: 3471 - DNA, 933 bp, Staphylococcus epidermidis
atgttcaaaacattgaataaaaatgacatcttacgcggattagagtcaattcttcctaaagatattattaaagtggatgaacctctcaagcgttatacatatacagaaacaggaggagaggcagatttttatttatcccctaccaaaaatgaagaagtccaagccatcgtaaagtttgcccatgagaacagtataccggtaacttatttaggaaatgggtctaacattatcattcgagaaggtggaattcgaggaatcgtcctcagcttattatctctcaatcatattgaaacctctgatgatgcaattatagcaggtagtggtgcagcaattattgacgtttcaaatgttgcacgtgaccatgtattaaccggtttagaatttgcatgcggtatccctgggtcaattggtggcgccgtattcatgaatgctggtgcttatggcggagaagttaaagactgtattgactatgcattatgtgtcaatgaaaaaggtgatttattaaagctcactacagctgaactggaattagactatagaaatagtgtggtacaacaaaaacatttagttgtattagaggctgctttcaccttagaaccaggtaaattagatgaaattcaggccaaaatggatgatcttactgaaagacgtgaatctaaacaaccgcttgaattcccttcttgcggaagtgttttccaaagaccaccgggtcattttgcaggtaaactcattcaagattctaatttacagggctatcgaatcggtggcgttgaagtttcaactaagcatgcgggattcatggttaatgtagacaacggtacagcaactgattatgaagcacttatacatcacgtacaaaaaatagttaaagaaaaattcgatgttgaattgaatactgaggtacgtattataggtgatcatcccacagattaa

SEQ ID NO: 3472 - DNA, 315 bp, Staphylococcus epidermidis
ttggcaaaggtttatggatcactcatagataatgaaacacgatgtacacattattattcatctttagatgttattgccattaaatttaaatgttgcaacaaatattatccgtgttataaatgtcataatgaacacgtatctcatacaattgaaagatgggctgaaaatgagtttgatgaaaaagctattatgtgtggtgtttgtaaacatgagatgcgtattcgtgactatatgatggtagaaatgtgtcctcgttgtaaagcgcattttaacagtcgttgtaaatttcattatcatttatattttgaagtataa

SEQ ID NO: 3473 - DNA, 1044 bp, Staphylococcus epidermidis
atgaaaaaaacagtcttatttttattattgtctctagttttagttttaacggcttgtagtaatagttcgaataataattcaacttcgaaaaagaaaaatagtgattctaaagaaactgtaaccatcaaaaatagttttgaagcaagtggtaaagaaaataatggcagtgataagaaaaaaatctctaatactgtcgaagtaccaaagaatcctaaaaatgccgttgtattagattatggagcgcttgatgtgttgaaagaattaggtgtggctgataaagtaaaaggtttacctaaaggtgaaaataaccaatctttacctaaatttttagatgaatttaaagatgataagtatattaatactggaaatttaaaagaagtgaactttgataaagttgcatcagctaaaccagatgtgatttttatttcaggaagaacagctaatcagaaaaatttagatgaatttaaaaaagctgcaccaaaagctaaagttgtatatgtaggtacaagtgatgacaacttaattaaagatatgaaaaaaaatacagaaaatttagggaaaatctacgataaagaagataaagctaaaaaaattaataaagatttagatagaaaaatatctgatatgaaagataaaactaaagactttaataagaaagtaatgtatttattggttaacgaaggtgaactatcaacgtttggaccaggaggaagatttggtggtttagtgtttgatacattaggatttaaacctgcagacaaaaaggttagcaaaagcccgcatggtcaaaatataaataatgaatatattaacaagcagaatccagatgttattttagctatggatcgtggttcagttgtaggtggtaaagcaacaacaaatcaagttttaaaaaacaaagttataaaaaatgtaaaagcagtaaaaagtaatcatatttacgaattagatccaaaactatggtatttctcttcaggatcttcaacgacaactatcaaacaaattgatgaattaaatgaagtagtagagaaagttgaaaaataa

SEQ ID NO: 3474 - DNA, 780 bp, Staphylococcus epidermidis
ttgattcaaattcgaaatttagataaaacgatagacaataaacctattttaaaagatattagcgtagatattaaaaagggaaaattgacttcactcataggtcctaacggtgctggtaagagtacattattatctgctatcagtcgcttatttagttatgagaacggttcaattttgattgaagacaaagaaatttcagaatataaaactgacgatttagctaaaaaattaagtattttaaaacaatctaatcacactgatatgaacataactatcgagcaactagttaaatttggtcgttttccatattcaaaaggtcgaatgaagcaagaagactatgacaaagtggaatatgctcttgacttattacagcttaatgaaattaaacatcgtaatattaaaacactatctggaggtcagcgacaacgtgcatatattgctatgactatagcacaagatactgattatatattattagacgagcctttaaataatttagatatgaaacattcagtacagattatgcaaacgttacgagatttatgtcgtcagttaaataaaacaatcattatcgtattacatgatatcaactttgcttcttgttattcagacgacatcattgcgcttaaacaaggtgagctagttaaagctgatgataaagataatgttattcagtctgacattttaaaaagtttatatgaaatggaagtacgtatagaggagataaggggacaacgtatttgtctatattatgatgaaactacttttgactcagtttaa

SEQ ID NO: 3475 - DNA, 960 bp, Staphylococcus epidermidis
atgcaaatgagcgctaataaaaaaataagtatactggtcgttatggcaatttgtatggcaattttttatttattggtaggtttagattttgatatatttgaatatcaattccaaagccgtttcaaaaaatttattcttatattattagtaggagcatcgataggaacgtccgtagttattttccaatctattactacaaatagattattaactccttctattatgggacttgattctgtgtatttatttgtcaaagtcttacctatttttattttaggtgaacaagcaactgttgttacaaatatctaccttaattttttaatcactttgatcgcaatggtgtttttttcattgctattatttcaagttatatttaaactaggtcacttttcagtctatttcatattactagttggtgtaatattaggaactttcttccgtagtattacaagttttctccaacttataatgaatcctgaatcttttttagcagttcaaaatgttatgtttgctagctttgaagcatcaaattctaaattagtaactgtttcaggcatattattagttatattaataattgttacaataatacttcgaccatatttagatgttcttttgttaggtagagcacaagcaattaatctaggtgtttcttatgagaatatgacgcgtatgtttcttattttggttgctttactcgtctctatatctactgcattaataggtcctgtaacatttcttggcttattaactgtcaacttagcacacgaatttatgaagacctatgaacacaaatttattttaccggcaacaatattattcagctggattagtttatttatagcgcaatgggtagttgaaaatctattcgaagcaacaactgaattcagtttgatagtagatttagttggtggaagttacttcatatatttgcttgtcaaaaggagaaatgcaaattga

SEQ ID NO: 3476 - DNA, 975 bp, Staphylococcus epidermidis
atgaaatttatttttaaaggttataccttatttattttattagtgattttaactattgtctctttatttataggggtgagtcagctctctttaatagatattttccatttaagtgatgaacaaataaacattttgttttcgagtcgaattcccagaacagttagtattctactttcgggtagttcactagctttatcaggattaattatgcaacagatgatgcaaaataaatttgtaagcccaacgactgctggtactatggagtgggcaaaattaggtattttaatgtcattgttgttctttcctaatggtcccattttaatcaaattattatttgctgttgttctaagtattgttggaacgtttttatttgtccaattaattaatcttatccgtgtaaaagatgtaatctttgttccacttttaggcattatgattggtggtattttatccagttttactacatttgtagcgttgagaaccaatgctttacaaagcattggaaactggttaactggtaactttgcagttataacgagtggtcgttttgaggtgttgtatctcacaataccattacttattttggcatttgtatttgcaaatcattttactattgcaggtatgggaaaagactttagtcataatttaggtgtaagttatgaaaaaatcattaaaatagcattattcataacagcaacgctaacagcattagttgttgttactgttggaacattaccatttttaggtttaatcgtaccgaatatcatatctatctatagaggcgatcatttgaaaaatgctttaccacacacgcttatgctcggtgcaatttttgttttaattgctgatattattggtagaataattgtttacccttacgaaattaatattggattgacgataggtgtatttggcacaattattttcctaatcttgctaatgaaaggtaggaaaaattatgcaaatgagcgctaa

SEQ ID NO: 3477 - DNA, 969 bp, Staphylococcus epidermidis
atgaaggcggtaaattggaacacccaagaagatatgactaatatgttctggcgtcaaaatatctcacaaatgtgggtggaaacagaatttaaagtatcaaaagatatagcaagttggaaaacattaacagattctgagaaaaatacttttaaaaaagcgcttgcaggtttaacaggtttagatacacatcaagctgatgatggtatgccattaatcatgcttcatactactgatttaagaaagaaagctgtttattcatttatggctatgatggaacaaatccatgcgaaaagttattctcatatcttcactacattattaccatctagtgaaaccaactatttattggatacttgggttattgaagagccacatttaaaatataaatcagataaaattgtagaaaattaccacaaactttggggtaaagaagcatcgatttacgatcaatatattgctcgtgtttctagtgtattcttagaaacatttctattctattctggcttctattatccattatatctcgcaggacaaggaaaaatgactacgtcaggtgaaattatacgtaagatacttttagatgaatctatacatggagtgttcacaggtttagatgcacaaagtctacgtaatgagttatctgaaagtgagaaacaaaaagctgatcaagaaatgtacaaattattaaatgaactttatgataatgaagtttcatatacacatttattatatgatgatattggtcttgctgaagatgtattaaattatgttcgatataatggaaataaagcattatcgaatttaggttttgaaccatatttcgaagagagagagtttaaccctattattgaaaatgcactagatacatctacaaagaaccacgatttcttctctgttaaaggtgatggctatacattggctttaaatgttgagcctctacgtgatgaagactttgtttttgataattaa

SEQ ID NO: 3478 - DNA, 2106 bp, Staphylococcus epidermidis
atgaaaaccatggaagaaaagaaatacaatcatattgaattaaataatgaagtgaccaagagaaaagacaatggtttctttgatttagagaaagatcaagaagcattgaaagtgtatcttgaagaaatccatgataaaatgatttcttttgatgatgaaatcgaaagacttcattatcttgttgataataatttttattttaatgttttcgaaaaatatagcgaagcagaattaattgaaattactgaatacgcaaaatcaattcacttccaatttgctagttatatgtcggcaagtaagttttataaggattacgctttaaaaacgaatgataaaactaagtttcttgaggattataatcagcacgtcgcaatcgttgcactttatttagcgaatggtaatgttaaacaagcaaaacaatttatttctgcaatggtggaacaacgttatcaaccggcgacaccaacattcttgaatgcaggtagagcaagacgtggagaacttgtttcatgtttcttattagaagtagacgatagcttaaattctatcaatttcattgattcaactgcaaaacaacttagtaaaattggtggtggtgtggccattaatttatcgaaacttcgtgcacgtggagaagcaattaaaggaattaaaggtgtagctaaaggtgttttacctgttgctaaggcacttgaaggtggatttagttatgcagatcaattaggacaacgtcctggcgctggggcagtgtacttaaatattttccattacgatgttgaagagtttttagatactaagaaagtgaatgcagatgaagatttacgtttatctactatttcgactggtcttattgtaccttctaaattctttgatttggctaaagagggtaaagatttctatatgtttgcacctcatacagttaaacaagaatacggtgtgactttagatgatattgatttagaaaagtattacgacgatatggttgcaaaccctaatatcgataaaaagaaaaaagacgcacgtgaaatgttaaatatgattgcacaaacacaattacagtctggttatccatatcttatgtttaaagataatgcaaacaaagtacatgcgaattcaaatattgggcaaattaaaatgagtaatttatgtactgaaattttccaattacaagagacatcagtaattaacgactatggaattgaagatgaaattaaaagagatatttcatgtaacttaggctcattgaatatagtgaatgttatggaatcaggtaaattcagagattctgtgttcacaggtatggatgctcttacagttgtaagtgatgaagcaaatattcaaaatgcaccaggtgtaaaaaaagcgaatagtgaactacattctgttggactaggagtaatgaacttacatggttatctagctaaaaataaaattggctatgaatctgaagaagcaaaagactttgctaatatattctttatgattatgaactattattccatcgaacgttcaatggaaattgcaaaagagcgtggagaaaagtatcaagactttgagcaatcagactatgcaaatggtaaatattttgaattctatacatctcaagaatttgaaccaaaatttgaaaaggttcgccaactttttgatggtatcgatatacctacttcaaatgattggaaagaattgcaaaataaagtagaacaatatggactttatcacgcttatagattagctattgctccgactcaaagtatttcttatgttcaaaatgcgacaagttctgttatgcctattgttgaccaaattgaacgtcgtacgtatggaaatgcggaaacattttatccaatgccatttttatcaccagaaacaatgtggtactacaaatcagcatttaatactgaccaaatgaaacttattgacttagtagctacaattcaaactcacgtagaccaaggtatttcaacgatactttatgttaattcagaaatttcaacacgtgaactttcaagattatatgtatatgcacaccataaaggccttaaatctttatactatacacgtaataaattattaagtgtggaagaatgtacaagttgtgcgatttaa

SEQ ID NO: 3479 - DNA, 399 bp, Staphylococcus epidermidis
atgaaagtagtatattattcattttctggtaatgttagacgatttattagtcgtgctggtattaaagatacatttgaaattactcaagataattgtaacgaatcagttaatgaaccctacattttagttactggcactattggatttggagaggtgccgcagccggttcaatcttttttaaatgtaaatcatactcagttacaagctgttgctgcgagtggaaatcgaaattggggacaaaatttcgctaaagctggccatacaatttctgaggaatataaagttccattaatgatgaagtttgaagtacaagggacaaataaagacattattgaatttaaggataaggtgggcaatttcaatgaaaaccatggaagaaaagaaatacaatcatattga

SEQ ID NO: 3480 - DNA, 876 bp, Staphylococcus epidermidis
atgatattgaattcaaaagttaaaggtattattgctatattgatttcagctgtgggttttagttttatgtcagtcttttttagattggccggtgatttaccagtctttcaaaaatctctagctagaaattttgtagccatgtttataccattattttttatttataaatataggcaacctatgtttggaaaattaagtagtcaacccctactcatctcacgttcaacacttgggttaattggtgtcttacttaatatctacgcaattgatcacatggtattaagtgatgctgatacattaatgaaattaaatcctttttggacaattgttcttagtttaatttttttacatgaaaaggtacgaaaatatcaaatcacggcgatgattattgctataatagggatgctattaattgttaaaccagaattttcatcatcagttattccttcaatagcaggattactatccggtatttttgcagcttctgcctacacatgtgttagagcactcagcactcgtgaaaaaccttatacgatagtgttttatttttcattattctcagttgtagttcttatacctttttcaatatttacttatacacctatgacaacaattcaaattcttttcttactcggcgctggattatcagcagctgtaggacaaattggtataacattggcttatagttttgctccagcaaaagatatctccatcttcacatatgcgtctataatatttactgcattatttggatttattctgtttggagaatcacctgatatgtttgcaacagtaggatatattgtcattatcggagcaagttactatatgtttgataaagcaagacgtgaaacaactataaatcaaaataattaa

SEQ ID NO: 3481 - DNA, 501 bp, Staphylococcus epidermidis
ttgacacaaggacgtcaaaaagatgaattaaaagatattactttattaggcaatcaaaataacacttatgaatttgattatagaccggaagttttagaaacttttgataataagcatcaaggtcgtgattattttgttaagtttaattgtcctgaattcacatcactatgccctattacgggtcaaccagattttgcgacaatttatatctcgtatatccctaatatcaagatggtggaatctaaatcattaaagttatatttatttagttttagaaaccacggagattttcacgaagattgtatgaatattattatgaatgatttaattaatttaatggacccacattatattgaagtttggggtaaatttactccgagaggtggcatttccatagatccttacacgaattatggtcgtcctgatacaaaatatgaaaaaatggctgaacatcgattaatgaatcatgacatgtatccagaaaaaatagataatcgttaa

SEQ ID NO: 3482 - DNA, 1506 bp, Staphylococcus epidermidis
atgacttcaaataagtcccatgaaaaagcagttcaagaaataccacaacatggattcttcgggcatccaaaaggattaggcgttctctttttcgtagaattttgggagagattcagctattacggaatgagagcaatgcttattttttatatgtattttgcactccaggaaaacggacttggaatggacaaaacaacagccatgtctatcatgtctgtatatggatcattaatttatatgtcttcaattccaggtggctggatagctgatagaattacaggtacccgaggtgccacattaatcggagctatattaattattataggtcacatatgtttaagccttccttttgcaatggtaggtttattcacttctatgttctttattattgtaggatcaggtttaatgaaaccaaacatttcaaatattgttggtagactctatccagaaaacgacgtacgcatggatgctggatttgttatcttctatatgtcagtgaacatgggtgcactcgtttcaccaattattttacaacactatattgatattagaaatttccatggcggcttcttgattgcagcaatagggatggctcttggattagtttggtacttactatttaaccgaaaaactttgggtagtatcggtatgaaaccgacaaacccattatcttcttctgaaaagaaaaagtacggaacaatcatcggaatcgttgttatagcaatagtattaatccttatgattgcttactttacgcatacgctatcatttaatttaatcagtaatactgttttaattttaggtattgctttaccaatcatttactttacaacaatgattagaagtaaagaagttactgatactgaaagatcaagagtaaaagcatttattccgttattcattttaggcatgttattttggtcaattcaagaacaaggatctaatgtattaaatatctatggtattgaaaactctgatatgaaattaaatttatttggttggaaaacacattttggtgaagctattttccaaaccattaacccattatttattttattatttgcacccgtggttactcttttatggcaaaagctaggaaagaaacaacctagcctacctattaagtttgcaattggtactattttagcaggcgcatcctacatacttatgggagcaatcggtcatatttatggggatacacaattctcagttaactgggttattctttcatacgttatctgtgttattggtgagctttgtctctctccaactggtagtagtgcagcagttaaattagcacctaaggcatttaacgcacaaatgatgagcctttggttattaactaacgcttcagctcaggccattaacggtacattagttaaattaattaaaccacttggtcaaaccaattactttatcttcttaggtgttgttgcaaccgtgattacgttaattatattagcgtttattcctaagatttctaaagcaatgaaaggtattcgttaa

SEQ ID NO: 3483 - DNA, 162 bp, Staphylococcus epidermidis
atgtataaaaattatcatatgactaaacatactctaccaatggaaacttcagtaattatctccacacatgatatgtcacaatatgtgaatgatattgtaaaaaaattccaggtactgaattcagacagcatcgttgcgcaacattatagcatcccaaaataa

SEQ ID NO: 3484 - DNA, 924 bp, Staphylococcus epidermidis
atgaaacaaccgtataaccatggtgttcttttctatcatgaacatagcggtttgaaagatatacataatggcataggagaagttgcaaaatctcttagttcaatgtgtaaacacctctctcttcaactcagtgaaaataaaggcgatattattaaatattgtaaatctattaaaaatgaaaattatagctctgatgtagacgttttatttattttaggtggagatggtacacttaatgaactagtaaatggcgttatgcagtatcagttaaatttaccaatcggtgtaataccaggtggtacctttaacgattttacaaaaacacttcaactgcaccctaattttaaaacagctagtgagcaattattaacatcacatgctgaatcatatgatgtgttaaaagtgaacgacttatatgtacttaatttcgttggacttggcttaatagtacaaaatgcagagaatgttcaagatggttctaaagatatattcggtaaattcagctatattggatcaaccgttaaaacgttattaaatcctgttaaatttgatttctcattgactgttgatggtgaaacaaaagaaggcaatacttcgatgatgttaatagcaaacggtcccaatataggtggtggacaaattccgctaaccgatttatcgccacaagatggaagagcaaacacatttgtatttaatgatcaaacactaaatatattgaatgatatattaaaaaaacgtgatagtatgaattggaacgaaatcacacaaggtattgatcacatatcaggtaagcacatcacactctcaacaaaccctagtatgaaagtggatattgatggcgaaattaatttagaaacaccaattgagattcaagtattacccaaagcgatacaacttcttactgcaactgaacaaaataattaa

SEQ ID NO: 3485 - DNA, 2610 bp, Staphylococcus epidermidis
atgttatctgtaactaaaaaaaatacatatgaatcaaacaaagatgaagtcacacaaatgattgattcattagcagaaaaaggacaagaagctctaaaagaactatctaaaaaatcacaacatgagattaatgacattgtacatcagatgagcatggctgctgttgatcagcatatgcatttagctaaactagcttacgacgaaacaggtagaggtatttatgaagacaaagctatcaaaaatttatatgcctcagagtacatatggaattcaatcaaagacaataaaacagtaggtatcataggtgaagataaacaaaaaggattaacgtatgtagctgaacctataggcgtgatttgtggagtgacaccaacgaccaaccctacatctacaactattttcaaagcaatgattgctattaaaacaggtaatccaattattttcgcatttcatccaagtgcacaacaatcatcaaaatatgctgctaaagtcattttagaagctgcaacaaaagcaggtgctcctaaagattgtattcaatggatagaagtgccatcaattgaggcaactaaacaattaatgaatcataaagatattgctttagttctagcgactggaggctctggaatggtaaagtccgcatattcgacaggtaaacctgcattaggagtcggtccaggtaatgttcctacttatattgaaaaaactgctcatatcaaacgtgctgttaatgatatcattggttctaaaacttttgataatggtatgatttgtgcttctgaacaagtcatggttgttgataaagaagtatacactgacgtcgttaaagaattcaaattacaccaaacacattttgttaataaaaatgaactacaacaattagaagatgccatcatgaatgaagataaaactgcagttaaacctgatatagttggtaaatctgctgtagatatagcgaaattgtcaggaattagtgttccagaaaaaacaaaattattagtcgcagaaattgatggaattggaaaagattatcctttatcacgtgaaaaattatcacctgtactcgcaatggtaactgcaaaatcaacaggacatgcactacaaatttgtgaagacacattaaaatttggtggtttaggtcacactgctgtaattcacaccgaggatagtcaattacaacaaaaattcggtctaaaaatgaaagcttgccgtgtattggtaaatacaccttctgctgtcggaggaattggaaatatgtataatgaactcattccttcactcacgttaggttgtggttcatatggtagaaattctatttctcataatgtaagcgcagtagacttattaaatattaaaacaatagcaaaacgtcgtaataatatgcaatggtttaaactcccacctaaagtttattttgaagaaaattcagttatgtatttgacagagatggataatgttgaacgtgtaatgatagtttgtgatccaggaatggttaatattggttatactgatatagttgaacaagtgctgagacgccgagaaaaccaaccacaaatcaaagtgtttaacgaagttgaacctaatccatcaactcatacagtctataaggggttagaaatgtttataaatttccaacctgatactattattgcactcggtggcggttcggcaatggatgcagccaaagcaatatggatgttctttgagcatccagaaacttcattttttggggcaaaacaaaagttcttagatattcgtaaacgtacttataaaattaccaaacctaaaaacgcaaaatttatatgtataccaacgacatcaggaactggttctgaagtgacaccttttgcagtaattactgatagcgagacacacgttaagtatccactagcagattatgcgttaactcccgatattgctatcgtcgatccacaattcgtattaagtgtacctaaagatgttgccgcagatacaggaatggatgttttgacacatgccattgaatcttacgtctctgtcatggcttcagattatacaagaggcttaagcttacaagcaataaagttaacttttgattatctaaaatcatcagttcaagaaaatgacaaacactcacgagaaaaaatgcataatgcttcaacaatggccggtatggcatttgccaatgcttttttaggaatttctcattctatcgcacataaaattggtggtgaatatggtattccccacggcagaacaaatgctattttattaccacatgtcattcgctataatgccaaagatccacaaaaacatgcactgtttcctaaatatgatttctttagagcagatactgactatgctgacattgcaaaatttttaggactcaaaggtaatacaactgaagaattagtggatgctctagctaatgcggtgtatgatttaggatgttcagttggtattgatatgaatttaaaatcacaaggcgtaactgaagagcttcttcactctactatagacagaatggctgaattagcatttgaagatcaatgtacaacttctaatccaaaagaaccgctaattagtgaacttaaaggcattatcgaaacagcatatgattatgaaagataa

SEQ ID NO: 3486 - DNA, 540 bp, Staphylococcus epidermidis
atgacgcgacagagaatcgccattgatatggatgaagtgcttgctgatacattgggtgctgttgttaaagcggtcaatgaacgagcggatttaaatatcaaaatggaatcattaaacggtaaaaaattaaaacatatgatacccgagcatgaggggttagtcatggatattttaaaagaacctggattctttagaaatttagatgtaatgccgcatgctcaagaagttgtaaaacaactcaatgagcattacgacatatacatagccacagcagcgatggatgttccaacctcttttcatgacaaatatgaatggttattagaatactttccttttttagatccgcaacattttgtattttgtggtagaaagaatattattcttgcagattatcttattgatgataatccaaagcaattggaaatttttgaagggaaatcaattatgtttactgcttctcataatgttaatgaacatagatttgaacgcgtaagtggttggagagatgtaaagaattattttaattcaattgaaaaatag

SEQ ID NO: 3487 - DNA, 1056 bp, Staphylococcus epidermidis
atgaagaaacaattagaccaattaacagcatatacgccagggctttctccagaatctttaaaaaaacagtatggcattagaggtgaattacataaacttgcttcaaatgaaaatgtatatggtccaagtccaaaagttaaaacggctattcaatctcatttagatgaattatattattatccggaatctggatcgccaaaattaagggaagcaataagtcaacaacttaatgttgatgcatctcgtattttatttggtgcgggtttagatgaggtcattctaatgatatcaagagccgtattatcaccaggagataagattatcactagtgaatctactttcggacaatattatcataatgcaattgtggaatcagctgatgttatccaagtgcctctcaaagatggtggatttgatttagatggtatgttacaacaaattgataataaaacgtctttaatttggttatgcaatcctaacaatccaactgggacttacttttcgcacgatgaattatttaatttcttaaaacgtgtcccaagtgatattcctgtattaattgacgaagcatatgtagaattcgttactgctgatgattttccagatacgctaaaattacaggaggattttgacaatgcctttttattacgtactttttctaaggcatatggattagctggattaagagtaggatatgttatagcctctgaagacgccattgaaaagtggaatatcattcgtccaccatttaatgttactagaatttcagaatatgcagcaatcgctgccttagaagatcaagagtatttgaaagaagtgacacaaaaaaatagttttgaacgagataaattttatcaaattcctcaaagtcagcattttttaccaagtcaagcgaattttgtctttgttaaaacttcaagaagtcaagcactttatgatgcattgttaaacgtaggatgtattacacgtttattccctaacggtgttagaattactattggtttaccagaacaaaatgataagatgattgaagttttaaaacattttgagtattaa

SEQ ID NO: 3488 - DNA, 1515 bp, Staphylococcus epidermidis
atgaatgagttctttacgacattaagtgatagaaaagggcagctattttctactataattgaacacattcaactttcttttatagcgcttttcattgcaactcttatagcagtaccaattgcaattttgctcactaaaacaaaaaaactttcagaaatcgtcatgaatattgcagctgttctacaaacaattccatcactggcactacttggtttgatgataccaattttcggaattgggagacttccggcaattatcgccttagttgtatatgcgttacttcctattctacgtaatacatacacaggtattaaggaggtcgatccctctcttattgaagcggctaaaggcattggaatgaaaccacttagaagattgaccaaagtcgaactccctattgcaatgcctgtcatcatggcaggaatacgcacagctatggtattaatcattggtactgctacactcgcagctttaataggcgctggtggtctaggagatttaatattattaggtattgatcgtaacaatagtgcactcattttaataggtgctattccagctgcacttctagctattatttttgattttattttaagatacatggaacgtttatcatataaaaaattgctcatttctttagggacaattgtaattgtgattattatagctattgccatacctatggcagctcaaaaaggtgataaaatcacattcgcaggtaagctaggttcagaaccgtcaattattacgaatatgtataaaatacttatcgaagaagacacagatgatactgtagaagtcaaagatggcatgggtaaaacctcattcttatttaatgcgcttaagtcagatgaaattgatggttatttagaatttacaggtactgtattaggtgaattaacgaaagaagatttaaagtctaaaaaagaaaacgatgtatatcaacaagcaaagtctagtttagaaaaaaaatatgatatgacaatgcttaaaccgatgaaatataataatacgtatgcattagctgtaaaacgtgactttgcaaaaaaatatcaaattaagacaataggtgatttacgcaaggtagaagataaacttaaaccaggttttacattggaatttaatgatagaccagatggatacaaagctgttaaaaaaacgtatcatcttaatctttctaatgttaaaactatggagcctaaattacgttatactgcagttaaaaagggagatattaatctcatagacgcatactctactgatgcagaattaaaacaatataacatggtagtattaaaagatgatcaacatgtatttcctccataccaaggagcaccgctatttaaagaaaaatatttaaaagaccatcctgaagttaaaaaaccgctcaataaattggcgaatagaatcacagatgaagaaatgcaagaaatgaactataaggtaacagtgaagaaagaggatccttataaagtagcaagagaatacttagaaaaagaaaaattaataaaataa

SEQ ID NO: 3489 - DNA, 975 bp, Staphylococcus epidermidis
gtgattaaatttaaaaatgtcacaaagcgatatgctaataatattgctgtagataatgtaagttttaatattaaagaaggagaattttttgtgttaattggtccttcaggttgtggtaagacaacaacacttaaaatgatcaatcgtttaattcctttaagcgaaggttacatatattttaaagataaaccaattagtgattatccagtttacgaaatgcgttgggatattggatatgtactacaacaaattgcattatttcctcatatgactatcaaagaaaacattgcacaagtaccccaaatgaaaaagtggaaagataacgatattgatttacgtgtggatgaattattgacaatggtaggtttaaatcctgagcaatttaaaaatagaaaacctgatgaactatcgggtggacaacgacaaagggttggtgtagtgcgagcattagctgcagatcctcccgttattatcatggatgagccttttagtgctcttgacccaattagcagagagaagttgcaggacgatttgattcatttgcaaactcaaattaagaaaacaatagtttttgtaacgcatgatattcaagaagcgatgaaactaggtgacagaatttgtttactcaatgaaggacgtgttgaacaaattgatacacctgatggttttagaacgcgacctaaaagtgactttgtaaagcaattcatgggtagtcatttggatacaacgcataatattgtgaatcaagtgaagattaaagatttaggaattaatcggtctgtagatgacaatgcaagcgttattcattatcctgaagtagatgctgagttgtacttaaataatatttatgaagatttgtctcattatgatgcagttgtggtcaacgataaagaacaacatcgtcgatatttgttaaatagagaagatgtgtttacttatttatctcgtaataaggaggaagcgacacatgaatga

SEQ ID NO: 3490 - DNA, 1779 bp, Staphylococcus epidermidis
atgcaagagactttatcgcattattttggttataagtcatttcgaccaggacaagaagaaattataactaaaatattaaatcatcagcatacactgggagtactacctaccggtggcggtaaatcgatatgctatcaagtaccaggtttaatgcagggtggcacaactattgttataagtccacttatttctttgatgaaagaccaagttgatcaactacaagcaatgggaattcaagctgcatatttgaatagtagtttgactcataaacaacaaaaagagattgaagagcaaataaagcgtggcgccattcagtttttatatgtagctccagagcgctttgaaaatactttttttctaaatttattacgtaaaatagaaataccccttatcgcttttgatgaagcacactgtatatcgcagtggggacatgattttagacctagttaccaaagtgtcatacaaaaagtttttacattacctcaaaacttcacaatagttgcacttacagctactgcaaccgctgaagttcaacaagatatcatgtctaagttatcaattggacaaaatgatgttgtcaaaacaagtactaaaagacgcaatttaatcttcaaagtcaatccgacttatcagcgacaaaaatttgttgtggattatgttgcaaatcatgaaggacaggcaggaatcatttattgttccactcgtaagcaggtagaagaattacacgaagctctaaatagtgaaaaaattaagagtacaatttatcatgctggtttaacgaataaagagagaattgaggcgcaaaatgatttcttatatgatcgtgtagaggttgtcattgcgacaaatgcatttggtatgggtattgataaatcaaatgtacgttatgtcattcactataacatgcctggagatttggaatcttactatcaggaagctggacgcgcgggacgtgatggtttaaaaagtgagtgtatccttttgtttagtgaacgagataagggattacatgagtattttattaccgtatcccaagctgatgatgactataaagataaaatgggcgaaaaattaacgaaaatgattcaatataccaaaacgaaaaagtgtttagaagcgacaattgttcattattttgaacccaatgaaaatttagaggaatgcaatcaatgtagtaattgtatacaggaaaataaaacgtatgatatgactcgtgaagcgaaaatgattattagctgtattgctcgaatgaagcaacaggaaagttatagtgttattatacaagttttacgtggagaagtgacagattatataaaacaccatcagtataatgaattaacgacacatgggttgatgaaaaattatacaacatctgagttatcacacttaattgatgagctacgtttcaaaggatatttaaatgaaaatgatgaaattcttatgtgtgatacttcagtgaaacaattactaaataattataccaaggtttataccactccgttcaaacaaaaaactaaagagaaggtatttatcaacactgttgaaggtgtggatagagcgttatatcgtgagcttgttgatgtacgtaaacagctaagtgataaacttggaatagcacctgtaagtatattttctgattacacgctcgaagaatttgctaagcgtaaacctgaatcgaaacaagaaatgattgctattgatggtgtaggtagttataaattaaagcattattgtcctaagtttatcgaaaccatacaaagctataaaactagaatataa

SEQ ID NO: 3491 - DNA, 1884 bp, Staphylococcus epidermidis
atggaagcatacaaaattgaacatttaaataaatcctatgcagataaagaaatttttaatgatcttaacctatctatatctgagcatgaaagaattggattagtaggtatcaatggaacaggtaaaagtacactattaaaagtcattggtggtctagatgaagattttactgcagatattacccaccctaatcaatatcgcattcgttattcctctcaaaaacaagacctcaatggccatatgactgtgttcgaagctgttttaagttcggatactcctacattaagaattataaaaaaatatgaagaagcagttaatcgctatgcgttagatcaaagtgactctaattttaataaaatgatggaagcacaagaagaaatggatcaaaaggatgcatgggactataatgcagaaattaaaacgattttatctaaactagggattcacgatacaactaagaaaatagttgaactttcgggtggtcaacaaaaaagagttgtattggctaaaactctaatagaacaaccggatttacttttgctagatgaaccgacgaaccatcttgactttgaatccatccgttggctcattaattatgtcaagcaatatccacatacagttttatttgtaacacatgatcgctactttttaaatgaagtatcgacgcgaattattgaactggatagagggaagttaaaaacatatccaggtaattatgaagattacatagtaatgcgtgcagaaaatgaattagtagaacaaaaacaacaagaaaaacaaaaagcattgtataaacaagagttagcatggatgcgagcaggagcaaaggcaagaactactaaacaacaggcacgtatcaatagatttaatcaactagaatcagacgttaagacgcaacatacacaagataagggtgaacttaatcttgcatattcaaggttaggtaaacaagtatatgaattaaagaatttatcaaaatcaattaataataaagttttatttgaagatgtcactgaaattattcaaagtggtagacgtataggtattgtaggacctaatggagcgggaaaaacaacattacttaatattttaagtaatgaagatcaggactatgagggtgagcttaaaatcggtcagactgttaaggtagcttattttaaacaaaccgaagagacacttgaccgtgatattagagtgattgactacctaagagaagaaagtgaaatggctaaagaaaaagatggtacctcaatttcagttacacaattgttagaaagatttttatttccgagcgctacacacggtaaaaaagtttataaactctcaggtggagaacaaaagcgtctgtatttattgcgtttacttgttcataaacctaatgtactccttttagatgaaccgactaatgatttagatactgaaacacttacgattttagaagattacattgatgatttcggtggttctgtcattacggtcagtcatgatcgttatttcttaaataaagtggtacaagaatattggtttattcatgatggtaaaatcgaaaaaattattggatcatttgaagattatgaatcttttaaaaaggaacatgaacgccaagccatgctatctaaacaaactgaacaacaaaataaacataagcatcaaccaaaaaagaaaacaggactttcttataaagagaagttagaatacgaaacaattatgacgcgtatagaaatgactgaaacgcgtttagaagatcttgaacaagaaatgattaatgcaagtgataattatgcaagaatcaaagaacttaatgaggaaaaagagcaacttgaagcaacctatgaagcagacatcacgagatggagtgagcttgaagaaattaaagaacaataa

SEQ ID NO: 3492 - DNA, 816 bp, Staphylococcus epidermidis
atgtcagatttattccaaaacgcaccaccctatattcaggcgcttatagccggaataatcacgtggttacttactgctttgggtgcggcagcagtttttatatttaagaaagtgaatgataaagtcttaaattcgatgcaaggttttgcagctggaatcatgatagcagcaagtttttggtcattgttacaacccgcaattgaatcgagtgaaaatagtgctatgccatggcttcctgcagcaataggttttattctcggtggcgtttttatcagggttctagattatattattccccatattcaccaaaatgcccaagataaaaaccaacaacaagagggtgtgcctacctctcttggaaaaaatgcattacttgtgttagctatcacacttcacaacatacctgaaggactatctatcggagttgcattcggtggtgttgtatctggcaacagtcacgctacatttttaggtgcgattggtctagcgataggtatcggcatacagaatattcctgaaggtgcagcactatcgatgccaatccgtgctgcaggtgcaacacgttggaaagcatttaattatggacaagcttcagcaattgttgagcctattttcgctactatcggtgctgcagcaattttagtggtaaatcctatattgccttatgcattggcgtttgctgcaggtgcaatgattttcgttgttgttgaagaactgatacctgattctcaatcaagtaacaacactgatttggcaactttaagtctaatgattggttttacaattatgatgattcttgacgttgcacttggataa

SEQ ID NO: 3493 - DNA, 618 bp, Staphylococcus epidermidis
atgattcagactattgtaactgctgctattctttatattgcgacagcagtagatttattagtgattttattaatattttttgctagagcaaagactagaaaagaatatagagatatttatattggtcaatatgtaggatctgtgacattgattgtcgtaagtttattctttgcctttgtcttaaattatgttcctgaaaaatggatattaggattattagggttaataccgatttatttaggaattaaagtagctatttatgatgattgtgaaggagaaaagagagctaaaaaagaattgaatgaaaaaggattgtctaaattagttggtacggttgcaattgttacgatagcaagttgtggtgctgataatattggtttatttgttccgtattttgtgacattaagtgttactgatttattaattactttgtttgtctttttaattttaattttcttcttggtatttactgcacaaaaattagctaatattccaggagttggagaaattgttgagaaatttagtcgttggattatggctgttatttacatagctttaggtttattcattattattgaaaatgacactattggaacaattttaggatttatattttaa

SEQ ID NO: 3494 - DNA, 348 bp, Staphylococcus epidermidis
atgagctatgaaaatgcttgtgatgtgatctatgtacatgaggataaagttaacaatgctttaagttttttagaagatgataaatctaagaaattacttaacattttaaaaaaaatttgtgatgagaaaaaattgaaaatcatattatctttgattaaagaagatgagttgtgtgtttgtgatatttctttgatattgaaaatgagtattgcttcaacttcacatcatttaagacttttatataaaaatgaggtgcttgatttttataaagatggaaagatggcatattattttattaaagacgatgaaataagagagtttttctctaaaaatcagaaggttttttga

SEQ ID NO: 3495 - DNA, 345 bp, Staphylococcus epidermidis
atgtctgaaaactggtgtacaccaaaaccaaaactaacggaacgtcccttattagatacagagaacgctgaaagtttaagtgagacctttaaaatactttctaatgggacacggcttagaatactgcataccttgcttcgaactccaaatgcatctgttagcgaggtggcagaacagcttgaaatgaaacctcaagccatttctaaccaacttcaacgattggttgataaaggcatcgtttgcagtattcgtgaagccaattttattcggtaccgaattgttgataattgcgtcgttagtctattagatcgaggttggtgtttaaccgaagatttacctaaataa

SEQ ID NO: 3496 - DNA, 1950 bp, Staphylococcus epidermidis
atgaatagaaaagaatggtggaaacaaccaaggaccgtattgctaatcatttccgccatgatcaccgcctttacatttatttctgaattatcttttggtctaccagaaacatgggcaaccgctttgtatgggatggcaatcgtggtagggggtatatatccagcaaaaagtggatggaatgaattgagaggtggaaccctctccattaacacattgcttatcgttgcagtgcttggagccatttatttagggttactggaagaagctgccatgctagtggtcattttctctttaggagaactaatggagtcgtatgcggcgaataaagccagagattccattcgagcacttgtcgaactcgctccaagcgaagcaacggttctgcggaatggaagcgaaatccgtatattagccgaggaagtagagattagtgatatagttctagttcgcccaggtgaaaaaatacctgttgatggtattgtagtaaagggaaagtcaacagccgaccaatcttccattactggtgaatccatccctgtaataaaagaactagggaatgaggtatttgctgctacactaaacggtagtggtgcattagaaattgaagtaacaaaacttgctcaggatacaactctagcccaaatcattcatttggtcgaggaatctcaaatgaaaaaagggaaagggcaacgttttagtgagaagtttggagctgtttatactccatttatgtttgttttagctattattatggcaactgttcctccacttttctttaatcaaccattcgatgaatggttctatagggcactagttgtgttagtagtttcctgctcttgtgctctcgtactttcagttcctgttgctgttgtaactggaattggaaccgctgctagaaatggggttatggtaaagggcggtatttatatggagtcagcaggtagtactcaagttgttgcatttgataaaactggaacattgacggttggggaaccatctgttacggatgttgttactgtatctaacctttcaaataaggaactactagaacttgctggagcacttgaaacacgttcagagcatcctttagccgaagcaattctacaagaaacttcaaataggaaaatttcccttccaaatgttgaagattttgataccttggcaggacggggagcaaaaggaattgttaacggagtcagttattatattggaaatccaagattgtttaaagaattgaatgtaaaaataacaaaaaaacaactaagtaaaattgagaaacttcaaggacaagggaagacagttatgcttttaggaactgacgatcttgtactaggactcatcgcagtagctgatagaccgaaagaaaatgcaaaagaagcgattcaacgtttaaaatctgctggtgtgaaaaagattgttatgcttacgggcgataaccaactaacaggtgaagcaatcggtaaagagcttggtgttgatgagattcgggctgaattgctaccggaagataagattaaagcaattacagaattacaaaagcagtatggacacgttgcaatggtaggtgacggtgtaaacgatgcacctgcactggcacaggcagatgtaggtatcgcaatgggtgttaaaggaacggatgtggcattagaaacagcagatatttccttaatgcaagacaatttagaacaactggtgtatatgctcaaattaagtaaaaaaacagtttctaaaatacgccaaaatatcatcatttcactaacaattgtagcctttcttattgtgaatgcattgactgggttaatgggccttacaactggtttaatcctaaatgaaggaagtgccttgattatcattgcaaacgcaatgttccttcgtagatatcaatggaaaaaagaaggtataagaactaaaaacaatgcaagtgatattccattgactaatgtagaataa

SEQ ID NO: 3497 - DNA, 210 bp, Staphylococcus epidermidis
atggaaactgttgtattaaaagttgaaggattagattgcccatcttgtgctaaaacagttgaaaaaggtttgaaaaagttaaagggaattgaaaaaacagaatccaacttttttgccgagaaattgactgtaacttatgatacgtctcaattaacaatggaagaaattgaaactaggttgaagaaagtcgggcaccctgttacaaaataa

SEQ ID NO: 3498 - DNA, 114 bp, Staphylococcus epidermidis
atgaacatgcccgaaatgaatatggagcaaatgcaacaaatgatgatggaacaaaaaattaaacaaaaactaggctacttatcccctgtaaaatacagagaattagcagcctag

SEQ ID NO: 3499 - DNA, 168 bp, Staphylococcus epidermidis
atgaaaaagaagttacctttagtgctgtcgtttgtactagcaggtttaatagtcattggacaaactggttttacccaaggttctgattatgaccagagaatggataatatgatgaatgaatgcatgaacttcatgcagtcctttgatgataacaacgaaaataagtag

SEQ ID NO: 3500 - DNA, 231 bp, Staphylococcus epidermidis
atgggtatgggtcatatgatgggcggaatggggttcattggcatgattttttggattatcattcttggcttgttattttatggtgtatatatattaattgcaaaagcttcagaaaaaccaaaaggtgtaagatcagatgattctttacaaattttaaaggaaaggctggcccaaggtgaaattaatgaagatgaatatgaaaaattaaagaaagtgttaaaaaaagattag

SEQ ID NO: 3501 - DNA, 246 bp, Staphylococcus epidermidis
atgaacacattcgttttcggcgtgattacaaagagattagaagaaaaaggacttaatgtacacgaagtattcaatatgagcgataaacaggctaagaaagaattatttgatgatttataccattatgtccgctatacaaagccatgcggtgcagaattaacaatggtggcattagatgctgatgaattaatgcattactttatatactgttacatggaacgttatgcttacaaattgaacgcttaa

SEQ ID NO: 3502 - DNA, 159 bp, Staphylococcus epidermidis
gtggctagcgacgatactgttaagcaaaaccgtaaacctaatcttaaggagcgtaaacaaattagttttcgagtgagcgaagacgaatatttaaagttacaacaatctgcggaaactttaaatataagtgtgcctgctttcgttaagaaaaaggcataa

SEQ ID NO: 3503 - DNA, 1140 bp, Staphylococcus epidermidis
atgaaaaaaatatggattttaactataggtatgtttgccttaggtatggatgcttatatagtagcaggattaataccttcaataagtaaaagttttaataaaagtagctctgctattgggcaaggagtaacagtttttacattgtttttctctatctctgcccccattttttcaacaatattagctaaatccccagttaaaaaaatactaataatagcattcagtatatttactttagccaatattataaccgcaatatctatgaactacatgctatatatcgtatcaagagcaatcgctggtttaggagctggcgtattctcaccaattgcaataagtgcaagcaatcatttagtctccgaaaagcataaaggaaaagcaatcgcttttacagtaggcggaatgagtgtaggaactgttataggagttcctctcggactagaaattgccaacatttctaattggcgatttgcaatgttggttattattgtcattagttttattgcattaataagcatatctatattgatgcctaaatttaaaatagaagctcctccaaatttaaaagatcgttttcaattatttttaaacaagcatgtactaagagttatttcggttacattatgcgctgccattgctagtttaggtttgtatacttatttagccgatattattaaaacaaatacagatacaaaaaatttaactcattaccttacagcgtggggaataggcggattaataggaagttttggtataggatttattatagatagatttaaaaatacaagatttgttatgctaattattttaattttactagcattaagttttggtttaattcctatttctattaacttgcctatattaggtttaattccctttattttatggggagctatgggatgggctacacaagctcctcaacaacatatattattgaaaaaacatcctgaatatggaggctctgctgtcgctttaaatagttctattaattatttaggcagtgctatgggatcagcaatcggaggaattattttatttaatgctaatagtacaaatgtactaatatatagtgctttaggaattactattattggtattttattacaattactaaatttatccctagaaaaaaattaa

SEQ ID NO: 3504 - DNA, 822 bp, Staphylococcus epidermidis
atgaattttaattatatgaaggacttcattaaagttgtcgagtacaatagcttaaataaagcttctagagaattgaatataagtacaccagccttaagtaaaagaattagaagtattgaagattattttgattgtcagttattttatagaacttctaagggtatttttttaactcaaaaaggaaatgctgtttatcattcgtttttaaaaataaacgagcaatttgaagaattaaaaagtaaaataagtgagtctaaagataaaagaattaaattaggagtcatacctagcttttctttatataagctacatgaaaagaattatattaatgaaagtgtcgttttagttattgaaaatagtacttcaattttacttgaggaaatttataaagataatatagatgttgttattggtgatattacacatttaaaaaataactcgctctatacacaagaaatttacactgaggactttattgtggcttatggtgatgaaaataagtttaaaaacactaaccaagtaagtataaaatctttaaaaaatgagaatatttatatacaaacaccgccatgtgatacatatgatcttcttaaaaattattccttgaaagataagttacatattgattatgttgattattatgaaactatattagctaatgtcaaagcaaataaaggtattactttgactcctcaatctttgactacaagacttgaaagtatgaacttatatcaaaaaaaattacaaagttataaaagagttgtaggcgtagtatcacgtgataaagataagatgaataaaattattgatataattcagtaa

SEQ ID NO: 3505 - DNA, 732 bp, Staphylococcus epidermidis
ttggagtgtatttatgagatattaaaatcaatttttagtttcgttaaatttttgtatcagaatttttcttttccagttttatttcttatcatcatttttttatttaaagaacaaataaaaaaaattttgactgattttacagtgggtgaattcaaattccctagtggatcgataaaagtaacacgtaaaggtattgaaaaagatcaggaagagtatttaagacagtttgaaaaagaaaatgataaaagtatagaatttgatgctgatgagatgagcgctaaaatcggagaattatttggagtagaatataaagatggtttgcctattgataattctggtggtggtggtgctccacctaaatcagaaagttataacccctcagtttttaacgctcatctattttctatagtggctagtgaagattctttaaaagaagagtataaatttttcggtttcaaagagaccattatctctttatatactgcctatttatctaattataaaaaagataagtgggttactaaaggtggtgctccttatcatgtttcaaatagagaagagagcttagagaagaaagcatttgatattataactgggtattatttagaagctatgaatactcgtaaagaatggaactttaatactataaaatcttatcaaaagttaataagagttgtgttggtttcttatcaagttatagaacgagaacttatggaggaaaatgaagaataa

SEQ ID NO: 3506 - DNA, 600 bp, Staphylococcus epidermidis
atgattagtatcataagctatagtatagaaatatttaagtatttgtattcagaatttagttttccattattgataatggttattataattatattttacaaacagataaaaaatatccttaatgatttaactaaattacatataagttggaatggtcgttctatcggaatagagcgggagaaaaaagaaactgttgaattgatgcaaatgttacttaaagataaagttgacagtgaaggtaaatctattatctatgaaggacaaagaggatctgggggaggagaattagatactcatgatcccatgtatttttcgaatttaattactagtaaaatatttttaattaatcaagtagaaaaacataataagttttttatagctgaaaagctttttgaaggttatgaaagtaaatgtatggaaaaatatggaacaaattatcacggagcaataatagagacaagagatgaaaataggatattagccgatgaaacaatacgtaaattttactttttaacgaaagacatggaaaaagagaatgaatatttaagcttagatgatttaaataaatttagacttttaatatttgcatttactcattga

SEQ ID NO: 3507 - DNA, 414 bp, Staphylococcus epidermidis
atgtataattcaattttgcttgcagcagatggttcaaaaaatagtatacgtgcagcccaagagttactaaattttataggtgattatacaattgtcacaatacttacggttgtagatattgaagaatcaaaaacagatgttttacatgatcaccaaggaactaatctaactcaaaaaagggaaagtaaattacaatctattaaagatttatttacagaacacaatgtgaattacaaaattaaaattgttcacggtactccaacagataaagtggttgaagtttcaaatagtggtgaatatcaagctatcattttaggtacacgtggcttaaacagttttcaaaaaatggttcttggtagtgtaagtcataaagttgctaaacgttctcaaatacctgtaattattgttaaataa

SEQ ID NO: 3508 - DNA, 1452 bp, Staphylococcus epidermidis
atggttgaaaaattaaaatctgaatggttcaatcagcctagaaagaatatacttgctgggatcgttgtagcactagcattaataccagaagcaattgcgttttcaattattgctggtgtggatccgatggtgggattgtatgcagcatttatcattgctactgttactgccatagtgggtggtagacctgcaatgatttctggcgccaccggggctgtggcgcttttagtcacacctttagttaaagaacatggtgttgaatatctttttgctgctacgatattgatggggttaatacaattacttttaggaatacttaaagtcggtcgtttaatgaaatttattccccgtccagttatgattggatttgttaatgcattgggtattatgatttttatgtctcaaatagagcatatttttaatatatctatagcaacttatatatacgttattataactttactaattgtatatgttattcctagattttataaagctatacctgccccattaatagctataattgttttaacagcattgtatatgtatacaggatctgacgtaagaactgtaggtgatttaggtaatattaagcaaactttgcctcatttcttaatccctaacattccttttaatttagaaacacttcaaattattttcccatattcattatcaatggctattgtgggtctagtagaaagcctacttacagctaaaattgtagatgatgcaactgatacacacagtagtaaaaacaaagaatcaagaggtcaagggattgctaatattattactggtttctttggcggtatgggaggttgtgccatgattggacaatcagtaatcaatgttaagtcaggtgcaaatagtagattgtctacatttacagcaggtattgtacttatgtttatgattattgttctcggtggtgtagtcgttcaaatcccgatgccaattcttgcagggataatggttatggtttctatcgggactgttgattggaattcatttaagtatataaaaaaagcacctaaaacagatgcattcgttatggttttaacggttattattgtattaataacacataacttagctatcggtgtagttgtaggtgttgttttcagtgctatattctttgcgactaaaatttctaaagttgaagttatttataaagagttaggtaagcagcatcgtttttcttttaaaggtcagatattctttgtatcaattgattctatgatggagaaaattgattttaatattgaagatagtgtcatagtgttgaattttgatcacgctcacctatgggatgattcagcagtaaatgccattgatacgattgttaggaaatttgaagagaaaaacaatattgtgtatgttgaaaaattaaacgcagatagccgaaaaattatttcagaactaagttatttaaatgaaactcatttaaattaa

SEQ ID NO: 3509 - DNA, 543 bp, Staphylococcus epidermidis
atgaaatacggctacattagacctgtaacaataaatgacactgttactgaacaagcaaagaaaatagaaatatatacaaaaaatattctaaaagagacgcatgctaataataaaaaaagaaacgaactaaatacattattaaattcaaaattagtttttggtgatacattgtatattacagatttgtgtattattgcagattctacaaaacacttagtagatatactagatttactttctgccaaaggaatttcactatatataattaatttaaataaaaatctcattgcagataccaatgaaaattttataaaaacattacatgagattactgattttcaaagcgacattgtaaaatttagaacacgtatggggttagagaattatacaagagaaggtaaacgtcttggtagacctaaacgtgatgataaaaatttaagagatgctatagaaatgtatatgagtaagaaatatacattagatgagataaaagaaaaaaccaatataagtagagccacattatacagacatttagataaataa

SEQ ID NO: 3510 - DNA, 579 bp, Staphylococcus epidermidis
ttgaaaataggttatgcaagagtttcaactggattacagaacttggatttacaggaagatcagttaaatcaatatggttgtgaaaagatatttaatgatcatatgagtggttcaaaaagtaagcgacctggtttagataaagccattgaatttgcgaggtcaggagatacgattgttgtttggagactagatagactaggacgtaacatggaagatttaatcacattagttaatgaacttaataatcgaggcgtgagttttcatagtttagaagaaaatataacaatggataaatcaagttctacaggacaattgttatttcatttattcgcagcatttgcagagtttgaacgtaatttaattttagaacgttcttcagcgggacgaattgcagctcgtgctagaggacgctatggaggtcgacccgaaaaattaaataaacaagatttaaaattactcaaaacactttatgataatggaacaccaattaaaactattgcagagcaatggaaagtttcacgtacaacaatctatcgttatctcaataagttaaataaccaagaaaataaagataaataa

SEQ ID NO: 3511 - DNA, 339 bp, Staphylococcus epidermidis
atgaagcctaagaaattgaaggccaacatcgaatatacaacaccgcatggacacgtgtatcgaacggatcacaaaggccgtattaaagaagtatatgcggatgacctatcacttctagatggcggacgtaattcatatgcgcaacgaacagtaggaagagaagaccgattaccagatgatgacggcggtcatttaattgcgcgcggattcggaggttctaaagatatagataatctcgtcccccaaagtaaatacatcaaccgctcatttaaagagaacggagaatggtataacatgaagaaagaatggcaaaaagcaattaaaaagggagagaagtaa

SEQ ID NO: 3512 - DNA, 195 bp, Staphylococcus epidermidis
atgagatacctcatgacattcatttgggcagtattgttacttcaaatggttaatttcgtattgaatagcttaaatagtggaccagaactaaatgtaattaatccaattattattgctgtcatcttcactattgttgtagctattttagatccaattcttaagccgtctaaaggttcaaatcaatacgaatcttaa

SEQ ID NO: 3513 - DNA, 942 bp, Staphylococcus epidermidis
atgaatgtgggtattaaaggttttggtgcatatgcacctaaaaatattatagacaatgcctattttgagcagtttttagaaacttcagatgaatggatttctaaaatgactggtattaaagaaagacattgggcagacgaagatcaagacacatctgatttagcatacaatgcaagtattaaagcgatagaggatgccggcattcagccagtagatatagacatgattatcgttgctacagctactggggatatgcctttcccaagcgtggctaacatcttacaagaaagactaggaacaggtaaggttgctactatggatcaacttgctgcatgttctggctttatgtattcaatgattactgctaaacaatatatacaatctggtgattacaaacatattttagttgtgggtgctgataaattatctaagattaccgatatgactgaccgttctactgctgtattatttggagacggtgctggagctgttgtcatgggagaagttgctgaaggtcgtggtatcattagctatgaaatgggttcagacggtagtggtggtaaatacttgtacttagatagagaaactggcaaactcaaaatgaatggtagagaagtatttaaatttgctgtgagaattatgggtgatgcatctacgcgtgtagttgagaaagctggtttatcgtctgaagacatagacttatttgttccacatcaggctaatattagaattatggaatctgcgagagagagattaggaatagaaagagaaaaaatgagtgtctcagtaaataaatatggtaatacttcggctgcctcaataccattaagtattaatcaagaattgcaaaatggaaaaatcaaagatgacgatactttagtcttagttggcttcggtggaggtctaacttggggcgcaatcgttattaaatggggaaaatag

SEQ ID NO: 3514 - DNA, 1245 bp, Staphylococcus epidermidis
atgaataaaaataatagagttgttataacgggtatcggagccttatctccaattggtaacgatgctaaaacaacatgggacaatgcactaaaaggtgttaacggtatagataaaatcacaagaatagatactgatgattataatgtacatcttgctggtgaattgaaagattttaatatagaagaccacattgatagaaaagaagctcgccgtatggatcggtttacacaatacgcggtggttgctgcaagagaagcggttaaagatgcacaattaaatattaatgaaaaaaatgccgaccgtattggtgtatggattggttctggtatcggtggtatggaaactttcgaagttgcacatacaacacttgtagaaagaggaccacgtcgagtaagtccatttttcgttccaatgttaattcctgatatggctactggtcaagtttctattgatttaggtgccaaagggcccaatggttctacagtaacagcttgtgctacggggactaattcaataggtgaggcatttaaaattattcaacgtggtgatgcagatgcaatggtgactggtggaacagaggcacctattacacatatggcaatcgcagggtttagtgcaagtcgtgcattatctacaaacaatgaccctgaaacagcttgtcgaccattccaagaaggccgtgatggctttgttatgggtgaaggggcaggtattgttgtacttgaatcattagattcagctaaagagagaggcgctgaaatttacgctgaagttgtaggttatggttcctctggcgatgcacatcatattacagcacctgcgcctgaaggtgaaggtggctcacgagctatgcaagctgctttagatgatgctggaatcaaagctcaagatgtacagtatttaaatgcacatggcacaagtacacctgttggagatttatatgaggttcaagcgattaaaaatacattcggtgatgctgcgaagtcattaaaagtaagttcaactaaatcaatgactggacatttattaggtgctacaggtggaattgaagctattttttctgcgctatcaattcgtgattcaaaggtagcccctacaatacatgcaatcacaccagacgaagaatgtgatttggacattgttccgaatgtagcccaagacttagacattacctatgcaatgagtaatagtttaggatttggtggacataatgcagtgttagtatttaaaaaatttgaagactaa

SEQ ID NO: 3515 - DNA, 372 bp, Staphylococcus epidermidis
atgtccataaattcttatttgatttcgtcattatttacgccagttttatcaataattatatggttattttattcaaatcactttataaatttaatcaatatcttattttatacatcattcattatttttatagttgctttccttattttactcattcaagaaggaatatttgatgctacaagttttggatttcgtcgtttaaagtatcaactttcctcaactaagagaaaacgtatgatgaaaaatgaccactttttcaatccacaaaaagttaaaaaagaaagttatattatttccccatgggtagttccaacattgattattaacctcacttatataattgtgagtatcggagtatctttattaatataa

SEQ ID NO: 3516 - DNA, 927 bp, Staphylococcus epidermidis
atgactaaatatgtgttgaaacgattgtgttatatgtttgtgtcgttatttattgttataacaattacatttttcttaatgaaattaatgccaggatctccgtttaatgacacaaaacttaatgcgcaacaaaaagaaatattaaatgaaaagtacggtttgaatgatccagtagcattacaatatgttaattatttgaaaaatgtagtaacaggtgattttggcaactcatttcaatatcataatatgccagtgtgggatttagttaaaccacgattgataccttcaatggagatgggaataacagctatggttattggtgttgttttaggtttagtattaggtgttgctgctgctactaaacaaaatacatgggtagactatacaacaacaattatctctgttatcgcagtatcagtgccgtcatttgtcttagcagttttattgcagtatgtatttgcagttaagttagaatggtttccagttgcaggatgggaaggtttttctacagctattttaccttctctagcactatcagctacagttttagcaactgttgcaagatatattagagctgaaatgattgaagtactcagttcagattacatacttttagctcgagctaaaggaaattctactttaaaagtgctctttggacatgcattacgaaatgcattaattcctattattacaatcattgtacctatgttagcaggtatattaacaggaacattaacaattgaaaatatctttggtgttccaggattaggtgatcaatttgttcgttctataactacaaatgatttttcagtcatcatggctacaacgatattattcagtactttatttattgtttcgatctttattgtagacattttatatggtgttatcgatccaagaattcgtgtacaagggggcaagaaataa

SEQ ID NO: 3517 - DNA, 1071 bp, Staphylococcus epidermidis
atgagtaataaagaagatgttacaaacattaatggcgatatttctaatgcaacgatgtcacatacaagtaatgatatttcgaatacagattttattattagagatttagacttgaatcaagagccagaaatgccacgtcaaagtaagaatttttggcaagatgcttggtcacaattgaaacgtaataaattagcagtaatcggaatgataggtttgttgcttatagttattatggcatttataggaccattaatgaataaacacgattttgctgagcagaatgttgatcatcgtaatctcccagcaaaaataccattattagatcatgtttcatttttaccttttgacggtaaaggtacggacggtaaaaatgcttacaaagaagcaggtgcgaaagaaaactattggtttggtactgatcaacttggacgtgatttatggacacgtacttggaaaggtgctcaaatttcactttatattggtgtagttgctgcattattagatatttgtattggcgttgtatatggagccgtttctggtttctttggaggcagggtagatgatgtgatgcaaaggattttagaaattattgcttctatacccaatttaattgtcgttattttattcgtacttatttttgaaccatcaatttggactattatattagctatgtcaattactggctggctggggatgagtagagtggtacgtggagaatttttaaaattgaaaaatcaagaatttgttttggcatctcaaacattgggtgcttctaaattcaagttaatctttaaacatatattacctaacacattaggagcaattgtcgttacatcaatgtttactgttccaagtgcaatatttttcgaagcatttttaagctttattggaataggggtgcctgcgcctaagacgtcattaggatctcttgtcaatgatgggcgtgcaatgttgttgatacatcctcatgaattatttattccagcaatcattttaagtttattgattttattcttctatctatttagtgatggactacgtgatgcattcgacccaaaaatgcgaaaataa

SEQ ID NO: 3518 - DNA, 1080 bp, Staphylococcus epidermidis
atgacagaaacggtattagaagtaaatgatttgcacgtttcctttgatattgctgcaggagaagtgcaagctgtcagaggcgtggattttcatttaaataaaggggaaacgttagccattgttggagaatctggatctggaaaatctgtaacaactaaggcaattacaaaactttttcaaaaggatacaggaagaataaaaaagggagaaatcttatttttaggtgaggacttagctcagaaaagtgaaaaagaactgatacagctaagaggtcgagatatttcaatgatatttcaggatcctatgacttctttaaatccaacaatgcaaatcggaaagcaagtcatggaacctttgattaaacataagaaattaagtaaagcaaaggccaagcaaagagcattggaaattttgaatttagttgggttacctcgtgctgaaaaacgatttaaagcttatccacatcaattttcaggaggacaacgtcagagaatagttattgcaatagcattggcatgtgagcctaaaatattaattgctgatgagcctacaactgctttagatgtgacaatgcaggctcaaattttagatcttatgaaagaactacaaaataagattgaaacttcaattatctttattacgcatgatttaggcgttgtagcaaatattgcggacaaagtagccgtaatgtatgggggacagatggttgaaacaggggatgtgaatgaaatattttatgatcctaaacatccctatacctggggattgctttcttcaatgcctgatttaacaaccagtaatgacacggacttaattgcaattccaggtacaccaccagatttacttcatccaccaattggtgatgctttcgcacgtagaagtcgatatgctttagatattgattttaaagaagaaccaccttggttcaaaatttcacccacacattttgttaaatcttggttattagatgcaagagctccaaaagttacgccaccttcaatggttcaaaaacgattaagaacaatgccaagtaattatgaacaaccacatagagtagagagggtggcttttaatgagtaa

SEQ ID NO: 3519 - DNA, 939 bp, Staphylococcus epidermidis
atgagtaatgaaaatgtattattacaagttaaaaatttaaaacagtattttaatcaaggtaaacataatgaagttaaagcgattgataatataagttttgatgtttataaaggggaaactttaggcctagtaggagagtctggatgtggtaaatcaacgactggaaaagccattatcaaattaaatgatattactgatggcgcaatcgagtatgatggtaaagatattcatcaaattagaaaacgtaaagagcgattgaagtttaataagaaaattcaaatgatatttcaagatccttatgcatctctaaatcctcggttaaaggtaatggatatcgtagctgaaggaatagatattcacaaacttgctagtagtcagcgtgatcgaaagaaacgtgtatacgaccttttagaaacagttggtttaggtaaagaacacgcgaatcgttacccacatgagttttcaggcggacaaagacaacgtattggtatcgcacgtgcattagctgtagagccagaatttattattgcagatgaaccgatatcagcattagatgtatcgattcaagctcaagtcgttaatcttttattaaagctacaacgtgaacgtgatattactttattgtttattgctcatgatttatcaatggtgaaatatatttccgatagaattgcagtgatgcacttcggtaaaattgtagaaattggaccggctgatgatatttataattatccattacatgattatactaagtcattattaagtgccattccacagcctgatcctgatgttgagagaaatcgtcaacgtgttttatatcatgaagatgcaacgcttaatgaagaacgtcaattaaatgaaattagaccacaacattatgtattttctactcaaaacgaagcagttaaattgaaacaaaagtatggtttgtctgtttaa

SEQ ID NO: 3520 - DNA, 1644 bp, Staphylococcus epidermidis
atgaaaggttttaaagtcttaattattttattaagtgtatgcataattttatctgcttgtagtaataagcagagtttatattcagaccaggggcaagtttttaggaaggtaatcacacaagatatgactacactagatacagctttaattacagatgctgtttctggtgatatagcagctcaagcttttgaaggattatatactttaaataaagaagacaaagctgaaccagctattgctaaatcttttccaaagaaaagtaatggtggcaaaacacttacgattaatttaagaaaaaatgcaaaatggtccaatggagattcggtaactgcatatgacttcgtatatgcgtggagaaaggtagttaatcctaagacggcttctgagtttgcatacataatgagcgatataaaaaatgcagatgaagttaatgcaggtaaaaaatcagtcaaggatttgggtatcaaggctataggtaaatataaattacaagtagatttagaaagacctgtaccttatattaatgaactattagcacttaatacatttaatcctcaaaatgagaaagttgctaaaaagtttggagaacaatatggtacaactgctgaaaaagcagtgtacaatggaccatttgaagtaacaaattggaaagtggaagataaaattcaattagttaaaaatgaacaatattgggataagaagaatgtaaaattagataaagtgaactataaagtattaaaagatcaacaagcaggtgcatcgttatatgatactggctcggtcgatgatactattataacttctgaacaagttgataaatatagaggagaatctgctttgaattatcgtttaacagcagcaacattctttattaaaatgaatcaaaaaacagttcctgaatttaaaaataagcatttaagattggctatatctcaagcaataaataaaaaagggtatgtcaattctgttttaaatgatggttcgctaccatcaaataattttactggagtaggaactgccgatacaccggatggcaaagattttgcaagaaccatcaaatcaccattaaaattcaaccctgatttagcgaaaaagaattggagagaagcacaaaaagaattaggaaaaaataaatttacttttacgatgaacacacaggatacacctgcttcaaaaattgctgccgaatatataaaatctcaaattgaaagtcatttgccaggtgtgacactcaaaattaaacaaatgccatttaaacaaaaaactactttagaattagcaaataactatgaagcaagttattcagggtggagtcctgattatcctgacccaacagcatttcttcaaacaatgacaaaaaataatgcacagaataatacagattggagtaataaagaatacaatcaattactcaaagatgctaacagcaagcttttacgaaagccaggtgaacgtaatacctcattacaaaaagcggaatatatcttattacatgaagcgccagtcgctcctgtttatcaaaaaggagaagcacacttaacgaatccgcaagtaaaaggattacaatatcacaaagtagggcctgaaacgacgcttaaacatgtctatattgataaatcaatcaatagggagacaggtaaatag

SEQ ID NO: 3521 - DNA, 990 bp, Staphylococcus epidermidis
atggaaactttattctcaggaattcagccaagtggtattccaacaattggtaactacattggtgcattaaaacaatttgtagatgttcaagatgactatgaatgttttttctgtatcgtagaccaacatgcaataacggtaccacaagaccgcttaaaattacgcaaacaaatacgtcaactcgcagcaatttatttggcaacaggtattgatccagataaatcgactttatttattcaatctgaagtccctgcacacgtgcaagctggttggatgcttacaacaatagcttctattggtgaattggaacgtatgactcagtttaaagacaaagctcagaaacgcgcagatggagtgcctgctggtctactcacttatccaccattgatggcggctgatatcgtgatttacaacactaacattgtccctgttggtgatgatcaaaaacagcatatggaactgacacgtaatttagtagatcgtttcaatagtagatataacgatgtattagtaaaaccagaggtacgaatgcctaaagttggtgggcgtgtgatgagtttacaagatcctactaaaaaaatgagtaaaagtgatgataatcagaagaatttcatttctttattggatgaacctcatgtagctgccaaaaaaattaaaagcgctgtaacagactctgacggtataataaaatttgatcgtgagaataaaccaggcatttcaaatttactttcaatatattctggtctaactaatgaatctattaagaatattgaatctaaatatgaaggtgaaggttacggtaaatttaaaggtgatttatcggaaatcgttaaagattttcttattaatttccaagaaaaatatgcaagcttttataattctgatgacctagatgatattctagataaaggtaaagaaaaagctcaaaaagcttcatttaaaacattgaaaaaaatggaaaaagcaatgggcttaggtcgaaaaagataa

SEQ ID NO: 3522 - DNA, 396 bp, Staphylococcus epidermidis
atggtaacattatttacttcaccaagttgcacatcttgccgtaaagcgaaagcatggttacaagaacatgatattccgtatacggagcgtaacattttttctgaacatttaacaattgatgaaattaaacaaattttaaaaatgactgaagatggaactgacgaaattatttcaacacgttctaagacatatcaaaaattgaatgtagatatagattcattaccattacaagatttatactcaatcattcaagataatcctggcttgttacgtcgtccaattattttagatgataaacgtttacaagttggatacaacgaagatgaaattcgtcgtttcctaccacgaaaagtacgtacgttccaattacaagaagcgcaacgtttagttgattaa

SEQ ID NO: 3523 - DNA, 198 bp, Staphylococcus epidermidis
ttgttaattcttattataacagtagttggatgtaataagggggcaaaaaatcaacataataatattcaatatcatgatgaaataaaaaagatattaaaaattcaagaaaaaacacatcaagaaatggcccataaaagtgaaaaagttagaccaaaatttgaaaaagaaaaagtaaatagatacgtttcctacgattag

SEQ ID NO: 3524 - DNA, 207 bp, Staphylococcus epidermidis
atggaaaaaacagggaaggctctaaaagtgtgggcatggatttttattgttacatcagtaattattccattacttggtgtagggagtatcatttgtagtattaaatacaaaaaatatgatgagaaaaaaggggcacaattattacagatttctataattgtagctgttgtagctttggggtacaacatcattaaattgctccagtaa

SEQ ID NO: 3525 - DNA, 267 bp, Staphylococcus epidermidis
atggaattaaatggatatcgcgatgctttatacggtggtggtaaatctgctaaatccttgatgactaaaaaagatattaagatgagtaataaaattgctaatgcaatgaaaaagttagaaaaaattatagataactcagaaaaaattgacaccagaacaatacgagagtatgtcaataaatatccaattatcgagggtcaatttatacatatcaatagttttcttgagaatgttatttatggcacatatatttactacagtgcctga

SEQ ID NO: 3526 - DNA, 123 bp, Staphylococcus epidermidis
ttgggtgacttcaaagattttcaagttaaacatgattttgatgatgcgaacttattgaatatgattgcacctgtagctacaatggcttcaaaagtgaaagatatgccgagtgattgctactaa

SEQ ID NO: 3527 - DNA, 1398 bp, Staphylococcus epidermidis
atggcaaaacaagcacctgatgttggggattataaatacggattccatgacgaagatatttccatttttagatcagagcgtggtttaacggaaaatatagtaacagaaatctctaaaatgaaagaagagccacaatggatgttagatttccgtttgaaagcattgaaattattctataaaatgccaatgccacaatggggtggagatttatctgaattagattttgatgatattacgtattatgttaaaccttctgaacatactgaacgttcatgggatgaagtgcctgaagaaatcaaacgtacttttgataaattaggtattccagaagctgagcagaaatacttagctggagtttctgctcaatatgaatcagaagttgtttatcataatatggagaaagaattggaagaaaagggtattattttcaaagatactgatagtgcattacgtgaaaatgaagagttattcagagaatattttgcgtctgtagtacctgctgcagataataaatttgctgcattaaattcagcagtatggtctggtggttcattcatttatgttcctaagaatgttaaattagatacaccgctacaagcatatttccgtattaactctgagaatatgggacaattcgaacgtacattaattattgctgatgaaggtgcatcagtaaactatgtagaaggttgtactgcacctgtatactccacaagttcactacattcggcagttgttgaaattattgtacacaaagatgcacatgtaagatatactactatccaaaactgggccaacaacgtatataatttagtaactaaacgtacctttgtacatgagaacggtaatatggaatgggtagatggaaacttaggttctaagttgacgatgaaatatccaaactgtgtacttttaggtgagggtgctaaaggtagcacgctatccattgcatttgctggtaaaggccaagttcaagatgccggtgctaaaatgattcataaagcacctaatacatcttcaactattgtttctaaatctatctccaaaaatggtggtaaagtcatttatcgtggtatcgttcattttggacgtaaagctaagggtgcacgttcaaacatcgaatgtgatacattaattttagataatgaatcaacttcagatactatcccttataatgaagtgttcaatgacaatatttcattagaacatgaagctaaagtttctaaagtatcagaagagcaattattctatcttatgagtcgtggtatttctgaagaagaagcgacagaaatgattgttatgggattcattgagccgttcactaaagaattaccaatggaatacgcagtagaaatgaaccgtttaattaagtttgaaatggaaggctcaattggttaa

SEQ ID NO: 3528 - DNA, 465 bp, Staphylococcus epidermidis
atgaattttaataatttggatcaattatatcgatctgtaattatggatcattacaaaaaccctagaaacaaaggtgtcttagacaatggctcaatgactgttgatatgaataatcctacatgtggtgatcgcatacgtttgacatttgatattgaagacggaatcattaacgatgctaagtttgaaggtgaaggatgttcaatttcaatgtctagtgcatctatgatgactgaagcagttaaaggtcattcacttggtgaagcaatgcaaatgagccaagaatttactaaaatgatgctcggtgaagactacgagattactgaagaaatgggagatattgaggcacttcaaggtgtctcacaattcccagctcgaattaaatgtgcaacgcttgcatggaaagcattagaaaaagggacagtcgaaaaagaaggtaagtcagaaggtacaactgaagaagattaa

SEQ ID NO: 3529 - DNA, 1242 bp, Staphylococcus epidermidis
atggccgaacattctcttgatgttaaggcagtcattaaagactttccgatacttgagcaaaaggtaaataataaacgtttagcataccttgattcaactgcgactagtcaaacacctgtacaagttttaaatgtgctagatgattattacaagcgttataattctaatgttcatcgtggtgtacacacattggggtcattagctacagatggctatgaaaatgcgagagaaacagtaagacgttttatcaatgcgaagtactttgaagaaattattttcactcgaggaacaactgcatcaataaatatcgtagcacatagttatggtgatgctcatattagtgagggtgacgaaattgttgtaacagaaatggaacatcatgctaatattgttccatggcaacaattagctaaacgtaagaatgcaacactaaaatttattcctatgacaaaagatggtgaattgcaattagatgatataaaagcaaccatcaatgataaaactaaaattgttgctatcgctcacgtttccaacgttttaggaacaattaatgatgttaatactatcgctaaaattgcacacgaacatggtgcagttataagtgtggatggtgcgcaatcagctccacacatggctttagatatgcaagatattgatgctgatttttatagttttagtggacataaaatgttaggtcctactggcattggagtcttatatggaaaaagagaattattacaaaatatggaacccgttgaatttggtggagatatgatagacttcgtaagtaaatatgacgccacgtgggctgacctaccaactaaatttgaggctggtacaccacttattgctcaagcaataggtctagcagaagctatacgttatattgagaatttaggttttaatgcgattcatcaacatgaaaaagaattgacagaatatgcatatgaacaaatgttaagtatagatggtcttgaaatttacggtccaccaaaagatagacgtgcaggggtcattacttttaatttagaagatatacatccacatgatgtagctacagccgttgatacagaaggtgttgcagttcgtgcaggccatcattgtgcgcaacctttgatgaaatggttgggtgtctcttcaacagcgcgtgcaagtttttacgtttataatacgaaagaagatatagatcaattagttcaagcattgaaacaaacgaaggagtttttctcttatgaattttaa

SEQ ID NO: 3530 - DNA, 1308 bp, Staphylococcus epidermidis
atgacaactaaaactttgaacatttctgaagaacaacttgttgattattctaaagcgcacaatgaaccttcttggatgacagagttacgtaaaaaagcgttgaaattaacagaaactttagaaatgccaaaacctgataaaacgaaattaagaaaatgggattttgatacgtttaaacaacaccatacaacaggagattcataccatcaattaactgatttaccaaaatctgttaaagaaatcattgatgttgaaaactcagaaaatttaatcattcaacataataatgatttggcatatacacagatatcagatcaagctaaaaatgatggtgtgattattgaaggtctatctgaagcactagtcaatcatagtgatttagttcaaaagtactttatgactaaagcagtaaatgttgatgaacatcgtttaacagcattacatactgcattagtgaacggtggtatttttgtttatgtacctaaaaatactgttgtagaacatccgatacagtatgttgttttacatgatgatgaacaagcgagcttttacaatcacgtcatcattgttacagaagaaagtgcagaggttacctatgtagagaactatctttctactactagtggtgaagataaccaacttaatattgtgtcagaggttatcgctggcgcaaactctaacgtcacatatggttcagttgattatttagataaaggatttacaggtcatatcattcgtcgtggttctgcagatgcagatgcttctatcaattgggcattaggattgatgaatgaaggtagccaaattatagataatactacaaatcttaacggtgatcgttcaacaagtgcattgaaatcagttgttgttggtacaggtgatcaaaaaataaatttaacttccaaaattgttcaatacggtaaagaaacagacgggtatatattgaaacatggtgttatgaaagaaaatgcatcttctgtatttaatggaattggctacattaaacatggtggtacaaaatctattgcgaaccaagagtcacgtgttttgatgttatctgaaaatgcacgtggtgatgctaatcctattcttttaatagacgaagatgatgttgaagcaggacatgcagcttcagttggtcgtgtcgatcctgagcaattatactatttaatgagccgtggtatttcaagagctgaagcagagcgtttagttatacatggtttcttagacccagtagtacgtgaattaccgattgacgatgtaaaacgtcaactaagagaagtaattgagcgtaaagtttcaaaataa

SEQ ID NO: 3531 - DNA, 762 bp, Staphylococcus epidermidis
atgtcatcaacattagagattaaggacctacatgtgtctatcgaggataaagaaattttaaaaggtgttaacttaacaattaatactggtgaaatacacgcaattatgggacctaatggtactggtaaatcaacattatcgtcagcaattatgggacatccaagttatgaagttacacaaggtgaagtattattagatggcgttaatattttagagttagacgttgatgagagagctaaagcaggtttatttttagctatgcaatacccatcagaaattacaggggtaacaaacgcagattttatgcgctcagcaatcaatgcgaaacgtgaagagggacaagaaattaatttaatgcagttcatcaagaaattggataaacaaatggactttttagatatcgataaagatatggctcaacgttatttaaatgaaggtttctctggtggagagaaaaaacgaaatgagattttacaattaatgatgttagaaccgaaattcgctattttagatgaaattgactccggtttggatatcgatgctttaaaagtggtttctaaaggtattaatcaaatgcgtggtgaagagtttggtgcattaatgattacgcactatcaacgacttttaaattatattacaccagatcaagtacatgtgatgtatggtggtaaagttgtgaaatctggaggcccagaattagctaaacgtcttgaagaagaaggctatgaatgggttaaagaagaatttggtgctgctgaatag

SEQ ID NO: 3532 - DNA, 861 bp, Staphylococcus epidermidis
atgaaaaaattcaaatggataaatatatttaaaggttttggtatgggcacaagtgatctcgtcccaggtgtaagtggagggactatcgctttattacttggaatttatgaagactttattagctcaattagtggtttgttttcaagacgattttggcctagcttaaaatttttactacctattttaataggaatgctaatagctataggactattaagtcaattatttaattatttgcttagtcaacatcatattcctactatgttattttttacaggtttgattctcggtatcatcccttatttattaaccgtctctaatttcaaaaaaaatttcagtataatacattattctattctattattaggtattgctattatagtcgttttcgcattgcttaatcatggggacaagcatacaggtgaaacacttactttatctttcagtcttatcattaaatattttatcgcaggtgttttcgcttcaagtgctatgttattaccgggcatttctggatcatttatgttacttgtcttcggagtatatgggacgctaatgtatgccatctctgaactacttcattttaatttaaatgcattacctatcatattaatagtaggtttcggtattgtcactggatttatgatttcaagtcgattaattcaatattgtctacatcaacaccctacaatgacctttgctttgataataggctttgtgatcggatcgttgtatgcagttttccctggattcccgaaagacttaatccaatggatcatatcatttttcctattggtcactggcttcttagtaagctatgttcttggtaaaattacagcaaaaaatgaagcatcattttga

SEQ ID NO: 3533 - DNA, 192 bp, Staphylococcus epidermidis
atggctgaagataaatttgaacaagctaaaggtaatattaaagaaacagtaggtaatgctactgataataaagaattagaaaaagatggtaaaggtgacaaagcttctggtaaagcaaaagaagctgtagaaaacgttaaagaaaaagcaaatgacgttattgataaatttaaaggtaataaaggtgactaa

SEQ ID NO: 3534 - DNA, 159 bp, Staphylococcus epidermidis
atgaaatttattactattaaagcgattactgaaaaagggttagataaaaaagtaaatcaatttttaaaatcacatccacaaattgaaattatcaaatttgattaccaaatgggatatagcggtgtaagtgttggtattttataccgtgataatatttaa

SEQ ID NO: 3535 - DNA, 315 bp, Staphylococcus epidermidis; identical to SEQ ID NO: 2614

SEQ ID NO: 3536 - DNA, 144 bp, Staphylococcus epidermidis
atgagtaatagatataatatacatccagcattatatataggtggatttgcggtattttttagttttatatttggatttcctgtaggaacattaatgggattagctataggaataggaattagtaaaaaaaataaaaatttgtaa

SEQ ID NO: 3537 - DNA, 1173 bp, Staphylococcus epidermidis
atgattgaggtgaaaagtaacataagattatatgttttaggatttttagcattttttgcttcattaattcaaaatatatatacacctatcattccaagattacatgaagactttcatgtatcgttattttggataaatgtaactgtaggcggttttatatttatagttgctataatgcagatagttttaggaaaaagtatagattctagagattcaaaaaaagtacttttaacaggcttaggaattgttatcatatctagcttaatgtgtgctataacgaataattttgttttgtttgcgacggctagattatttcaagctattggttgtggaatcattccacttgtaactttaactctattagctaaattaagtgaaggtgatagcagagcatctgcgatggcaaattaccagatatttttatcgtgtgcaccagcaatagcgcccattttgggtagtagtataggtgccaaatggggttatataggtatctttagttttttatttattatatccatcttattatttcttattattacttttactaagattccaaatgttgaaaaaggtgtagggaaattaacagaaaaggtgaatgaaaaatacttatcagataaagtttttattactttagtggtattaggatttttagcattttttacttatttttctatattagtttatctacctacattactaaatcatgtatataatataagtgaaggcatatctggtatattatttttaccgattactgttagtgtcatattaggtagtatgttctataaaaaaatagccaaaaaatataacagcttaatgatacttagatgtactataattatcttttctatattcaccttattatttggaatatttaactctgtaaatttaataatcttatcttttattatttttgtgctaggtttttttgttggtgttgttcctgcgttgctatcgacgttaatatctcaaagatttgaaaatataaagggtaaggttttaggaatttttaattttgtaaggtatataggtatgacaataggagcaatattgattggattagtatctcaattatttataccatattattttggaatagtttctataattctaataataatacttatctatatcaaagcaaaaacatttgaaaatatgtttaataaagagtga

SEQ ID NO: 3538 - DNA, 468 bp, Staphylococcus epidermidis
atgaatatgcaaaaaaaagtcatattaatgttacaacaattcattatagaaagagaaaatgccgataaaagaagacaatatagaaaagaaaatgaggatatggatttatctttaactcaatttcatatcatagagatcattgataaacatgaaaaagttaataacaagtttcttgccgaagaactaaacgtatccaagccagcagtcacaaaatctattaagaaacttttatctaaagaattagtagttgaactgaataatgagtcaaataaaagagaagtttattataatttaactaaaaaaggagaaaaactttcttttatacatgatgatttacataaaaaagcagtaaaaaaatatgaagaagtattgaaagtatttgatgaaaaagaaatggaaactatcattgaatttctaaaaagaagcgttgatgagttaaaaaaagaagaagttgattcaaatgattga

SEQ ID NO: 3539 - DNA, 705 bp, Staphylococcus epidermidis
gtgcaaaactttaaagtagactttttaacaaaaaactgtaaacaaatctatcaaagaaaaaaacatgtcattttaggaattagcccttttacaagtaagtataacgaatcctacataagaaagattattcaatgggctaattcaaattttgatgatttctctattttattggcaggagaagaatctaaaaatcttttagaatgcttaggatattcatcttctaaagctaatcaaaaagtacgaaaagaaattaaacggcaaatcagattttgtgaagatgaaattataaagtgtaataaaaccataactaatagaattcataggttttctgattttaaaaataatatttcttatattgatatatataagactattgtagatcagttcaatacagattctaattttaaaaacagttgtttaaaaatgtcacttcaagcattacaaagcaaaggaaaaaatgttaatacatccatagaaatcactgatgaaactttagagtatgcagcacaatatgttttagcagaattaccattctttttaaatgctaatcccataattaatacacaagaaactttaatggcttatcatgctccatgggaattaggtactaatattataaatgatcagttcaatttaaaaatgaatgaaaaacagggctatattatattaacggaaaaaggggataattatgttaaaagtgtctaa

SEQ ID NO: 3540 - DNA, 1200 bp, Staphylococcus epidermidis
atgttaaaagtgtctaaaagtatttttgataaagagtatgaaataaatcctatttcgtatttccaattttttagagaaaacgacccagttcattatgagaaatcagttgatgcttattttataagtaattatacagatgttaaatatgttcttaaaaacaacgatactttcactactaaaacattagccgaaagagctgaacctgttatgaaagatagagtattagcacaaatgtcaggtcatgaacacaaatctaaaaagaaagctattttaaaaggtatgactggaaaatatcttgaaaaattaatgcctatattagaaacacgaacaaataatattatcgatcaatttatagataaaaaagaaatagatatagtaaatgactttggaaaagtatttgcagttcaaagttctatggacttactagggataaatgtagaagactctgaaaaaattagggaatggcataatggtatagctaaatttataacatctttcaatttaagtgatgaagaaattaaatactcaatgcattgtagtgataaattagaagaatatttaatgcctttgattgaagagagaaaatattctaataaagacgacttaatttctcttttacatgaatataaagatgctgaaaatgaaattacggatactgaaattttagctttaactttaaatattttattagctgcaacagaacctgttgataaaacattagcttatttattttacaatctattaaatagtcccaaccaatatcaagatgttatagataaccctaaattattgagatcagcaatcacagaaacacttcgtttcaattcaccagtgcaattaatacctagacaattatctgaaccatgtactttacacaataaaaatttaaaagcaggtgacacagttatatgtatgattggtgctgctaacagagacccaaaagcttatactaatccggatatatttaatattcacagaaaatctgaaagtaacaagccatttacttcgcattctcagaatttatcatttggatcaggagttcatacatgtgtcggtgcatcattctcattaatacaattagaaatggttaccaagattttattaaaaagattaaaaaacattaaattaaaaacaatgaatcttgaagaaaaaggactatatactagaggaccaaaatctatggtaattagttttgattaa

SEQ ID NO: 3541 - DNA, 384 bp, Staphylococcus epidermidis
atgagcgaacaaaacacatttgtggctagcaacgaaactgttgggcgaaaccgtaaacccaaccgtaaggcgccgaaacaaattagttttcgtgtgagcgaatccgaatatttaaagttacaacaatcagctgaaactttaaatatgagtgtgcctgctttcgttaagaaaaaggcacaaggcgcccgattggtcacacctaaattggataaggcaacgcgacaatcggtagcgaaagatttgagtatgttgggcgcaaatgccaatcagattgccaaatattgcaaccaacatcaacacgaagcgccgaactatgaagcattagaacgtaatatcagcgaattacgtgaaaggttggatgatatatggacaacactaaagtaa

SEQ ID NO: 3542 - DNA, 198 bp, Staphylococcus epidermidis
atggacaacactaaagtaacaatgatcgtcagtgcgattttattagtgttttgtttaaccattgcgagttatttaatttttcatgaacatctattttggccaagtttaatttttttaggcttagcttttattgatggcacaaaattttatatttcatatcaaaaagtcaaagaacgtgataataatggcaacgactaa

SEQ ID NO: 3543 - DNA, 300 bp, Staphylococcus epidermidis
atggcaacgactaaattaagtgccaccaaatcaacatcacgagcgattaattacgctgaaaaacgtgcagtcgaaaaaagtggcttaaattgtgatgtcgactatgccaaatcgagttttaaagcttctcgtgagttatatggtaaaaccgatgggaatcaagggcatatcattatacaatcgttcaaacctggcgaagtcgcgcccgaacaatgtaaccaattaggattagcactcgctgaaaagctcgcaccaaatcatcaagacaagaagaaactcgttcaactcgtttctaaatga

SEQ ID NO: 3544 - DNA, 447 bp, Staphylococcus epidermidis
atgctgtttggttttggagggacaagttttgtacaagctaaagaagttaagaatactaatgtagttagttctttacaaaatcaaaaaacagatacatacatagatttagataattctgagcaacaagcagacttggaacacgttttaactgtattagaaactatgccggatggtgttattaaaaaaggtcaacctgcaattaaagaatattttaataatcatggtgttacagttaatggtgatagaggtgtagtaggatgtacctcagcaataggatatgccgttgtttcaggattagttgcacctgcaaaacttttaaaaattaaaaaaggcttaaaagctttaggtggagcgaagacttttgctaaaacatataaagcagagaagaaaaaacaagaaatcaactgcagtaaaaaatgctgtgaagaaagctggttcagctgctag

SEQ ID NO: 3545 - DNA, 939 bp, Staphylococcus epidermidis
atgccaaattttgagaaatacaatttatcacaagtaaaaactgaaagattttatcaactgcctaaatatttatttgaagatacatattttaagaaaatgtcagcagaagccaaaattatgtatgcgttactaaaagatcgttttgaattatccatccaaaatgaatgggtagataaaaataataacatttactttattttcagtaataaacatttgtgtgagtacttaggttatgcagaacaaaaaatcataaaattgaaaaaagagttaataaattttaatttactgactcaagaacgtgttggccttaataaacccaatagattatatttattaaaacccaattatgatattgaagtcagtcataccaaggaacttctaaattcacagttccagaacaatgaatttagaagttctagaactatgaatttaagtggtcaagaaccaccaaattcacagtctaatgatactgatttaagtaatactgactatataacaactaagaataatgatatgaatgatatgaatgatatatataacaattcaacaaaccacaatcattcgaatcatacaaatcatcaacaatccgaatttgataatgacgcacttaagttccaagttctcgaagaattgccacaacaaattcaggactatttaagtaaatttgaaattcgagaaatccgaattattaaaagtgtattactcaaaggaaaaaaatcatttaataatgcacacgatacctattatcgtttagaagatgttgaatttgaaattgtaagtgtgttgaaacgttttaaagcaatgctgctacaaaagaatgaaactgttgaagctatgcaagggtatctaatgcaatcaattaaagctgaacttgaagaaacacacgcactgtatatgcgacgtcaaaacattaaaaaatataacatctttaatcaataa

SEQ ID NO: 3546 - DNA, 780 bp, Staphylococcus epidermidis
atggatgctatgaaaactattaagatggttgctgatgaattgaatgtaactaaacaaactattgttaataatgctaaaagcttaaatatatcttttgaaaaagaaaatggaattaattatattaatgagaatgattgtttgaaaattatagaaaaaatcactaagaaagaaagtacaaagcaaaataaagaatcagtaaaaaaagaaagatttgatgaaaatactgcagaggttgaaaagtatatatataataattcaaatagttttgagacattaaaaacaaaagtaaatgaattagaaaagcaaatagaaatctttgaaactagagctaaaaatgatgaaaaatatattgagaatttaaccaaacaactagatcaacaaaatagcaatgttaatacactaaacaaactgttggagaatcaacaaattttagctttagaaagtaataaaaagattcaaaaactagaaaaccaattagaagaagaaagacatcttaattattcttttaatacagcgactaatgatagacaaagcgttaattcgcaagaagcaacttttactgaagaatctcaaaatatcaatcaacaacaaaagaaaagccaaccaataaaagcagaagtaaatcataaggatataaccgaagaaaaaaaggatgacagtataaacgaagacgtattagcgaaagaggataaaccatttgaagaaatagaaagtgggcctgaggataaggaagtagaaccacctaaaaagggtttttggagtcgtttgtttggtagctaa

SEQ ID NO: 3547 - DNA, 156 bp, Staphylococcus epidermidis
atgtataaagattataacatgactcaacttactctaccaatggaaacttcagttcttatccccacaaatgatatttcacgacatgtaaatgatattgtagaaacaattcccgagactgaattcgatgaattcagacattatcgttgcttaatataa

SEQ ID NO: 3548 - DNA, 1317 bp, Staphylococcus epidermidis
atgaataaaattataatagtcggtgcagttgctggtggtgcgacttgtgcaagtcaaattcgaagattagataaagagagtgaaatcattgtttttgaaaaagatagagacatgagctttgctaattgtgcattaccttattatattggcaacgttatcgaggaccgtcgtaaagttttagcatacacgcccaatcaattttatgacaaaaagcaaatcactgtaaaaacataccatgaagttatacaaatcaatgatgagagacaaacagttactgtcttaaatcatcaaactaatcaaacttttgaagaaagttacgatacattgattttaagtcctggcgcatctgcaaatcgattaaacactcatagtgatatctcatttactgtgcgaaatctcgaagatactgaaacaattgatacctttattacgaataccaaagcacaacgtgcacttgttgttggcgcgggttacatctctttagaagtccttgaaaatttacatcatagaggtttggatgtcacatggattcatcgctctacaaatattaataaactgatggatcaagatatgaatcaacccatcatcgacgaaatagaaaagagaaatatcacttatagatttaacgaagaaattagtcacgtaaatggacatgaagttacattcacatctggtaaagttgaaaactttgatcttattatcgaaggtttaggtactcatccaaattcacaatttattaaatcatctaacgtcatactgaatgataaaggttatatcccagtaaatcataatttccaaacaaatataccaaatatttatgcattaggtgatgttattacttcacattatcgtcatgtgaatttaccggcacaggttccacttgcttggggagcacaccgtggtgcaagtattatagctgaacaactttctggaaattcgtctattcactttaaaggttatctaggaaataatatagtgaaattttttgactatacattagcaagtgttggcatcaaaccaaatgaacttaaaaatttcgattatgatatggttgaagttaagcaaggagctcatgcaggatattacccaggaaattcaccactacatttacgtgtttattttgaaaaagactcgagaaaacttatacgcgcagcagcagttggtaaacaaggtgccgataaaagaatagacgtattatcaatggcaatgatgaataatgctactgtggatgatttaacagaatttgaagtagcatatgcacctccttatagtcatccaaaagatttaattaatttaattgggtataaagcgcaataa

SEQ ID NO: 3549 - DNA, 822 bp, Staphylococcus epidermidis
atgcaaccttatttaatttgtctagatctagatggtacattattaaatgacaataaagaaatctcaccttacactaaacaagtattaaccgaattacaacaatgtggacactacgttatgattgctactggaagaccctatcgcgcaagccagatgtattatcatgaactaaatatgagcacacctgttgttaactttaatggagcatttgtacatcatccaaaagcaaacgattttaaagtgatacatgaagtacttgatgtggaaatttctaaaaatattattacagcacttcaacaatctcatattacaaatatcattgctgaagtaaaagactatgtctttataaatagttatgattcaagactttacgaaggtttttcaatgggaaatcctaaaattcaaacaggtaatttacttgaaaatcttcatgaagcacctacgtcattacttgttgaagcagaagaagaaaatattcctgaaattaaagatatgttaacacatttttatgcagaaaatattgaacatcgtcgttggggcgcaccgtttccagtaatagaaattgtgaagcgtgggattaacaaagcacgtggaatcaagcatgttcaaaactatttaaacatcgccgacgatcatatcattgcgtttggtgatgaggacaatgatatagaaatgataaagtttgcgacccatggcattgcaatggccaatggcttgaaagatttaaaggaaatagcaaatgagactacgtatagtaataatgaagacggaataggtcgttatttaaatgacttttttaatttgaaaatacgttattattaa

SEQ ID NO: 3550 - DNA, 309 bp, Staphylococcus epidermidis
atggaagaagcactaaaagatagtatcttaggcgctcttgaaatggtaatagatcctgagttagggatagatatcgttaatttaggtttagtatataaagttgatgttgatgatgaaggtttatgtacagttgaaatgacattgacttcgatgggatgtccattaggaccacaaattattgaacaagttaagagtgttttggctgagattcctgaaatttctgatacagaagtgatgattgtatggagtccaccttggaataaagatatgatgtcacgatatgccaaaatagctttaggcatcggataa

SEQ ID NO: 3551 - DNA, 1824 bp, Staphylococcus epidermidis
atgagaaaaaaattaaataatgaatatcgctctgctaaaaaaatacgatatatgcctggattagatggtttgcgagcaattgcagtcattggtattattatttatcacttgaataaacaatggttaacaggtggttttttaggcgtagatactttttttgttatttcaggttatttgattacgagcttattacttaaagagtatgaagatactggaacaataaatcttaaaaatttttggattcgtcgtattaaaaggttattaccagcggtatttgcattaatagtagtagttggaattgcaactttattattgcaccccgagcatattgtaagagttaaacatgatatgatagcagcaatattttacgtatctaattggtggtatattgctaaagatgtcaattatttcgagcaattttcttttatgcctttaaagcacctatggtcactagccattgaagagcagttttacctttttttcccagcagtactcttattatttatggcaatagttaagaaaaagaaaaatgtcatactgatgttttggatcatatccctggtttcattattaatgatggttgttatttctcaacctcacttgaaccattctagagtatattttggaactgatacaagattgcagacactgcttttaggtgtacttctagcatttatctggccaccttttaaattaaatcccaatccacctaaaggattaaaaactgtgattaatagtgcgggtatcataggacttacatttttaattctattattctttactgttagtgatgaaagtgattggatttataacggtggattttatcttatttcaacaatgactttgctaattattgcaagtgttgttcatccaacgacaattttagctaagttattaggaaatcctttatttgtctacattggaaagcgttcatacagtttatacttatggcattttcctgtaattagctttattcatagttattttattgatggtcaattaccaacttatgtttatattatggatatcgtaattactgtattattagccgaattatcatttagatatgttgaaacgccattaagaaaggaaggtctaaaggcttttacatttaaaaaaacttacaaacctcagtttattagaacaattgtaacgttaattatgttgttaccttttatttttatactagttggagctttcgataaattcggaaaagatacaatttcaaataaagcacaaacatttaatacaaacgaggctgatcaatatcttattcatatgataccgattgataatatttcgttaactagcgatggtaaaaccaaagagaataagaaagacaatgatgtatatacacaaattaagccattattaattggtgattcagttatggtagatataggggaacaatttaaaacgaaagtacccaaagctaaaatcgatggcaaagtcggtcgtcaactctatcaggccgagagcctagttaaaaatcaatatagacattataataaaccatcagaccaaatcatacttgagttaggtacaaatggtgattttacaaaagaacaattagataatttaattgacaaatttggcaaagcacaagtgtatcttgtgaatacaagagtgccaagatcatatgaaagtcatgttaatgagttgatggcaaaagcagctaaaaataaaaagaatgtaaccctaattgattggtatagtcgctcaaaagggcatacagagtattttgctccagacggaatccatcttgaaaatgatggcgtagaggcattgacagatgagatattaaaaaatataaagaagaaataa

SEQ ID NO: 3552 - DNA, 2610 bp, Staphylococcus epidermidis
ttggatattaatcaaatgacatatgctgtacaaggtgccttacaaaaagcagtcgcgtacagtaaagaatatgaattacaaaacattgaagttgaagcattgttaaaagctgcaatgaatgaaaatgatagtttatttaaaagtatattagaacgagcaaatattgatgttgatcaattaataaaagcatacgataatcaattaagtcattatccaactgtacaaggtgacaatgttcagtatggacagtatattagtgctaaaacaaatgaattattagacaaagccgagaaatatatgaagtcctatgaagatgagtttatttctatggagcatatattacgtgcagccatagatactgatgaaactactcaaaaatgggtcggcaataaagtagaagtgataaaagaaattataactaaagttagagggggaaatcatgtgacatctcaaaatccagaagtaaactatgaagctttagaaaaatatggtcgtgatcttgtagaagaagtacgtcaaggtaaaatggaccctgtcatcggtagagatgaagaaatacgtaatacaattcgtatattaagtcgaaaaacaaaaaataatccggttttaatcggtgaaccaggtgtaggtaaaactgcaattgttgaaggtttagcacaacgaattgtacgtaaagacgttccagaatcattactcgataaaacgattttcgagcttgatttaagtgccttagttgcaggtgcaaaatatagaggtgaatttgaagaacgtttaaaagcagtattgaaagaagtaaaagaatctgaaggtcgaatcatcttattcattgatgaaattcatatgttagtaggcgctggtaaaactgatggtgctatggacgcaggaaacatgttgaaaccaatgcttgcgcgtggtgaattgcattgtataggtgctacgacattaaatgaatatcgtgaatatattgaaaaagattcagcattagaacgtcgtttccaaaaagttggggtcagtgaacctgatgttgaggatacaatatcaattttacgtggtctaaaagaacgttatgaggtctaccatggtgtacgtatacaagaccgtgcacttgttgcagcggctgagctatctgatagatatattaccgatagatttttgccagataaagctatagatttagtcgaccaagcgtgtgcgacaatacgtacagaaatgggatcaaatccaacagagttagaccaagtaaatcgtcgagtaatgcaattagaaattgaagaaagtgccttgaaaaatgaatctgataacgcaagtaaacatcgtttagtagagcttcaagaggaattatctaatgaaaaagaaaaacaatcctctttaaaatcacgtgttgaacaagaaaaagaaaaaattgctaaagtacaagaaaaacgtgctgaactagatagtagtcgtcaagctcttgaagatgcacaaacagaaggtaatcttgaaaaagcagcagaattacaatatggtacaattccgcaattagaaaaagaattgcaagaatttgaggaagcctttcaagatgaaactggcgaagatagtgaaagaatgattcgtgaagtcgtttcagatgaagaaataggcgacatagttagtcaatggacaggtatacctgtatctaaacttgtggaaacagaaagagaaaagctattaagtttaagtgacatcttacacaaacgtgtagtaggtcaagataaagcagttgatttagtatcagacgcagtagttagagcacgtgctggaattaaagatccgaatagaccaatcggaagtttcttattcttaggacctactggagtaggtaaaactgaattagcaaaatcgcttgcttcatcacttttcgattctgaaaaacatatgattagaattgatatgagcgaatatatggaaaaacatgctgtatcacgtttaattggtgcacctccaggttatgtaggtcacgatgaaggtggtcaattaactgaagcagttagacgtaatccatactcagttattttgttagacgaagttgaaaaagcacatagcgatgtttttaatgtattacttcaaatactagatgaaggtcgtcttacggattctaaaggtagaagtgttgactttaaaaataccattatcatcatgactagtaatattggttcacaagtattacttgaaaatgtaaaagatgctggtgaaattagtgatgatacagagaaagcagttatggacagtctacatgcatacttcaaacctgaaatattaaatcgtatggatgacatcgtgttatttaaaccattatcagttaatgatatgagtatgattgtagataaaattttaacacaattaaatatgagattattagatcaacatatctcaattgaagtgacagaagaagcgaaaaaatggctaggtgaagaagcgtatgaaccacaatttggtgcaagaccattaaaacgctttgttcaacgacaaatagaaactccaattgcacgtatgatgattaaagaaagtctacctgaaggtacaataattaaagtagatttaaatgacaataaagaacttgattttaaggttgttaaacctacgtcttaa

SEQ ID NO: 3553 - DNA, 525 bp, Staphylococcus epidermidis
ttgcaacagaaccttttaaattctataacagctgattttacgaaatttgaattaaaagaaatgacccatcttaaatctacttacgctaaaaatatgtttagattgcttaaacaatataaacatactggttatattaaaataaatatatctgattttaaaaatcgtctagatatacctaaaacttatcagatgaatgatataaccaaacgtgtattaaatccaataattaatgaactttcttcaatttttaataatcttaatatcaataaaattaaggcaaaaaaaggacgtaaaattgaatggctagagtttacctttgacgctgagaaacgtattcactccaagcgacagcctgaaataaaagatgtaggtaaaccacgacagatgataagtcgtgagaaaacgccaaaatggttagaagaacgagataatccgaaatatcagaataaatataacgttgacgaaaattttgaaaaagataaagaagcttttttaaagcaacttaaagtggattgggaagaataa

SEQ ID NO: 3554 - DNA, 732 bp, Staphylococcus epidermidis
atgaaaataactaaattttttactttattcttactttttttgacaattacaattgttttgagtggatgtaataaagatgttgaacacaaaaaaaatatatctattaaagatatcattaatgataaaaaacagcacatgttcttttcaatgtatactgatgaagataataataacgagattgaatctatatacttaactaaaaatggtcaaatgaaacagatctttttgggttcttcagaaatatctccttcatttctactgaatttagatcctaatgaagttaaaaaagtccttgataataaaaagattgattatcaagaaacaccctataaagatgttaaaacttatttagaagtaacaaatgaaaaagggaatgcccttattacatttgttaccactaaggatatttctgaaaagaaagctaaaaaaggtctaggcgatgtactcaaatcagtctattcaaatgataaacaaaccgaaggcttattactttatacaaatgtgagtacaggaagtatacaaagtgctggtgatgctggtaagtatactggccaattaaccaacgataatttacctagtttaatgaatgaatctaatgatgaatctgacagacttgatacaattattaaattaaataataaagatcaaaaaatggtgaatgtttcttctcaagataaggatgtcatcaaaattaaattatctgattttgatacgaaattagaccaaaattaa

SEQ ID NO: 3555 - DNA, 1008 bp, Staphylococcus epidermidis
atggaaaaggaaaatctacttacaggtgacagacccactggtaaacttcatatcggtcattatatcggttccctaaagaaaagagttgaaatacaagaccaatttaacaactttattatgatagctgaccaacaagcattaactgataatgctaaaaatcctgaaaagattcaaaatagcttaatagaagtcatattagattatttatctgtaggcataaatccaataaaatctaatatttttgttcaatctcaaattcccgaattaagtgaattaaccatgcattatttaaatcttgtttctgtttcacgattaaaaagaaatccaacagtcaaaaatgaaatgaaagaaaaaaattttggtgatagtgttccaacaggcttttttatttatccagttagtcaggcagccgacattactgctttcaaagcatccattgttcctgtaggtgaagatcagataccaatgattgaacagacaaatgaaattgttaaaacctttaataatacgtataaacaaaatgttttaaaaagagctaaagctttattatctaaaaaaggaatgggtagacttccggggatagatggaaaagctaaaatgagtaaatctttaaataatgccatttatttatctgattctccagatattattaaacaaaaagtaatgtctatgtatactgaccctaatcacattcgagttactgatcctggtcgagtagaaggcaatacagtattcacttacttagatgctttctgtaaagataaaaagtatttagcagaaatgaaagagcattataaagctggtggcttaggtgatgttaaagttaaaaaatacttaaatgaaatcatacaagcagaattagaaccaattagaaatagaagaaaccaatatcaaaataatatggactatatatatgaaatattaaaagacggaagtaatcaagctcgattcatagcatctcaaactcttcacgaagtcagagatgctatgggaattaattatttttaa

SEQ ID NO: 3556 - DNA, 138 bp, Staphylococcus epidermidis
atgagccattatgagccggaattttactttgaaccttttatggctgacgattttgcattatttttaggagttattcatttcatagttattatgcttatatatttagttatctatggtttttctcatcgtaataattaa

SEQ ID NO: 3557 - DNA, 186 bp, Staphylococcus epidermidis
atgggatatgctgaaaaagatattgtttttaaagatcaaccatatagtgagtatgagtataacgtgacaccagcaccagcaccatggacagatgataaagaatataaggtgtggggggaaacagatttacaaaagaaagactcctattataaatatcttttagaatcagaaccttacagaaaataa

SEQ ID NO: 3558 - DNA, 705 bp, Staphylococcus epidermidis
ttgaaaaatttcgcaaaactaattttggtgggcattttagtatcggggtcagggatagcgagtgtacaaacaaatataactcacgcaaaagaaagtcacgattcaactcctcaaaatattaaattagtgggaacgtatgatacttctcaagttgattccaaaacgatgaaacaatttaaagaaatagaaaaagaagataataatttccacataactaaacatggaaataaagtcgttgtagaagacaaattacctaatccagagaataaaacttcaagttattcagctgatggtagtgctgaaaataatacaaaagtaattaatttctctgattttgttggtaatatggatgggaaagatgatggaaaaatatcggatgggataaccttttatagtggtaaatcatataacggacaacacgatggtcaaaaagtaaaaaaagggactcatgtacattgtaatagatttaacggaacaaaatctgatcatagatactggtcaaaaaaacatcctagagcttatgtagatttttataaaagtgattgctggtatcacgccaaagcttataaatgttcttccttgggaaaaatgactaaatgcgatggtttgaatagtatttatagaaaaggtgtcaaagattgctcatcatggaaaggtaaacccaaacataaaaactggcctaaaacagcatggtatagaaattaa

SEQ ID NO: 3559 - DNA, 360 bp, Staphylococcus epidermidis
atgaaaaaagtattctatgttattggtataataatttttttagcaatttgttatatttttgtaaactttttctattttgattcatgggcgtgtcattcaagtgaaaagcaattaaataattatgttaagcatgaagatactaagaaattaaaagaggttgctaaagataataaaacgtatcaattcttaaaaaagcaaaataaaatttctatagatggaaaatctgataatcaaggaagtgggcatataggttattatcgtattgatatcaatggaaagccagcttcattatttataaagattaagtatgcatttcttccagaaataccaaagataaaaacagtagagttagataaataa

SEQ ID NO: 3560 - DNA, 750 bp, Staphylococcus epidermidis
atgaaaaagttaatgatgagcttattatgttgcacaatatgtggaacagttttaactacaggaagtgtaaatgcacaaggtgatagctcaactaactctgagtcgttaaaggaacttcaaaatgaaggtattgtgtctaaatcaattactgaacaacaatggcaacaaatgaaagctcaagagcgtaaagatgaagcagaatttgagaaaacagctgaagtacaatggcagaaacaacaaaaacaagatcgaatagatcgagaaaatcgttcaagaaaaaagaaatttcatttgaaaaaaggtgattttttcatcacaaataacgtaagttcaaaagggtttacaggtcatgctgcaatatatactggaaaaggaaaagttaaagaagcgcctggatatggacaacctgtgagggtaaaaagttttagtgattggaaaaagagtactttgaaaaaaagaaaaggaagtcccaaacatcgttatatcaaggtttatcgagcaccaaaaaaatatagaggtaaagctggaaactatgcgaaatctcattttaacggtgtaccttacagtataacgacgaatccatattctaaaagcgttacatactgttcgaaacttgtttggcaatcgtattattatggtgccggacgattatcagttcttccggttgttacatctcaatttattattgagccatatagtctcaataaatatattccatcaaaagcagttaggtcttataaaagaagctaa

SEQ ID NO: 3561 - DNA, 396 bp, Staphylococcus epidermidis
atgcaaagaaaatacaaaattataggtattatttttatcgttcttcttattgttttaacattaatttttagtatagtgcatcattatgctaatgttcaaaaacatgaagaagctaaactaagacaaaaagttcaccatattttcaaacaaaaaggttgggaagataaagttaaagaagaaaaaaatatatttacgttcaatactggggataatgatttacaagtcacttttaaagatgagccttataatacgtatacatactctattgatgaaaacaataaagtatatggacatgctgttttgaaagatgaatatgataaagattttgatagtaaaaaaaagtacaaagaatatttaagaaaaatgcattttgaagaaaaatatgatctgaaataa

SEQ ID NO: 3562 - DNA, 180 bp, Staphylococcus epidermidis
ttgaaatcaattgttcattttatttgcctctttatcatattttgtatttttggatatgtgatagatttaatattttttaaagaaataaatatttttctgattttagaatcagcctttattttatcattactaatcatgccgatattaaagattgtaaaagagatagaaattgaaaaatag

SEQ ID NO: 3563 - DNA, 438 bp, Staphylococcus epidermidis
atgataaagttactttcagtttttattgcaagtttattagttttaaccggattatctttttcttcaattaatcaaggtaatactgcgagtgctaaaacaaaatataaaacaactataacttacaaaggtcaaaaatatgtatatgttggtcattataaacaccatttttctaaaaaagtagttaaattttctaaaggagttcattcaggaaacaaattagtatctgctgctagtaaacttagtaaaaatggttatgttaaagcatcctcggctatttataaagcctttgattttggattgaaaaatgaattaaaaggtagctatttttacacagcagctaaaaaaggtacaggcgtaacaatttcttatgatatgtatactgcaacaacaggtccgaaccatactatagctaagaattttaaacatagttataattaa

SEQ ID NO: 3564 - DNA, 120 bp, Staphylococcus epidermidis
atggaaaatattttaagaataatagctgaaatattatctaatatctatgaattcataaattatggtctaaaattcaaccgttcaaaaaagcttgaaaataaatgtgaggggaaagattaa

SEQ ID NO: 3565 - DNA, 387 bp, Staphylococcus epidermidis
atgaaaaaagcaatatttagtattattatttctcttattttagttctaactgctactggatgtagtaatagttctaaagaaaaaccaattaaaaaaagtgcattagaaattaatcctacaagtaaagctgttaatattacagtaaataaaaaagaaaataacaaacctgaaaaaattgggaaagtgtatcgatataaaaataacaatgcaaaagaaattactaacgacggtattaaaaaagatactaaagatacattgatttggaaaggtgtagcaaacaaatacgataatgtaaaagatttattaggagaaagtattctttatgaagttaaatataaaaatggggatataaaaaaattcgagagaaaaattaaatatactgaataa

SEQ ID NO: 3566 - DNA, 153 bp, Staphylococcus epidermidis
atgaactatttcagatataaacaatttaacaaggatgttatcactgtagccgttgggttcaagaatatgccccaattttatatcaaatttggaagaaaaagcatcaaaaagcttattacaaatggcgtattgatgagacgtacatcaaaataa

SEQ ID NO: 3567 - DNA, 930 bp, Staphylococcus epidermidis
atgtctaaaatcgtcgtagctttgggtggtaacgctttaggacaatcgcctaaagaacaattagatttattaaaaagtacatctaaatctctagtaagtttaatcgataaaggatacgaaattgtaattagtcatggtaatggtccacaagttggaagtattaacttaggtttaaattatgcggcggaacacaaacaaggtcctccttttcctttccctgaatgtggtgctatgagtcaagcttatattggctatcagatgcaagaaagtttacaaaacgaacttcattcaatgggcatagataaacaagttgttacgctagtaacacaagttcaagttgcaagcgatgattctgctttcaataaccctactaaaccaattggattattttatacaaaagagcaggctgataaatttacgaaagaaaaaggttatacttttgtagaagattctggacgcggctatcgtcgcgttgtcccttccccacaacctataagtatagttgagttagatagtatagaaacattaatcactcatggaacactagttatcgctgccggcggtggtggaattccagtaattaaggaaaatgaagtttatacaggtgttgatgcagttattgataaagataaaacgagtgctttattagcagcacatttacaatctgatcaattaatcatattaactgctgtggaccatgtttacattaactatggaaaagaaaaccaaagaggtctcgatgaagtgtctgtggatgaaatgaaaaaacatatctctgatggtcaatttgctaaaggaagtatgcttccaaaagttgaagctgcacttcaatttcttgaaaaaaatactaaaggcagtgttttgattacatctctagcaggattaggggacgctttagacggtaaaataggaacattaattaagaattga

SEQ ID NO: 3568 - DNA, 999 bp, Staphylococcus epidermidis
atgaaaaatttaagaaatagaaactttttaactttgttagacttcacacaaaaagaaatggaatttttacttaatttatctgaagatcttaaacgcgcaaaatatgcaggaatagaacaacaaaaaatgaaaggtaaaaatatcgctctactttttgaaaaagattcaacacgcactcgatgtgcatttgaaacagcggcttatgatcaaggtgcgcatgtaacataccttgggccaacaggttctcaaatgggtaaaaaagagtctaccaaagatactgctcgtgttttaggtggaatgtatgatggcatagaatatcgtggattctcacaaagagtagttgaggatttggcaaaatattctggcgttcccgtatggaatggtttaacagatgaagatcatcctacacaagtacttgctgattttttaacagctaaagaagtattgaaaaaaccatataatgaaattaacttcacatatgttggagatggacgtaataacgttgcaaatgccttaatgcaaggagcagcaatcatgggcatgactttccatcttgtatgtcctaaagaactaaatccaactgatgaattattaaatcgttgtaatgatatagctgacaaaaacggtggtgaaatccttataactgacgatattgatgaaggtgtcaaaggatctgatgtaatttacacagatgtttgggtatctatgggtgaacctgatgaagtttgggaaaaacgtatcaaattattagaaccataccgtgtaactaaagaattaatgaaaaaaacaggtaatccacatacaatttttgaacattgcttaccatcattccatgatactgaaacaataatcggtaaacaaattcaagaaaaatatggtctaactgaaatggaagtaacaaatgaagtatttgaaagtgaacaatcagttgttttccaagaagcagaaaatagagcacatacaataaaagcagtcatggtagcaacattaggagagtaa

SEQ ID NO: 3569 - DNA, 690 bp, Staphylococcus epidermidis
atgtatgaagaaaatatttatattaaaaattcagaatatgaatttgataataatcttaaacaattagcatcatacttaaatattcctgttagtattgttagaccttataaagaggatttaacactttatcaatataaaaaaggacaagtcatatatcattcaactgatcaaataaaatttgtatactttttagtaaatggttgtattttacatgaatcttctaatattactggtgacaattatttaagattaagtaaagacgaaaatatatttccaatgaacttcatatttaatgaaacccctgcaccatatgaaatatgtacagctttgacagattgtaaaatattaactttaccgaaagatttacttgagtatctatgtagaaagcataatgaaatatttgaaagtctcttcaagaaacttaatgagactattcaatttcaagtagaatatattatggcgttaagagctaattcagctaaagaaagaattgaaagaatactacaaattttatgcctttcaattggggatgataatggagaattctatgaattaaaacaaattatgactgttcaattaataagtaatttatctggacttaacagaaaaactactggtgaaataatcagagaattaaaaatagaaaatattatatatcaagataaaagaaattggattataaaaaaataa

SEQ ID NO: 3570 - DNA, 1422 bp, Staphylococcus epidermidis
atggatgaaaataaattaggtaaaacttccttaattggtttagtcataggctctatgataggcggtggtgcattcaatatcatctcagatatgggtggccaagctggtggacttgcaataattatcggttggataataactgctattggtatgatttctcttgctttcgtatttcaaaatttaacaaatgagcgaccagatcttgatggaggaatttatagttatgctcaaacagggtttggagattttattggtttttcaagtgcttggggatattggtttgcagcatttctaggtaatgtggcttatgcaaccctattaatgtcagctgtgggtaactttttccctatatttaaaggaggtaacacacttccaagtattatcatagcatcaattttattatggggtgtacattttttaatacttagaggtgtagaaactgcagcgtttataaatagtattgttacagtagctaaattaatacctatatttctagttattatatgcatgatagttgtattcaacttcagtacttttaaatccggtttttatggtatgactagtggaagtgttggcgtttttagttggggagatacaatggcacaagtaaaaagtactatgttagtaactgtatgggtattcacagggattgaaggagccgttgtcttttctggacgtgcaaagtctaaaaaggatgtaggaactgctaccgttattggtttgatttctgtgctagtcatttatttcttaatgactgtactagcccaaggtgtcattcagcagaaccaaatttcaaaacttgctaatccatcaatggcacaagtattagaacatattgtaggtcattggggttcagtgttagttaatataggcttaattatctctgttttaggagcttggttaggatggacattactagctggtgaattaccattcattgtagctaaagatggacttttcccgaaatggtttgctaaagaaaataagaataaagctccggtcaacgctttaattattactaatatattagttcagttatttttaattagtatgttgtttacagatagtgcctatcagtttgcgttttcacttgcatcaagtgcaatcttaattccatatacactcagtgctttttaccaggttaaatatactattcaaaataaatctaaagctaatttaaaacaatggataataggaattattgcatctatttacacaatttggttggtttatgcagctggattagattatttactattaacgatgttgttatatatacctggattactcgtatacagctacgtacaaagggataataacaaacatttgacaaaattggattatacgttattcatattcatcattgtacttgcaataataggaatagttcgtttgattacaggtaatatttctgtattttaa

SEQ ID NO: 3571 - DNA, 1236 bp, Staphylococcus epidermidis
atggtacaaggacccattcaagtaaatagtgaaataggcaaattgaaaactgtgttgttaaaaagaccaggaaaagaattagaaaatttagtacctgatcatttaagtggtttattattcgatgatattccctacttaaaagttgcacaagaagagcatgacaaatttgctcaaactttgagagatgaaggaatcgaagtagtttatttagaaaaacttgcagcagaatctattactgagccagaagtacgcgagaacttcataaacgatatattaacagaatctaaaaagacaatattaggtcatgaaactgaaattaaagaattcttttcaaagttatctgaccaagaacttgtaaataaaatcatggctggcgtacgtaaagaagaaattcaacttgaaacaactcatttagtagaatatatggatgatagatatccattttacttagatccaatgcccaacctttattttacaagagatccccaagcttcaattggtagaggaatgacaattaacagaatgtattggagagcacgacgtagagaatctatttttatgacatatatactgaaacatcatccaagatttaaagataaagatgtaccagtatggttagatcgtaactcaccatttaatattgaaggtggagatgaattagtattatcgaaagatgttttagctattggtatatcagaacgtacatcagctcaagcaatagaaaagttagcacgtaatattttcaaagatgcaaacacaagttttaaaaaaatcgtagctattgaaatacctaatacacgtacatttatgcacctagatacagtactaactatgattgactacgataagtttacagtacatgcagcaatatttaaagaagaaaataatatgaatatatttaccatagaacaaaatgatggtaaggacgatataaaaattactcgttctagcaagttacgtgaaacacttgctgaagttttagaagtagaaaaagtggactttattccaacaggtaatggcgacgttattgatggtgcacgtgaacaatggaatgatggctcaaacacattatgtattcgaccaggggttgtggtgacatacgatcgcaactatgtatcaaaccaacttttacgcgacaaaggaattaaagtgattgaaattactggtagtgaacttgtacgtggacgcggaggcccaagatgtatgagtcagccgttatttagagaagatatttaa

SEQ ID NO: 3572 - DNA, 447 bp, Staphylococcus epidermidis
atgaaaaaagaaaaacgtttaaatcttatcttaactgttatacaacagaatcagtttaataaaaaacaacaaatagtggattacatggcaagacattttggagtttactatagcttgacaactatttctcgtgacttacaagaattagaaatttacaaaatccctgttgaaaataaaaagtatatttacaagaaaataaatcaaacaaatcaattaagtgcaaaaaaacaattagaaatatttagtgatgagattattgaatttataacgctaaataactatgtcttaataaaaacatctcctggctttgctcaaagtataagttattacatagatcaattacaaatgaaagaaatattaggaattattggaggtaacgatactttgatgattttgacttcttcaaatgaaatagcagaatttgtttgttatcaattattcccttaa

SEQ ID NO: 3573 - DNA, 168 bp, Staphylococcus epidermidis
gtgaaagaaaatatgactgtagattgtgataagaaatcaagtagtagagttaataagaggagatcagtaaaaagattattgaagaaatacggatatccatctgacttagaaacaatagcaatcaatcaagtggttgaacaagcagagatgatggctagtaatcagtaa

SEQ ID NO: 3574 - DNA, 264 bp, Staphylococcus epidermidis
atgtcagtgttcgatgcattttataaagcgttaaaaggaaaacaagttcttgtttattctggactatttaaagacgcaagaaagaaattaaaaaatggagaattagattacttaaaagaagttgatccgaccgaatatatttatcaaattttttatacttggaataaaaaagagtatttagcgagtgaaatttttgatttaacagaaagtgaagaacaagaaatcaatcatcaaatgattgatgaaattgaagaagaaaaataa

SEQ ID NO: 3575 - DNA, 1425 bp, Staphylococcus epidermidis
atggaaatggaattcaatgagaacaatatcgacttagagacgattatcagagatgaagttaataaatatttatctagagatattggagacttacctgcgacacaacaggcaccgctcgagttgagagagaaatatgaaaagatggaagtgccgaataaagggcgagatatctatgaagtactcaaagatttaaataatgaagtgctgaattatttatatcgtccgaaccatccacgttcattctcatttataccaggtccagcatcacgtctatcatggcttggagacattttaacaacagcaaataatatccatgcctctaattttgccaatgcgacgctgccaattaatattgagcgtaatttaattaactacttggtaggaaaaatcggttatgagatcaaaccggccggtggtgtctttgtatctggcggttcaatggccaatttaacagctatcgttgcggctagagatgcacaggtagaaatggaagatattaaaaaagcaaccgtttatcttacatctcaaacgcatcattctgtaggcaaagccttgcatgttgcaggcttccttaaaaataatatccgcagaattgagtacaacgatgactttacaatgaatacagatagcttaaaagccgcaattgataaagatattgaagaaggttacaaacctgctatggtgattgcgactgcaggcacgactaatacaggttctgtcgatgatttcaccacacttggagatatttgtgatcactacaatctatggctccatgtagacggtgcttatggactatcacatatcttatccgataaatcacaacacttatttaaaggcattgaacgttcagatagtgccagttgggatgctcacaaattactgttccaaacatatagttgcgctatggtaatcgtgaaagaaaagaatcatctgctgcaaagctttggcgaagatgctgagtacttggatgatattgcttcagatgatgatgtgattgatccagaaatgttaggcattgaacttacacgccctgcacgtgctttaaaattatggattactctgcaagtcattggtgaagatgaaattatcgagcgcattaaatacggcgaaggtttagcagaatatgcagaagaatacgtgtcaagtctcgataactggcgtattatctcacacgctaatctttccattgtgaacttcagatatgaaaacagtgatttaactgaagcacaaaataatcaactcaatagcatggctgcgcaaaaaattgcagattctggttatgccattgcttataccacagtattgaataaccaacgtgtcattcgtttatgtacaacgaacccattaacgacacatgatgatatcagagaaacaagaaatcgccttgatcagtatattggtgattacgatatgaaagatgcttaa

SEQ ID NO: 3576 - DNA, 822 bp, Staphylococcus epidermidis
atgactttaaaaaagaattcaaaaacagagagatgtgaaaatgtgaaacattcgaaaaagttatttttatgcgtcagttttttattaataacgatttttattggtggaggtggatttatgaataaagacgagagtaaagaaacggaaatcaaaaaaagttttaataaaacgttaagtatgtatcctattaaaaacttagaagatctatacgataaagaaggttttcgtgatgaagaatttgataaagatgataaaggaacatggacactttactctgaaatggctattcaacgtaaaggtgatgaccttgaaacaagaggtatgaaattagatatagatagaaatactaggacatctaaaggtgaatatattataagcaaagtcacttatgaaaaaaaaggaagaccccatcatcatgataaaaagtatccaataaaaatgaaagataataaaataattccgattgaaaaaagcattgataatagactaaaaagtgaaatagaaaattttaaattctttgcgcaatacgcaaactttaaagatttaaatgattataaaaatggagatatttcatataatcccaatgtacctagctattcggcagaatatgatttagaaaataataattacaatgtaaaacaattaagaaagcgatatgatattcccactaagcaagcacctaaattattattaaaaggaactggtgatttaaaagaatcatcagtgggatataaagatcttgaaattacttttgtagaaaaaagtggagaaaatatatatttttctgatcttatgaactttaatccaagtaagggtgagtag

SEQ ID NO: 3577 - DNA, 234 bp, Staphylococcus epidermidis
atgcaaatacagaaattaaagaatggcaaagagtttccttcaaatcttgagtatgtagatagctacacgaatcctaataaaggaacgacgtcaactgtctttttaaatcaagatacaggaaaagtgactgggggaatggcagggacaaatgtatatggggaacaattaaaaaatacgcttaaccccttttattttattaaggataaacaagaggcaatagatggtcaatgctag

SEQ ID NO: 3578 - DNA, 450 bp, Staphylococcus epidermidis
atgctagattttgccgcagatgcaaacattgtattaaacactattacagataaagatgcgcattttaaaaacacgcaacaatttatcaaagatattaaaaaagactatgagatagatacgatcacaggtcactctttgggtggccgtgatgcgattatcatagatgttagtaatgatattgacaatgtggttgcttataatcctgcactactaacggttaaagattttagaggaattataaaggaatcaatatctagctttcatgataaagaaaaagatgcatatatagagtcttttattaaaagttatgatggtaacatattaagaattgtttctgataaggatgaaataaatggcattataaaaaagactgaatatgtatttgcaggaaatgaaatggtaattaaattagataagataggtgaaagtttaaagcaaattatagattga

SEQ ID NO: 3579 - DNA, 1731 bp, Staphylococcus epidermidis
atgggaaacttattaaaaatagaaaatattaactattcattagagaatttagataactcagtacgtaagtggaatacttcagcaagtgggaaatttttattgagatatccgactgtgtatatcattaatgacaaaaagagtgaaaataattttgaagtttatgtgggagaaacagctgatataagaaatagaacaagacaacatcttaatgctgatacgaaggtgaaatcattttgggaagatttttctgaatcaaaaaaatcatcaatgtatgtgattggtcatgaattatttaataaatctttgactctcgatattgaaaataggttaatgcagtatttgttgagtgtagagaatatatctagagttcataatagtagaacaaatcaacaaaatgaatattatacatcggaaatgcttgatgaaatattctctgaaatatggcaatctttaaataaaaaaaataaatcgttatttcctatagaaagtattattaaagattcagctatattcaaagcatctccatttcataaattgacacaagaacaaattaatgctaaagaagaaatactaactaaaattaaagaaagtatacttttaaatgaagatggacaattaattattgttgaaggagaagcgggctcgggtaaaacagttctaatgagtacattactttatgaactaggaaaatataatttggatttagatgaaaatttagatattcatcttttagttaaccataatgagcatgtttctatatatagtcaaatagcttctaaattaggtatagctaataaaaaaaataaaattgttcaaaaacctactagttttattaataacaactcatcagatgaaaaagtagatgtggttattgttgatgaagcacacttacttttaactcaagggaagcaaagttatcaaggtaaaaatcatttagatgatttattggcgagagccaaggttgtggtaattgtatttgatataaaacaagttcttactactgaacaaatttgggaagtagataagttgaatgaatattttgataaagccaaaagtaatagtaatcatgtaacattgagaaatcaaatgcgtataaatagtgatatttcaactgttaattggatcagaaacttagttgattatcaagtaataaactctatacctaaagataaattaggatatgatattaaaatctttgatacaccagatgagttagaaaaagctattaagataaaagctgcacatacagatagtggtatatcacgaatgcttgctacatttgattggaagtatggaaccaagccacctaatcatgaagacttttggagagttaaaatcggaaattggtccatgccttggaattatcaattaaaagctaatagaaatcaagttagcttaccgtgggttgagcaagatcaaacaattgatgaaataggctcaacatttactatacaaggtttagatttaaactttgcaggtgtcattataggaccttcagttaaatatagaaatggcaaaattatttttgacaaaagtgagagtgctaataaaaaagctacgcaaagaagaacgttaaaagacggatcaaaacagtatttttcagaaatgcttttgaagaatgaattaaatgtcttattaacacgtggtgtaaatggcttatatatttatgctgtagatgatcagttaagagaagcgctaaaaatagcagcaaagggtgagagcaatgggtga

SEQ ID NO: 3580 - DNA, 342 bp, Staphylococcus epidermidis
atgggtgaaattaatgatatcgtgaaagaaattaataaatttagagatgctcgtaactggagacaatttcataatgagaaagatttatcattgtccattactttagaagcagctgaattattggaattattccaatggaaaacatctgatgaagtagtagaaactaatcgtgaaaggttagctgaagaaatagcagatgttttaatatatagctatatgttagcagacaatttaaattttgatatcaatgatattatccgtaagaagttagtgaagaacgcggagaagtatcctatagcaaaaagtaaagataacaaaattaagtataatgaattgtcttag

SEQ ID NO: 3581 - DNA, 117 bp, Staphylococcus epidermidis
gtgattataattgattcgaaaattaataaacaaatcgctaaaaatctctcgcttgaaggtatgatagtgacaaaagaacaacaaaaacaaatacttgctactattaataataaataa

SEQ ID NO: 3582 - DNA, 705 bp, Staphylococcus epidermidis
atgacaaatgaagttaataaagaagaaaaaattaaaaagagttttgagaaaacattaagtatgtatcctattaaaaacttagaagatttgtacgataaagaaggatatcgagatgaagaatttgataaagatgataaagggacgtggttactttactcggaaatggctatacaacgtaaaggagaagatttagaaactagaggtatggtgttgaaaataaatagaaatacacaaacatctaaaggtgattatataaccaataaatttacatacgataataaaggaagacctcaaaataataagaaaaaatatccagtcaaaatggaaaataataaaataatccctattaaaaaaattgaagatagtaagataaagagagaaatagatgaatttaaattcttcgctcaatatgcaaattttaaagatttaaaagaatataagaatggaaatatatcatacaatcccaatgtacctagttactctgcagaatatgatttagaaaatagcgattataatgtaaaacaattaagggaaagatatgatattccaacgaaacaagcaccaaaattattattgaaaggttcaggtgacttaaaaggttcttcaattggtactaaagatgtagaatttacctttattgaaggcaagaaggagaacatttatttttctgatagtatgaactttatgcctagcgaggatgattaa

SEQ ID NO: 3583 - DNA, 858 bp, Staphylococcus epidermidis
atgattgaacttaacaaatttataaaagtaccgaatttaaataaaactaaaataaagtttaatatgaatgcaggaaatgttgaaataagagcttgggatttactttttaaagaagatgaaactgaatgggaacaaattaatgcatggaaaacaaaacatccaaacaacaatttgaatcatgcagattacctactagcttttgctcaatattatccatatggtccagaatattttatttttgggggattatataaaatcaaaaagattgaacctgaagtttttgatgaggtaggttatgaattaactttaatggatgattataaagaatatagaaaaagacttatcgttaaattaaaaaaacctataggtagagatttatataatagattatataaaaatattcaaggtactttagaacctgaggtttatgaaattgcgcctaatacaaaattaggacattttcctggttatcagaatgtaaccttatcccacccacaaatgcaacaaattatattaagaaatgaacctagttggaaacaagctttaatgaatgtaaaaggtgtttatgttataaccgacttaagtaatggcaaattatacataggatcagcatcaggtaatacagatggaatatggcaacgatggtcggactatgccaatatagaaaatctaacaggtggtaataaattattaaatgaaattaaattagataaaggaaaagattacatcgtaaataattttcaatattcaattttagagatttttgatacaaagactaaagcaaacactataatcaatagagaaaattattggaagaatgtattttgcactagaaaatatggtatgaactataactaa

SEQ ID NO: 3584 - DNA, 699 bp, Staphylococcus epidermidis
atgaataaagacgacggcaaagaaacggaaatcaaaaaaagttttaataagacattaagtatgtatcctatcaaaaatcttgaggacctatacgacaaagaaggatatcgagatgaagaatttaataaaaatgacaaaggaacatgggtaataacttctagtattaatattcaacaaaaagggcaagatttaaaaactagacgaatggttttatttatgaatcgaaatacaagaacgtccaaaggtaagttcatgataactgaagaaaaagaaaaaagtgatataggatttcagactcgaaagaaagaatatccagtcaaattgattgataataaattcattccatctaaacaaataaaagatgaaaaagtaaaaaaagaaatagaaaactttaagtttttctcacaatatggcaattttaaagatttaaaagattataaagacggtgaggtatcttataatcccaatgcgcctaattattcagctaaatatcaactcagtaataatgattataatgtaaaacaaataagaaaaagatatgatattccaaccgaacaagcccctaagttgttattaaaaggtacaggtgatttaaaaggttcatccacaggttctaaaaatattgaatttacttttgtagagaaaaaaggagaaaatatttattttactgacagtgttgaatacacgccaagtgagtaa

SEQ ID NO: 3585 - DNA, 489 bp, Staphylococcus epidermidis
ttggttgaatctaatcaaattgatgattttgttaagtataaatatgtaagtaatgtgatagataatttaaagcggctttttaacgaattgcttgaaatacgatactacgtagatgaagaaaaacctcatcaagaaaataatttaagtgtgacttttactcttacaaataaatgcaatctttcttgtagtcattgtgctctatctgcttctcctttatcacaagatattttaagtacaaatgatgtcaaatatccaattgataagattattgacgtcaacctgaatacgcttattctaactggtggagaaccctttattagaaacgatatattagaaattatttcctatataagaactaactttaagaataagttgatgattatgactaacggtatgttaatcagaaaaatttcatttcatttaaaaaaaagaatcgtatacgtcaataagtgtgaaatggcatccttacgtgtgcacatggcgtcgtag

SEQ ID NO: 3586 - DNA, 876 bp, Staphylococcus epidermidis
atgaataaaatagttatcaaaggtttgagtaaatcatatgatggaaagaaagatgcgcttaattcattggatttagtaattcccaatggtatgtttggtattttaggaagaaacggatctggtaaatctacattaatgaatattattgcaacaattcttcaaccaagtaagggaacagtaacaattaatggtattgaaattaagaattcacaaaagattagacaaatgattggttacttacctcaagattttgatttttatcctaatatgaaagtctcggaagttttatactatttaggttttttatctaaaataaatcaaacggatttcgataaatatgtagatttaattcttcgtaaggttaatctaattgattataaaaataaaaaggttaaaagtttatctggtggaatgaaaaaaagattaggtatggcgcaagccattttacatgaccccaaagtaattattgtcgatgaaccaacggcgggattagatccagaagaaagagtaaggatacgcaatttactatctgatttagctgaaaacaaaattgtgattatatcaactcacattgtgagcgacattgaatcaacttgtaataggattgctattttagataaaggaagtcttgtatataaaggtgacataccatcgttgatacaacaaagtgatgatcatatttatgaaatcaatctatccccatcggaattagaatcatttagagaaaatgacttatttattactaaaactcaagaaattgaaaataaattaaaagttaggtttatttctgaaacaaaagttgcaaacgctaaaaaagttaaagctgattttgaagatgcttatatgtatttttttaaaaacaacaaggaggtttga

SEQ ID NO: 3587 - DNA, 1122 bp, Staphylococcus epidermidis
atgcgtctatttataatggaatttaaacatttaatgtttagtaagacatttctattttattgtttattgattattatattcacggtattgaattgtcaacaagttctcaaacatcctattaattcagatgtatatcaacctcaaaatatgactatgtattctactgataaaaacataataatgtcaaatgaaattaaagaattaaagaacgaagtacatcaaaataactttaaaacgtatcaatttggatttttaaagcaaaaaaagttaaatgaccaacaaatttctaaaataaagaaactaatatcaaaaatggaaaaaacgaataattttcatcagtttaaaaattattctaatagcgtatcacatgttgttggatggggatctcaatattctaaaaataatatctcattatttggaattaagaatatgagtaagaacacgtatgttaaagagaagaatattataaaaaataaagagtactattatggagcatatagtagatatttttcagatattatgggggtagtgttaggaatacttccattctttttgggagctcaaatgattcttcaagacaaaaaaagtaatgccattaaaacgattcattctaaatctatatcatcataccaattaatttctacacgtgtatttactattcttgttttggcatatttaccagtgttattagtatcaatatattttgttacttgtttatcgatgatacatcagatatcgatgttttctttattaattttttataaaattttaatcttgtggacattacctactttaatatttactatcgcgatgggattgtttgtcacaattatattgaattcttatttaggtgtaatgatacaaatagtaatttggtttatcaatttaaatataggttctcgtgccattgaggggtactatggttctctattgattcctcgacataatactttatttaacgcagtttttttctataatcacttcaatcaaattttagctaatagatttacatactttggcttaggtttacttttaattctacttagtacatatatatttgacctgaaaagaagaggggtaggttttaatggcaaaatttttactaatagatatcaaaactaa

SEQ ID NO: 3588 - DNA, 612 bp, Staphylococcus epidermidis
atggcaaaatttttactaatagatatcaaaactaatttagtcaaactttacataggaattttaattctattatttggtggaatgtttatttttggtgtatctaatcttaatcatgagagggttacacaatatattgagttaatatttactatactaggcatattgttatttactgctatctattctgtagatcaaaacaagaagtccaagttaactattggtgcaaagtgtcatgactaccaattcgtatttatgcttagattagtgataacaatcatctatatactgttcctaattacaatcaatttatttatattttatttatttaactcaaatatcattgttttgagggatatgtttattgctataaccagtactttatttataggctcaatatgtttattaacaagtattcttagtggtaatacattaaatggcttaatgtttggacttgtatatttcttattctgcttaggatttagaaatctaggctttatgtatttattctcagaaacctttaactttccattttatataaaaatatttcaatttttattaggaattgtattattaatttttagttacactattatcaaaaaaatacaaaattaa

SEQ ID NO: 3589 - DNA, 666 bp, Staphylococcus epidermidis
atgtataacataatgattgtcgacgatgaagaaaaaattgtgtcatttataaaagaaagtttatacttagaaggttttaacactattgtcgcttataatggacgtgacgttttaaaacaaatcgatgacaaaattgatttaatcattttagatattaaaatgccatatatagatgggtttgaagttgctcaatcacttaaagagagtaatatacctattatttttcttactgctaaagataatcttgatactagactgaaatgtttctcgcttggtgcaaaggattacttacctaagcctttctatatggaagaacttataattcgaattaaaaatgtacttaatcaaagtcattctcaaagtttgactcccaatataaaaaaaactaaagaattaattatttattacgatacatatagaattgacgtaaataacatgacgatagatattacaaaaaaagaatttgaaattataaaattactatctttaaatcctcaatattattttagtaaagaacagatatatgattcgattaatttaaataagacaggcaatactcaagttgtggctgaacatatacgtaaaataagaaaaaagttaagttgttatagtcgttttgaatacatcgatacaaagtggggagttggatataaatggctagagtag

SEQ ID NO: 3590 - DNA, 1092 bp, Staphylococcus epidermidis
atggctagagtagaaagtttaaaaagaaaaatgactcgtcttatcatagcaattatagttgtcagtgttggattagtatttttactacaaattttgcttaatgtattagaattttcaaattttggaaagtctttatacactaatttttggaaacaaccgcattacattttctcttttaccagcgcatgtatcagtattatgactcctttgttaatcatttacgtgttcacacagtttttttataaaaagtacattacaactagtattaattatcttaatgatacgattcaaggattaaaaaataaccgcactgatgttgaatataagaaaatgagtatttcagaattcaataaagtgattcaagaagttgagcatatacatacttatcttgctaatagtattaaagatcaattatctattcaaaataattttaaaagaaaactcgaaattttagaacatgatttaaaaacaccgttaaccgtccttcaaggtcatattgaattattaagaaagattaatcgttctaatctgtctcaggaggaaatacattttaaaataaacaaggaagcagacattgcgttacaatctattgatagaataaataatcaattacaaatacatattaaaaacatcaacctattgccaaaccattcagatacaattcatgttgataaggtaataaaaatcattaaagagagctataatcaacaatacatattaaaggagagagaactgattattgatgttgatcatgatttcccctattataccttaaacattaacaatcaagttctataccacgtcatcgataatctaattaataacgccttgaaatatgctgaaaaacaaatatctataaagtttaaagttatcaacgaccatttactaaacttcaccataaccaatgatggaagaatatttactgaagatgaattgaattctgccaaagagtgggggacaaaaggtaaagaatcaaatgggtctggtattggtctatattttgctaatattgtgcttcaacaatataatagtgaacttattttagaaaatgagaataagcatgcaaaagtaagtttcaatattcctgtttaa

SEQ ID NO: 3591 - DNA, 144 bp, Staphylococcus epidermidis
atgattatagcaattatcataacaaagccaggaatattacgctttgttccaggtgatttattattatttgaatttaaactcacgtataccaagcatttctcaacaatactatatcatttcatttgggtaagtaatgatcaatga

SEQ ID NO: 3592 - DNA, 1362 bp, Staphylococcus epidermidis
atgaacgatacaaatagaacacataaggaaaataagttagaacaagatattacactaccttatttaaaaaaagcagttattttttcaattacttttggtttctttggtgtaaatatggcttttgcacttcaatcagcaatgatggggagaatattccaaacgttaggagctaatcctaataatttaggatggttttttattttgccacctttagtaggaatgattgttcaaccccttattggatactactctgacagaacttggactagatttggacgtcgtatgccgtatctgttgatagctggtccgattggagccatcgtattagtcttattacctaatgcaggctcatttaattttggatatgcttcactcatggctttatcctttggtgcggttatgactttacttatggatttgacttcaaatgcatgtatgcaaccatacaaaatgattattggcgatatggtaaacgaaaaacaaagagatatggcatggtcttggcaacaaattttttcaaatttaggtggtattattgctacagtattaccatttttattaacaatgttgggaatgagtaatgtagcacctaaaggtgaagtaccaatgactgtaaaattagcttattatattgcagcagcagtattattaattgcttctatatggacagttatctccgttagggaatatgagcctaaaacgtataattattatcatggaatcaatgagagcaatagaaataataaattaaacttattacagttattaaaaaaagcccctaaacaattttggcaaattagcgtagttcaattttttaactggtttgcattgatgtatctttggacatattcaacaggtgcaatagcaaagaatgtttggaatgtgacagacccttcttcagccggatatcaagcagcgggaaattggtatggcgtattatactgtatacaatttttgagttcagttatttttggttttgtcattgcaagatctaaaccatcccaaagaaaattttggtatagctttggattggttttcggtggaataggtcttatttcaatattctttatccataatcaatggttactcattttttcatttgtattgattggtattaataatttaacgatgaatacacaaccatttacattattaactgaggcaatcgatggagaaaattcgggggcatatttaggtttatttaatacaagtatttgtctaccacaaattgtagcgtctatagtcagttttggactgtatccattattgggaagttcaatgcctgcgatgctactgcttgcaggaatcatgatgcttttaggtgcagtttcagttaaatttattaatgcaaaatttgaatag

SEQ ID NO: 3593 - DNA, 486 bp, Staphylococcus epidermidis
atgaaaaaagtttctaaatttattttagctagtagtttaattttgggcttttccgtaacgcccgaattatttaatgtcactcaagcacatgcgcaagaatctgtgaaaccttattataattatagtggttatacagcacatcaaagtaactttattctagataagaattttaaaacatctttaaaagctgataacttcaagattaatggttacaagattactcaaaacgaatcagctaaaaatgataaagatgtatatgatcaaacatattacggggtttctaatcataaagcgaatggtgttttcttctcattagacggtaagtcagtgagcgaaaaagaattattgaatcattacggtgaaccaaagtatacgtctacatcagcatggggcaaagaatatacgtataaaattggaaataaagatgtaagattttatgttaatagaaatggatatgtcattaaaggacaaatcattagtgaatag

SEQ ID NO: 3594 - DNA, 2061 bp, Staphylococcus epidermidis
ttgaataataatggtgaagagcataatcatcaaaatcacatgaatcattccaatcaaatgcatcatgataaccatgcctcacatcatcatagtggccatgcacatcatcatggaaattttaaagttaagttttttgtttcattaatttttgcaatacctatcattcttttatcgccactgatgggtgttaacttaccttttcaattcacatttccaggttctgaatgggtagtgttaatattaagtacaattttattcttttatggtggtaaaccgttcttgtctggtggtaaagatgaaattgctacaaaaaaaccaggtatgatgaccttagttgccctaggtatttcagtagcttatatttatagcttgtatgctttttatatgaataactttagtagtgcaactggtcatacaatggactttttctgggaattagcaaccttaattttaattatgctattaggacattggatagaaatgaatgctgtcggaaatgctggagatgctttaaagaaaatggcagaactgttacctaatagtgctattaaagttatggataatggccaacgcgaagaagttaaaatatcagacatcatgactgatgatatcgtcgaagtaaaagccggagaaagcattccaacagatggtattatcgttcaaggacaaacatctatagatgaatccctagtcactggagaatctaaaaaagtacaaaaaaatcaaaatgacaacgtcatcgggggttctattaatgggtctggaacaatacaagtcaaggttacagctgtgggagaagatggatatctttctcaagttatgggacttgttaatcaagcacaaaatgataaatctagtgctgaattgttatctgataaagtagcgggttatttattctactttgctgtaagtgttggcgtgatttcttttattgtctggatgctcattcaaaatgatgttgattttgcattagaacgtcttgtaactgtgttagtcattgcttgtccacatgctttaggcttggcaatacctttagtcactgcacgttctacttcaattggtgcacataatggtttaattattaaaaatagagagtctgtagaaatagctcaacatatcgattatgtaatgatggataaaactggtactttaactgagggtaacttttctgtgaatcattatgagagctttaaaaatgatttgagtaatgatacaatattaagccttttcgcctcattagaaagtcaatctaatcacccattagctataagtattgttgattttgcgaaaagtaaaaatgtttcatttactaatacacaagacgttaataatattccaggtgtcggattagaaggtctaattgataataaaacatataaaataacaaatgtctcttatcttgataaacataaacttaattatgacgatgacttgtttactaaattagctcaacaaggtaattcaatcagctatttaattgaggatcaacaagtcattggcatgattgctcaaggagatcaaattaaagaaagctcaaaacaaatggtagctgatttactatcaagaaatattacaccagtcatgcttacaggtgacaataatgaagtggcacacgctgtcgcaaaagaattaggtattagtgatgtccatgcacaactcatgccagaagataaggaaagcattataaaagattatcaaagtaacggtaataaagtcatgatggtcggagacggtatcaacgatgcgccgagccttataagagccgatattggtatagcaattggtgcaggcacagatgttgctgtggattcaggtgatatcatacttgttaaaagtaatccatcagatatcattcatttcttgaccctttcaaataatactatgagaaaaatggttcaaaacttatggtggggtgcaggttataatattgttgctgtacctttagcagctggcgcattagcttttgtcgggttaatattatcaccagctgtaggagcaatattaatgtctttaagtacagttatagtagcgattaatgcttttacattaaaattgaaataa

SEQ ID NO: 3595 - DNA, 546 bp, Staphylococcus epidermidis
atgattaaaaaattattttttatgatattaggatcattactaatattatcagcttgctccaataatgatgaaaaagataaagacactaatgatcaaaaaagtgagagccatatgaagcataatgatgaaagtaaagttcctgaagatatgaaatcgactaatgagggtgaatttaaagtaggagataaagtaacgattacagcagggcatatgccaggtatgaaaggtgcagaagctactgtaaaaggtgcgtataaaacatatgcctatgttgtaagttataaacccacaaatggaaatgaaaaagtaaacaatcataaatgggtcgtaaacgaagagatcaaagatgcacctaaagatggatttagtaagggcgatactgttaaattagaagcaaatcatatgtctggcatgaaaggcgctacagccaatatagataacgtgaaaaagactactgtttacgtggttgattacaaatccaaagataatggtaaaatcattaaaaatcataaatggatgacaggaaatgagctgaaagcacgataa

SEQ ID NO: 3596 - DNA, 1329 bp, Staphylococcus epidermidis
atgttttttaaacaattttatgataaacacttatctcaagcatcttatttaatcggttgtcaaaaaactggagaagccatgattattgatcctattcgtgacttatcttcatatattcgagttgctgatgaagaaggtttaaccattactcatgcagctgaaacacatatacatgcagattttgcttcaggaattagagatgttgctataaagttaaatgctagtatttatgtatcgggtgaaagtgatgacacgttaggttataaaaatatgcctaaccagactcattttgttcaacataatgatgatatttatgtaggaaatataaaattaaaagtgcttcatacacctggtcacacgccagaaagtataagttttttacttactgatgaaggtgctggagcacaagttccaatgggactattcagtggtgattttatttttgtaggagatatcggtagacctgatttactagaaaaagctgttaaagtagaaggatcatctgaaataggcgctaaacaaatgtttaaatctattgaaagtattaaagacttgccaaactacattcaaatttggcctggccatggagctggtagtccttgtggtaaatctttaggtgctattccaacatctactcttggctatgaaaaacaaacaaactgggctttttctgaaaataacgaagctacctttatcgataaactaatttctgaccaacctgcaccaccacatcattttgcacaaatgaaaaaaattaatcaattcggtatgaatttatatcaaccttatacggtttatccagctacaaatacaaacagattaacttttgatctccgcagtaaggaggcttatcatggtggacatattgaaggtacaatcaatattccatatgataaaaatttcatcaatcaaattggctggtatctaaactatgatcaagaaattaacttgattggagaatatcaccttgtttcaaaagcaacacacaccttacaactcattggatatgatgatgttgctggatatcaattacctcaatctaagattcaaacacgttccattcatagtgaagatattacaggtaacgaatcacatatattagatgtacgtaatgataatgaatggaataatggccacttatctcaagcggttcatgtaccacacggcaaacttttagaaacagatttacctttcaatagaaacgatgttatttatgtacactgtcagtctggcattagaagttcgatagctattggtattttagaacataaaggttatcacaacattattaatgtaaatgaaggttacaaagatatacacctttcttaa

SEQ ID NO: 3597 - DNA, 1071 bp, Staphylococcus epidermidis
atgtcacaatataaaacaaaacacattaatgatttcactaaaaaagaattacaagaattgggttctaagggtcaattaattgacgttcgacagcctgaagaatatgaattaggacacattaaaaatgctttattacattcagttgaaaatatagagacttttaaacaaagtaaaaataaaacttactatgtttattgcaaaagtggtaatagaagtagaaaagcaagtcaatttcttacacaacgcggatacaatgtggtgaatttagatggaggctataccgcatacgaacaacaacataataatgaatcatttaaattagaaaaagataaagaaattcaaatcaaagacaatcgtaagacgtttaattatagtaatctacagtgtccaggacctattgttaatattagtaaagaaatcaaaaacatcgctattggtgatcaaatagaagttgttgtgactgatcacggttttttaaatgatattaaaagttgggtcaaacaaactggacacacacttgttagactcaatgattctggtaatgaaattcgcgctattattcaaaaagaagaaaataaaaatatagaagtgacgcacacaaaaaatggaacaacgattgttttatttagcggcgagctagataaagcagttgcagcaatgattattgctaatggtgctaaagccgcaggtagagatgtaaccattttttgcacattttggggcttaaatgcacttaaaaaaattcaaagtcaacgcattaagaaaaaaggtatcgcaaaactatttgactttatgcttccaaattcaccaattaaaatgcctatttcaaaaatgaatatgtttggtgtaggaaatttaatgatgcgttatgtcatgaaaaagaaaaatgtcgatgatttaccttctcttatcaatcaagcagttgaacaaggtgttaaacttattgcttgtacaatgagcatggatgttatgggcatttcaaaagaagaactacgcgatgatgtagaatacggtggcgtaggtgcatatataggatatacagaacaagctaatcacaatttatttatataa

SEQ ID NO: 3598 - DNA, 261 bp, Staphylococcus epidermidis
ttggaatataataaaaagatgattaatcgtattcatcgcatacaaggacaacttaatggtgtcattaaaatgatggaggaagaaaaaaattgtaaagatgtcattagtcaattaagtgcctctaaaagttctattcaacgtttaatgggtattatcattagcgagaacttagtagaatgcgtcaaaatgtctgaagaaaatagtgaagattctcaggcattaattaatgaagcagttgaattattaataaaaagtaaatga

SEQ ID NO: 3599 - DNA, 741 bp, Staphylococcus epidermidis
atgataatcatgttactcattggaatatttggaggatttatttcaggattggttggtatagggggagcaattatcatttatcctatgcttttattattaccacctttggttggtctacccacttatagtgcttatattgcttcaggattaacctcaagtcaagtgtttttcagtacattgagtggatcttttaaagcatataaaaacaaagatttttctagaacgcttgtacttaatatgggaagtggaatgattataggtagtatactaggtgcaatattagcgaatttaataaatgtacagttcgttaatatggtttatattattattgcattattagctcttattttaatgtttattaaagtcgcaccatctactagtcatattaagtttaatcgtctacttttaattacaataggtggtatcatcggtttggtatctggtattgtaggagctggtggagcatttattattattccagtactacttgttatatttaaattaccaatgaacacggtggttacaaatagtattgtaattgcgttcatttcttctattggagcatttattattaaattattacagggttatattcctgttaatagtgcaataccgttaattttaggtagtatactatttacgcctctaggtatgaaaataggacaaaaaatacctgattatattcaaaaaatgattgtaagtattttaatcgtcattgcaatcattaagttgattttttaa

SEQ ID NO: 3600 - DNA, 396 bp, Staphylococcus epidermidis
atggataaaaaaacaatttactttatatgtacaggtaattcatgccgtagccaaatggctgaaggttggggtaaaaaaatcttaggtgacgaatggcaagtatattctggcggtattgaggcacacggtgtcaatccgaaagcaatcgaagcgatgaaagaagttggaattgatatatcaaatcatacttctaatttaattgaccaaaatatactacatcaatctgatttagtagtaactttatgtagtgatgctgacaagaattgtcctatattgccgccgagtgtaaaaaaagaacattggggatttgatgatcctgcaggcaaaccttggtcagaattccaacgtgttagagatgaaatcaaagcagccattgaatcatttaaggctagataa

SEQ ID NO: 3601 - DNA, 1290 bp, Staphylococcus epidermidis
atgacaatattagcaatcacaatttttatattaacgttaatttttgttatatggcaacctaaaggtctagatattggtattactgcattaattggtgctgtaattgctataatcactggcgttgtaagcttttcagatgtactagaagttactggaattgtttggaatgcgaccttaacttttgttgcagttattctcatttcactcatattagatgaaattgggttctttgaatggtctgctatacatatggtgagagcatcaaagggtaatggcttgaaaatgtttgtttacattatgttgttaggcgctattgtagcagctttctttgcgaacgatggtgcagctttaatactgacacctattgttttagcaatggtacgtagtttaggatttgataaaaaagcggtattcccatttattattgctagtggttttattgcagatactacgtctcttccattaattgttagtaatttagttaatattgtttctgctgattactttgatattggatttgttgagtacttcagtaaaatgattatacctaatatattctctttaatcgcaagtattcttgtcttatggctttattttagaaagtctatcccaataaaatttgatgcagtaaatattagagaaccaaaagaagcgattaaggacaaaaagctttttaatatctcatggattgtactcactgtattgctagttggttatttaataagtgagtttataaatattccagtatcaattattgctggtatcattgctttaatatttgtattattagcacgtaagtctaaggctgtgcatacgaaacaagtaattaaaggtgcgccatggaatattgttttattctctattggtatgtatcttgtggtatttggtctaaaaaatgtgggcatcacaacgcttcttagtgatgtactaacaaatatttcaaattacggcttatttagtagtatcatgggcatgggctttatagctgcattcctttcatccattatgaacaacatgccaactgttttaatagatgcaatagcgattggtcaatctcaaacaacaagcatactcaaggaaggtatgatttatgcgaatgttatcggatctgatttaggacctaaaataacaccaattggttcgttagcaacacttctctggttacatgtgcttactcaaaaaggtgttaaaatttcttggggacaatactttaaaatcggtattattataacgattccggtattatttatcacactgttagggttatatctaacacttattattttctaa

SEQ ID NO: 3602 - DNA, 315 bp, Staphylococcus epidermidis
ttgaattatagtgaaatatcgcaatacttgaaagtgatggctgatagtagccgtcttgaaatattagatttgttatcttgtggtgaattatgcgcttgtgatttattacagcatttttctttttctcaacccacattaagtcatcatatgaaagtattaaaagacaataatttaattacatctagaaaggatggtaataaaaatttatataaattgaatcatgatgtattagatgacattacatcacgactcactctattgagttccagtactgtcccatgtatatgtgaaactgtagagaaaggtgaatgttaa

SEQ ID NO: 3603 - DNA, 1731 bp, Staphylococcus epidermidis
gtggagatggatgctgttaagtacttaaataaattgaatccagataacattgagttaacaaaatatttgttttttactggtaaaggtggcgtaggcaaaacaacgatatcaagttttattgctttaaacttagcagagaatggaaagaaagtagctttagtaagtactgatccagctagtaatttacaagatgtatttcaaatggaattatctaataaattaactaaatatcaacctatacctaatctctctatagccaattttgacccgattgctgctgcagacgattataaagcacaatctatagaaccttatgagggtattctaccagaagatgtgcttgctgagatgaaagaacagttaagtggttcatgtacagttgaagtagcagcatttaatgaatttacaaattttttatccgataaaactttagaacaagaatttgatttcattatatttgatacagctccaacaggtcacaccttgagaatgcttgaattaccttctgcatggacagattatttaaatacaacgagtaatgacgcttcttgcttaggtcaattatcaggtttaaatgaaaatagagttaaatataattcagcacttgaaaaactacgtaaccaagatgatacgaccatgatgttagttgcgagacctagtcactcttctatatatgaaattcaaagagcgcaacaagaattacaacaactgtcaatttctaaattcaaagtaatcattaacaactatatagaagaaagtcacggtttaatttcgagtcagatgaaatcagaacaagataaaaacattaatcattttactgaatggttaaataacaatcatgcttattacgttccatataaaaagcagaaagaagaaggtatagaaagtttaactaatctattaaatgatgataacttaattgaaaatgatgactttattgttgaagatcatccgcaattcaataaattaatagatgaaattgaaaatagtaaagttcaatatttatttacaatgggaaaaggtggcgttggtaaaacgacagtagcaacgcaattagctacagtattatctaataaaggatatcgtgttcttttagcaactactgaccctactaaagaaattaatgttgaaaccacaagtaatttaaatactgcttatattgatgaagaacaagcattagaaaaatataaaaaagaagtactagcaacagtgaatgatgatacaccacaagacgatattgattatattatggaagatttaaaatcaccttgtacagaagaaatagcatttttcaaagcctttagtgacattatggagaatcaagaagacatggattacgtaattgtagatacagctcctacaggccataccttgctgttacttgattctagtgaaaatcatcatagagaattaaagaaaaaatcaactcaaactaccagtaatgttgaaacattattacccaaaattcaaaataaaaatttaacacagatgataattgtaacattagcagaaaaaacaccttatttagaatctaaacgtttagtagaagatttaaatagagctaatataggccataattggtgggttgttaatcaatcgttagttacgctaaatcaacgtgatgacctttttagtaacaaaaaagaagatgaatcattttggataaacaagattaaaaatgaaagtcttgataattactttgtcataccttatcgagtattagaatattga

SEQ ID NO: 3604 - DNA, 348 bp, Staphylococcus epidermidis
atgttaaatattgaaatatacgaagaagctatgtgctgttctactggggtatgtggtcctgaaccggatgaaacactaataaagacgaaccaaatcaatgaatatttaaagcaaaatcaaatagaagttcaacgttataatatgaacaataatccgaatgaatttattcaaaataaagaagttattcgtttaattcaagaaaaaggtgatgaagttttaccaatcacttttatagaaggcaatatagctaaaacgggcgcttatattacccaagaagaagccgatgaaattattacagttaatcaaatgagaaatggaggatgctgtggtggagatggatgctgttaa

SEQ ID NO: 3605 - DNA, 321 bp, Staphylococcus epidermidis
atggaagttattaaaacaaagactgatatgagtgaagatcaacagtttgacttttatgaaaagatgtttaatgcacttgccgataaaatcagattaaaaatactaaatcaaattagccaaagctctaataaatcattatgtgtgtgtgatttagaagagttattagatataaaacaatctaaactttcttatcatttaaaaaaattagtagatgcaaatgttcttattgctgaaaagcatggcacatggaattattataaaattaatgagcaacaaatacaggttgttttaaatgaagatacttgttgtaagatactttaa

SEQ ID NO: 3606 - DNA, 885 bp, Staphylococcus epidermidis
atgttagattcaattatggaatttataaaaacatttgtgatgttgttttttgaattattaacactattcatcatcgtgagctttattgtaagtttaattcaacaagtagtttcggaagaaaaaatcaaaagatttttgagcaagcctaatcaagcaattagttatgtattggggatggtgtttggtgctatgacaccattttgttcttgttcaactattccaatacttgcagggctattaaattctaaagttccatttggtcctgcagtgagtttcttgattgcatcgccattaatgaatccattaatgatatttatgttatgggccttattaggttggaaagttgcaatagtttattttattgtactagcaatctttagtatcttaacaggttttgtattttcaaaaatgaatttagccgaaacttataaaggtgtaaacgttaaaggagatgggttttttgctaataaaactggatctcgtgttaaacatgcattaaatgatgcttgggcattcttatatccaatgctcccttatttatttattggtgtgtttattggagcgttcatatatggatttgtacccgaaacatttattactatatatgcgagtggaggtggcattatatccgtatttattgcttctattataggtattcctatgtatattagacctgaaacaatgttacctatagctgaagcattagcttcaaaaggaatgtcgcttgggacagttgttgctttgatcattggtggtgctggtgcaagtattccagaagttgtattattatcgaaactattcaagaaaaaatttgtaatctcattcgttatcgccattttagttgtagctatttctacaggtttgatggtgaacatcgttatttaa

SEQ ID NO: 3607 - DNA, 129 bp, Staphylococcus epidermidis
atgggaatcaaagacgtattaaaaaaattaaaacctcaggaacaatcttgttgttcagtagaaattgaagaaaaaaaagagaagaatgaaaaagaacagctggataataacaattgttgtaacaattaa

SEQ ID NO: 3608 - DNA, 786 bp, Staphylococcus epidermidis
atgaaacattcaagcaaaataatagtatttgtaagtttcttaattttaacgatttttattggaggatgtggttttataaataaagaagatagtaaagaaacggaaatcaaacaaaactttaataaaatgttaaatgtgtatccaactaaaaatctagaggatttttacgataaagagggctatcgtgatgaagagtttgataaaggagataaaggaacttggatagttcattctaaaatggtcattgaaccaaaaggcaagaatatggaatccagaggaataattctacgtataaatcgtaatactagaacaacaaaaggatactttttaattagtgagataacagaggacaaaaatggctttgcgcataataaagataaaaaatatcctgtcgtaatgaaacataataaaattattccaacgaagcctataccagacgataagttaaaaaaagaaattgaaaacttcaaattttttgtacaatatgccaactttaaagatattaatgattataaaaacggggatatttcatacaatcctaatgttcctagttattctgcgaaatatcaactgaataataatgactataacgtggaacaattaagaaaaagatatgatattccaaccaatcaagctcctaaattattattgaaagggacaggatatttaaaaggatcctctgtaggttataaacatcttgaatttacttttgttgaaaataaaaaagaaaatatattttttacagatgcagtacaattcactcctagcgaggatgatgaatcatga

SEQ ID NO: 3609 - DNA, 888 bp, Staphylococcus epidermidis
atgagtcagtttaaggacacattatataaactatttgagccaatgatgaaaatagagttctatcaaaatctattggttaatcttttaattatacttgcttatatcttgatgggtatgattgtaattgcgatatcaagaaagttagttactaaatttttcaacgttaatgaaaagaaaaagaaccgtcataaaattaaaagaagtgaaacactatccacattgattcaaaatttaataagttatgtcgtatggtttattgtccttacgtcaatactttcacgtttcggtattagtgtatcagcaattttagcaggagctggtgttgttggtgttgccgttggtttcggagcacaaacaattgtaaaagacattattactggtttctttatcatatttgaaggacagtttgatgtgagtgattatgttcaaattaatgcatctggggtaacaattgctgaaggtaccgttaaaacaattggtttaagatcaacacgtatacaatcagatactggagaaatttatacattacctaatggtatgattagtgaaatagtcaattattctgctacagatgtttcacctattgtgatgataccgatttctccaaatgagaattataaagtgatagaagagaaattattaacatttttacctacattaaagaataaatatgacatatttgtatctgcaccagatttacttggtttagatagtgttgatggcaatgaaatggtgattaaacttttagcacatgttaagcccggaatgcattttccaggacaacgtttgcttcgtaaagaggtcatacaatacttcagtgaagaaggcattcatattccaaaaccaacacttgtaaaacttgataaagaattgaataaaaaagaatag

SEQ ID NO: 3610 - DNA, 813 bp, Staphylococcus epidermidis
atgacaaatcgtttaatattattcgactttgatgaaacttactataaacatcgtactaatcaagcagatattccttatttaaaagaaatggaaagtttattacagaatataactgctaaaaacaatgtcattacggcgattttaacaggaagtactatagaaagcgtactgcaaaaaatgagtaaagttaatatgtcatataaacctcaacatattttttcagatttaagttctaaaatgttcacatggaataactgcgaatatattgaatctgatgaatataaaaacgaagtgttgatagaaccgttcttattggaagatatattagatatattaaaacacgtttcttctaaacataaagtagagtttataccgcaaagaatttttcgagaaaatgaaacattgtataatttttatttctattcttcgggtgacacgcatttagataaaacaattttagaagacctcagtcaatattctaagacaagggactatacgatgacatttaatcgttgtaatcctttagcaggtgatcctgaaaatgcttatgatattaattttactccaaaaaatgcaggtaaattatatgccacaaaatttttgatgaataaatatggcgttccaaaagaattgattattggctttggtgatagtggtaatgatgaagcgtttttaagttatttagatcacgcaatgattatgtctaacagtcaagatgaggaaatgaagagtaaatttaaaaatacaaaatatccttattataaaggtatttatacacatgtacgtgaatttatagaatatgaaaatgtttaa

SEQ ID NO: 3611 - DNA, 624 bp, Staphylococcus epidermidis
ttgaaaaagtttttaaaaggatttattttattttttctcattgtgatgctaggatttgcagggggattgggatacagtcattataaagattcaaaagcaaacactgatgtatcttcaaaagagactcagacttcaaataaaaatactcatgaagatacaatttcacaagatgaaatgcaaaatcaagttgataaccaaacaaacgaagtatcaaatgagacatcaactaaaacacttagcgaaaaagcaaagcggttaagagaagcttttaacgttaatgatgaggaagctcaaatattagcagatgaaatcgatagagcagatgtaaataaagatggcacgattactatggatgaaatgacgcctactttagatcgttttgcaaaagaagggaaattccaaccatctgcaggtggcacaactaacgaagcacatcatcctaaatatacagcagaagatgttagaaatatgtcagatgatgaatttctagacgcgtatacagaaggcatgtcagatgatgaagctgcgacaattcacgaaagtgctcaagaatctaacgagtatatgaaatttttaagaggacaagttgaagcacgtgcaaaaggacagggcggtaattattaa

SEQ ID NO: 3612 - DNA, 903 bp, Staphylococcus epidermidis
atgaaaagacactttttagcaatcggagcaattacaataacaacattacttgcgggatgcgattttggagatttggtaggacagcatcagtctggtaagaaatcagaaaatagtaacactcaaaccgaacaagcttcaaataataaaaattcaaattctaataatggtcattcaagtaataacaatgagtctagaggtagagtggaagatttaactcaatcgcagaaggtagcattagctatcaatgatccctcagtttctcaatatgtcgttaatgcaagtgaattaaggaatcattcattttatgcaaattataacggcggaggccaacgtaaaagtattcatacgtataagttggaagcattaccaaaaaaagtagaaggtgcacctaatgatatgacattctatactgcaaaaccatcaaaagggtcatttgttactcttatcggtattggtaatgaaaaggtattaattgcaggcacacaaagttcaggtacatatcaacaatatgctcattcggaagcagcaagagaattagatttacatgaattattagataaatacggtgaaagttcaaattataaaaatctagcaaatcaaattgcgtttacacaaagtcaatcatcaaattcaagtgaatctacatcagatgaagggacgtctaataatgatgcatctaatgatgacaaagttactcgtgataatgtaatagataaagttgaagcgtatgaaggtcatcagctagataccgatacgtatacatttaaagaacccgaacagaacgaagacggagattggggattttctattttagataaggaaggcaacctcgaaggttcttatattgtgacatctgatggtgaagttacaaaatacgatgaaaacggggaagaaatagagtga

SEQ ID NO: 3613 - DNA, 186 bp, Staphylococcus epidermidis
atgaatcattttggtaagcttcatcgtatatcattaatattaaatattatgtttttaatactcatgcctaaaatctatagttttgataatatttatttatcaataatttggactttgttaggcatagcaaatgctgtctacttattgattaagcaaagacaagaaaacaccattaaacgtaaataa

SEQ ID NO: 3614 - DNA, 405 bp, Staphylococcus epidermidis
atgtcaaaaaagaaaatcttgatctttattagtgtcatattaatcatttttggaggtgtctacctcaaaatgaaatatgacgaaaaagcaaaacaaaaagaaatctactacaaagagcaacaagaacgtatcacgctttatcttaaatacaacacaaaaaaccctaatactatcaaatctgtccatttcacaagtttaaaacagggaccaatgggtgatgctgttattgaaggctatatcaataacaataaagaagatgaatttgttgcatttgcatcatctgaagataattttcaattccaaggtgatatgatagaaagcaaaaaagtatcaaatctaataaaatatcaaacaaaaacacctgatgaaatcaaaaaagatttagacaaaaagaaagaacgctaa

SEQ ID NO: 3615 - DNA, 120 bp, Staphylococcus epidermidis
gtgaataaattggaaaatttaggttttttgttagctattggatgtgctttatttgtaatatttgttgtaccgtattttgataagaaaaaaagtgaagttgaatataaagtacaggtataa

SEQ ID NO: 3616 - DNA, 360 bp, Staphylococcus epidermidis
atgaaaagattgatttttatagttgttattctctttatccaagcctgtagttatgttgttattaactttttcttcttcgacatgtgggtgattcactcaagtgaacaccaattaaatcaatccatacaacatcatgacacaaagcaacttcataagattgctaaagataagcagacatatcagtttttaaaaactataaagaaagccgatttcgaaaatgcgacagataaccaaggtagtgggcctattggttattatcgtttagatattaataaaaaacccgtcggacttacaatcaatattaaatataacttccttccagaaaagacaactattaaatcaataaagttatatcaataa

SEQ ID NO: 3617 - DNA, 981 bp, Staphylococcus epidermidis
atgaaagaaaatttttggagtacattgccacgtccattttttattttggcgcctatggaagacgtgacagatattgtctttcggcatgttgtcagtgaagctgcgagaccagatgtattttttactgaatttaccaatactgagagttactgtcaccctgaaggtattcatagtgtgcgcggacgcttaacttttagtgacgacgaacaaccaatggtagcgcacatctggggcgataaaccagaacaattccgagaaatgagtatcggcttagcggatatgggttttaaaggtatagatttaaatatgggttgccctgtcgcaaacgttgcgaaaaaaggtaaaggatccggcttaattctacgacctgaaacggcagccgaaatcattcaagcttctaaagcaggtggtctaccggtcagtgtaaaaacacgtttaggttattacgatatcgatgaatggcgagactggttaaaacacgtcttcgaacaagatatcgcaaatttatccattcatctacgtacccgtaaagagatgagtaaagtagatgcacactgggaattaatcgaagcaatcaagacattacgtgatgaaattgcgccaaatacactattaactatcaatggtgatatccccgatagacaaactggtctagaactcgcaaataaatatggtattgatggcattatgattggtagagggatcttccataacccattcgcatttgaaaaggaaccacgcgaacattcaagcaaagaattattaggtttattacgcttacatctctctttatttgaaaaatatgataaagatgaagcccgacacttcaaaagtttacgcagattcttcaaaatctacgtacgcggcattagaggcgctagcgaactccgccatcaattaatgaacacccaatccattgccgaagcaagagaactactcgatacttttgaagcacgtatggatgcacgttcagaagtataa

SEQ ID NO: 3618 - DNA, 1485 bp, Staphylococcus epidermidis
atgagtgaagcaaatcataaaaacatcgttgttgtaggtgctggaattattggtacgtcagtagcgacaatgctttcaaaagtaagtcctaactggcatatcgatatgtttgaaagactagaaggcgctggtattgaaagttcaaatgaaaataataatgctgggacaggtcatgcggcattatgtgaattaaactatacagttgaacaagatgatggttcaattgatgcatctaaagcgcaagaaattaatgaacaattcgaattatctagacaattctggggtaatttagttaaaaatggtgatatttctaatcctgaagaatttattcaaccattacctcatatcagtttcgttatgggaccaacaaacgttaactttttaagaaaacgttatgaaacactaagaactcttccaatgttcgatacaatcgaatatacagaagacatggaaacaatgagaaaatggatgccattaatgatggaaaatcgtgaaccaggtcatcaaatggcagcaagtaaaattgatgaaggtacagatgtgaactatggtgcgttaacacgtaagttagcacattacttagaacaaaaatctaatgtttcattaaaatacaatcatgatgttgtagatttaacacaaagagaagatggcaaatgggaagttgtcgttgaaaatagagaaactaaagaaaagataactaaaatagcagataaagtgtttattggtgctggcggtcactctattccgttattacaaaaatctggtgttaaacaaagagaacacctaggtggtttcccaatcagtggtcaattcttaagatgtacaaacccagatattattaaacaacatgcggctaaagtttacagtaaagagcctcaaggtaagccaccaatgactgtaccacaccttgatacacgttatatcaatggtaaacaaacattattatttggtccatatgcgaatatcggccctaaattcttgaaattcggttcaaatttagacttattcgaatcaatcaaaccatataacattactacaatgttggcttcagcagttaaaaatgtacctttaattaaatattcaattgatcaaatgatcaaaactaaagaaggttgtatgaactatttaagaacatttattcctgatgctaaagatgaagattgggaactttacactgctggtaaacgtgttcaagttattaaagatagtgaacaacacggtaaaggtttcgtagtatttggtactgaagttgtcaattcagacgacaattctatgattgcattattaggtgaatctccaggggcttcaacatcattatcagttgtattagaagttttagagaaaaacttcgctgatgacaaagaagcatgggaacctgttgttaaagaaatggtaccaacatacggtcgttcattaattaatgacgaaaaattaatgagagaaacacgccgtgaaacttctaaaaacttacatttaaatagataa

SEQ ID NO: 3619 - DNA, 495 bp, Staphylococcus epidermidis
atgattttaactatcttatttatctttttctgtattcgactcatcagcttaaagatatcaatgcaacatgcaaaacagctaaaggtagatggcgctgtagaatatggtattaaaaattcaaaatttctagccattactcacgtgttgatttacatgagtgcagctatagaagcattcattcgtaaggatacatttagtctacttaacggcattggcttaatcatattgatcatcgcttatatcatgctatttatagttattaagacattaggtcgtatttggacattgaaattatttatactgcccaaccaccctattatcaagtcaggattatataaagtaacgaaacatccaaactattttttaaatatcattcccgaattaattggtgtattgctactaacacatgctacatacacaacactcttattagttccatatgcttattttttaattgtacgtatccgtcaagaagagaaattaatgaatatataa

SEQ ID NO: 3620 - DNA, 3117 bp, Staphylococcus epidermidis
atgaggaataaaaaaatatggatatttaatgctactaatgactttgtaggtaatcctaaatggttgttcatatatgtgaataaatatagaaaagatatcgatgcatattggatgtgtgataatgttcatgtggtaaattacgttaaaagtttaggattcaatgctgaattatttcattccaaaaaagcagaaaagattaaaagcgtggcaggtgtatttgtcgtacatcaagtgaaagaacatatccctgtaaaatttgaaaatgaagtcgttatactaaatctatggcatggggtcggtatcaaacctatagagcgatttgttgactcgccaggaattagatatcgtacatataaaaaatatatcaagtataatgagatgtaccataataaccaattatttttggtcacttcaccgcttatggaacaacattttactaaaatgcttaatttagatgaagatcaaatcatccgagcaggttatccagcaaatatgtttaataaagctgaatttagatcttttgatcattctattaagcggcataaaggtttaaatgatgaaactaaagtagtcttatatgctcctactttcagagattataagatgaataatttttttgctgaagctatacctgatatggcaaagcttcttaaaattttaaagaaaaataatattttgctaattataaaattacattacttagttaaaaatgatgtgaatttcacaactgccaaaaaaatgtatgagaaccatccaaatattttgttttgggataataagaaagacatttatgaaatattcgaccaaatagatttaggaatcttagattactcatctatttattacgatatgttaacttcaggagttaaaaagtttattagatatatttatgattatgataaatatatggaaaacagaactttagtatatgattacaaagaaaaaacttcaggtgtgattgtttcaagttttgatgaattattaaaagctctagatcaaattgacgctatagaaattaatgaaaagaaaagtaaggaaattataaatgaattttggcaatatgatcaggacgataaaaatggttttgagaaaattatagatacaactttaaaatttagtattaaaaagaaacaattacctaagttatatagctttgatatatttgatacgttgatacaaagaaaaacattaagaccagatggtattttctattatgttaaagataagttattaagaatgagtactgatataccgatatatgtaatacaaaattatccacgtattagaatccaagcagaaaactatgttagagattattataaaaagtctgaatttattcgtgatgaaaaaagaatcgaaataagatttatagatatcattaacagaattaaaaatattcacgagctcacagatgatcaagcgcaacttctatataatttagaaattgaagcagaaatagcaaatgtagaagaaaaaaaggataaaattaaagtgcttcataacttattagacagttatcaagacgtcattctaataagtgatatgtatttacctaaagaagttatcttagaaatgttatatcaagtagaccctagattaactgaattacctctttatctatcaagtgatataggtaatcaaaaatcaaccagtacactatatttagatgtgtttgaagatttaaagtacaattattcagaatggattcattatggggataataagcatgcagattttaatgttcctaaaaagttaaatatcaaacctattcatcatacaataactaaatttaatggatatgaaaataaaattttaaataggaataagaactatgatacattcttacttacaacacaaatagcaagatttcgtgaaaatgataaaagtagattaaattactatgtatacagttatataagtagttatttcataccatatgtgagttggtctattaaaaaagcaattaaagaaaatattaagacgctttattttatatcaagagacggtgagttacttaaaaaaattgctgatgaaataatatcagtgaaaggatacaatatcaaaactaagtatatatatgggtctcgaaaagcctggaggattccttcgtttattaatgaagtggacaaagagttcttttcgccttttggtaactttacagggttaacgaactttgatagtaccttacgtgcgttgcatatcagtgaacaagaatttgatgagatatttccacagttaaaacatattaaaggatgttctgaattcacaaaaagtacaaaagaattaattagagtttctgctcaaaataataataaatacaaaaagttattactaaaaaaagcccatgaagaacgtaaaattgtgaatgattatttaattcaagaaattgatttcaatgaaaaatttgctttcgtcgaatattggggaagaggttacacgcaagattgcttagatcgactcttaaataacattagcaatcaaacgattaatacgatattcttctatgcaagaagtatttatccgacagtaggaacatcaatcagatataactatactagtaaaatgacatcattaatatttattgaatctatatttgccaatatgccatatcaaagcattccaggatatcgtagaaataacaatgtagttgaaccagtgataaattttaaaaattataataaacaattatatgacgcaatggacaagatattgccactattcatacaagaattttttaataacaaatatatagatgaagatgaagttgaacgtaatttctatgattttggtgttgagtattttaaaaataatcctgaagatgattttatcgttgaattctttgcaccactcaaagattcagtcatattgtacgaaccagagatagaatatgcacctgccattagctataaaatggcttctcaaaagttattaggaaaaaaagtcccgttaaaaactaaaaataaaagaatgtcattaaaaagatcgccattaggagttcaaaaagcatatcaatttcatattaaatatttaaaaaacagaaaatcaaaaattatacgacaatttctgaataatagagtgattaaggctattatgaagttaaaaactattttaaaataa

SEQ ID NO: 3621 - DNA, 135 bp, Staphylococcus epidermidis
ttgtcaattttgtcatttcctgatggatataatttaagtggtagttctaaccctcctaatgtccaacaagaagtggcagctgcagaatcattatatggtaatccaagagattttattcttaagcataataagtaa

SEQ ID NO: 3622 - DNA, 672 bp, Staphylococcus epidermidis
atgaatatatttgtaactggaacgaatactgacatcggtaaaacgtatgtcactaaatatctctataaggcattaagaacgaggggatatcgggtatgtattttcaaaccttttcaaactgaagaaattggtggaggtagatacccagatttagaaatttataaaaacgaatgcgatttagactatgacgttacgtctctttacacattcaaagatccagtttcaccacatttagcattcaaaattgaaagtcatcagcaattgaaccatcaaacaatgatagacaaactcgaatcactaaaagcacaattcgatatgattctcattgaaggtgcgggtggtattgcagtgcctatctatgaatacagtgaccatttttatatgacaacagatttaattaaagacacatcggatttcattgtgagtgtcttaccttcaaagttaggtgcgattaatgatgccatcgttcaccagaaatatattgatcatcaagaacttcccccgaatgtgttaatcatgaataactatactgatagtgctattgaacaggataatttacataccattgaaaaattaacacataagcctgtttatacgttaggtcatcaagcgactcaagaaagcttttccgaaccatttatacaacgaattataggaggatccaatggctaa

SEQ ID NO: 3623 - DNA, 1356 bp, Staphylococcus epidermidis
atggctaatacacgagagttaaatcataaagatgcacagtatgtatggcacccatttacacaaatgggcgtctatactaaaaatgacaatattattattgaaaaaggtcgtggaagttatttatacgatactgaaggtaacaaatatttagatggttatgcgtcattatgggtcaatgtgcatgggcatcagcataaaaagttaaataaagctattcataaacaacttgataagattgcccattctacgctattaggttcgtctaatattccatcgattgagctagccgaacagttagtcaaattaacaccagatagattacaaaaagtgttttactccgatacagggagtgcgtcggtagagattgctattaagatggcttatcaatattggaagaatatcgatgctgaacgatatgcgaagaagaataaatttcttacattacatcatggatatcatggagatacaataggttctgttagcgttggtggtatcgatagtttccacaaaatttttaaagaccttatttttgaaaatatacagatagaaacaccgtgtttatataaaagtaagtatcgcaatgaagcggaaatgcttaattcaatactgaatcaaattgaagatatattatctgagagaaatgatgaaatagtaggatttattctagagccacttatacaaggtgcaacaggtttattcgttcatccgcatggttttttgaaagctgtagaacagttatgtagaaaatatgatgtgttactaatttgtgatgaagtagctgttggtttcgggcgtacgggagaaatgtttgcctgtaaccatgaagatgtacaaccagatattatgtgtctgggtaaggcaattacaggcggttatttaccgttagcggcaactttaacatctcaaaagatatatgatgcttttttaagtcagagtcacggtaagaatacgtttttccacggtcatacatatacaggtaatcagttagtttgttccgtagcacttgagaatattaatctttttaaaaagaagcatctgattgggcacattcaaaagacgtctcaaacattaaaacaacgtttagaggcacttcaacctcataaaaatattggagatattagagggcggggattaatgtatggtgtggaattagttgaaaacaaatcaacgcagacaccactcgatattccaactgtagaactgattatacgtcgatgtaaagagaatggattgatgattcgtaatttggaaaatgtcatcactttcgtacctattttaagtatgtctaataaagaaattaaaaaaatggttaaaattttcaacaaagccttacatcaaacattgggtaagaagtaa

SEQ ID NO: 3624 - DNA, 1134 bp, Staphylococcus epidermidis
atggacattaaagcacagttaaaacagatacaaaataaaggtttatatagagagcttcaaccgattcagtccgtagaaaaacaatatatttatatcaatgaccaatcttatattaattttacttcgaacgattatctcggtataggacaagttgaatatcaacctcaaaatttcttagattttataaagacatatagtatccatctatcaagttctagattagtgagtggcaattcagttgtttatcagaaattagaacaggcaattagcgagcattttaattttgaagacgccttaatttttaatagtggttacgatgcgaatttggcggtatttaatatttttaaaaataataatgtagttatcttttcggatcaacagaatcacgccagtataatagacggtattaaattaagtggtttatcaaaagtgatttatcaacatttaaactatgatgacctggaaagtcatttagcacggcacacccatccagatgttcaaaaagtaattgtctctgatagtgtgttttctactaacggcactaaagcagatattaataggctagttcatctcaagcaacgttacaatgcgattttaattattgacgcatctcatagtttaggattaaatctctttgagtgtcatgcagacattgacatagttacctcaagtttatctaaagcgtggggagcccatggtggcttgatactaagttcaaaagatataaaagatttaattattaataaaggtcgttcgcttatctactcgagtagtttacctagctatcatttgtattttattcaagtgagcttacaacatgtgattgaagatacatacagacgagagaagttgaatgcacttagtgaatattttaaccaccaatttatggaattatttcccaatcaaccattatctaatacacctatcaaaaatatcgtttgtgatagtttggcttcagcacaagcacaatacgacatgttatttgaacatggtatatttgtcagttatttaaggtatccaacagtgtcacagccaacattaagaatttcattatcctattttcatgacacagatgatattgatcgacttttcaatgtaatgaaacaatacgatgaaggtgatagctatgtatag

SEQ ID NO: 3625 - DNA, 687 bp, Staphylococcus epidermidis
atgtatagtataaaaatgcgtgcaagccacgaagatattcatattagtggtgctgaaacaatgtgtgaatttgaggatttagaaaattatttaaaaaaatattttaataaagcctttaatcatgaaaatggaaatatagatttcttaaatttgaaaattgaaaaggttaaggcaccgattcaaacgttagtagcattaccagtggttgaaaatctaaacgatactttaacacaattagcaaaacaaacaggtgtttctgaatatgcgctaaacaaagggttagaatttataaaaaatgatattacttatactggagccattattctatctgcacaaaccggacaacgacttgatagcactgaacaacgaggtatcagggtaacacaattagcatttaaaacatgcaaatgtaatggagaaatatcagaaagagtaaaagatgcacgtgcacttgcaacttgtatcaatgcatttgaaggtgtaaaggcagaactatgtgtatcagacgatttgcattacacgactggatattatgcgtcgcctaagttaggatatcgtagaatctttaatattaaagaaaaaggcacgcgtcacggaggaagaattatcttcgtagacgaagggataaatttaaatgcatatgtttcctttttagaaacagtacctaaagaaatcatagaaaaataa

SEQ ID NO: 3626 - DNA, 318 bp, Staphylococcus epidermidis
atgcataattacaacaacattaacatcgtaagtgatgattcaaaatatcaagaaatttgttggttccatacattagaaggtatttggcaccctgtagaagtagaaacttcaccattaaatattacatttaataaagagataacgcctaattacgtttgtacgttaataaatgaagattccagaaaaatcattttaagtaatgtagacaatccgaatatcattattgaaatgattcttattaattcaaaaaaattggtttttaatgctataagtaaagaaggcttaggtacctcgcctaaaatcacatttacaaaataa

SEQ ID NO: 3627 - DNA, 1188 bp, Staphylococcus epidermidis
atgaagaaaaaattaagttatatgattaccattatgcttgcttttacgctaagtttagcacttggcctatttttcaatagtgctcacgccgactcgttaccacaaaagaatggtgcagaccaaaaaacaactaaagtcactgtcagtaataaagacgttccagatgcagttcgcaaacttgctgaagaacaatatttatctcgtgtagctttattagataaagcttccaaccacaaagcaacatcgtatacacttggtgaaccttttaaaatttataaatttaataaggaaagcgacggcaattattattatccagtgctcaataaaaaaggagatgtcgtttatgtagtaacaatttctcctaatccttcaaattctaaagcttcaaaacagcaaaacaattattccattaatgtttctccatttctttctaaaatattaaaccaatataaaaatcaaaagataacaattttgactaatacaaaaggatattttgcacttactgaagatggtaaagtgacacttgtgcttaaaacgccacgtaataatgaaaaaacatatgaaaatgccactgaatccactaaatctaaagatttaaatgattttaaacaaactgcaacagtaacaaaaccaactttagaatatcaaagtacacgaaatgaaatgtacgcagaatatgtaaatcaattaaagaatttcagaatacgagaaacacaagggtataatagttggtgtgccggctataccatgtcagcactactcaatgccacatataatacaaatcgatataatgcagaatcagtaatgagatatttacatcctaatttaagaggtcacgacttccaatttacaggactaacatctaacgagatgcttcgttttggtagatcacaaggcagaaatactcaatatcttaatagaatgacttcatataatgaagtagaccaattaacaactaataatcaaggtatagctgtattaggtaagcgtgttgaatcaagcgatggtattcacgctggacatgccatggctgtggctggtaatgctaaagttaacaacggacaaaaagtcattttaatttggaacccatgggacaatggtctcatgactcaagatgcacatagtaatatcattccagtatcaaatggcgatcactatgaatggtatgcatcaatttatggttattaa

SEQ ID NO: 3628 - DNA, 1884 bp, Staphylococcus epidermidis
gtgggagtcgtgtcaatcattactgggattacaatatttgtcagtggtcagcatgctcaagctgctgaaatgacacaatcatcatcagattctaaagaacagtcacaacaaacagaacaagttgaacaaaaagaagatacaactcatttatcttacgaattgaatcaagagggtgagacagctagccaatcaaagactagtcaagagaatcaatctgatggcaatgtacaaaaaaagggtaatcaaacacaacaagattcaacacaaacgtcaccactaaatgaccaagaacaaactttaaaggggcaacaatcaaaagataatcatgttaccccaaattcacgtcaggatacatatccaaaaggccaaaatcaagatgataaaggcaaacaacagtttaaagataatcaacactcacaaacagaacatcaacctaatactcaaaaacaaaataatgatcaagattcatcagataaaaagcaacacccatctgatcaaactcaagacttatcttcaaaaggaacacaaactaaacaatcacagtctatagaagatagagataaaacagtaaaacaaccatcttctaaagtacacaaaataggtaacacaaaaactgataaaacagttaaaacaaatcaaaaaaagcaaacatcattaacttcaccacgcgttgtgaaatcaaaacaaactaaacatatcaatcaacttactgcgcaagctcaatataaaaatcaatatccagttgtgtttgtacatggatttgtaggtttagtcggtgaagatgcattcagcatgtacccaaattattggggtggtactaaatataacgtgaaaaaagaacttacaaaattaggttaccgagttcacgaagccaatgtaggggcatttagcagcaattatgaccgtgctgttgaactgtattattatattaaaggtggaagagtagattatggtgcagcacatgctgcaaaatatggtcacaagcgttatggcagaacatatgaaggcatcatgcctgattgggaaccaggtaaaaagattcatcttgttggacatagtatgggtggccaaacgatacgcttgatggaacattttttaagaaatggaaatcaagaagaaatagactatcaacgtcaatatggtggtacggtatctgatttgtttaaaggtggacaagataacatggtgtctacgattactacattaggaacacctcataatggcacacctgctgcagataaactagggtcgactaaatttatcaaagatacaattaatagaattggaaaaattggtggaactaaagcgctcgatttagaactaggtttttctcaatggggcttcaaacagaaacctaatgaatcatatgctgaatatgcaaaacgtatagcgaatagtaaagtttgggagactgaagatcaggctgtaaatgatttaacaactgttggagcagaaaagttaaaccaaatgacgacattgaatcctaatatcgtctatacatcatatacaggtgctgcaacacatactggaccattaggcaatgaagtgccgaatattagacaattcccactattcgatttaacaagtcgtgtgataggtggagatgataataaaaatgtcagagtaaatgatggcatagtacctgtgtcttcttcactacatccaagtgatgaagcatttaagaaggtaggtatgatgaacctagcaactgacaagggtatttggcaagtgagacccgtacaatatgattgggatcatctagatttagtcggcttagatactactgattataagcgaactggagaagaattaggtcaattctatatgagtatgataaataatatgttgaaagtcgaagagttagatggtactacacgtaagtag

SEQ ID NO: 3629 - DNA, 717 bp, Staphylococcus epidermidis
atgaataaagaaaataataaagaagcggaaattaaagaaaattttaataaaacattaagtatgtatccaattaaaaatttagaagatttatacgataaagaaggctatcgtgatgaagaatttgaaaaagaggacaaagggacatggattattaattcagaaatgaatattcagaaaaaaggtcaagcgatgaaatctagaggtatggttttgtatatgaatagaaatactagaaagacgactggtcatttttatacaaatataattacagaagataaaaaagggagagtgcacagtaaagataaagaatatccggttcgccttaaaaacaataaaattgaaccgactaaacctatcgccgatgaaaaattaaaaaatgaaattaaaaactttcagtttttctctcaatatgggaattttaaaaatttaaaagactacaagaatggaaatgtgtcttataacccaaacgtaccaagctattcggcagagtaccaattaagtaatgaagatgacaatgtgaagcaactcagaaagaggtatgatattccgattaagagagctcctaaattaatattaaaaggtgatggtgatcttaaaggttcatctataggttataaagaaatcgagttatcttttgtcagaaacaaagaagaaagcatctacttttcagatagtgtggaatttaatccaagtgatgtaaataatgagtcgaagtaa

SEQ ID NO: 3630 - DNA, 882 bp, Staphylococcus epidermidis
atggaaatcattattatcggtggttttttaggaagtggcaagacctcagcaataagtcatttaatcgctgatgcacttgaaaacaacttaaatcctgctgttattataaatgaatttggaaaaagaagtgttgatggccaacttatagaacgtcctgaagtacctatgagtgaaatcactgaaggatgcatttgttgtgcgatgaaatcagacgtatcacaacaactacatgaactatacttaaaatatcaaccagatatcatctttattgaatgcagtggtgtagctgaaccactagctgtcgtcgatgcatgcttcacacccgtacttgcaccttttatcactttaaggagtatggtgggaattattgatgcaagcatgtattcacgaattaaatcttatccacaagacattgcagctctattttatgaacaacttcgtcattgttcgactttatttgttaataaaatagataagatagaggtggaagaaaccgcccgcttgctacgtcaactcgagcacctcaatagcgatgccaatattcaagttggtcaatttggagaattaaatttaaaatcactactagagctaacacatataaattcaaatgcatgtagcactttgcataataatataaatcatcaattcatcgagaatcctaagatacaaacaaaagaagaaatgatcagtgcgttagataacttgtctcaagatgtttaccgtgtcaaagggtttgttcgtttttcagatcagcaacacgtttatttagtacagtatgcacaaggaaatatagaattatctcccattcaacttaaaaacgatgtaccattgtacctcattgttataggaaaacatttaaaacaaatacaacttgatttataa

SEQ ID NO: 3631 - DNA, 1383 bp, Staphylococcus epidermidis
atgttaaaagtaacctttaatttacgtgatgggacgtttactgacattccagatgatgcacatgagttgatcattgaaggttatgacaaattaacctctagccaacaagttttattaaaacgttacattatcaaacaccaattagatatttcattacaacatgctattctttcatctccactccatagtttaaatatgattaaaaagttagagacttttgttaaggagagcaaagcataccatcctcaatttcacaatattatttgtggatggtgctttattgtacttatgtttgctttacccatctacttgtcttatcacgtttcagacggattacaatactacgtgtcacactggttaactaaactatcccaaatatcattatttcaagaaaataagctacaacatattttattcggtcactatggtgtcatttctttaggtacatattcattcgtctgggcgttaccagttgttttcatgattagtttatctacagctcttatagataaaactcatttaaagcattatatcgtttggtctatcgaacctacgatgatgagacttggtcttcatggatcagatatcatacccttgttagaaggatttggatgtaatgctgctgctattactcaagctacacatcaatgtcatcgttgtacaaaagtacaatgtatgagcttggtaagtttcggaactgcatgtagttatcaaattggtgctacattatcgatattcaacgcaagccaccgctcttggttgtttttaccatacataggcatggttttcttaggaggaatcatacataacaaactatggtatagtcatcaaacgcctatgacaacaccatcagttttccaacgacaacctgtacgttggcccaaaccaaagctactcttaaaagcagcgtggaaaagtattcaaatgtttattgtacaagccttacctatttttataggaatttgccttattgtaagtctattgtctcttacgtctattttgacttttatatcaaatgcattcatacctttattatggctactagatgtacctacacaacttgcaccaggtattctgttttcaatgatacgtaaggatgggatgttgttgtttaatatggatggcggtactttaattcaaagactttccgcattccaattattgttgctagtcttttttagttcaacatttacagcatgttcagtaacaatgactatgctcatgcgtcgactcggttcaattctaggaattaaaatgataatgaaacaaatggtatcgtccacaatttgcgtcaccatactagtcatagcaatgttaagcataactaaaatttcagacttaggagtgatgttatggaaatcattattatcggtggttttttag

SEQ ID NO: 3632 - DNA, 1107 bp, Staphylococcus epidermidis
atgtctcatcatcgcgtcattatcatcggcgcaggcgcagctggtgtgggtatggcaatcactttacaagaattctgtattaaagatgttctaattgtagaaaagggatccatcggcaattcatttaaacattggcctatctcaaccaagaccatcacaccatcatttacaactaatggttttggcatgccagatatgaatgctatagctaaagatacttcacctgccttcactttcaatgaagaacatttgtctggaaataattacgctcaatacatttcattagtagctgagcattacaatctaaacgtcaaaacaaataccaatgtttcacgtgtaacatacatagatggtatatatcatgtatcaacggactatggcgtgtatacagcagattatatatttatagcaaccggagactattcattcccgcatcatcccttttcatatggacgtcattatagtgagattcgagcgttcactcaattaaacggtgacgcctttacaattattggaggtaatgagagtgcttttgatgcagccatacaccttagtcaaacaggtgcaaaaatatcaatatacacatctaaaactggacttaataaggaagatgcagacccaagtataagattatcaccgtatactcaacagcgattgcgtaacgctatacaagatggtgcattaatcgaaatgcatgttggctaccaggcacgcaaaataacatatcaaaaccattcctataagatacattttgataatggacatattgttcactctcatactgaaccgattatcgcaactggatttgatgttacccaaaaccctttaatagaacaactatttcaagtacgacaatcagaagttcaattaacagaattagacgaatctacaaagtttcctaatgtatttttaattggagcgactgtacgtcatcaaaatgccattctttgttatatatataaattcagagcacgttttgcagtattagcacgcatagtaagcctacgcgaaggcttacctgaagatacgtctttaattcagtcatatcgtcaaaaaaatatgtttctagacgattatagttgttgtgatgtgaattgcacatgttaa

SEQ ID NO: 3633 - DNA, 996 bp, Staphylococcus epidermidis
atgtataaaaaaggtttaattttattttttgtagcagtactaacattggcacttgctgcttgcggtaaagatagtcataatcagtcatctgatcataaaggaaaattagatgtgaagacaacagtctatccacttaaatcatttgcacagcaaattggtggtaaatatgtaaatgttgaatcggtttaccctaaaggcgtagatccacatacatatgatccaagtcaaaaacaaatggtagatattgggaaatcagacttattcttatatactggtgataacttagatcccgtagctaagaaaatcgctaaagctataaatgataaagataaaacactatcactagaatcgactttagataaaaataaagatttattaaaaggcgaagaacatgaacatgagcacggagaaggtcacgaacatggtgaatcacatgaagatgaacacgaacatgaacatcatcaccatggaaaatacgacccacacatttggttggatcctgtagtaagtcaaaaatttgctaaagcgattaaagatgaattgattgagaaagatagcaaacataaatcttattatgaaaagaattacaaccaactagttaaagagttaaaaggcttagataaagatatgaaacatgctgtgaaaggtaatgaagataaaactgtttatatttcacacgactctataggttatctagctgaacgctatcattttgaacaagaaggcattgaaaatatgaatgcggaagaaccaagccaaaaagatttaacaaatattgttaaacaaattaaagaagataaagtgaaaaatattttaatagaagaaaatgtatctcataaagtagcagatacggtaagaaaagagacaaatgctaaaacaattaaattttacaatatgggatcacacacaaaacaacaagatgatgacaaaaacacttaccaatcatttatgaaagaaaatattaaagctattgaaaaagccctacaaaatgaataa

SEQ ID NO: 3634 - DNA, 906 bp, Staphylococcus epidermidis
atgattaaagcaatggggacggtgatacgtttatcgattgagcatcaacatccggatacattacttcaagaagctgaaataaaaattcgtgcttgggaatcacaatttagtgctaatgatccgaaatcagatttgatgaatgtgaatcagcatgcaggtatcgcaccagtcaaggttagttctgagatgtttaacatgatacgttttggttatgaaactacattatcttctaattttaagatgaacattttgatagggccactagtcaaattatggaaaattggttttaaagatgcattgaaacctaaagaagaggatatacaacgtactttattgtgtatggatcctgaaaatcttgttctaaattcaaaaacacatgaagtatttcttacacaatcaggaatggagattgatttaggagctatagttaaaggctattttgctgatcaattacaacaatactttttagctcatggtgtatcttctgccattatcgatttaggtggtaatgttttaacaatcggtagacaacccgaaacattagaaaaatggcatgtaggtgtacgtaatccatttcataaggatgcactaccactcgttacattaagcgtagagcatcaatcagttgtcacatcaggtatctacgaacgctacttcatacaggaaaatcaattatttcatcatatattggattcaacaacaggttatcctgtagataatgatatcgctagcgtgacaatcatatctgatcatgggattgatggcgaggtatggagtacaatttgtagttttggtcagtcacaaaaaaatattgaattattaaatctcattgacggtattgaaggcattattgtgacaagagatggaagcgttttaatgacttcgaaaatgcaaaagtatttataa

SEQ ID NO: 3635 - DNA, 3018 bp, Staphylococcus epidermidis
atgagtaaggaaatattcgatacttttaaatttaaatgtggtgccgaattaaaaaatagagtattaatggcacccatgactatccaagctgggtattttgatggaagtgttacatcagaaatgattgattattatcaatttagagctggtgatgcttcagcaatcattgttgaaagttgttttgttgaaaatcacggacgaggatttccgggagctataggtattgataatgatgacaaaatacctggactcaaacgtttagcagaagcgattcaagctaagggatcaaaagcgattttgcaactttatcatgccggaagaatggcaaatcctaaatttaatgaaggagagcagccgatatctgcgagccccattgcagcattaagacctgatgctgtaccacctagagaaatgacacatgctcaaatcaatcagatgattgatgactttggagaagctacacgtcgcgctatagaagcggggtttgatggtgtcgaaattcatggcgccaacacatacttattacaacaatttttctctccacattctaatcggagacaagattcatggggaggcagtcgtgaaaaacgtacacgatttccaatcgaagttttaacaaaggttcaacacgtcgttgctgaaaaagaggcttctcattttattataggatatcgattctcacctgaagaaattgaagaaccaggcatacgttttgaagatactatgtttttactaaatacattagcagaatatgaacctgattacttccatatatcagcaaacagttatcaacgtacatctattgtgaatcaagaagatacagaacctttaattaataagtacatcaaaatgcaaagtgcacagttggcaaaaattccattaattggtgtaggtagtattgcccaacgacaagatgcagaacatgcccttgaactaggatatgatcttttaagtgttgggaaagcctatttagtggaaccacaatggacagataaaatttcacaaaacgaagaagtagaacaatttgtcgatatacatgatcagaaagtacttcacataccatcccctttatggaaagtaatggactttatgattttagataaagaagaagagcatcgtaaatatgaaaaattaaaagcacttcaaaataaaaaagttaaatttaacaaaggtacgtatcatgtctatgcaaaaggtcataatggcaacttacctatgaaagtccaattatcagaagataagattgtaagtatcgaggtagatgatagcggagagtctgaaggcatagcgaacccagtgtttgaacgtttacctcaagatattatcaatgggcaaacattgaatgtagatgtcatttcaggtgcgacagtaacaagtgaaggcatcgtgcaaggtattgcagatgcaattgaacaagcaggagaagacccagatattttacgggcgcgtcctaaaccagtcgttcagtggtctgatgaggtcgttgaagagacgactgacgtcgttgtgatcggtacaggaggtgccggactcagtgcagctgctacggtattagatgaaggaaaagaagtcatcatgcttgagaaatttgcggctataggtggcaatactatccgtacaggtggtcaaatcaacgctgctgagcctaaatggcaaaatgcattcccggcacttgctggtgaaaaagagacactcatacagttattaaatcatgatgaaaatgatatagatgaagcttacattgaagatttcaatactttaaaacgtcaaattaaagactatcttgaaaatagcagtaatgaagatgaatatctttttgattctgtcgaattacatcgtattcaaacatatttaggtggtaaacgtaaagatcgtaataatgtcgaaatatcaggtgattatgatttagttaaaacactcacagataacgttttggaatctgtatactggttgaaagacaaaggtgtacattttgatcgttcgtttgtagatatgcctgtgggtgctttatggcgtcgtggtcataaaccaatgaaagcacaaggtttagagtacattgaaaatttaggagactacgttaaacataatcatggtcgtatttttacagaaactactgcagaaaagttaatcaaagaaggtaatcaagttgttggtattgaagcacgtaaagcaaatggtgctaaagtgaagattcatacacgtcatggtgtagtgttggctactggtggctttggagcgaatacaaaaatgctacaacaatataatacgtattgggataatattcctgatgacattaagacaacgaattctcctgcaattacaggtgatggtatccgtttaggtgtgcaggcaggcgctgacatcgtaggtatgggattctctcaaatgatgccgatttctgatccgaagacaggtgcattatttactggattaatcgtaacaccttcaaactttgtcttcgttaataaggaaggacaacgttttgttaacgaatttgaaagtagagatgtattatctaaggcagcattagaacaaaaagacggtatcttctatattattgcagatgcaaatattaaagcactagctatgaatacaactgaggacaaaattaatcaagaattagaagacggcactttagtaaaagcagataccttagaagcattagcccaaaaattaaacattgatacaactacttttgtgaacacgattgaaagatataataccttcgtagaacaaggacaagatgaggatttcaataaaaatgcatttgatttaaaaattgaaaaagcaccattctatgcgacaccacgtaaacctgcaatacatcatactatgggtggtttaaaaataaacacgcatgcacaagttatagatgttgaaggtcatatcattgaaggtttatatgcggctggtgaagttgccggtggtattcatgctggtaaccgtttaggcggaaatgcactggcagatatttttacttttggtcgcattgccggtcaaagtgctgtaacgaaataa

SEQ ID NO: 3636 - DNA, 1377 bp, Staphylococcus epidermidis
atgagcgaacagtttaataaagggaaacaactaattgtagcgattatcttagggattctcacatactggttatttgcacagtcttttttgaatatcgcaccacatgttcaacgtttttatcatgtagatatgagtattgttaatattgcggtcagtctgacatcactcttaacaggtgtatttatagtcgtagcagggggattatctgataaaataggtcgagttaaaatcacaaatgcaggtctaatattaagtatacttggctctattgcattgattatctcgcatgcaccaattttattattattagggcgtgttttacagggcttatctgctgcatgcttacttccagcaactatcgcgttaattaattctttcttccaaggtgaagaaagacaaaaggtgcttagttattggtcattcggatcctatggtggaacagggttagcatccctatttgctggaattatagctacatttattggatggcgatggattttcgtgttgtcaatcatcttttcaattatcgccttaatattgcttagaggtataccagaatctaaagatgagtctgcatataataaaaaatttgatatcgttggaatcattatttttgttgtcatgatgttaagcattaacgtagtgattacgcaaggcgatagaattggatggttaaatcctcttatattgatattaattgctatattcattgtgacattaattgcattttatatatttgaaaaacgtcaagatgaaccttttatagatttaagtttattttcaaataatgtttatattggaacaacattagccaacttgatggtgaacatggatattggttcattagcattatttaatatttatgttcaagacgataagcatttatcagctgcacaagccggtttaattacaattccatatatgctgtgtagtttgttaatgattcgtgttggtgaacgttttatgcaaaaaagaggaccgcaattgccattgatgttaggtccggtatcaattactgttggtattatacttttagcattcacttctttgcctaatatgatttattatattgtggcatgtattggctttatctttataggtctaggattaggattttttgctactcccgcgctatctactgctgtatctaatgttccagctgaaaaagcaggtactgcatcaggaattatcaaaatgacttctacactaggtgcagcatttggaatcgctgttgtgacaacaatatatacggcattatctgtaaatcacccggcatatttagcagctactatcgcatttatcgtgggtgcaggtttagtgtttatcgcatttattgcggcgtattgtttaattcctaaaaagaatgtaaatatttaa

SEQ ID NO: 3637 - DNA, 774 bp, Staphylococcus epidermidis
atgagtaaaacagcaattataacaggtgcagcaggtggattaggtaaaggtattgcagaacgtcttgctaacgatgggtttaatatagtactacaagatattaatgaagcacttctattagaaactgagaaagaattcaaagaaaaaggttatcaagctgtcgcattcaagagtgatgtatctaaaaagaaagaacaggaagaattagttcagttcgcagttacagaatttggtcaattagatgtcatggtgaataacgcaggtgttgatgcagtgacgccaattttagaaattggggaagaggaattatctaagttatttaatattaacgtatttggtacattgtttggaattcaagcagctgctaaccaatttattaaacaaaaaagtaaaggtaaaattatcaatgcatgtagtattgcaggacatgaatcttatgaagtactcggcacttactcagctacaaaacactctgtacgttccttcactcaaacagctgctaaagaattagcagacaaaggcattaccgtaaacgcttattgcccaggagttgccaaaactgaaatgtgggatcgtattgatgaagaaatggtgaaacttgatgatagtctagaaataggagacgcgtttgaagcattttcttcagaaatcaaacttggaagatatcaagagccatcagatgttgcgaacttagtatcattcttagcttcaaatgattctgattatattacaggccaatccattttaactgatggtggattagtgtacagataa

SEQ ID NO: 3638 - DNA, 690 bp, Staphylococcus epidermidis
atgatagatattcaaaatgtttccaaaagctataaaaagaagcatattttcgattccctagatatgcaatttcaaaatcataaaattactattttattaggtgaaaatggtgctggaaaatctacattattgcgtttaattgcaggtattgagaatgcagacgaaggacgtattcaatacttcaatcaatatttgtcaagacgtcgaatacgtcatattgtaggctatgtccctcaagacatcgcactattcgagcatatgactgtcatggagaacattgagtttttcaagtcactttgtgaaaatcctatttcagatgaaacacttcattcttatttatcacaattaaactttactgatacaaaagtgaaagtatctaacctttctgggggaaataaacgtaaagtcaatattatgataggtctacttagtcggcctaaaatacttattctagatgagccaacagaagacattgatttagaatcaagatatgatattcacaacttattacaacaaatgaccgatcaatgtttaatcatcatgacgacacatcatttagacgaagttgaagcactagcagatgatattaaagttataggtcaaaatcctttttatcatgatattttagaaaataaaggttggtcttttaaaaaatatgcaaatgccttagctgataatacgaaatcttaa

SEQ ID NO: 3639 - DNA, 204 bp, Staphylococcus epidermidis
atgctcatgctattgatgattagccttttaatgcatcaaccattaagcattcttttctacttaaaaacactgattatagttttattttatgaggcaggtattgctttattactttttaaaattaatgttcttagtcaccgtatattcatggctattatttatacggtagcgataggtattatatatttatggattcaattgtaa

SEQ ID NO: 3640 - DNA, 840 bp, Staphylococcus epidermidis
atgcaacgtcaagtggtcgaattttcaaaatataatccatctgggaatatgacaattcttgttcattcaaagcatcaaccgagcgaatatgctgcgattgcacatcagttgatggcgacaacacacatgtgttgtgaacaagtagggtttattgaatcagtaaactatgaaaatggggataactatcacttggtaatgagtggaaatgaattttgtggtaatgcgactatgtcttacattcactatttaaaagaacgtttattgatacagcatcaacaatttcaattaagagtttcggggtgttctcatcctgtagagtgtaaagttcattcgcaacattatgaagtgactatgccaaaagtacatcaagttaaggaaagatttgtgaaattaggggaacagcagtttaaagcatttgaaattagctatgatacatacattcactatgtgatgatgtgtgatgatgtagatttggcaataaaacagtgcgtggaagattttgtcagtgcgcaaacatggcatcgacaatttaaaacaattggtgtcatgctttttcaacaagataaacaattcatatatccactgatacatatacctgcaatagatagcttaatctgggaaaatagctgtggttcaggagcggcttctatcggtgtgttggttaattatctaacagatcatgatattcaagattacctagttaaccaacccggaggcagtattattgtctcatccagaaagtctggacaaaatgaatatcaaacaacgattaagggtcaagtttcaactgtcgcaacaggacaagcatatatagaacaggagacaatgacgcaaatatga

SEQ ID NO: 3641 - DNA, 816 bp, Staphylococcus epidermidis
atgaatgagcatacaaaaatagagaaccaattacaatattatttagaacaatttacgtacttacatcaactcgttttggaagatagtcggcatattgttgatttagaaaatttgattgatgaatacagtcaatggatacttcaacctttggcagagcatcattatttaacatggaatgatttagaaacaaaaataagctttaccaagaagcttcaagaggtatcagcaaagtgtgtgaaacaggtagaagtcattcgagcacaacgtttgttgaatggtagggcctccacgtcaggttatttcgaaaatatagagcattgtattaatgaagaattcggaagatggcaaattggacaaaatgacaagttgttactgattgggtcgggtgcatatcctatgacattaattcaagttgctaaagaaactggcgctgcggtcattggtatagatatagattcggaagcagttgatttagggcaacgtgtcgtcaatgtactagctccaaatgaagatatcgttattagtaatcaaacagttgatcaattagaagacatccaatctgtgactcatattattttcagttcgacgatacctatcaaatatgacattttgaatgaactttacacattgacgaatgatgaagttgttgtagctatgcgatacggtgatgatatgaaagcattgtttaattatccatctcaagcaactgacgaaacacaatggcgatgtgaagaactacaaacacgaccgaagcagatttttgatattgcactttatcgtaaagtggcatcaaaagttggtgttgaacatgtctaa

SEQ ID NO: 3642 - DNA, 1293 bp, Staphylococcus epidermidis
atgtctaaaatattaatggttggtagtggaccggtcgctattcaacttgctcgactatgtaacttacatggggaacatatggttgatatggtgagtcgcgttcatgcatcaaccaaatctaagagagtctttgatgcgtatcatcgtgacggctttttttcagtaatgactcaaaatgatgcacatcagtgtttttcaggtaagtttacggttagacatttttttaaagatgttaaagacattacacaatattatgacgtggtgattttagcatgtactgctgatgcgtatcgaccgatattacagcaattatctaagtccacattaaaacgtattaaacaaattatcttggtctcgccaacattaggatcacatatgcttgttaagcaaatactaacagatgttcattgtgaaggtgaagtgatttcgttttccacttatctaggcgatacccgaatatttgataaagcacaaccgcattgtgtcctaactacacgagttaaatcaaaattattcgtaggttcgactcattctcagtctattacgttgtataagcttaagtctttattcgactatttgaatatagaattaacaacgatggacacaccgctacatgcggagatacataatagttcactttatgtacacccaccattgtttatgaatcaattttcattaaaggcggtatttgaagggacgaaagtgccagtatacgtatataagctatttccagagggtccaattacaatgaccttaatacatgaaatgcgattaatgtggcaagaaatgatgatgatattaaaaaaattaaaggtaccctcggtcaatctcctgaagtttatggtgaaagaaaattaccctatacgtgatgagaccatgcgcgaagttgatattgaaagctttgaaaatttatcagctattcatcaagagtatctactttatgtgcgatatacagcaattttaatcgatccattttctaatccggacgatcaaggtgcatattttgatttttctgccgtaccatacaaacatgttgatactgatgaacaaggagttatacatataccacgcatgccgagtgaagattattatcgtactttgatgattcaagcaattggaagagcattaaacgttgcaacaccgatgattgacacattgttattacgttatgaaactaccgttaaacaatactgtgatacacatttacatcaacaactatcaaagcaattcgaattacatcattttaaacaggatttagcgttagtgacgaactacttaactttttataaataa

SEQ ID NO: 3643 - DNA, 1599 bp, Staphylococcus epidermidis
atgaataaactcacaaaactaagtacagtcatttttgtatctgggattattttagccggttgtggaagtaacaaagaactaacagagaaaaaagagaataaagtattatcatatacaactgtcaaagatattggagatatgaatccccatgtttatggaggttcaatgtccgcagagagtatgatttatgagccgttagttcgcaataccaaggatggtattaagccattattagcgaaaaaatgggacatttcacctgatggtaaaacatatacgttttatttaagggacgatgtatcttttcatgatggtacgaaatttgatgcagacgcagtgaagaaaaacatcgatgcagtacaacaaaataagaaactacattcatggttaaaactttcaacactgattgatgatgtcaaagttaaggataagtatacggtacaactacatttgaaggaagcttatcaacctgcgttagcagaactagctatgccacgaccatacgtttttgtatcgcctaaagattttaaacacggtacaaccaaagatggtgtgaaatcatttgacggtacaggaccatttaaaatgggtgaacacaaaaaagatatatctgcagaatttaataaaaataatcaatattggggagaaaaggcaaagttaaataaagtagaagcaaaagttaaacctgctggagaaacagcatttttatcaatgaaaaaaggagaaaccaactttgcttatacagatgatagaggtacagacagcttagataaagatagtttaaaacaattaaaagaaaccggaagctatcaagtaaaacgtagccaagccatgaatacaaaaatgcttgttgttaattctggtaagaaagatagtgcagtcagtgataaagcagtcagacaagcattaggtcacatggtaaatagagataaaatagctcaagatattttaaacaagcaagaaaagccagccacacaactatttgctaaaaatgtgacagatataaactttaatttaccaacaagaacatatgataagaaaaaagcacaagcgttattagataaggccggatgggtgctttcaaaagatcgacaagttcgtcaaaaagagggcaaagatttgaatcttaagttgtattatgacaaaggctcttccagtcaaaaagaacaagctgaattcttagaggcagaatttaagaagttaggtgtacaactagatataaacggagaaacgtcagataaagtagctgaacgtcgtagttctggtgattacgatctaatgtttaatcaaacatgggggctattatatgatcctcagagtacattagcagcatttaagacgaaaacgggatatgaaagtgcaacattaggtattaagaataagtcacaactgtacaaagatattgatgaggcgttcaaaattcaagatgcaaaggaacgttcaaaagcgtatcagcaaattttgaaacaagttgacgatgaaggtgtctttattccaattactcacgggagaatgactgttgttgcacctaaagatttacaaaaattatcctttacacaatcacaatatgagcttccatttaatgaaatgcaatataaataa

SEQ ID NO: 3644 - DNA, 936 bp, Staphylococcus epidermidis
atggttaaatttattatgaaacgtcttactctcatgattccattattgattgtagtgacttttatgactttcatgatgacctatctcacgaacgaagatccagccgtaacaattttacatgcccaaggaacgcctaatataacgcaagatttaatagctgaaactaaagaaaaatatggattaaatcaaccgatattcacgcaatataaaaattggcttgttgatgccttgcagtttaaatttggaacgagttatatcacaggggatccagtatctgagcgtatggggccagcgtttatgaatacattaaaactcactttgatttccagtgttgtggtaatgataacgtctgttgtactaggcatagtgagtgctttgactagtggtagatttacagatcgtgctatacgttcaatagcttttctactaacagctctgccctcatattgggtagcttcaatattaattatttatgtatctgtaaaactcaatttattaccaacctcaggactcactggtccagaaagttatattcttccagtctttgttattacgattacctatacaggaatttattttagaaatgtccgacgatctatgcttgaacaattaaatgaagattatgttttgtatttaaaagctagtggtgtacctcgtctgacaatgttgctgcatgtattacgtaatgcattacaggtagccatatctattttttgtatgtcgataccaatgattatgggaggtctagtcgttattgaaaatgtatttgcgtggccgggtttaggaccattaagtattaaagcgattactgaacatgattttccagtaattcaagcatacgtgctcattgtcgcggtgttgtttattctttttaatacacttgcagacatcattaatgcaatattaaatccgcgtttaagggaggcaatgaaatga

SEQ ID NO: 3645 - DNA, 879 bp, Staphylococcus epidermidis
atgattgtgttacgtcgtctatttcaagatagaggtgccatatttgctatagctattattacaatctacgtagtgcttggagttttagctcctttaattacattctatgaaccgaatcacattgatacagcaaataaatttgctggtataagttggtctcactggttgggaacagaccatttaggtcgagatgtattaacacggataatatacgccataagacctagtttgttatatgtatttgtcgcattgattatttccgttgtgataggagcgatacttgggtttatttcaggttatttcccaggttatatcgatgcaataattatgcgtatatgcgatgtgatgttagcttttccaagctatgtggtcacattggcattgattacgttgtttggcatgggtgtagaaaatattattattgcatttatattgactcgatgggcgtggttttgtcgcgtgattcgaaccagtgtaatgcaatatattgaagctgatcatgtaaaatttgccaaagtaattggtatgaatgatttaacaatcattcgcaaacatattttgccactaacctttactgacatagcgattattgctagtagttcgatgtgttcaatgatattacaaatgtcaggattctcattccttggattaggtgttaaggcacctacagccgaatgggggatgatgcttaatgaagcacgaaaagtaatgttcacacatcctggaatgatgatgacaacaggtgtggctatcgtcataattgtgatggcgtttaactttttatcagatgctttacaaatggcgattgatcctcgtatgtccgctaaagaaaaacgactggctctgaagaaaggtgtgaaagcacgtgacactgcttaa

SEQ ID NO: 3646 - DNA, 816 bp, Staphylococcus epidermidis
gtgacactgcttaaagtagcacatttaggaattaaggacacatggtcagatgagacgctcgttgataacgtgaatttcacagttcaatgtggagaaacattaggtattattggagaaagtggaagcggaaaatcgattacttgtaaggcattaataggtttaaacgctcaacgtttatctgtaagcggagatatcttttttgaacatcaaaatttaaatacaataactgaaaagcaactacgcaaaattcgtggtaaagatattgcgatgattatgcaacaaggaacacgggcatttgatccttcaactaaagtgggaaagcaaatgattgaaactttgcgtgcacatacgacattatcaaagcaacaaataaaacaagaacttattcattatatgacgtatatgaagttgaaagatcctcagtcattattaaaagcatatccctacatgttgtcaggtgggatgcttcaacgtatgatgattgcactagcattagcattgaaacctaaattgatcattgctgatgagccgaccacagcattagataccatcacacaatatgaagttatcaatgcttttaaagatataaaacatcattttgattgcgccatgatttttatatctcatgacctcacagtgattaataaaattgcagaccgtgttgtagttatgagagaaggtcgtgtgatagaagaaggtcgaacaaatatggtattacaacaacctcgtcatcactatacagcttatttattatcaactaaaaagacaatttatgattattttcagtttgtgctgaggggtgatttcaatgcttaa

SEQ ID NO: 3647 - DNA, 750 bp, Staphylococcus epidermidis
atgcttaaggttcaaaatgttattaaattttatggaaaaaaatcaatgtttcgtgataaacgtattcctgtagttaaaggcgtgtcatttgattgtcccactggtgcatcagtagcaattattggtgaaagtggaagtggaaagtctacgttgagtcgtatgattttaggactagaaaaaccagatcaaggacaagtgactttggacggtcagcctgttcatttaaaaaaagtgagacgtcatcgaattgctgcggtttttcaagactatacttcttctttgcatccttttcatactgtcaaagatattttgtttgaagtaatgaatcaatgtcgatgtacatcgaaggagaatatggaagagtatgtaacagtgttactacgtgaagtagggttaaaatctgattgtttgtattgttatccacatatgctttcaggtggagaagcacagcgtgtagctattgcacgtgcgatatgtatgcaaccagattatatattatttgatgaggcgattagttcattagatatgtctatgcaaacacaaatattagatttattgaaaaggttacgtcactcacaccagctgagttatatctttattactcatgatatacaagctgcgacatatatatgtgatgacttgcttatttttaaaaatggttgtatcgaagctaggacatctataagtgaattgcataggcaacaaaatggttatacaagagaactgattgataaacaactatcaatctaa

SEQ ID NO: 3648 - DNA, 1191 bp, Staphylococcus epidermidis
atgaaaggtgccatgtcttggccttttttaagattatatattttaacattgatgttttttagtgcgaatgccatactcaatgttttcatacctctaagaggacatgacttgggggcgacgaatactgtaattggaattgtaatgggagcttatatgctaacggcaatgctatttcgcccctgggctggtcaaattattgcacgtattggtccgattaaagtattgcgtattatattattgattaatgctatggcactggtattatatgggtttacaggacttgaaggttatttgattgcacgtatcatgcaaggtgtgtgtacggcattcttctcaatgtctttacaattgggtattatagatgctttacctgagaaatatcgttcagaaggtgtatctctctattcattattttcaacgattcccaatttattaggaccattaattgcagttgggatttggcacgtggaaaatatgtccatatttgctattgttatgatttttattgcagtaacaacaaccttatttggttatagaactacttttgcaaatacacaaaaagaggtatcaccaaaagacgaagtcttgccttttaatgcaatgactgtatatgtccaattttttaaaaataaagcactcttctgcagtggtatgattatgatcttgtcatctatcgtgtttggtgcgatgagtacttttataccattatatacggttagggaaggtttcgcgaatgcaggtattttcctcacaattcaagccattacagtagtgatagctagattttatttacgtaagtatgtaccatctgatggtttatggcatcaccgttttatgatgattgtcttaacgttactgatggttgcttcagtcattgtagcttttggaccacatatagtgagtatatttgtatatataagtgcaatctttatcggaataacacaagcgctcgtttatcctacattgacaacgtatttaagttttgtcttaccaaagataggacgtaatatgttattaggattgtttatagcatgtgcagatttagggatttcactaggaggtgtgctaatggggccaatatcagatacggtaggatttaaatggatgtatattttatgcgctttattggttactattgcaatgacactaagtaaaattagacaaagacaaagtgtttcaaaagcctcatag

SEQ ID NO: 3649 - DNA, 2247 bp, Staphylococcus epidermidis
atgttagaaacaaataatcatactaatgcttggcaaggatttaaaacaggtcgttggaataaaaatatagacgtgagagaattcatacaattgaactattcattatatgaaggtgacgatgaatttttagaaggtcctacaaaagcaactgaaactttatgggatcaagtaatgcaattatcaaaagaagaacgtgagcgcggtggcatgtgggatatggatactaaagtggcatcgacaatcacttctcatgacgctggttacttagacaaagatttagaaaaagttgttggtgttcaaactgaaaaaccattcaaacgttctatgcaaccattcggtggtattcgtatggcaaaagcagcatgtgaagcgtatggttacgaattagacccagaaacagaaaaaatcttcactgaatatcgtaaaacacataaccaaggtgtattcgatgcatattcaagagaaatgttaaattgtcgtaaagctggtattattactggtttaccagatgcttacggacgtggacgtattatcggagactatcgtcgtgttgctttatacggtgtagacttcttaatggaacaaaaacttaaagactttaacacaatgtccactgaaatgtctgaagatgtgattcgtttacgtgaagaattatcagaacaatatcgctcacttcaagatttaaaagaattaggacaaaaatatggatttgatattagccgtcctgctactaacttcaaagaagctgtgcaatggttatacttagcatatttagctgctattaaagaacaaaatggtgcagcaatgagtttaggacgtacttcaacattcttagatatttatgctgaacgtgatttacaaaatggtgacatcactgaacaagaagttcaagaaatcattgaccacttcattatgaaattacgtatcgttaaattcgcacgtacgcctgaatataatgaattattctctggagatccaacttgggtaactgaatctatcggtggtgtaggtattgacggccgtccgatggtaactaaaaactcattccgtttcttacactcattagataatttaggtccagcaccagaaccaaacttaacagtattatggtctacacgcttacctgaaaacttcaaaatctattgtgctaaaatgagtattaaaacgagctcaatccaatatgaaaatgatgacttaatgcgtgaaagctatggcgatgattatggtatcgcttgctgtgtatctgccatgaagattggtaaacaaatgcaattcttcggtgcacgtgctaacttagctaaagcattactttacgctatcaatggtggtaaagatgaaaaatctggcaaacaagttggaccaagttatgaaggtattaaatcagacgtactagattatgatgaagttttcgaaagatatgaaaaaatgatggactggttagctggcgtatacatcaactcattaaatatcattcactatatgcatgataaatacagctatgaacgtcttgaaatggctttacatgatacagaaattattcgcacaatggcaactggtatcgctggattgtctgtggcagctgactctttatcagcgattaaatatgcacaagttaaacctatccgtaacgaagaaggtcttgtaactgactttgaaatcgaaggcgacttccctaaatatggtaataatgacagtcgtgttgatgaaattgcagtagatttagttgaacgtttcatgactaaattacgtagccataaaacataccgtaattctgaacacacaatgagtgtattaacaattacttcaaacgttgtttatggtaagaaaactggtaacacaccagatggacgtaaagctggcgaaccatttgcgcctggtgcaaacccaatgcatggtcgtgaccaaaaaggtgcattatcttcactaagttctgtagctaaaataccttatgattgctgtaaagatggtatctcaaatacatttagtatcgtaccgaaatcactaggtaaagaagaagcagatcaaaataaaaacttaactagtatgttagatggttatgcaatgcaacatggtcatcacctcaatattaacgtgtttaatagagaaacattaattgatgcaatggaacacccagaagagtatccacaattaacgattcgtgtatctggatacgctgtaaacttcattaaattaacacgtgaacaacaattagatgttatttcacgtacattccacgaatctatgtaa

SEQ ID NO: 3650 - DNA, 756 bp, Staphylococcus epidermidis
atgcttaaaggacacttacactccgttgaaagtatgggcactgtcgacgggccaggacttagatatatattatttactcaaggttgtttgttaagatgtttatattgtcataatccagacacttggaagattaacgaaccatcaagagaagtgacggttgatgaaatggtaaatgaaatcttgccgtaccaaccttactttgaagcttcaggcggtggggtaacagtcagtggtggcgaaccattactacaaatgcctttcttggagcaattattcaaagaattaaaagcaaatggtgttcacacatgcattgatacttctgcgggctgtgtaaatgatacaccagcatttaatcgtcattttgatgagttgcaaaagcatacagatttaatcttattagatattaaacatattgataatgataagcacatcaaattaacaggcaaacctaacacacatattttaaagtttgcacgtaaattatctgatatgaaacaacctgtttggattagacatgttttagtacctggtatttcggatgataaagaagatttgataaaactaggagaatttattaattctttagataacgttgaaaagtttgaaatcttaccatatcatcaactcggtgtgcataagtggaaaaatttaggcattccttatcaactcgaaaatgttgaaccgcctgacgatgaagcggttaaagaagcttatcgctatgttaattttaatggcaaaatacctgtaacattatag

SEQ ID NO: 3651 - DNA, 1218 bp, Staphylococcus epidermidis
atgactgtattgagtgagcaagacaaaataagattattagctgatatcgtcaagattcaaactgagaatgatcatgaaattgaagtatgtgagtacttaaaagacctgttaagtcaatatgatattgattctaagattgttaaagttaatgattcacgcgctaatttagttgctgaaattggtagtggcgctccagtcttagcaatcagtggacacatggatgttgtagatgctggtgaccatgatgattggactttccctccatttgaactcacagataaggatggcaagttattcggcagaggtaccactgacatgaaaggtggtcttatggcgatggtcatcgcgatgattgaattgaaacaatcaaacgcattaaagcaaggtacgatacgtttattagctactacaggagaagaaacggaacaatatggtgcacaattacttgctgatgaaggttacttagatgatgtgagtggtttaattattggcgaaccaactagtaatatcgcttactatgctcataaaggttctatgagctgtgtagtcacagcgaaaggtaaggctgcacatagttctatgccacacctaggtacaaatgctgttgatattttagttgattttgtaaatgaaatgaaacaagaatataaaaatattaaagagcatgataaagtacatgagctagacgctgttccaatgattgagaaacatctccatagaaaaattggtgaagaagaatcacatatctactctggatttgtaatgttaaactctgttttcaatggtggtaaacaagttaattctgttcctcataaagcgacagctaaatataatgtaagaactgttccagagtatgacagtactttcgtgaaggatttatttgaaaaagtcattcgtcatgtgggtgaagattatttaactgtagatatacctagcagtcatgatccagtggcaagtgatcgtgataatcctcttattcaaaatattacacgtattgcaccgaattatgtacatgaagacattgttgtgagtgcattgattggtacaactgatgcatctagtttcctaggaacaaatgaaaataacgtagattttgctgtctttggacctggtgaatctattatggcgcatcgagttgatgaatttattagaaaagatatgtatttaagttatattgatgtttataaagatgtatttaaagcatatctagaaaaataa

SEQ ID NO: 3652 - DNA, 1362 bp, Staphylococcus epidermidis
atgatgaaaaataaactaacattaaaagagaatctatttatcggctcaatgctgtttggtctattttttggtgctggaaatctcatttttccaattcacttaggtcaaactgcggggtcaaatgtatggaccgccaatttaggatttcttatcacggctatcggactacctttcttaggaattatagcgataggtgtatctaaaacaaacggggtctttgaaatttcctcaaggataagtaaaatatatggttatttgttcacaattggcttatatcttgttataggtccgttttttgcgttgccaagacttgcgacgacgtcatttgaaatagcattttcaccatttatttcatctggtacggcccaagcgttgttgcctatttttagtattttattcttcggagtagcgtggttattttcgcgtaaaccttctaaaatattagactatattggaaaattcctaaatccggtctttctcatcttgcttggaattgttgttgtgcttgcatttatccgtcctatgggtggaattagtcatgcgccagtaagtgctgattatagcaatagcgtgttactcaaagggtttatcgatggatataatacattagacgctttggcatcattagcatttggtattatcattgttactacaattaaaaagttggggattactaatccgaatacaatcgctaaagaaactttaaaatcaggtacgattagtattatagctatgggtgttatttatactttattagctttaatgggtacgatgagtttaggtcgttttaaagtaagtgaaaatggtggtattgctcttgctcagattgcacaacattatttaggggattatggaattattattttgtcactaatcatcattgtggcatgtctgaaaacagcaataggattgatcacagccttttcggaaacatttacagagttattccctaaatctaactatctttggttagctactggggtgagtatattagcttgtatatttgctaatgtaggtttaacaaaaattattatgtattcaacaccagtattgatgttcatttatcctttagcgattactttaattttattagcattacttagtccactatttaaacattctaagattgtctatcgatttacaacattatttacaatggtggcggcatttgtagatggtgtgaaagcaagtccagagttctttgttaatacaaaatttgcacaaacaatcattggatttggagaaaattatctcccattctttaacattggtatgggatgggttgttccagcattttttggtttcattattggtattattgtatactttatgactgctaaaaaatcgtcccacgtacaataa

SEQ ID NO: 3653 - DNA, 540 bp, Staphylococcus epidermidis
atgcctagaatttccaaaagacaattaatattagaatcggccgcagctattattaatgaaaaaggtgctgattatctcacgttggatgctgtagctcaaagggctggaataagtaaaggtggtttattttatcattttaaaagtaaagatgaacttatcaaagagctggttaactatgccaataatttgtacagagataacgtgaaccaacatatcggtaatgaaaagaacaaaaaagggcaatggctcaacgcatttatagaagcgacaagagcacatcgtacggataatgcgcctattacttctggaatgttagcggcgcaagggactaatagaagtttattatcaccattaaagacctcatatcaagaatggcaatatcaaattacccacgacgggttagatgaggtagatgcaaccattattcgtttagctgtcgatggtttatggttgtcggaaatattcggaattagtgctatagatgaagaaatgagagagaaagttattgaacgtttaaagatgcaaatagaaaaaaattaa

SEQ ID NO: 3654 - DNA, 894 bp, Staphylococcus epidermidis
atgcaaaaagttgttttaacagcagctattactggcgctggagatacaatacaaaaaaatgagaacgtaccagttacaccacaagaacttgcagattcagcaattaaatgtgcacgagcaggagcaactgtcgcacatattcatgtaagagatcctgaaactggaggagtaagtcatgatccagaactgtatgctgaaacagttagattaattagagaagctgatgaagatatcgtcattaatgtgacatctggtggcggtggagatttcattccaagtctagaacatccagagacaggtggagaaggaacttggattcaaacaccagaagaacgttttaaacctattggtgacttattaccagaaatgtgtacattagattgtggcagtgtcaacatgggagatgcaatatacttaagccctgcatcgtggttacgtaaacaagcacaaatggttaaagatgcaggagtcaaacctgagcttgaatgttttgatacaggtcatgtgagttttgccaaacaaatgatagaagaaggattaattgatggagaccctatgttccaattttgtttaggtattccttggggtgcagagaatgatcctgaaacaatagaatatcttaaatcacgtataccagaaaatgcacattggtcagcatttggcattggtaagatgcaactgccaactgtaagagaagttgcgcaacgtggaggaaatgttcgtgttggattggaagataatatttatttaagaaaaggtgtaaaagcaacgaatgaagcattggtagaagaggcaaaaagaattttagcagaactagatattgagccacttacacctgctgaagcaagagaaaaatttaatcttagaaatcctcatggtaaaggagacaaataa

SEQ ID NO: 3655 - DNA, 966 bp, Staphylococcus epidermidis
atgaaattcgcagttgttggaacaggtgtaattggtagtggatggattactagaatgcttgcgcatggtcatgaagtgattgctactgatccaagtgaaggtgcatatgaacgcatgttgacacaagttaaacaaaattggccttacgcagagcaaatgggccttgctgaaaatgcatcaattcaaaacctaacatttacaccacatttagaagaagcggtcaaagatgcggatcatattcaagaaaatgtaccagaagtagaagaaattaaagatgctgtattaaaagagattgatttttatgcgaaacctgaagcaacaattggttcaagtacatcaggaattatgccttcagaattacaagctaacttatcacatcctgaacgattagttgttgcccatccatttcacccggtatatattttgccattagtcgaaattgtgccaggtaagcaaacatctgaagaaacaacagttaaagccgaacagatttatgaaagtattggtatggatgttttacatgtgcgtcatgaaatagaaggacatattgcagatcgtcttatggaagcattatggcgtgaatcattgcacatagttaatgatggtattgcaacaacagaggaagttgataaggcgtttacccatgcagcaggtttacgttatgcacaatatggtccatttatgacgttccacttggcaggtggtgaaggtggtatgcgtcatatgttaaaacaatttgggccagctttaaaaaaaccttggacaaaactcatcgcgcctgaactgacagatgacctatatcataaagtagtaagtggtagtgaagcatcttctcaaggatatacaatgtctgaacttgatcaaaaaagaaacgaatttctaattaaagtgaaagaattagcagaacaatattggccaagtgatagtaaagcgatgaaaaagtctaacggagcggaattacaatga

SEQ ID NO: 3656 - DNA, 489 bp, Staphylococcus epidermidis
atgatgaatcaacagtatgtgtttcacacaaaagtgcatcgtgattgggtagatcataacgggcacctaaatgatgcaatgtataaccgaattttcagtgatacaacagatgattggttaggtcatttaggcttaactattaatgccattcaatcttatcaatataccgtattcaccttagaaaatcatgtcatgtttcttaatgaaatgaaagaaaatgaagatgtcattgttaaagtacatcttcacaattatgatagcaaacgattacatgtactaatggaaatgtttaatgcagatgatgatttatgtgcaacatatgaagtgatgctgatgggcattgatacgacttcaggaagaccttcagcctttccgaacgacattttgaataacattgaacactattataatattgagaatgtggagatgacatctcaatatataggtcatcgtattggcatcaagaaaaagccaaaaagcaaagagtaa

SEQ ID NO: 3657 - DNA, 1188 bp, Staphylococcus epidermidis
atgttaagtattaaaaacttatcaaaggtctatgcaggtggtaaaaaagctgtagataatatgaccatagacattgaatcaggagactttattgcatttattgggacaagtggtagcggtaaaacaactgcccttagaatgattaatcgtatgattgaatctacagagggagaaattaccattgacggtaaaaatatcaaagagcttaatccggttgagcttcgtcgcagtatcggttatgtcatacaacaaatcggcttaatgccacatatgacagtgaaagagaatattgttctcgtaccaaagttattaaaatggtcacaagagaaaaaggatgagaaagcgaaagaacttatacgcttagtagatttaccagaagaatatttagatcgatatccttcagaattatcaggtggtcaacaacaacgtattggtgttgtaagagcacttgcagctgaacaagatattattttaatggatgaaccgtttggtgcactcgatccaatcacaagagatacgttgcaagacttagtcaaaaaattacaacaacaattaggaaagacattcatttttgttacacatgatatggatgaagcaatcaaacttgcagataaaatatgtattatgacaaatggacaggtggttcaatatgacacgccagataatattttacgtagtccagcgaatgatttcgttaaagactttattggtcagaatcgcttaattcaagatagacctaatatccgtacagttaaagatgcgatgattaaacccgtgacagtacatgttgaccgttctcttaatgatgcggtgaatattatgagagagaaaagagtcgatacgatatttgttgtcggcaatgatgagcatttattgggttatttagatattgaagatattaacgaaggattaagacatcataaagaacttatagatacaatgcaacgagatatttatagagtacgtattgatagtaagttacaagattctgttcgtacaattcttaaacgtaatgtacgtaatgtacccgttgttgacagtgataataaaacattattaggccttgtcactcgagctaaccttgtagacattgtttatgacagtatttggggagagttagaatcggataacaatgataatcattctgggattgttgaacccgaatccacaggagttgagacaccatga

SEQ ID NO: 3658 - DNA, 636 bp, Staphylococcus epidermidis
atgataaagtttatttcggaacatagtggtatgttatttgcaaagacattcgaacatttgtacatatcgatagtggcattggttattgcaattatcgtagcggttcctttaggcattttattatctaaaaaagaaaagctttcgaaagtgtcattgacgatagctggcgttttacaaacgatacctacattagcggtattagctttaatgattccattatttggcgtaggaaaaacacctgcaattatagcgttatttttatatgtattattaccaattttaaataatacgattataggcattcaaaatatagattccaaccttagagaagcaggacgtagtatgggaatgactaactttcaattgatgaaagatgttgaattgccactcgcattaccattaatacttagtggaattagactgtcttcggtctatgtcattagttgggcaacattggcaagttatgttggtgctggtggtttaggtgattttatctttaacggattagcgctatttgaaccgagtatgattattactgcaactattcttgtcactgctattgcacttattgtagattatgttttatcactgattgaaaaatgggttgtacctaaaggattaaaagtttccagataa

SEQ ID NO: 3659 - DNA, 960 bp, Staphylococcus epidermidis
atgaagaattataaaaaatatctgattgttttagtattatgtctaacagtgttatctggatgtaacttacctggtttaaaaaatagtcattcagatgacgatgttagaatcacaagtttaggaacaagtgaatcacaaattatatcgcacatgctgagattacttattgaacatgatacaaaaggtgaaattaaacctaccttaattaataatttaggttcaagtacgattcaacataatgctgtcacaagtggccaagctaatatgtcaggtacgcgttatacaggcactgacttaacaggggcgttgaaagaagatccgattaaagatcctaaaaaggccatgaaagcgacacaagaaggatttaaaaagaaatacaatcaaaccttcttcaattcgtatggtttcgaaaacacgtatgcattgatagtgacaaaagaaacagctaaaaaatatcatttagaaactgtttcagacttggaaaaacatgcgaaagatttaagagtaggtatggatagttcatggatggaccgcaaaggtgacggttatccagcatttaaaaaagaatatggttatagctttggtactgtgagacccatgcaaattggcctggtttacgatgcacttagttctggcaaattagacgtagcagtaggttattctacagatgggcgtatttcagcatacgatttaaaagtgttggaagatgatcgtcgattcttcccaccatacgatgccagtccacttgcatcagatcaattgttaaaagagaagccagagctcaaaccgattgttaaaaaattagaaggtaagatatcaacagaacaaatgcaagaattaaattatcaagctgatggtaaaggaaaagagcctgcaacagttgcagaggacttcttgaaaaaacatcattattttgaagacgatgacaataaaaaagataaacagaaaggtggtcaataa

SEQ ID NO: 3660 - DNA, 648 bp, Staphylococcus epidermidis
atggaagggaatttaatacaacaactcgttcactactaccaaatgaactttggctacctatgggaattgtttgttaatcatttgttaatgtctgtttacggtgttttactagcatgtttagtgggcatacctcttggtatcatcattgcaagatttggtaaattatcaggtgtgattattactatcgcgaatattattcaaactgttccggttattgctatgttagcgatattaatgcttagtatgggactcggtatgaatacagtcatttttactgtgttcttatatgccttgcttcctattattaaaaatacgtatacaggaattaatgaagttgacccaaatattaaagatgctggaaaagggatgggtatgacgcgtaaccaagtattaactatgattgagttacctctgtcactttcagttattataggtggtattcggattgcccttgttgtagctattggtgtcgtagctgtaggttcatttattggtgcgccaacattaggtgatattgtgattagaggtacaaatgcaactgatggaacactattcattctagcaggtgcaatacctatcgttatcattgtcatacttatagatgttttattacgtttattagagaaaaagctagatccagctacgtaa

SEQ ID NO: 3661 - DNA, 768 bp, Staphylococcus epidermidis
atggctcatattacattaaattatttatctaaaactttaggaatgcatcaaacgattaatgtcattcttccagaagataaaagttactttgatacaaatgaaaatgcgaaaccattaaaaactatgttattgctacatggtttatcaagtgatacttcctcttatatgagatatacgagtatagaacgctatgcgaatacccatcaactagcagtggtgatgcctaatgctgatcatagtttctattcaaatatggcttatggacatagttattatgactatatactagaagtttatgattatgttcatcaaatatttccattgtctaaaaagagagaagataattttatagcaggtcactctatgggaggttatggtgcaatcaaatttgcattaacgcaaagttatcgtttctcaaaagccgccatgctttcagcgccatatgatgtttctatgtttggtcaatatcaatggtatgattttactccagaagcgattgtaggtaatacgcaacatgtcgcggggacatcttttgatccatactatttagttgaacaagcaatagacaatggacaagcgttaccacaactatatattacttgtggaactgaagatgaactgtatcaaggtaatattgattttgtgaactatttagatgaaaaaggtattccatatcaatttaaaaaagcgccaggtaatcacgattatgcattttgggataaagcaatagaagatgtcattgaccgttttacatcatcacatatttaa

SEQ ID NO: 3662 - DNA, 1557 bp, Staphylococcus epidermidis
ttggaacaagcgatcaatgataataaaaagaaaaaacgttttaactttagaatgccaggtgcatttatgattctctttatcctaacagttgtcgcagttatagcaacttggataatccccgcgggtgcatactcaaaactttcatatgaaccttcatcccaagaattaaaaattgtcaatcctcatcatcaagtaaaaaaagttcctggaacacaaaaggagcttgatcgattaggagttaaaatcaaaatagaacaatttaaatctggtgcaattaataaacccgtttcaattcctaatacttacgaacgtctaaaacaacatccagctggtcttgatcaaattactagtagcatggttaaaggaaccatcgaagccgtcgatattatggtctttatacttgttctaggtggactgattggtattgttcaagcgagcgggtcctttgaatcaggattgttagcacttactcaaaaaaccaaaggccatgaatttatgttgattatgttcgtagcgattttaatgattctgggtggaacactatgtggcattgaagaggaagctgtagcgttctatcctgtactcgttccaatatttattgcgctcggatatgattctattgtctctgtcggtgcaattttcttagcaagctctgtgggcagtacattctcaacaatcaacccattctcagtcgtcattgcttctaatgcagcaggaacaacttttactgatggtctttattggagaataggcgcttgtatcatcggtgccatatttgttattagttatttgttctggtattgtaaaaaaattaaaaaagatcctaaatcctcttattcttatgaagacaaagcagcatttgaaaaacaatggtctgtgctacatgatgacggttcttctgagtttacattacgtaaaaagattattcttacgcttttcgtcttaccattccctattatggtttggggcgtcatgacacaaggatggtggttcccagtcatggcatctgcattcttaatctttaccattatcatcatgttcattgctggaacaggaaaatatgggttaggcgaaaaaggcactgtagatgcattcgttaatggcgcttcaagtttagtaggtgtatctttaatcattggtttagctcgaggaattaatttagtattgaataaaggaatgatttctgacacaatcttgcacttttcatcatctatcgtgcaacatatgagtgggcctttattcatcatcgtgttactctttatctttttctgtttaggatttatcgtaccatcatcatcaggattagcagtactatctatgcctatctttgcgccattagctgatacggtaggtataccaagatttgttattgttacaacatatcaattcggtcagtatgcaatgttgttcttagcgcctactggacttgtaatggcaacacttcaaatgttaaacatgcgttactcacactggttacgtttcgtatggcctgttgtcgcgtttgttttaatatttggtggaggcttactaattacacaagttttaatatactcataa

SEQ ID NO: 3663 - DNA, 933 bp, Staphylococcus epidermidis
atggctaaaattgtagtagctttaggtggaaacgctttaggaaaatcaccacaagaacaacttgaattagtaaaaaatacagctaaatccctagtaggattaattactaaaggtcacgaaattgtgattagtcacggtaatggaccacaagtaggaagtattaaccttggtctgaattatgcagctgaacacgatcaaggtcctgcttttccatttgctgaatgtggcgctatgagtcaagcctacatcggctatcaacttcaagaaagtttacaaaatgaacttcattcaatgggcatagataagcaagttgtcacactagttacccaagtagaagttgatgaaggcgatccagcttttaatagtccaagtaaacccatcggtctgttctacactaaagaagaagcaaatcgtattcaacaggaaaaaggttatcaatttgtagaagatgctggtcgaggttaccgtcgcgttgtaccatcaccacaaccaatatctattatcgaactggaaagtattaaaactctagtagaaaatgacacactcgtcatcgctgcaggtggaggtggtataccagtcattcgcgaacagcatgatagctttaaaggtatagatgccgtcatcgataaagacaaaacaagtgcattattaggtgctgatattcactgtgatcaactcattattttaacagcgattgattatgtttatatcaactatcatactgaccaacaacaagcacttaaaacaacaaatatagatacgcttaaaacatatattgaagaagaacaatttgccaaaggcagcatgctacctaaaatcgaatctgccatctcctttattgaaaataatcctaacggtagcgtgctcatcacatcattaaatcaattagatgcagcactagaaggtaaaattggcacactcattacaaagtaa

SEQ ID NO: 3664 - DNA, 1002 bp, Staphylococcus epidermidis
atgaaaaatttacgtaacagaagctttttaactttattagacttttcacgacaagaggtagaatttttattaacactctccgaagatttgaagcgtgccaaatatatcggcactgaaaagcctatgctaaaaaataaaaatatcgcgcttctttttgaaaaagattccactagaacacgttgcgcattcgaagttgccgcacatgatcaaggtgcacacgtcacttatcttggacctacaggttctcaaatgggtaaaaaagaaactgctaaagatacagcacgtgtacttggtggtatgtatgatggtattgagtaccgaggtttctctcaacgtactgtagaaacattagcgcaatattcaggtgttccggtatggaatggattaaccgatgaagatcaccctacacaagtgcttgctgactttttaactgctaaagaagtattgaaaaaagagtatgctgatatcaactttacttatgttggcgatggacgtaacaatgttgctaacgcattaatgcaaggtgctgccattatgggtatgaatttccatcttgtttgtcctaaagaactcaatccgacagaagaattattaaatcgttgcgaacgtattgcgacggaaaatggcggtaacattttaataacagatgatattgataaaggcgtgaaagattctgatgttatttatacagatgtttgggtatcaatgggcgaacctgatgaagtatggcaagaacgccttaaacttttaaaaccatatcaagttaaccaagcattattagaaaaaacaggcaatccaaatgttatttttgaacattgtttaccttctttccacaatgcagaaactaaaattggtcaacaaatttatgaaaaatatggcattagtgaaatggaagtcactgatgatgtcttcgaaagcaaagcttctgtagtattccaagaagctgagaatagaatgcatacaattaaagcggtcatggtagcaactttaggagaattctaa

SEQ ID NO: 3665 - DNA, 225 bp, Staphylococcus epidermidis
atgaaagtgtataagttgaattatcaacaccataaagatattgttgatgataatgtattaacgatgttcgtaacagctgataatcaagatgaagttgaagcgtttgcgaaaaaattacattacaagattgaacatttatctccattaactaaaaaggaatttgaagatgagaaagcgaaagattcacactatagacttgaacacgtggatcactatttaaattaa

SEQ ID NO: 3666 - DNA, 429 bp, Staphylococcus epidermidis
atggaaataacaaatgttaatcatatttgtttttcagtgagtgatttaaatacctctatacaattttataaagatattttacatggtgacttattagtatcagatagaacgacagcatatttaactattggtcatacttggattgcactgaatcaagaaaaaaatataccaaggaatgaaataagtcattcctatacgcacgttgctttctccatagatgaagaagattttcaacagtggattcaatggcttaaagagaatcaagtaaatattttaaaagggcgaccaagagacattaaagacaaaaaatcgatatattttacagatctggatgggcataaaattgaattacatactggaacattaaaagatagaatggaatattataaatgtgagaagacgcatatgcaattttacgatgagttttga

SEQ ID NO: 3667 - DNA, 876 bp, Staphylococcus epidermidis
atgaataaattatcaaagtacattgcaatagctacattagcatcgacagttacaatttcagcaccaattcatacatatgcatgtgaatctcatactaaagataaccataatcaaacgacacaacatcaaaatgaccccaaccttggtgaacaaaatgtaatggctgtctcatggtatcaaaattctgccgaagcgaaggcactttatctacagggatacaatactgcaaaatatcagttagatgaacatattaaaaaggataaaggtaagaaaaaacttgctatagctttagacttagatgaaacagttcttgataattcaccatatcaaggatatgcttctatgcacgatacgtcttttccagaaggatggcatgaatgggttgctgcagcgaaggcaaaacctgtttatggcgccaaatcattcttaaaatatgctgacaaaaaaggtatcgatatttactatatttcggaccgtgataaggaaaaagattttaaagctacaaaggaaaatttaaaaaatattggactaccgcaagcgaaagataatcatattttactaaaagggaaaaacgataaaagtaaagcatcgcgacgtcaacaagtcgaaaaaaatcataagttagtgatgttatttggtgacaatttgttagattttacagatcctaaaaaatctactgctaaagaacgtgagaaactcgtacagaagcatgcaaaagattttggcaaaaagtatattattttcccaaatccaatgtatggaagttgggaatcgacactttatcataatcaatacgaaataagtaagaatgaaaaggatgaactacgaaagtcatcaattaaacaatttaatcctaaaacgggtgaagtaaaataa

SEQ ID NO: 3668 - DNA, 966 bp, Staphylococcus epidermidis
atgacattaaacctagctcaacgtgtgttaaatcaagagtcattaacaaaagatgaagcaatatctattttcgaaaatgctgaaattgatacatttgatttattaaatgaagcctacacagtgagaaaacattactatggtaaaaaagttaagcttaatatgatattaaatgctaaaagtggtatctgtgcagaagattgtgggtactgtgggcaatctgtaaaaatgaaagaaaagcaacgttatgcacttgttgaacaggaccaaattaaagaaggcgctcaagtggcaactgaaaatcaaatcggtacatactgtattgttatgagtggtagaggtcctagtaacagagaagtcgatcatatttgcgaaacagtagaagatattaaaaagatacacccacaactaaagatttgtgcgtgcttaggattaacgaaagaagaacaggctaaaaaattaaaggctgctggtgtcgatcgttataatcataatttaaatacgagtgagcgttatcacgatgaagtagtaactacacatacatatgaggatagagtgaatacggttgaaatgatgaaagataataatatttctccttgttcaggtgtgatatgtggtatgggagagtcgaatgaggacattattgatatggcatttgctttaagagccatcgatgctgatagcattcctattaattttttacatcctattaaaggaactaaatttggtggattagatttattgtcaccaatgaaatgtttaagaattatagcgatgtttaggttaatcaatccaacaaaagaaattcgaattgcaggtggacgggaggtaaatctacgttcattacaaccactcgcattgaaagcggctaattcaatttttgtaggagattacttaattacaggcggtcaaccgaatgaggaagattatcgcatgattgaagatttagggtttgaaatcgacagttaa

SEQ ID NO: 3669 - DNA, 1104 bp, Staphylococcus epidermidis
atgtctaaatttatttatcaatcaccaggaagatatgtacaagggaaaggtattgttagctctatcgctgaagaaacagaacgtcttggtagtcacgcgttgattattgcagatgaagtggtttggaatatcactgaagaaaaaataaaagaaagtttctcagcaaataacaacgttgattttgaatatgaagtatttaaaggagaatcttctgaagaagaaattcaacgtatagttaaacaatataaagaaaaaaacattgacgttgttattggtttaggcggaggtaaagcgttagatacaggtaaagctgtagcatttgaacttaaagcaagcgtcatcgattttgcgtctacagcatcaatggatgcaccaacagcagcagtatctgttatttataacgaagatggatcatttagtggttatgaattctaccctaaaaaccctgatacagttatcgtagattctgaaattgttgcacaagcacctgtacgtttatttgcatcaggtatgagtgatggtttagcaacattaatcgaagttgaatctacacttcgtagacaagggcaaaacatgttccatggcaaacctacattagcaagtttagcaatcgctcaaaaatgtgaagaggttatttttgaatatggttacagtgcttatacttctgtagaaaaacatatcgtgacaccacaagtagatgctgtgattgaagccaatacattactttcaggtttaggatttgaaaacggcggattagcaggtgcacacgcaattcataatggattcacagctttagaaggggatatccaccacttaactcatggtgaaaaagtggcatacggtattttagtacaattagtacttgaaaatgcgccaactgaaaaattcatgaaatacaaaacattcttcgataatatcaatatgccaacaacattagaaggtcttcacattgaaaacacaagttatgaagaattagttcaagtaggtgaacgtgcattaacaccaaatgatacgtttgctaacttaagtgataaaatcactgctgatgaaatcgcagacgcaattttaactgttaatgatttatctaaaagtcagttcaactaa

SEQ ID NO: 3670 - DNA, 963 bp, Staphylococcus epidermidis
atgaaaaagttaattcaagataaaaacacaattttaaaagatatgcttgatggaattacagtttcaaacaacgatgttgaagttgtatctgacactattgttgttagaaagcataaaaaacaatcaggtgttgcactcgtttctgggggcggcagtggacatgaacctgcacacgcaggatttgtagcagaaggcatgctcgatgcagctgtatgtggagaaatcttcacttcacctacacctgataaaatattagatgccattaaagctgtggacaatggtgacggcgttctacttgttattaaaaactatgcaggagacgttatgaactttgaaatggctcaagaaatggctcaaatggaagatattaaagttgaaagtgttattgtcagagatgatattgctatttctgacccggaaaaacgccgtggtgtagcgggtacagtatttgtgcataaatatgctggatacctagctgaaaaaggtgttgcacttgatgaaatcaaatctaaagttgaggcacttttaccagatattaaaagtattggtatggcattaacgcctccaatggtgcccacaactggtaaaaacggtttcgatattgaagacaatcaaatggaaattggtatcggtattcacggtgaaaaaggtttacatcgtgaagacgtacaacctattaacgtgattgttgaacgtttactcgatcaattatacaaagaaattgagaaaaaacctttaatcgtaatggttaatggtatgggtggtacgccactatcagaattaaatatagttactaaatatctagatgaacaattcaatcagaatgatattggtgttaaacaatggttcgtaggtgactatatgacagcgttagacatgcaaggcttctctataactgtactccccttcagtgaagaattgagtgaagctttagctgcacctacagcaagtaaatatttctaa

SEQ ID NO: 3671 - DNA, 576 bp, Staphylococcus epidermidis
atgaatgtagcagatatcaaagcacgcttattagatttagaaaatacttttaaagaaaaagaaagtgaactgactgatttagacagagctatcggtgatggagatcatggtgtaaatatggtcagaggtttcgaacacttaaaagaaaaaatagatgatcaaagtatgcaagcgctatttaaatcaacaggtatgacattaatgtctaacgtaggtggtgcttctggaccattatacgggtttggttttatcaaaatggcgagtgcagtgaatgatgaaattgatcatgataatcttaaagaggtacttaaagcgtttgctgatggcattcaacaacgtggtaaagtcgaattaaatgaaaaaacgatgtatgatgttatcgaacgtgcgagagaagctgttgaaaaaaatgaaacagtagatctagataaactacaatcatttgctaatgaaaccaaagatatggtagctactaaaggccgtgcatcatattttaacgaagcttcaaaaggttatattgatcctggtgcacaaagtagtgtttatattcttaatgcaattataggaggagagtaa

SEQ ID NO: 3672 - DNA, 375 bp, Staphylococcus epidermidis
atgacatctatagtagtagtaagtcatagtcataaaatcgcagaaggtgttaaacaattaatcaatcaaatgactgacggtggtgttgaccttattgccgttggtggcttaagtgacgatgaaatcggtacatcatttgatcaaatcgtctctgtaattaatggacttgaaaatgatgcgctttgtttctatgacatcggttcagcaggtatgaatttagacacagctttagaaatgtacgaaggtgaccacaaaattgttaaaatggaagcgccaatcgttgaaggaagctttattgcaagtgtaggaattaaatcaaatatgagtatggatagtgttatctctgaagtaagagctaaatatcctgaagaataa

SEQ ID NO: 3673 - DNA, 1449 bp, Staphylococcus epidermidis
atgttagaaatcactgtcctcgtgtttattacaatttttggtgtaggctctcaatttttttcaaatttagcctatagtttaaatcaaggtatccttcaaacatcctttggtattggctctcaatatctgattatcccctctgtattagctaatttcacttttgctttaggtataccgttggggcatacactcacacataaatatggattcaagcgtaattacttatgctttgtgtttatatttctcattggttcaatcttaggacttctatcttttaacttaatcattctgtctattgctaaaatgattcaaagtttcagttcaggtgtattattctttaccttgttacctaaacttttcttgaactttccaaaacaatatagaaatgtatttttattgatggttattgtaggtttatttggttcaaatgcgcttggaggattatctggtagtttatcattagaattagatcgttggcattggatttttgtagtaaatatcatctccgcgatattatgcttaattctaggcaacgtcatattaagaaaaaatgaatatcatcaaacatcagatattcatattagtcgatcaatgatgattactttagtattaagtaccatttctttaatgattcctatgtcacttcttactcaaaaaggctaccattcattatgggtgtggccgatactcttaattgcaatattttttattgtaaattttatcattacaaatcggcaagctacacatcccattgttcactttcatacactattcagtaaaaagcctttcgtcggtgcaacaatggcaatttcatcacatttaactttattaacaggcattgctggtatcaatgtctatatcgtaagaatattaaagttgccttttgatatttcattacatttctatttctttttctttgttggagtcattataacgggtatcttaaaaatgttcttttatagctctgtcggtgcaggttttttaggtacattgggatcgtcagccttactatatgtaagcatccattggattattctgggaaatacgattaacattccattactttatattcaaggtcttctgctcggcttcggtgcaagcatgaccttagttagtggctcgatggctacattattggacggagatttaaaagaagcagcacaacgttctcaaaccatgcatacaataagaaatttctctgctgctatgttgataccgattatagcttatacgattaagaatcatatccaaaaaggaacacagtctatatatgctgaaaacattactgataaaatgatttaccttaaaaagttgcaagatgttgcgattgatgctgatcatcaaatattcttattaatgattattttcaatatggtcatgttcgtttcttcaattatacaaatgattttaggtaaaggtagacgtattacaccacctcgggaatcataa

SEQ ID NO: 3674 - DNA, 249 bp, Staphylococcus epidermidis
atgatggattttttacattacatactgccagtcattatatacgctgttttgcttgctattcattactttttatcgcgtacgggaaataaaatattaggccttattgtgcctgttggtgtgattgcaagtcttgtatatatgtatcaagccgatattatacgtatgaaaatgattggcgttattattataggtattgtggctctattattcttggcagaggagtggcagagagcacaaaaggataaataa

SEQ ID NO: 3675 - DNA, 1419 bp, Staphylococcus epidermidis
atgtctaacatttcgatgacgacttctaaacgtaatgctatcgttacggtaatgctcattagtgcttttgtgtctatgctcaatcaaactattttaaacactgcactaccagcaatcatcaaaggactgaacatcacagaaacaacagcacaatggttaattaccggatttatgcttgttaacggtataatgattccactcactgcctttttaatggataaatattcgacacgccatttatatattttctcaatggctatttttcttataggatctattgtagcggcattttcacctacgtttacaattttaatgatatctcgtattatccaagcgattggtgccggcatccttttaccattgatgcagtttacagtatttacactgtttcctgctgaacaacgtgggtttgcgatgggattggcaggggtggttgtacaaagtgcgcctgcaattggaccaacgttaactggattattcgtagatttatttagttggagaatgcctttttatcttgtttcagcaattgctgcggtagcttttattttaggtttcttcttcgtagaaaataatacaaaaacaaaagacattgttcttgataaaatttctgtagtttattctactttcggctttggtttaatattattcgcatttagtagcgtgagtacgtttggtatcacctctctacctgtcattgtgacatttgtactcggtatagccattatcataatttttacaacgcgtcagcttaaattaaaacatccattgttaaatatgcgtgtgtttaaaaataaagtgttcacactttcagctgtttcttcaatgcttgtatatattacgatggtaagtcctgcgttactcatacctatctacattcaaacaggtttaggtcaatcagcattactatcaggtgttgttgtacttccaggcgcggtcattaatggattaacgatggtttatacagggaaaatttttgataagcatggtattaaagtgcttgtgatacctggttttatcttactcattagtatgacattcttatattcattccttactacaggaacgccatattggtttgttattcttgtttacactataagaatgattgcgttaggattattagttatgcctcttaatacagttggactgaatgcacttgagtcagatgatgtctcacatggtacagcaattatgaattccttacgcatcattgcaggtgctatgggtacagcggttagtgtgacgattctatcaatagtggcaaaacagtatacagcttcacactcgacaatgtcaaaaatgaaactaacacaagaagcaactgtacatggtatagatgttgcatttatttttactacagtattaatcattattggatttattttagcgttattcataaaagaagaaaaaaatcattaa

SEQ ID NO: 3676 - DNA, 1242 bp, Staphylococcus epidermidis
gtgaagcaattaagtacaactttaaaagtccgattaatatgcgatttttttcaaaatattatagtcacggcatttttaccatttattgcgttgtatttaacagatatggtcaatcaacatttttcagggctttttttatttgggcttgtaatgataaattttccaatttctttgatttcaggtcatattattgaacgtttacctaaaaagacgttaacacttagttatcaatttatattaagtttaatgctcgtaattatggcgatttcaatatcacaacatacttttaagatcattttattttgtatcgcttacgcaatatttagtatcacaataggcatgcagcaacctataatggacacgattattatggatgcgattacgcctgaagttgagcaatatatttataagataagttattggctgacgaatattgctgtagcctttggtgcgctcataggtggattgatgtatggggcacataaatctatgttgtttttcatcgcttttgtcatttacattatggtttttatagcacttatcgtatggttgcctaaagatttaaatattgttactcagtcgcacacacatcatgctaatgagaaacaattctccatgggtcaaatattaaaaagttataaaccagcatttaaagatacaacatatctacttctaattataggatttagtattttaacaatgggtgagttatctgcatcatcgtacatttcagtgcgtttaaaacaagagtttgatccgatgatattgttttcgttacatatcaatggcgttaaaatgtattcacttctattaatgacgaatacaatcattgttataatttttacctattttatttcaaaaattgttatgagaatgaatgttaaaacagcattattgattggaattattttttatgtcattggatattcgaacctcacttatcttaatgattttacgttacttatcatatttatgattatagcgacgataggtgaaatggtatattctccaattcttgaagaaaatcgttttaaaatggttccttctcataaaagagggacatattcagcagtgcatgctttaggatttaacctagctgaattacttgcaagatttggaattatattaggagtgtttttaacttcaatggagatggggatctatatgtttgttttattattgctaggtggcatgtcactttacattgcagtgagtcgttttaataatacaaattcacaataa

SEQ ID NO: 3677 - DNA, 7164 bp, Staphylococcus epidermidis
atgaatattgaagcactatattttcaaaaatatttttattttaaacatttaaatcaatcaagttcagaacacagtgtgacatactgggtaaagttaagtcgcgacattgagttacatagattaatgtatgcattagtagatgtcgttcaaaatcaacctgtgttgcgtacacagtttgtgacagatgattttaatcaactcaagataaatttaagagatttttttccatttattgaaattaaagaagttaatgaaatgtcgcaaagcatagatttagaagcattctttacacgtaatttaaattcctaccatttcaatcaattacctctgtttaattttaagatatatcaatttctagatgacgcctacttacttttagatttccatgctactatttttaatgaaagtcaattaactccatttttacaacaattaaatatcgcctatacccactctttaaaaagtgaatatagtatctcggatttttataattggattaaagaaatgaatcaaaagatggatcaaaatcaagttgtgtgtccatcaaagcacttcaacgtattgaatgcagacggtgataattacgcttacatacctgttaagaatacatgtgaaaagaaaaaaatgtgttctttgcatgcagaactaccatctttagacattgatgtgtggattgtaagtatttacttagcgcatcattttataagtcaatcttctgatgtgacgttaggcatccatttttcgatagataataaaaatactgagaatatgatggttttaaacacagacattgccccacttaatttaagtattagtcaaagtgacgtcgtaaaagatatggtagatgagtgttccgcgctacttgaagagcttcaaatgtgtggtgcgtcttttgttgttcaacctaaagcagtacaaacagatgtagaaacgatgattcatattgaaaaagtacaagaacaatttgagcttaatcatatatgtcatcatatacatcgtctatacaatgaagcatcatcattcgcggatttagagttttatcctcatgtgcaggatggttttgatatagtttataatgacaacgtttatgatgatttaactgtacatacgttagtcaaattaattaatgggatttatatgcaaattacacaaaatccatcattattaattaaagatataaaactcagtgatcgctcagatttagctaaatataatgacatcaataatcaaaacaatgacattaattatagtgaggtcacttataaaaccgtggttgaaagattcgaacgtcaagtgcaccaacatcccgatagtattgcgttgcaatatgaacaacgatcgatgacatatcatcaattaaatcaatgtgcgaatcttttagcatatagattgcgtttaaatcatcagattgaacctaatgatatggtggcattaatagcagaacgcagcttagaaatgattattggaatgttagggatcttgaaagctggtgcaggctacataccaattgatccggattatcctgaagaaagaatgaattatattattgaggacgcaaaacctaaagcggttgtaacatatcgtacatcatttcaatcaggtttacctcaaatggatatagaattgatagttgattcaagagaacatgatattgataacccgagaggcattaattgttcagaagatatcgcttatgtcatctatacatcaggaacgactggtaaacctaaagggacactggtgccacatagaggaattgatcgcttagtacacaatccaaattatgtcgaattgaacgaaaatacaaccgtcttattatcaggaacagtagcttttgatgcagcaacctttgaaatatatggtccattattgaatggtggacggttagtcattacatctaaagatacgttgttaaatcctcaattgttagatcaagctattactgaaaataaagtcaacacgatgtggttaacgtcatctttatttaatcaaattgctagcgaacgtatcgaagcactagaatctttaacttatttgcttattggtggggaagtgttaaatgctaaatgggttcacttattaaattcgcgtgagtgtcatcctcaaataatcaatggttatggaccgacagagaatacaacatttactacaacttttgcgattccacaagagatgccttcacgtatacctattggtttacctattagtggaacgacagtttatgtcatgcaaggtaatcgtatttgtggcgtaggtgttccaggtgaattgtgcattggtggtgcaggtttagcaaaaggttatttaaatcaacctaaacttactgctgaacgttttattcagtcaccttttaacaatgaaatgctttatcgaagcggtgatttagttcgtcttcaagaagatggctatattgattatattagtcgtatcgataagcaagttaaaatacgcggttttagaatagaattatcagaaattgaaaaagcattagaagctatacgtgatattaataaagctgtagtcatcgttcgagagcaagaccaagataaacaaatagtggcatattatgaagcatcgcaattaaaatcaacaggtcaattaaaagatattttaagtgaaacattacctgaatatatggtacctgtgcattttatgaaggtggatcgtatacctatcacgatgaatgggaaattagatgtgcgttcattacctgaaattaatctaaagaataatagaaattatgtagaaccacgtaatgatattgaacgtaccgtttgccgtattttcgaagagattttacatgttgatcaggtaggtgttaaagataatttctttgaactaggtggacactctcttagagcaacattagttgtaaaccgtatcgaagaaaggttaaaaaaacgtcttaaagtaggtgatttaatgaaatcgcctactgtagagcaacttggacaacaaattgaagaactgcaaaatgatgtctatgaagtgattcccaaagcaaatgaatcgtatcaatatgatttaagtgcgtctcaaaaaagtatgtatcttttatggaaggtcaatcctaaagacacagtgtataacattccattcttatggagattatcttctgaacttaatgttatgcaattgcaacgtgcattatctaagttgattgaacgtcatgaaatattacgaacacaatatgtaattgatgacaatgaagttaaacaacgtattgcgacacatgtttcacctgattttgaagaggtaacgacatctctaacgaatgagcaagatattattcaatcatttatggaaccgtttgatttagaacaaccaagtcagatgcgagttaaatatatacatggaccacaacaagattatttatttatggatactcatcatagtattaatgatggtatgagtaacacgattttactatctgatttgaacgctttataccaagataaatcattacctgaacttaagcttcagtataaagattatagtgagtggatggtgcacagagacttatctaaacaacgtcacttttggttacaacaatttgaaaatcaggttccaatattaaatatgcctacggattatcctagaccaagtattaaaacaaccaacggtaatatgttgacatttcattacaatcgtcaaatcaaacagcaattgaaatcttatgtagaacaacatcaagtgacagactttatgttctttgctagtgcaatcatggtattattgcacaaatatacacgtcaggacgatatcgctattggtagtgtaatcagtgcgcgtacccatcgcgatactgaaaatatgttaggtatgtttgctaatacacttgtatatcgtggtcgacctcatgatcaaaagacatgggatcaattgatggctgagatgaaagaaatgtgtctaggggcatatgaacatcaagaatatccttttgaaagcttagtcaatgatcttgttgatgaaagagatgcttcacataatccgttatttgatgtgatgctcgtacttcaaaataatgaaacaaatcatgcgaattttggacatagtcaattgacacatattccacctcagtcaacaacagctaaatttgatttgtcatttattattgaagaagatcaagatgactatgtcatcaatattgaatataatacagatttatataaacaagagaccattcatcatattgctgaacaacttcaaatgattattaaacatgtaatatctaccgaaaacctaaaaattcaagatattgatgaaaatgatgacttattaatttggttggacaagcatgtgaatgattgttctttagacttgccaaaaaataagtcaatacagcaacttttacatgatgtcatgaaagcgaaagcagatgatgtagcacttaaaatgaatggacaatcgatgacgtatcaagaacttgatgattattctaatagtatggctcaaacattgatacaaaatggaattcaaaaaggggaacgtgtagcccttttaactgaacgaagttttgaaatggttgctagtatgattgctgtattaaaagttggaggttcttatgtacctattgacgtcacttatcccaataaacgcattgaatttattattgaagacgctgaagtcgcagcagtgctcacatatggaaaaacaatatcctcacatataccagtaattaaaattgaagatattgataacactgaaaataataaaaggttaaatatagaatatgcagggaatttggaagatgatatgtatcatatttatacatctggaacaacaggaaagcctaaagcagtatcagtgaaacaacgtaatatattaaatttagtatgtgcttggacaaaaagactcaatttatccgatgatgaagtttatctgcagtacgctaattatgtgttcgatgcttcagcaactgatttctactgtagtttattaaatggatatccgcttgtcattgcaacatcagttgagcggaccaatacagatttattagaaaagttaatttcacaagaaaatatcaccatcgcatctattccactacaggtatataatgtgatgcatcatttctatattcctaaagtgattacaggaggtgcgacaagtactccagcatttgttcaacatatttctaagcattgtgatatgtacgttaatgcctatgggccttctgaaaatacagttatcacatcttgttggatatacgaaaaaggtgacgccataccatcgactattccgattgggaaaccgttagctaatgttgatatttttattatgtcaggcggtaaactatgtggcgttggtattccaggtgaattatgtattgcaggagaaagtttaacttcaggatatttaaacagacccgaactttctgctgaaaaatttataaataatccttttgggccaggacaactttatcgaagtggtgatttagcacgattgatgccagatgggcaaattgaatttcttggtagaatagacaagcaagttaaagtacatggctatcgcattgaactaggtgaaattgaaaatatcattaattcagtagatactgttacagatagcgttgttattttagctaaacagggtgagcgtgaagtgctgcatgcttattatgttggaagtcaagaagacgaaaatcatatttcacaacatttaaatcaatatttgcctaaatacatgattcctaagacattaacagctattagcgaaattccattaacaggaaatgataaggtggatgagtcaagattacctgtacctaatgtacacaaaaataaatttgttgcaccacgtaataatatcgaacgagaaatagcacaaatcgttagcggagtgttggacgtatcgtctatgagtatagatgatgacttctttgaaatgggtggtacatcactagatgctatggtggtagtatcaaaactaaaatcaaatggcatacacattacaatgcaagatgtatatcaatttaaaactgttcgttatatagctaatcacacagaaaaacgccaagcactaccagaagtagtattaccagatcatctaccacaattacaatctttggttgaaagacgataccaactaaaatcacaacacctaacgcaatcatctctaggtcatgtattgctaactggtgcaacagggttcctaggcgcatatttaattgatgaaatgcaagatgatgctgatcaaattacatgtattgtcagaggtcatgatatcaatcaagctaaaactaacttggaaaataatttaaattgttattttgatacggctcatgtggataaattaatgaagcacattgatattattttagcggatttatcagaacttgaccatctcattatcgattcagccattgatacaattattcatgctggagctcgtacagatcactttggcgatgatgaaacatttttcgatgtcaatgtaagaagtacacaagcattaattgatttagctaaggataaaaaagcgaaattaatctatatatcaacgataagtgtgggtacggtatttgaagtacatcaagacgatattacattttctgaaaaagatttatataaaggccagttatttacatcaccatacactaaaagtaagttttatagcgagattaaagtgttagaagcggttaatgaaggtttagcagctcagattataagattaggaaatctgacaagtgcttctactggaccattaaatatgaaaaatttaacaactaatcgttttagtattgtcatgcatgatttattaaaaatgccgtttataggagaaagtatatcgaaagctaaagttgaattttcatttatcgatgtcacagcgcgccatattattaaattggcaagatccaatgcaatacctattatttatcatgtatacgcaccatgttcgataactatgaaacaagtaattgacaatgccaaagggtcagaaatgactgtagtaagtgatagtgagtttgaacagaaattacatgaattaggtatgcatgaattgattggtcttaatagtaatggagataatcaaatttcaggtgtgacagattcaaatatgactcaaacagtaatgaaagaattacaaggtgagtggccacatctttcttaccaatggttgcagcagtggtaccatttattgtttgaaaaatttgatgccaactag

SEQ ID NO: 3678 - DNA, 624 bp, Staphylococcus epidermidis
atgtatttgtatgtgactaagatgacagaaactttagaggaagtagaattgcttttaaatagaagttctcgtcagttgaaaaagccagaacgaatacactatagatttttaaaggatcgacttatgcaccaattaggtgatgcattgattcagtatgctattgaacaatgtgctggattaactcctaaagaatgggagtatcacatcacaactatgggtaaagtagagatacgaagttcttgtcatatatacgtgagtatttcgtatagttatccttatatcgtttgtataatagataatcagcctattggtattgatatcgaagaaatgaaagactttgattataaatatttggcgaaaaattttacaacaaatgaatttaaccaagtgactacacttaaagatttttatgaaatttggactaagaaagaaagttatacaaaactcatcggtgagggattgatgaatggtttagactgctatgatgtgacgcaaaatttgagatttttaaaaaaacatgtccaatttacctcagtagattattttaaaagactcattcaaatatgtcatatgagtaaacatagtttgaactttgaagtggtgccgctcacacaattattataa

SEQ ID NO: 3679 - DNA, 2187 bp, Staphylococcus epidermidis
atgaaaaataaaaagaattcatatagcattcgaaagttaagtgtaggtgcgtcttcaatcattgttgcatcgatgttatttattggcggaggctcagtacatgctgctgaatccaatcaccttgaaaatcaagaacaatcagaagtaagtgcatcacattctattgagatgcaacacaaaaatcaagaaactcaacaaactgagaataaagataataaaactaaccattcagaaacaattgataagactccaactatacataacaatggctactcatatcatgagacacctagtactgacgttaaatctaatgaagacaaacaaattgatagtcaatccaatcaacctcagacatctatgccaaataatgatcaacaaaaccctaaaaaagtagcggaacatacaacgaaaagtataaatgcaaaaaaagaagaaactagaaagaatgaaaatgcaaagagcctagtacaaccccaacaagatgataaaacaacatctgaacaaacaaaaatgaaagaatcacgtgaacaggagattacaaacgagcaaaagcagttacaaagtaaagatgtaaaaaatgctcaacaagaaaatcaaaatatagaccaagaaaaatctcaagaaaaaattaaagtccaacaatcgaacatcgaaaaggctcaaaaatcttcaagaatagatggaaaattagataatcaatacaataaagatgcaacgcaatcggatgaggggactgcatctgagaacgtttcagaacagcatataacagcaaaagatggaggtgttacacgaaataatcgtggagataaacatttaaatcaagaaaagccaacaacatcatcagataaagaacttaaagtggatgacatagacaaagatctttccacaaaagaatctcctgaaaatgaaaaagatgattctagaaaagggattaaagcactcactaaaaactctcaggcaacaacaagaaatactgcgacaacagaggcatccaaagaattgaaggatcaaacaaataaagtagcatcacaaaaagaatataaaaatcatgatcctattattcttgtacacggctttaatggttatgcatcaggaactggtcccgttacaggaaaaggtaactattggggtggtaaccgtctcaaaattattcaagattatagagctaaaggttataacgtgatggaagcaagtgtaagtgcatttggcagtaattatgatagagctgtagaattgtactattacattaaaggtggacgtgtagactatggtgcggcacatgcggcaaaatatggacacgagcgttacggaaaaacatacgccggcgcttataaggattggaagcctggtcaaaaaattcatctcattgggcatagtatgggtggtcaaacaattcgttatcttgaagagttattacgacatggtagtccagaagaggtagaataccagaaacaacatggtggtgacatttctccgttatataaaggtggacaagataatatgatatcgtctattactactattgccacaccacataatggcacccatgctgcagatttattaggtaatgaagaaattattagacaagtagcatatgactatgcaaggtcaaaaggtaataaattatctcatgttgatgttggtttaagtcaatggggacttaaacaaagagaagacgaaacattagctcaatatattcaacgtgtgaaacaaagtaaattatggacaacaaaagataatggattttatgatttaactactgagggtacagatatcttaaatcaaaaaacatccttaaaccccaatattgtttacaaaacatatcagggtgaatctacaagaccaggtccaaatggtactcaaaaagcagatgtcaatatgaacataggctatacattaactgcaaatacgattggtaaagtaaaagacaaagcgtggagagaaaacgatggactagtgtctgtcatctctgggcaatatccattgaaccaagcgcatacgtctgcgacagatcaagttcaaaaaggagtatggcaagtgacaccagttaaacataattgggaccatggtgacttcgttggtacagatacatcagaagttcgtatctctaaagaagaattagaagatttctgggacaacatgtttgaagatatggtacgtaatgaaaaagtgacagataaacaataa

SEQ ID NO: 3680 - DNA, 1341 bp, Staphylococcus epidermidis
atgaaagcaaataagtatttaatctttattttgggagcacttggtggcttattatatggttatgataatggtgtgatttccggtgctttattatttatacataaagacatacctctcaatagtacaactgagggtatcgttgtgtcttcaatgttaattggcgcaatagtcggtgcgggaagcagtgggccacttgctgataaattaggtcgtcgacgtctagtaatgctcatcgctattgtatttattattggggcactgattcttgctgcatcaaccaatttagcattattaattattggacgtttaattattggtttagcagtgggtggttcgatgtctacggtacctgtttatttaagtgaaatggcaccgacagaatatcgtggctcactaggttcacttaatcaactaatgattacaattggtattttagcagcatatttagtcaactatgcatttgcggatattgagggttggcgttggatgctaggattagcagttgttccatcggttattttacttgtgggtatttattttatgcctgagagtccaagatggttacttgaaaatagaaacgaagaagccgctcgtcaagtgatgaagattacttatgacgatagcgaaattgataaagaacttaaagagatgaaagaaattaacgctatctctgaatctacatggacagtcattaaatcaccatggttaggtagaatattaattgtaggttgtatatttgctattttccagcaatttattggtatcaatgcagtcattttctattcatcttcaatctttgctaaggctggactgggtgaagcggcgtctatattaggttcagttggtataggaactattaatgttcttgtaacaatagttgccatttttgtagtagataagattgatcgtaaaaaactacttgttggtggtaatattggtatgattgcctcattattaattatggcaatcttaatttggacaattggaattgcttcatcagcgtggattattattgtttgtttatcattatttattgtattctttgggatttcttggggacctgttctatgggttatgctacctgaattattcccgatgcgcgcacgtggcgctgctacgggcatttcagcgcttgtgctaaatatcggaacgcttatcgtgtcattgttcttcccaatattaagtgatgcattaagtacagaatgggtatttttaatctttgcattcataggtgttttagcgatgattttcgtaattaaattcttaccagaaacacgcggacgtagtttagaagaaatagaatatgaattacgtgaacgtacaggagcaagaactgaataa

SEQ ID NO: 3681 - DNA, 1704 bp, Staphylococcus epidermidis
atgaaaagtgcccaagcacttgaacagactttaacatcgttagacggtcaaaagtacggtgcgtataagcaaataaaagacctatacgaatttaatttatttaaactacgtattgaccatatccaagctgatccatttgcgccaccatctaagatgagtgttgttatagatcgccaacaagcaaaatttcctgattctttattaaattctgaactgaaacaacgggctgtgagtgattacttaacgcgcgtgtttcataagcagattcaatcaatagtagcccaagataaaaaagtaagtaaaattcaaattgatagttgtggccaagaaatcttagagcgtaccgcagtagtaattaagaatcgtcaaattgaggcacgtattgaagttggattaccagcacgaggacgtaccatattaggtagaatagcaagacatacacttattaatgtattacctcaaatagtagaacatgccttatgttatcgcaacattaatgtttcacaattggaacaacaagttgaattaatgatagatcaagaggagattagacaacagttagtaaaacgtgaccttgttgcatttgtagcaaatggtgctattttaccaagaaaaagtggtgtttcagatctccctatgaataacgctattgaatttaaaagtcctaaacaatatgagattgtaatgaaactatcgagtggcaaagttattaagggtatgggtattcccaaaggcattacactaatagttggaggcggttatcatggtaaatcaacattacttgaagcgttagaacgaggtgtatataatcatattgctggtgatggtagagaatatgtgattacaaatcaagatgcaatgaaaattcgtgctgaagacggaagaagtattcaaaatgttaatatccagccatttattgatcatttgccaggtgaaaaagatactacacatttttcaactgaaaatgcgagtggtagtacgtctcaagctgcaaatgtcatggaagctttagaatcacaagcatcattgttactcattgatgaagatacatctgcaacgaatttcatgattcgtgatggtcgtatgcaacgtttaattgctcccgaaaaagagccgattacacccttttctaataaggtaaaagcattatatgacgaccataacgtgtcgactattctaatcgttggaggttcgggagattattttgatgtggcagatcaagtattgatgatggatgaatatgtgttgaaagatgttacgcaacatgctaaagacattgcgcagtcagacggttatcaaagaaggctttcttctcactatcagttcggtcacattccatcaagaattccgttgagagcgagttttaatcaaaaagggaaacgtgatcgctttaaagctaaaggattgaatgtagtaacgtatggtaaggaaactattcatatttctggcttagaacaacttgtcgatgacagtcaaacacaaggtttagcgatgatgttaagttatgtaaaaaatgaattgctagatgacaaaagtacgattgtagaattgaccaatagtttgtatcaacggattgagaaacacggattagatgttatatcaaatcatcaggggcatcctggtcatttagcgctacctagaaagcaggagtttattgcgacacttaatcgatatcgtagattaaaaataaagcaaagggaataa

SEQ ID NO: 3682 - DNA, 498 bp, Staphylococcus epidermidis
atgaagtcttcagttcgattgttgaatcacatcataaagataatgaacttacaacaatcattaattataagagatgaacagtggaatcaatcttatgaggcatacaattttaatattaatggctacgtatttaaaagtaggttagctaagaaaacaacaaagaaaaaaggatattttttatcgctttgggaaaaagataaaacaaagaaaaatcgagcatttgactatgagtcatttcctgggaaattaattgtacacgtgatggatgattctcaagtaggtcagtttatttttccaaaacatgtactttttcataaaggtattttaagaaatcatgcatctaaagggaaaatggcttttcgagtgtatcctacatgggagaaagatttaaatcgtgtcgctcacaagacacaagagtggcaaaaacaatactttatagatatgtctcaaacaattgatgtaccaagtattaaacgtgcttattttaatgaagattga

SEQ ID NO: 3683 - DNA, 906 bp, Staphylococcus epidermidis
atggtgtcttcggagtataaaaaaggaatatttttagctttaggtgcttatattttatgggggattttacccatatattggcgtttaattgatgaaataggcgcttttgaaattttggcattccgtattattttttcagtgatatttatgatttttgtgctcattataggaaaaaatcaacggaacgctttttttagagatgttaatcagttggtatcgcatcccgtgcaacttattgccatcatagttgcagggtatgttattaccgtgaattgggggacatttatttgggcagtatctaatggtcacgtgctacaatctagcttaggttactacattaacccactagtgagtatcgtcttggcgcttatatttttaaaagagagatttaataaattcgaatggttagccatcatttttgcactagtaggcgtactttatatgacaataaaaatcggtgaatttccatttatttcacttctgttagcattttcttttggtatttatggtttactaaaaaagattgtgcatatcgatgcgataagtagcatcactattgaatgtattgttactgcaccagccggtttaatctatgttatttacctatggcagcaacaacacataacatttggattaaatatatcatcattttggctactattttcaggtgcaattacagcaataccattgattctgttctcagcaggtgctaagcgaattccattatcgttaactggcttcattcaatatgtagggccgacaatcatgtttatcttaggtatctttgtctttaaagagccatttaatactgatcaattgattacctttatttttatatggataggtattgtgttatatagtatttctcaatatgttcaaattaagaaaaacccagttgtaaaatag

SEQ ID NO: 3684 - DNA, 912 bp, Staphylococcus epidermidis
atggacaaattaacagtaggtttagaatggtttttaaatcctgatcatatgctgttaatcttaggtatcgaaaaaggttggtttaaagaagaatcattagaaattgagatgattgaaccaaaggaacactttgacgcactagacgagattgaaaatggttcaatggatatcgcgattactgaacctattcatctggttcaagatagagctaaagaacaaaacgtcatcgggtttgcgagatatcttcacactaacggaggtattatgtataacaaagataaaaatatcgctcgccccaaagatttaatcggtaaacggcttcaatatcctggcgctcccggtccaggtggtattgccatggctaaaacgatgattgaagcagatggtggcacatataaagagggtgacatcacaccagttaatcatagcttttatcatactgatgcacttttaactgataaagctgatgctgctacactcattttcgaaaattttgaaattcttgaagctagaaatcaaggacttaatgtagattattttccacttaaaaattataatgtacccgatttttgtcaactcattttcattactacacctgaagtattaaatacgagtgaggtcaaacttaaaaagtttctgaaagtcattcaaaaggccattcattacatcaatcatcatttagaaagtgcaattgaaatttactcaacgtatactcaaactgatatctctaaccaattaaacaaagatacaattgaagcaacagctaaatgttttacaaatgatttgtctatgagttccgactactacaatgatttacagttgtggcttaaagaagtcaatgatattaaagacacgattaacccaactttatattttacaaatcaactactattcagtcgatatacaaaataa

SEQ ID NO: 3685 - DNA, 1419 bp, Staphylococcus epidermidis
gtgggaagtactgttaaatatcgtaagtttattctacctattgtcgttggtttaattatctgggcattgacgcctattaaaccagatgccttaaatgatcaagcttggtttatgtttgctatttttgtgtcaaccatcattgcttgtattacccaacctatgactataggtgcagtatcaatcattggttttacaatcatgattttggttggaattgttgatacaaaaactgccgttcaaggcttcggtaatagtagtatttggcttattgcaatggcctttttcatttcaagaggatttgtaaaaacagggctaggtcgacgtattgctctgcaattcgttaaattatttggaaagaaaacgcttggtttggcttattcacttgttggtgttgatcttatcttatctcctgctacgccaagtaatacagcacgtgctggtggtattatgtttccaatcattaagtccttgtcagagtcatttggttcatcgccgagagatggttctgagagaaaaatgggtgcgtttttaatctttactgagttccaaggtaatttaattacttcagctatgtttttaacagctatggccggtaaccctatagcacaaagtttagctgaaaaaacggcacacgttcaaattacatggatgaattggtttgttgctgctattatacccggattgatttccctcatcgttgtccctttcattatttataaattatacccaccaactgttaaagaaacgcctaacgctaaaaaatgggctactgaacaactagaagaaatgggacatatgtctatagccgaaaaattgatggttggcatctttatcatagcattggctttgtgggtattaggaagcttcattaatgttgatgccacgctcactgcatttattgctttagcattgttattattaacaggtgtattagcgtggtcagatattttaaatgaaacaggagcatggaatacactcgtttggttctcagttcttgtattaatggcagaacaattaaacaagttaggctttatcccatggttaagcaaactcattgctcaaggtttgaatggctttagttggcctatcgttttagttttactcatcttgttttatttctactcacattatttattcgcaagtgcaacagcacatgtcagcgccatgtacgccgcgttactcggtgttgcagtcgcttcgggtgcaccgccattattcagtgcattaatgttagggttctttggtaacttactggcatcaacaacacactatagtagtggaccagcgcccatattatacgcagctggctatgttacacaaaagcgctggtggactatgaatattgtacttggtatagtctattttattatttggattggtgtaggttcactatggatgaaactcattggtatgatgtaa

SEQ ID NO: 3686 - DNA, 1353 bp, Staphylococcus epidermidis
atgagtaaatcatatgacttaatcgtaataggagctggacctggtggctatgtagctgcaatacgtggtgcgcaacttggtaaaaatgttgcagtcattgaaaaaaataatgctggaggcacgtgcttaaatgtaggttgcatcccctctaaaacgttgttagaacacggcgagaaagcacacagcatacgagttgcaaacgattggggaatcacaacgaaagacttaaaaattgattttactcaatttgtccaacgaaaaaagaaagttgtacaaacacttacgggtggcgtgaagcagttgttaaagaaaaataaagttacttatattgaaggggaagcacgaatttctaaaaacttaaaagtggacgttaataatgaaacgtatcaagcgaaagatataattttagcaactggcagtcagccgttcattccaccaattgatgggttagatcaagtcaattatgaaacaaccgatacatttttcgatttagagaagctaccaaaacagttagcggttatcggtgggggtgtgattgcaacagaactcgcatcctcaatggctgatcttggagttagagttacgataatagaagttgcagatgacattttattaactgaaatcaacgaaactagagaaatgttaaaagcacatttagataatcaaggtattaagatactgacgaaagcaaagataaaacaagttaaggaatcgaaaataatattagatgggcaagatgatgttagctttgatacccttcttgttgcaacaggtagacaaccgaatacgcaagttgcaaaagatttaaatttggaaatggatggtaaattctttaaagccaatgaacattatgaaacgagtcaaaaacatgtctatgctataggagatttaattaaaggatatcaacttgcacatgcagcaagtgcacatggcattcatgttgtcgaaacaataatgaacaaacagccgtcacttgtgcgtcaagaagatattacgcgttgtatatacacaagactggaagcagcatcagttgggttatcagaagcgcaagctaaagaggctggttatgatgtgaaagtgactcaatcagcatttcaagggaatgcaaaggcgttaatcaaaggagaaaatgaaggatttattaaacttgtcgttgataaaaagtatggagaggttcttggtgcttttattgtaggaccacatgctacagatataattggagaacttttaagtgtcaaagcatcagagggtacgattcatgaactttctcaaattattcaaccacacccggctttattagaagcaataggtgagagtgcagatgcattttttgattctgcaattcatatgtag

SEQ ID NO: 3687 - DNA, 954 bp, Staphylococcus epidermidis
atgaaaatggaaaaagaacaagcacattggatttataaaacgatgaacgaaattcgattttttgaagaaaaggtacacaaaatttttagtgatggtagaattccaggattcgtacacttatatgtaggtgaagaagctgttgcaacaggtgttatgtctcaattaaatgatgatgactatattacaagtacacaccgtggtcatgggcatgcgattgcaaaaggatgcgatttaaatggtatgatggcagaaattatgggtaaacgtgacggattaggtcacggtaaaggtggctcaatgcatgttgcagaaattgacaaaggaatgctcggtgcgaatggtattgtcagtggtggttttgggttagcaattggtgcaagtatttctatcattaatcaaggtaaagataatgttgccgtatgtttctttggtgatggtgctgcaaatgaaggtaatttccatgaaggtcttaattttgcttcaattttagatttacctgttctttttatatgtgaaaataaccaatttgctgaaggaactacacatgactacgcaagtgcttctgaaacaattgcagagcgtgctgcggcttataatatgccgggtgtacgtgttgatggcatggatgttgtggaagtatataaagcaacacaagaggctgtagaacgcgctaaaaaaggtgaaggaccaacgttaattgaatgtgatacgtatcgtaaatatggacattttgaaggtgatgagcaaaaagtaaaatcaccagatgatcgtaacgcagataaaaatgcgacagtagaatttagaaaaagagcaattgaagaaaattggctcactgaaaaagaagcagatgaaatagaaaaagcagctgaacaagctgtagaagatgctgtgaaatttgctgaagaaagcgaattaccagatgaggattcattatacaaggatgtttttgcttaa

SEQ ID NO: 3688 - DNA, 1041 bp, Staphylococcus epidermidis
atgagtgaagaacgcaagttaacatttatgggggctattaatgaagctattgaccaatctatggaaaaagatgaggatgtcattttaattggtactgatgtctcaggtggtgcaaaagtagaccacatcaaagatgacgatacattcggtggtgtatttggtgtaacaaaaggacttgcaaaaaaatatagtcgtaaacgtgtaatcgatacaccaattgctgaacacattacattgagcacggcagtaggagctgctgcgacagggctacgtccaattgctgaactcatgttcaacgactttattggatttggtttagatccaattttaaatcaaggggcaaaaatgagatatatgtttggtggaaaagccaaaatcccactagttgtacgtactgttcatggagcaggggcaagcgctgctgcacagcactctcagtctttatataatatgtttgcagcaattccaggagttaaagttgttgttccatctaatccatatgatgcgaagggtctactgatgtcagctattcaagaggacaatcttgttgtcttttcagaagataaaacattattaggacaaaaaggtaatgttcctgaagaaccttatactatagaaattggtaaagccaatgtgacgcgtgaaggtgacgatttaacaattgtggctattggaaaaatggtagctgtagcggaagaaactgctgaaaaacttgcagaagaccaagtatcagttgaggtcatcgatttacgctcagtgtcaccatgggatcaagaaacagttttagattctgtgaagaaaacgggtcgcctaattgttattgacgaatctaatccacagtgtaacattgctggagacgttgcttcagtgattggagatgtaggatttgattacttagatggtccaattaagaaagtgaccgcaccagacactcctgtaccatttgcagcgaacttagaggcggcatatatgccgaatgctgataaggtattagacattgcatctgaattaattgatgatttaaaaaaggctaacgcatag

SEQ ID NO: 3689 - DNA, 1278 bp, Staphylococcus epidermidis
atgagtgaaaatattattatgccaaagcttggaatgacaatgaaagagggaactgttgaagagtggtttaaatcagagggtgacaccgtaaaacaaggagagagtattgttacaataagctctgaaaaattaaccaacgatgttgaagcgccggcgagtgggacattgttagaaattaaagtgcaagccggagaagatgcagaggttaaagcggtattaggtataattggagaagaaggggaagctattgataaagatgaagatgatttagcatcagaaaaagtaaaagaagacaacgagcatgagaaggaaacgcaagaagttaaagatacatcacaacagtcttccgataataaagataattcgcctaaaagcgcagcacgagaaagaatctttatctcacccctcgcacgtaatatggctgaggataaaggattagacattaacaagataaaaggcacaggcggtaatcatcgtattacaaaactagatattcaacgtgttgaagcaaatgggtacgactatgctagtgatacgacatctaatgaagatacaagtcatgttccaacacagactgtggatacaagtgcgattggtgaaggattgaatcctatgcgtcaacgtattgctcaaaacatgagacaaagtcttaatagtactgctcaattaacattacatcgtaaggttgatgcggatcgcttgctagatttcaaagacagattagctacggaacttaaacaagcagatcaagatgttaaattaactgttactacattattagctaaagcagtagtgcttgcacttaaagaatatggggcaatgaatgctcgctatgaacaaggcgagttaactgagtatgaagatgttcatttaggaatcgcaacgtctctagatgaaggccttatggtgccagtgattaatcatgcagatacaaaaagtatcggcactttagcccatgaaattaaatcatcggctgaggctgttcgggaaggaaacacaggagcagtacaattagagggagcaacatttacaattactaatatgggtgctagtggtatagaatactttacaccaattttaaatttaggtgaaacaggtattctaggcgttggtgctttaactaaagaagtcgtgctagaagcggataacattaaacaagtttcaaaaattcctttaagcttgacatttgatcatcaaattttagatggtgcaggtgcggccgattttcttaaagtactagctaaatatatcgaaaacccttatttattaatgttatag

SEQ ID NO: 3690 - DNA, 156 bp, Staphylococcus epidermidis
atgtataaagaatataacttgactcaacatactctaccaatggaaacttcagttcttatccccacaaatgatatttcacgacatgtaaatgatattgtagaaacaattcccgatactgaattcgatgaattcagacatcatcgtggcttaatataa

SEQ ID NO: 3691 - DNA, 513 bp, Staphylococcus epidermidis
atgaaaaggtttgcgaaagcatttgtcgtaagtggtattactttaggtgcaattttaggtttaaacgtaacagagcataatggtgtatctaatgaagcaaaggcacaaacagcacacagttactggtataaatataatggttatactgcatcgggtggcgactttgtacttagcaattcattttatcaaggtttaaaagctggaaacgttacatttaatggtattaaggtaaatcaaaaatatgaatctaagactgctactaaaaaaatatacgatcagacatttcaacaaattaatggaaataaagcaaacaacgtacaatttaaaattgcttccagaactgttactttagatcaagttaaacaaaagtatggaaaaaattataattatcagccatcattatctaaaaacaaaacaagtaagacagatggcttgtacggttatcaagtcggaaaaggaaacatcgttttccacgttaaagatgggtatgtcacaagtgctacattgtcataa

SEQ ID NO: 3692 - DNA, 1611 bp, Staphylococcus epidermidis
atgaataaaaatattaaaatgaaaaacaaacgaaaaataaacaatactcttgtttatactatctctgttttaattattgttgttattactcttattgcgggtatctttcctaaagcatttgggatgtatgcgcagagcgtttatgattggattacaaattggtttggttggctattccttatcattgtctttattttagatgtatttttaatattcttagctttttctagatatggtcgatttaaacttggttcggatgaagaagaaccagaattttccatgctatcttggattggcatgttattttcagcaggtcttggcgtcggtatagtcttttggggtgttgcagaacctttaacgcattatctccattcacccttccctggaaaaattgcagatcactctgaagaatcagcacgtgttgcgatgggatatacattcttccattggggtatttcacaatggtcaatatttgcaatttcaggattaatcgttgcatactttcaatttagaaaacaacgtaacgggcttatttcaacagctatggaacccgtttttggtgaagcttataaacgtcctttcaggaatattattgatatattagctattatcgcaaccgtcatgggaattgctacgtcgattggtttgggaattatgcaaatcggtggtggattaaaccatctctttgatgttcctaataataatttcactaaaatcttaattactattttgatggtagccatatttttaggatcttcattaactggcttaaatcacggtgtaaaatggttaagtaatttaaatattttattaggtgctattttacttatatttattttgatttttggagatttaaaatttattttagaatcatacacactagcaatttctgattatttgcagcattttatagaatatagtttacgcgtaaatccatactcaggagatgatagttggattcaacagtggactgttttctattgggcttgggttatttcttggtctccttttattgggggctttgtagcaagagtatctcgaggacgtacaattagagaatttgtcgtaggtgtactcattattcctcctctaatttcgtttacatggattgcaggttttggaggtacagctattaaacttgctttaaatcataacgacaagcttgttcatattgtagataaagattatactgttgccttgtttgaattattatcacattttccattgtcggaagtcactagttccttagctattgtacttattttcatctttattgtaacaagtgctgattcaactacgcatattgttgcaggtatggctacaggtggttctatcaatccaactttaaaacataaagtcctatggggtctacttattggggcgatttcagttgctatgacaattgcaggtggtcttaaaagtttacaaactgcatcagttattacaggtctaccattctctatcattttattattaatgatattctcactcatgagggctttaaaaagagaacccatccatcattttaaaatgacatcaattgatgatgaaaaagattactctatttcattagaagagcgtgaaaaacaggacgaacaagataacaagtaa

SEQ ID NO: 3693 - DNA, 561 bp, Staphylococcus epidermidis
atgtataaatatttaaaaagaaatcgattctcaacgcagacttcaattataaaaaatgacgctcagcaacctgttggtatgatatcgaaagtgtataaaaattttattcaaaaatgtattggttatttgaccttaggtttaaaattaaatcaatatgagatatgtgatgtgaataataatagtgtagcttatattaaggtatcgcgatatatggagaaaaaacattttaaagttgaatatcatgattcaaaaggtaggcagtgtgaagcgttatttgataagcaaagtaatggttatgaggagacgtatggaatattaaaaattgacggtataatattaaatattcatgctaatgagaaacatcatactactatcaaagatataaagcgagatacacaaattgcgagttggaaacaaattggtgattatgcttatgcagaagggaatgatgggctatttaaagaacatcaattactctatattcttatcatgcacgcttttgctaatacatatgtgagcaaacgtcaaacgaacttgatgttcccagggccacctgtttaa

SEQ ID NO: 3694 - DNA, 636 bp, Staphylococcus epidermidis
atggaaatattagtcacagcatttgaaccatttggagatgaaaaaattaattctgcactagaggctgttagccatttggaaactaaaattggctgtcataaaattgatttgatacttcctacagtatttcatgactctgcggatatgattgctaaagtgttaaaatctaaaaattatgatgttgctctagctatcggacaagcaggtggtcgtagtgaaatcactcctgagcgtgtaggtataaatatagatgacgcacgcattaaagataatcaaggacaccaacctattgatcaagttatacgtcacgatggcgcacctgcttatttttctaatttacctatcaaaagaatgacaatggcaattcaaaaggctggtcttcctagcagactatctaattccgctggaacatttgtatgtaatcatatcttatatcaactcggatatatggcagaccatttttaccctgacttattattgggatttatacacgtgcctttgattcctgaacaaacaatcaatcattctcaacaatcttcaatgtccgttgaagatatcgtaaaaggattaactgaagcaatcaaagctatcgacttcgttgaagataacaagatcgcattaggagaaatccaatag

SEQ ID NO: 3695 - DNA, 963 bp, Staphylococcus epidermidis
atggattatagagtactactttattataaatatgtaactatagatgaccctgaaacttttgcagccgaacatttgaaattttgtaaggaacatcatttaaaaggaagaatactagtttcaacggaaggcattaatggaacattatctggaactaaagaagatactgataaatatatagagcatatgcatgcagataatcgttttgctgatttaacttttaaaattgatgaagctgaaagtcatgcgtttaaaaagatgcacgtgcgtccaagacgtgaaattgttgcactcgacttagaagaagatattaatccacgtgaaattaccggtaaatactattctcctaaagaatttaaagccgcattagaagatgaaaatactgttatattagatgctcgaaatgattacgaatacgatttaggacatttccgtggagctattcgtcctgatataacacgattccgtgacttacctgaatgggtgcgtaataataaagaacaactcgacggaaaaaatattgtcacatattgtacaggtggcattcgttgcgaaaaattttctggttggttagtaaaagaaggatttgaaaacgtaggtcagttgcatggtggtattgctacatacggtaaagaccctgaaactaaagggcaatattgggatggtaagatgtatgtatttgacgaacgtattagtgtcgatgtgaatcaaattgataaaacagtcatcggcaaagagcattttgatggaacaccttgtgaacgttacattaattgtgcaaaccctgaatgtaataaacaaattcttgtttctgaagaaaatgaagaaaaatatttaggtgcatgttcgtatgattgtgcaaaacatgagcgcaatcgctacgttgcccgtcatcatattagcaatgaagaatggcaacgtcgtttaaataatttcaaagatgtgcctgaacacacacatgcataa

SEQ ID NO: 3696 - DNA, 978 bp, Staphylococcus epidermidis
atggcaaatcaaaaattaccaacattaaaatatactggtaaatcagaaagtgcagtgccaattgtgtcagaaagtgaattgcaaacggtaacagcagagccgtgggtgaaaatttcagataaagggttacaactagaaggacttaattttaatcgcgaaggtcagttattcttattagacgtgtttgaagggaatatttttaaagttaatcccgcaacaaaagaggttacaacaaaatttcagtctgttaaagataatccggcagcgattaaagtacataaagatggtcgtttatttatctgttatctaggtgattttaagacaactggaggcatatttgcgacaacagaaaaaggtgaacaaagagaagaaattatttctgatttaaatacagaatattgtattgatgacatggtttttgacagtaaaggcggattttatttcacggattttagagggtattctacacaacctttgggcggtgtttactatgtagatccagactttaagacggttacgccaattattcaaaatatttctgtggcgaatggtattgctttaagtacggatgaaaaagtgctatgggtaactgaaactacaactaatcgacttcaccgaatcgcattagagaatgatggtgtgactattgcaccatttggagcgacaataccatattattttacaggtcatgaaggaccggattcttgttgtattgatagtgatgataatttatatgtagctatgtatggccaaggacgtgtattagttttcaataagagaggttatcctataggtcaaattttaatgccaggacgtgatgatggaaagatgttacgtacaacacatccacaatttatacctggtacaaatcaacttataatttgtactaatgatattgaaaaccattctgaaggtggatctatgctttatacagttaatggttttgctaaaggatatgagagttatcaatttcaataa

SEQ ID NO: 3697 - DNA, 516 bp, Staphylococcus epidermidis
atgacaaaatttaactttgatcaagttcacagtgatattcagtttaaaattaaacatcttatggtgtcccaagtaaaaggaacatttaagcaattcgatgttcaattagatggagatattaatgatttaacttcactaaaagcaacagctactattattccaagttcaattgacactcaaaatgaggacagagacaaccatttaagatcaaacgatttctttggtacagaagacaacgataaaatgacatttgtaactaaagaaattaacgaaaatcaagtagttggagatttgacaattaaaggtgaaactcatgaagagacatttgatgttgaatttaatggtgtaagtaaaaatccaatgaatggacagcaagtcactggttttatcgttagtggaacaattaaccgcgaaaaatatggtattaattttaaccaagctttagaaactggtggcgtgatgttaggtaaaaacgtaaaatttgaagcatcagcagaatttagcatcgacaattaa

SEQ ID NO: 3698 - DNA, 1497 bp, Staphylococcus epidermidis
atggctaataaagagtcaaaaaatgttgttattattggcgctggtgtcttaagtacgacatttggttctatgattaaagaattagaacctgattggaacatcaaactctatgaacgcttagatcgtccaggtattgaaagttctaacgaaagaaacaatgccggtacaggacatgcggcgttatgtgaattgaactatacagtacaacaacctgatggttcaattgatatagaaaaagccaaagaaatcaacgaacaattcgagatttcaaaacaattctggggtcacttagtaaaaagtggtaacatcagtaaccctagagatttcattaatccacttcctcacattagtttcgtaagaggtaaaaataacgttaaattcttaaaaaaccgttacgaagcaatgcgtaacttccctatgttcgataacatcgaatatacagaagatatcgaagaaatgagaaaatggatgccattaatgatgacaggtcgtactggtaacgaaatcatggcggctagtaaaatcgacgaaggtacagatgttaactacggtgaattaactcgtaaaatggcaaaaagtattgaaaaacatccaaatgctgatgttcaatacaaccacgaagtaattaatttcaatcgtcgtaaagacggtatttgggaagttaaagttaaaaaccgtaattctggagacgttgaaactgttctagctgattatgtatttatcggtgcaggcggtggcgctattccactattacaaaaaactggtatcccagaaagtaaacatcttggtggattccctatcagtggtcagttcttaatttgtacaaaccctgatgtaattaatgaacatgacgtcaaagtatatggtaaagaaccaccaggcacacctccaatgactgtaccacatttagatacacgttatatcgatggtgaaagaacattattatttggaccatttgcaaatattggccctaaattcttaagaaacggttctaacttagacttattcaaatcagttaaaccttataacatcacaacattactagcatctgcagttaaaaacttacctttaatcaaatactctatcgaccaagtattaatgactaaagaaggttgtatgaaccatctacgcacgttctaccctgaagctcgtgacgaagattggcaattatacactgcaggtaaacgtgttcaagttatcaaagatactaaagaacacggtaaaggattcattcaatttggtacagaagttgttaactctaaagaccactctgttatcgcactattgggtgaatcacctggagcatcaacttcagtatcagtagccctagaagttttagagaaaaactttgctgagtatgaaaaagattggactccaaaattacaaaaaatgatcccatcatatggtaaatctcttatcgatgatgttaagttaatgagagcaactcgtaaacaaacatctaaagatttagaattaaattattacgaatctaaataa

SEQ ID NO: 3699 - DNA, 537 bp, Staphylococcus epidermidis
atgttagaaacacatagattaaagctagtgaagcctaatttgagttatacagatgaactttatcaattgcatacaaataaggtagctacaaagtatacacctaaaggtattcatcagaataaagtagcaacccaagattttattaaaggatggatgaggcattgggatgaatatcaatttggttacttcattttaattatgagagataatcacgaagtagtggggatagcgggatttgagtatcgtacaattcatcaacaacagtttcttaatgcgtattatagaatctttccatcgtatactggtgttggtttagcttttgagtcaatggaggagattgcccgtcatttaaaaaagcatgataccataacaccaaaattaattcgaacaaatcaatataatacaaattctattaaattagcacaaaaactcggatataattatgatgctaactgggacgatgtaattaataaaggagatcgttgttttttaacctacaagcgttggataataactaaaagcatgatgaattcgtag

SEQ ID NO: 3700 - DNA, 408 bp, Staphylococcus epidermidis
atgaaattatctatttttcatgatggtcaattttttgtaggtgtcgttgaataccaagaaggcttcattcataaatatctaaaagttacatttggcaatgaacctagcgatgaaacagtgttacgattcataacttttaaacttattcctttattaaatcaaacacacggtaagaagaaacctattcaaaagcataaaaagattaatccaaaacgtttacaacgtaaaatcgctaaagaacaaaaagagaccaatttaactacatttgctcaacaagcgattaaagaagaacaagagttgaataagctaaagagtaaaaaacttcagcgattagaaaaagaacgacacagacaatacaaaagaatgttaaaaagaaaaaaagcacatgaaaagcacaaaggtcactaa

SEQ ID NO: 3701 - DNA, 411 bp, Staphylococcus epidermidis
ttggacctaacaaatcaaaaaatcctacacttacttgagcaaaatagtaagctatcgctttctgaaattggaaaggaagtaaatttatctacaccctctgttcgagaacgaatctataaacttattgattcgaaaatcattgaacgatatacaatcgatattaattacgatgcattaggtttcgatattaatgttttgatagaagtaactataaaaaataacctatataaagatttcaaagcatttatttcagttcaaaacaatgttgatttttgctatagaatttctggagatagttgctttatatttaaagcgcattttaaaaagatgagcgaagtcgaaacactcatcaacgaaatccaatattatggtcatacaaaaacacattttatattttcagaaacaaaatag

SEQ ID NO: 3702 - DNA, 417 bp, Staphylococcus epidermidis
atggctataattaacttatctcatcgtggtgatacttcttttgacaaacttctcggacatctccctagtgttcaagaaaaatggaatgcattggaagatatattaaaaaatgaggggcaattatctgttgatttaaaagaagaaattaggaaaatactagctcaaaacagtggttgtctatactgcaaatctaaaggaaaacccaataagaaatttaccgatgaaaaatctttagtttgcataggatttgttgatgtttatgtgtcacaaaatggacgggttccacaatctacaatacaggttttaacaaagacattgactgatatagaaattgtagaattgttagcattcgtatcatttacccactgtcaacaagaatttggtgctatgatgaatttacaacctagcaataactga

SEQ ID NO: 3703 - DNA, 813 bp, Staphylococcus epidermidis
atgaacaataccatcatttcaatgaaagaaaaggaattacgttttttaaagttttttcatcaacaaaaatataatattgtagattttaacttaattgaagaattggattggcaacgattgactcatgaagatttgcaacaaatggatgaaagaagcttttggcaacaaaataaatctatctatgcattaagaaatgattttaccgatcaattattcagatattattcgaactatccaacacattttaaaaaagtagcttatgcaggggatattatcagagataacagagttataaagcaagtcggcattgagaattacgagccacaatttgataatatcactcaaaatttcttagatttccaatattttattcaaaacgtacttcatgatgacattcaatttatcattttaggtcactatcaattgattgatgcacttttagagaaaaatcatcaaactagagaagttatggagatgatagaagaacgtaatttatcagggcttattcaaacactaactttcaatcatcccatcattcaaattcttaaagagaacacattaaatcaacttaaaatactctctcattatttaccagagcgacaccctgcaatggtggcaattcaatcttggtcacaatggtttactgatcatgggattactgaaatccaccttgatgtaactgcacaagcgcctagatcttattacaaaggtatttttataaaatgtcatcttaaaaatactgctcatagcgttttgacaggtggatattatcacggttcactagaaggttttggtttaggattaacactttaa

SEQ ID NO: 3704 - DNA, 615 bp, Staphylococcus epidermidis
atgttacgagttgcattagcaaagggtcgtttattaaagagttttatcgaatatttacaacaagttaatcagatagatattgcaactgtacttttaaatagacagcgacagttattgcttacagtcgacaacattgaaatgattttagttaaaggaagcgatgtgcctacttatgtagaacaaggtattgctgatgtaggaatagtgggaagtgatattctgaatggtcaaaaatataatattaataaattactcgatttgccatttggtaaatgtcattttgcgttggcggcaaagccagaaacatctcgctataaaaaagtagcaacaagctatgtacatacagctactcaattctttaataaagaaggtatggatgtagaagtgattcaccttaacggttcagttgaattgtcatgtgtagtggatatggttgatgctattgtagatattgtacaaactggttctacgcttacagctaacgggctcgttgagaaaaagcatatcagtgaaattaacgctaagttaattacaaataaagaatcatattttaagcaatcatctgaaatagagagactaatcaagcagttaggagtgtctattaactatgcttag

SEQ ID NO: 3705 - DNA, 1245 bp, Staphylococcus epidermidis
atgcttagcgcacaacaatttttaaaagaatttaataatgttgaatctctagatgaatctttgtacgagatagtgagtcagatttgtgaagaagttaaattacagggagataaagctttaaaaaattataatttacaatttgatcaagtggaaactgagaagcttgaattagagcaaagccaactaaaaaatgcatacgacatgctagataatgaaacacgagatgcattagagcaaagctatcagagaattaaagtgtaccaagaaaatattaaggtaaaacaggaatcatctcaacaaactgaatgttatgaacgataccatcctatcgaacgtgtaggtatttatgtgccgggaggtaaggctagctatccgtctacagtattaatgactgcaacacttgctcaagtagcaggtgttaatgagattactgttgttaccccacctcaaaatagcggtatatgtcaagaggtgttagccgcttgttacattacaggcgttcatcatgtttatcaagtcggtggagcacaaagtattgcggcgctaacttatggcacggaaactataaaaaaagtcgacaaaatcgtaggtccagggaatcaatatgttgcttatgccaaaaagtttgtattcggtcaagtaggcatagaccaaatcgcaggaccgacagaaatagccttgattatagacgaaagtgctgacttagacgcaatcgcttatgacgtatttgcacaagcagaacatgatgaaatggcttgtacttatgtgattagtgaaaatgaaaaggtacttaatcaattgaacactataatacaagagaaacttcagtatgttgaacggcaagatatcatatcacaaagtattgctaaccatcattatctaatattagctcaagatactgaagaagcatgtttaattatgaacacgattgcacctgaacatgcatctattcaaactcgagcacctgaaatgtatatagataaagttaaatatgtaggcgcactttttttaggtcatttttctcctgaagttattggggactatgtggcaggtccaagtcatgtacttcctactaatcaaacagctagatttacaaatgggctttctgtgaatgactttatgacacgacattcagtcattcatttatcacaaaaaacatttaacgaagtggcagaatcagctgagcatattgcacatatagaatctttatttaatcatgaaaaatcgattcacgtacgccgataa

SEQ ID NO: 3706 - DNA, 579 bp, Staphylococcus epidermidis
atgaactatcaaatcaaaagaaacactgaagaaactcagcttaatatttcactggctaataacggaacacaatctcatattaatactggtgtaggatttttagatcatatgttaacgctatttacttttcatagtggattaactttatctattgaggccactggagatacgtatgttgatgatcatcatataactgaagatataggtatagttattggacaattacttcttgaattaataaagactcaacaaagttttacaagatatggttgctcatatgtacccatggatgaggcgcttgctcgaacagtagtggacattagtggtcgtccatatttctcatttaatagcaagttgagcgctcaaaaggtaggaacttttgacactgaactagttgaagaattttttagagcattgataattaatgcgcgattaaccgttcacattgacttattaagaggtggaaatacacatcatgagattgaggcaatatttaaatcttttgcaagagcattaaagatttctcttgcacaaaatgaagatggacgtattccatcgtctaaaggagtaattgaatga

SEQ ID NO: 3707 - DNA, 579 bp, Staphylococcus epidermidis
atgattgcgattattgattatggattgggaaacataagtaacgtcactcgagcaattcaacatttaggatatgatgtgattttgacatgtgatgataaagacgtgcaaaaagctgaagctatcgtacttccaggtgttggacattttcaggatgcgatgcattctatagaagaaaaaagcattaaagatatgcttaaaaatatacatgataaaccgataattggaatatgtttaggtatgcaattactttttcaacatagcgcagaaggtgacgttagtggattggaacttgtcccgggaaatatagtgccaatccaatcatctcatcctattcctcatttgggttggaatgaattaaagagtacacatcccttactgcaaagtgatgtgtattttgttcattcatatcaagcagaaatgtcagaatatgtagtagcttatgctgactatggtacaaagattccgggagtcattcaataccgaaattatataggtatccagtttcatcctgaaaaaagtggaacgtatggattagagattctaaatcaagcgcttaaaggagggtttattaatgattga

SEQ ID NO: 3708 - DNA, 705 bp, Staphylococcus epidermidis
atgattgatttatggccagctattgatttaattaattcaacaagtgttcgattaacagaaggcaaatatgattcaaaagaaaaaatggaaaaatctgtagaagacagtatccgattttatagtcaatttaaatgtgtgaaacgtatacatattgtagatttaattggggctaaagcaaaagaggtaaaagaattcgactacatccgttccttaagaaagttgaccactaagcctatagaagtgggtggcggcattcgttcaaaacaaacaattgaaaattatattcattcaggaatagactattgtattgtaggtacaaaaggtatccaagatatagagtggttaacacatatgacacatcaatttccaaataaactctacttatctgtagatgcttttggagagaaaataaagattaatggatggaaagaggatgctaaactcaatttatttgattatgttgccaaaattgagcatttacctttgggtggtgtgatttataccgatatttcgaaagatgggaaactttctggacctaattttgatttgacaggtcgtctcgcactttatacatcgttacctgtgattgcttcaggaggtattagacatcaagaagacttgtttcgattagaatcgttaaatgttcatgctgctattgtaggaaaagcagcacatctggatgaattctgggagggattatcttga

SEQ ID NO: 3709 - DNA, 759 bp, Staphylococcus epidermidis
ttgattaaaaaaagagtgattccatgtttagatgttaaagatggacgcgtcgtaaagggtatccagttccagtcattaagagatatcggtaatccagttgatttggctctttattataatgaagccggtgcagatgaactagtctttcttgatatttcgaagacggaagcaggacatgatcttatgatagaagtgatagaagcaacggcaaaacaattatttatccctttgacagtaggaggagggattcaaaatttagatgatattacacaactattaaatcacggagcagataaaatatcactcaattcaagcgctttaaaacatccagaattaattcgacaagcaagcgagaaatttggtcgtcaatgtatttgtattgctattgatagcttttatgataaagacagagaggattatttctgtactacgcacggtggtaaaaaactaactgatgtcagtgtatatgattgggtacaagaagtagagcatttaggtgctggggaattgcttataactagcatgcatcatgatggaatgaaacaaggttttgatattgaacatttagcaaaaattaaacaattagttaatattccgattatcgcctctgggggtggaggaaatgcacaacattttgttgaattatttcaacaaacagatgtttcggcaggtttagcagcaagtattttacatgatcaagaaactacagtggcagaaattaaagataaaatgcgtgaaggaggtatcctcgtgagatga

SEQ ID NO: 3710 - DNA, 636 bp, Staphylococcus epidermidis
atgaataaacttatagacttttctaaaggattagtaccagtaattttgcaacatgcacaaacggatagcgtattaatgttgggatatatgaatgaagaagcttatcaaaaaactctgaaagaaaagaaagtaaccttcttctctagatctaaacaacgtttgtggactaaaggtgaaacttctggtcatttccaacatgttgagagtattcatctagattgtgatcaagatgcgatcttaatcaaagtgatgccacaaggtcctacatgtcacactggaagtctgagttgttttaatagtgaaattgaatcacgttttaaaattcaagctttagcacaaacgattcatcaaagtgctaaagccaatcaatctaactcttacactcaatatttgttaaaggaaggcatcgagaaaatatccaagaaatttggtgaagaggcatttgaagttgtgataggtgcgataaaacataatcgtgaagaagttattaatgaaacagcagatgtcatgtatcacctttttgtgttactacatagtttagatattccattttcagaagtagaacaggtactagcgcatcgccatcaaaaaagaaataattttaaaggcgagcgcaaagaggttcgagaatggtaa

SEQ ID NO: 3711 - DNA, 786 bp, Staphylococcus epidermidis
atggatatacaaaagtttgaatcttatttaaaaattaagcattcatattattcaaacccttctcttgaagcattgaattactatgtaagacgctttatgataactgtgccatttgaaaatattaatgttcaaaacaagattcctatctcaatcgatatcaaagatttatacaataaaattgttattcaacggcgtggcggtttttgctatgaattaaatcatttgtttgctacgtatttagaacataaaggcttccacgtcactcgtgctgcggcaacagttcacacaccaaatggtgggcgtagtcctgaaggctcgcatatgtcactttacgttaatatcgaaggaacactttatattactgatgttggatttggtgatttacctacaagtattatcgagataggttctaaaacacaattcattccaacatatgataaaaatggagtttactgtgctgtttggattaatgacaatcaatatgccttacagaagcttagacaaaataaatggatgacactctatgaagcgcatttaaaacctcaaagcattaaagactttaaagataaaataagctacaatgagcatcatcctcattctatttttgtacgacatttgcttattacacaaccacaatcgtttggacgtgcaacaatgacttatcattctttaactttaagcaatgacagtactaaacataaatatgacgttactaccaataactacaagtattttttaaaaaaatattttaatttaaatgtatcaatcatcccatttgaaccataa

SEQ ID NO: 3712 - DNA, 2067 bp, Staphylococcus epidermidis
gtgaagacaagacaaaataaatacagtattcgtaaatttagcgtaggtgcatcatccattctgattgcagcattattatttatgggtggaggatcagctcaggcagctgagcaacaacaggataagggaactgttgaaaatagcacaacacaatctattggggatgaaaatgaaaagttaagtgaacaacaatcaacgcaaaataagaatgttaatgagaaaagtaatgttgattctattactgaaaatgaaagcttacataacgaaacaccaaaaaatgaggatttgattcagcaacaaaaagattctcaaaacgacaataaatctgaatctgtagttgaacaaaataaagagaatgaagcatttgttaaaaaacattccgaagagaaaccacaacaagaacaagttgaactggaaaagcatgctagtgaaaacaatcaaactttacactcaaaagcagcacagtccaatgaagatgtgaaaactaaaccttcacaacttgataatacaactgcccaacaagaagactctcaaaaagagaatttgagtaaacaagatacacaatcatctaaaactactgatttactacgagcaacaggtcaaaatcaatcaaaagatagccaatcaacagaagaggtaaacaaagaagtaaaaaacgacactcaacaagtgactgctaagaacgatgacgacaaagttgaaacatttaatttaaatagtaaagaggaacctcttaaagttgacaagcaagcgaatccaactacagataaagataaatcttctaaaaatgataaagggtctcatgatggtctcgctaatttagaaagtaatgctgttgctacaactaataaacagtctaagcaacaagtaagtgaaaaaaatgaggatcaaacaaataaatcagcaaaacaaaaacaatataaaaataatgatccaattattttagtacatggtttcaatggatttacagacgatatcaacccatcagtgctaacgcattattgggggggcgataaaatgaatattcgccaagatttagaagaaaatggatatgaggcttatgaagcaagtataagtgcatttggtagtaactatgaccgtgctgttgagttatactactacatcaaaggtggacgtgttgactatggtgcagcacacgcagctaaatatggtcatgagcgttacggtaaaacctatgaaggtgtgtataaagattggaaaccaggtcaaaaaatacatttagttggtcatagtatgggtggtcaaacaattcgccaattagaagagctattgagacatggtaatccagaagaagttgaatatcaaaaacaacatggtggggaaatttctccattattccaaggtggccacgacaatatggtgtcatctattacaacactcggtacaccacataatggtacgcatgcgtcagacttattaggtaacgaagcaattgtacgtcaacttgcatatgatgtaggtaaaatgtatggtaataaagattcacgtgtagactttgggttagaacactggggattaaaacaaaaaccaaacgaatcatatattcaatatgttaaacgtgttcaaaattcaaaactatggaaatcaaaagatagtggtttacacgatttaacacgcgatggcgcaacagatttaaaccgaaaaacatcattaaatcctaatattgtatataaaacttatactggcgagtcaacgcataaaacattggcaggaaaacaaaaagctgatcttaacatgttcttaccatttacaattactggtaatttaattggaaaagctaaagagaaagaatggagagaaaatgatggacttgtttcagtcatttcttcacaacatccatttaatcaaaaatatgttgaagctacagataaaaatcaaaaaggtgtatggcaagtaactccaacaaaacatgactgggatcatgtagactttgtaggacaagacagtacagatacaaaacgtactagagatgaattgcaacagttttggcatggtcttgctgatgatttagtacaaagtgaacaattaacatcaacaaataaataa

SEQ ID NO: 3713 - DNA, 1068 bp, Staphylococcus epidermidis
atgaagaaaaataaacttgaattagtgtatttacgtgcgtttatttgtgtcataatcatcgtgacacacttactaacgcaaatcactttagaaaatgaacagatgtctgatagttcactcatattgcaatattatatacgcaatatttttattttcggcacccctagttttataatattgtctcaattattaacaacattaaattacgaatcagtaactataaattatcttttttcaagatttaagtatatttttattccatatcttttaatcggcttgttctatagttatagtgaatcacttatcaccgcttcttcttttaaaaagcagtttatcgaaaatgttgttttaggacaatggtatggctatttcattatcataattatgcagttctttgttctatcttatatcatttacaaaattaattttagattgttcaatagtaaaattttgctgcttttagcatttatagtccaacaatcttatctacattattttttgaataatgacacttttcatcaattcatgactcattattatccattaagcgaaaatacaatgatattaggatggatattctactttttcttaggtggttacattggctataattatgaaaaaatattatctttcttagaaaaatatttaattatagttattatgttaactttaggcgcatatgttttatttatcgctgtttccggtagtgattattggaatgtcacaagctttacttatacgttaacattatataatagtgtcatgttcttcttattactaggagtctgtatgcactttaaaactatgttattaaatactattaaagctattagtgcattttcctttttcatttatttgttgcacccaattatcttagattctctttttgcttacaccaacatatttgaagataatacaattgttttcttggcgatttcacttttaatgattctaggaatttgtataggcgtcggaatgatgttaagagagttttatatattcagatttgtaattggaaaacaaccgtacaagttacaatttgaccaataccagcctaactggaattaa

SEQ ID NO: 3714 - DNA, 870 bp, Staphylococcus epidermidis
atgaaacctttcaaattaatctttattagcgcattgatgatattaataatgacgaatgcaacaccaatatcacacctgaatgctcaagctaatgaagaaaacaagaagttaaagtacgaaaaaaatagcgcactcgcgttaaactatcacagagtaagaaaaaaggatcctttgaatgactttatatcattactatctgggagtaaggaaattaaaaattatagtgtcactgatcaagaatttaaatcacaaattcaatggcttaaagcacacgacgcaaagtttttaactttgaaagaatttattaaatataaagaaaaaggtaaatttcctaaaagaagtgtttggattaactttgatgatatggatcaaacgatttatgacaatgcctttcctgttttgaaaaaatatcatattccagcaacaggttttcttattacgaaccacattggttctaccaattttcataatttaaatttactttcaaaaaagcaattagatgaaatgtatgaaacaggcttatgggactttgaatctcatactcatgatttacacgctcttaagaaaggcaataaatcgaagtttttagattcgtctcaatctgttgctagtaaagatattaaaaaaagcgaacactatttaaataaaaactacccaaaaaatgaacgcgcacttgcttacccatacggattaattaatgacgacaaaataaaagctatgaaaaaaaatggaattcaatatgggtttacacttcaggaaaaagctgtcacaccagatgccgataactatagaattccacgtattttagtaagtaatgatgcatttgaaacgctaataaaggaatgggacggattcgatgaagaaaaataa

SEQ ID NO: 3715 - DNA, 210 bp, Staphylococcus epidermidis
atgtattgtatcgttgtgatgattgtttatataggaactcttatcaattctcaaatggaaagtgttataacaatacgtattgcattaaatgttgaaaacacggaaatttacaaattattcggatggatgagtttgtttgtacttattatatttatcttttttacatttagtctcgcgtttcaaaaatataagaaaggtcgtgacatatga

SEQ ID NO: 3716 - DNA, 1239 bp, Staphylococcus epidermidis
atgcatgtatttaactttttacttttctatccaatttttatgtcaatttactggatagtaggatcgatttactatttttttattaaagaaaaaccctttaatcgatcattgttagtaaaatctgaacatcaacaagttgaaggcatctcctttttattagcttgctacaatgaaagtgaaacagttcaagacacgctttctagtgttttatctctagaatatcctgaaaaagaaattatcattatcaatgatggaagttctgataatactgctgaaatcatctatgacttcaagaaaaatcatgattttaaatttgttgacctcgaagtcaatagaggtaaagctaatgcactcaatgagggaatcaaacaagcatcttacgaatatgttatgtgtttagatgctgacactgtcattgatgacgatgcgcctttttatatgattgaagactttaaaaagaatccaaaattaggcgcagttacaggtaatccacgtattcgtaataaaagttctattttaggaaaaatacagaccattgaatatgcaagtattattggttgtatcaagcgaagtcaatctcttgcaggagcaatcaatactatttcaggtgttttcacactatttaaaaaaagtgcactcaaagatgtaggttattgggatactgacatgattactgaggatattgctgtttcatggaaactccatctttttgattacgaaattaagtacgaaccacgtgctctatgctggatgttagtgcctgaaactataggtggtttatggaaacaaagggttcgatgggctcaaggcgggcatgaagtacttttaagagacttttggccaacaattaaaactaagaaattatcactatatattttaatgtttgaacaaatcgcatcgattacatgggtctacatcgtactatgttatttatcttttttagtaatcacagccaacatcttagattacacatatttaaaatatagtttttcaatctttttcttttcatcctttacgatgacctttatcaatatcatccaatttacagttgccttatttattgacagtcgctacgaaaagaaaaatatagttggcctgatatttttaagttggtatccaacgttatactgggttatcaatgccgcagttgtcattatggcatttcctaaagcattaaaaagaaagaaaggtggctatgctacatggtcaagcccagacagaggcaatatccaacggtaa

SEQ ID NO: 3717 - DNA, 558 bp, Staphylococcus epidermidis
ttgaaagataagattattgataacgcaataaccttattttccgaaaaggggtacgatggtactacacttgatgatatttctaaaagtgtaaatataaaaaaggctagtctatattatcattacgataataaggaagaaatatatcgaaaaagtgttgagaattgtttcaattactttatagattttttgcttaggaaccatgatgataattattccattgacggactttaccagtttttattcaaatttatattcgacgttgatgagagatatattaaattatatgttcaattatctagtgctccagaagcactgaattcagaaatcaaacaccatcttcaagaaattaatactaccttacatgatgaattgataaagtattatgatcctacgcacatcgctttggataaagaggactttataaacttaattcttctttttcttgagacttggtattttagagcctccttttcacaaaaattcgggattattgaggacagtaaaaaccgttttaaagaccaagtatattcactgttaaatgtatttttaaaaaaataa

SEQ ID NO: 3718 - DNA, 1176 bp, Staphylococcus epidermidis
atgaaagataataaaatgttgttcattatttttatgataggaacatttacagtaggaatggctgaatatgtagtgacaggattacttacacaaatcgctgacgatatgaaggtttctatttcgagtgcaggtttattaattagtgtttatgctattagtgttgcattgatagggcctttaatgcgaatcataacattgaaagttcacgcccaccgtctgttaccaattttagtagcgatttttataataagtaatttagtgggaatgttagcaccgaattttaatgtattgttattatcaagactcatgtctgcggcaatgcatgcgccattcttcggtgtgtgtatgagtgttgctgcgacagtcgcacctcctgctaaaaaaacacaggccattgcacttgttcaggcaggtttaactattgctgtaatgttaggtgtaccattcggatcatttttaggtggctttgcaaattggagagttgtttttggatttatgattgtgttggcaatcattactatgttaggaatgattaaatttgttccaaatgtttctttaagtgcagaagcaaatattagcaaagaattaacagtgtttaagaatccacacattttaattgtgattgcaattattgtgtttggttactctggtgtgtttactacttatacatttatggagccaatgatacgagatttttctccatttaaaattgtaggtttaactgtttgtttatttatgtttggtctaggcggtgtgatagggaatttaattactggtaatgtaccggaagataaattaacaaaaaatttatacctcacatttcttttactatttgtaacaatcatactatttgttactgttattcaaaattcaatattagcattaatcatttgcttcttattcggttttggtacatttggtacaacaccgttacttaatagcaaaattatcttaagtgcaaaagaagcaccacttcttgcaagtacgttagcagcttctattttcaatgttgctaattttcttggtgcaatcattggatctatattattatcaatagggttaccttacattcaaattactttgatatctggtggaattatagtgttgggtatgcttcttaatcttgttaatcaactttatgaaaagaaacatatcacatttaatgaatattcatga

SEQ ID NO: 3719 - DNA, 1536 bp, Staphylococcus epidermidis
atgtcccaaattgctttctatatccttagtgatgtccacggttttatattcccaacagatttttcatcaagagaaaaagatttacctatgggtttgttaaaagccaatcatcttatcgaacaagactgcgtgcactatgacggcagtgtaaagattgataatggagacttcttacaaggttctccattatgtaactacttagtatccaaattaaagagtagtctcccattaacatcaatatataatcgtttagggtttgattttggaactgttggcaatcatgaatttaattatgatttaccttatctaaagcaggccatcaatcaacttcattaccctgttttgtgtgcaaatataattgaaaatacacaaccattcactggccaaggtattcattattttaaagtaaatggtttaactataggaactattggattaaccactcagtatatccctcactgggaacaacctgattacattaaaacactcaattttaacagtgctatccacacattaaaatctgagttacctacacttagggaaaagagtgatattgtagtagtaagttatcatggtggttttgaacgtgatttagatagtggcctcccgactgaggcgcttactggggaaaacgaagggtatgatattctaagacagtttagcgatagtatcgatgtgttgataaccggccatcaacatcgtgatattgcgacaatcaagaaccaaacagccatcattcaaccaggttcaaaaggtacaaaagttggaaaaatagttattgaatatacacatgataaaaaagtattaattaaagaatgtaacttaatgaatgttcataacagtacctcctttaagccgaatgacgaagatatcgctttacgtaatcaattggaagattggcttgatactcaaatcgcagaactcccctacgctatgagaataaacaattcatttgaggcaagaaaatcaccgcatgcatttgttaaccttcttaattatattttattagaaaaaagtggtgcagatattgcatgtacagcactatttgattccgcaaatggctttgatgagaaagtaaccatgcgcgatatcatcaataattatccttttcctaatacttttaaagtgatagaacttagtggaaaagatattaaacttgcaattgaacgaagcgcaagttattttgacattgttaatcataaaatcacagttaataaagagtttctagaacctaaacctcagcatttcaactatgacatatttgcaggtatccaatatacaattcatgttagtcatccttacggtgaacgtgttagtgatttactaattaatgatgcaccactacaaagtgatcaaatatatacaatatgcgtaaataattatagagctgttggtggcgggaattatgatatgtacgttaacaaacctgtgataaaagatattcaaatcgaaggtgctcaattgttaatagattacttgtctcacaatgatttatctcaaatcccacaagtgattgatttcaatgttgttaagtaa

SEQ ID NO: 3720 - DNA, 1551 bp, Staphylococcus epidermidis
atgaaaatatttaaaactttaagttctatactagttacatctgttctttctgtgactgtgattccctcaacatttgcatcaacagaatctactgctacaaatcagacacaacaaacagtactttttgataattctcatgctcaaactgcgggcgctgccgattgggtgattgatggcgctttctcagattatgcagattcaatgagaaagcaaggttaccaagttaaagaactagaaggagaatcaaacatttctgatcaatctttacagcaggcgcatgtattagttattcccgaagctaacaatccatttaaagaaaatgagcagaaagcaatcattaattttgttaaaaatggtggtagcgtcattttcatctcagaccactataatgccgatcgtaatttaaatcgtattgattcttcagaatcaatgaatggttatcgacgtggcgcatacgaaaatataactaaagatatgaataatgaagaaaagaattctaacgttatgcataacgttaagagttctgattggctctcacaaaacttcggtgttcgctttagatataatgcacttggagatatcaatactcaaaatatcgtttcaagcaaagatagttttggtattactaaaggtgtacaatcagtttcgatgcacgcaggttcaacattagcaataactgatcctaataaagctaaaggtattatttatatgccggaacatttaacgcatagtcaaaaatggtctcacgcagttgatcaaggtatttacaatgggggtggcatcaacgaaggaccttatgtagccatttcaaaaatcggtaaaggtaaagctgcatttattggcgatagctctctcgtagaagatcgttcacctaaatatcttcgtgaagataatgggaaacctaaaaaaacgtacgatggttttaaagaacaagataatggaaaattattaaataatttaacaacgtggctaggcaaaaaagaatctcaaccttctatgaaagatatgggtattaaacttgataataaaacaccgctacttaactttgagcaacctgagaattcaattgaacctcaaaaagaaccttggactaccccaatagaaggttacaaatggtatgatcgttcaacatttaaaaaaggtagttatggaagtaatcaacggggtgctgacgatggagtagatgacaaaagctcttctcatcaaaatcaaaatgccaaagttgaattaactttacctcaaaatatccaaccgcatcatccatttcaatttacaatcaaactcacgggatatgagcctaatagcacaattaacgatgtaagagttggactttataaagatggaggtaagcaaatcggtagcttttcttctaaccgtaaccaattcaatactcccggctatagtcctagccaatcaattaaaacaaatggagcgggtgaagcctcattcacactcacagctaaagtgacagatgaaattaaagatgctaatattcgtgttaaacaagggaaaaaaattctattaactcaaaaaatgaatgaaaatttttaa

SEQ ID NO: 3721 - DNA, 957 bp, Staphylococcus epidermidis
atgaaaaatcttaagtttttagtggtgcttgttttatcggtggttatttttgcagcagcctgtgggaattcaagttctttggataataataaaagttcggatagtggatcagattcaaaatcgggtagttatacacctaaagaattaacagtacaatttgtaccttctcaaaacgctgatacactcgaagctaaggcaaaaccgttagaaaaattgttgtcagataaattagggattccggttaaagtatcagtttcaacaaactacaacacgatagttgaagcgatgaaatctaagaaagtggatgttggtttcttgccaccaactgcatatacattagcacacgatcaaaaggcagcggatttattattaaaggcagaacgttacgacgttaatgaagatgggtctccaagtaaaaagttagttgatgattataaatcagaaatccttgttaaaaaggactctggtattaataatctcaaagatttaaaaggtaaaaaaattgcattacaagatgtaacttctacagcaggatatacattccctctagtaacattaaaaaaagaagctggtattgatgcaacaaaagatatgaaaatagtcaatgttaaaggacacgatcaagcagttatttcattgttaaatggagatgtggatgcagcagctgtatttaatgatgcacgtacagttgtaaaaaaagatcaaccaaatgtatttaaagatactaaaatattaaaactcactaaacctattcctaatgatacgatttcagtacgtcctgatatggataaaaaattccaagataaattgaaaaaagcttttaaagaaatttctaaaactaaaaaaggtcataaaatcattagcgaggtatattctcatgaaggttatgttgatactaaagattcagactttgatatcgttagacaatatgaaaaagctgttcatgatatgaaataa

SEQ ID NO: 3722 - DNA, 774 bp, Staphylococcus epidermidis
atgagtcaaatcgaatttaaggatgttagtaaagtgtatccaaatggccatgtgggattaaaagatattaacttaaatatagaaaaaggtgattttgcagttattgttggactgtctggagcaggtaaatcaacattactacgatcggttaatcggctacatgatatttccaaaggtgatattactatcgaaggtcagtcaataactaaagcacgtggtaaaaaattattagaaatgcgtcgaagtataggtatgatttttcaacattttaacttagttaagcgttcaacagtgcttagaaatgttttgagtggcagggtaggataccatcctacttggaaaatgatacttggtctttttcctaaagaagataaagtcaaggcattggatgctttagaacgtgtaaacattttagataaatatgaccaacgctctgaccagttgtcaggtggtcaacaacaacgtatatcaatagctagagcgttatgtcaggaaccaaccattatattagcagacgaaccagttgcttcattagatccattaactacaaaacaagtgatggatgacttaaagaaaatcaatgaagaacttggtattactattttaattaatttacactttgtagatttggcaaaggaatacggatcgagaataattggtttaagagcgggagagctcgtttatgatggacccgcgtctgagacaaatgacgaagtatttaatcatatatacggtcgctctattaagaacgatgaaaaattaggggtggaataa

SEQ ID NO: 3723 - DNA, 801 bp, Staphylococcus epidermidis
gtgacgacaccaacaacgcataaatataatcgctatttaaataaaaggatgtctcttaaaactagcttttcaattattttaatcacgggtttgattatctggagttttatttatactggatttagcattggagatttaatgataggtctgccacaaattggcgtattcttcaaacaaatgatacctccagattggggttatctagatcatattacacaaccaatgctagacacgattcgtatggcaattgtcggtacttttctaggaagtattgtctccattcctatagcgttactgtgtgcgagtaatattgttcaaacaaagtggattgcgattccatcacgttttgtccttaatattgtacgcacaatacctgatttattattagctgccgtatttgtagccatatttggtattggacaaattccgggtgtattagcactttttgttctaacaatatgtatcattggtaaattattatatgaatcattagaaacaattgatccaggacctatggaagctatgacagctgtaggggctaataaagtgaaatggattgcatttggcgttgttcctcaagcaatttcatcatttatgtcatatgtgttatttgcctttgaaattaacattcgggcatcagcagttttaggtcttgttggcgcaggtggtattgggttgttctacgatcaaacgttaggattgtttcaatataaaaagacagcaatgattatcctgttcactctaatcattgtagttattattgactatgtgagttcgaaagtgagggaaaaattagcatga

SEQ ID NO: 3724 - DNA, 816 bp, Staphylococcus epidermidis
atgaatacgttggatagtaaatatgaattaaaatcaaaaaaacatcgtcagcgaataattaaaaattgggttatagtcactgtagttgcagctgtaattatatgggcgtttgcaggaattccaggtcttgaacttaaaagtaagtctattgaaatattaaagtctatcttttacggactatttcatccagatttaagttacatatatatacctgatggtgaagacttacttagaggtttgctggaaacttttgctattgcagtgattggcacgttcattgcttcaattatatgtattccttttgcatttttaggagctaaaaatatgatgaaattacgaccggttacgggcataagtaaattcatattaagcattatacgtgtgtttcctgaaattgtaatggcgttaatatttattaaagctgttggaccaggttcgttttcaggtgtacttgcactggggattcattcagtcggcatgttagggaagctttttgttgaagatattgaaagtttagattttagcgctgtagaatctttaaaggcgagtggagcaaataaaatgaagacgttaatgtttgctgtaataccacaaattttaccatcgtttatttcacttattttgtatcgatttgaattgaatttacgttcggcctccattttaggattaatcggcgcaggtggcataggtacaccattaatttttgctttacaaacacgatcttgggaccgagttggcatgattctaattggtttgattgcgatggtcgctttagttgatttaatatctggcgcggttcgtaaacgtatcgtttag

SEQ ID NO: 3725 - DNA, 1302 bp, Staphylococcus epidermidis
atgaaacaatttttaaacatcactcaacgtaaatttatcgaatggttgattatcttatccatttttatagttagcattcctaataaatggacattaatgatatctatcgctttatctttattacttcttaaaagaggggcgctaggtgtcgttcaattaatcatactttatatgctcagatcgcaaatatacactccctatgatacacaagagatggcgcattacatagtaagtatgaaatatatcttgatttatgtaattggagtattttttctatttaaatatgtaaaacattggataagaaatgaaatgatattaagatttatcaagtctactatgattcttatgctactttatatcataatgagtttagtcgtatctaatgatccgatagaatctattcttaaattgcttaacttctttataccgctaattttgattgttatgtatgttagtttaataaaaaagataaagaatctcattaactggattaatcaatttatcacgctagtgattgcctttacttttttatttatagttatagcgccaaaatcatatttaattgatgaggaatcacttagaagtgttttcaaggatgcacattcattcgcagttattcttgctatgggtctagttctatatatggtaacaataatcaaacaacaagattatgatgtattcaatttattattattaaatattggaatgatagagctctatttatcaaactctcgtcatattttcatatctgttattttatgtctaatgcttctattaccgttatctcacataaaaaagagaattaaacatcccataattggtgctatgatactaatggcaattgctataataaatcaaccatatatttatcatctttttattaaactaatcttaaaagggaagaatagccaagaggtctttatgccgagtgatatgaatattaaagctattgattatgcgctaactgagcatccttttttaggaagcggttttggtataccaatgataaaagcgagttcagaaatacaatactttaatgtagcaacgagtaatatcatcttcggtatgattatctttactggaataataggacttactttatgtacgatatacatgcttcatatggtacttttagttacttttccaatgagtattactattttattatttttaatcgctatctttgttaatatggattatattattttatttgattccgtggggctaggtatattgtgttatatattttggggaatatatttaaaagaaggtatgtatcaatacaacaacggacaatggtaa

SEQ ID NO: 3726 - DNA, 135 bp, Staphylococcus epidermidis
ttgttcaccacaacagaattagatgtcagacttgaagttgttgtcgtggacgttgttgtcggtgctgccatcgtattcaaaacagtaaatctactaaatgttcttaaatttgcaaaggaagtaggactcgattga

SEQ ID NO: 3727 - DNA, 4584 bp, Staphylococcus epidermidis
gtgaaagtttcagatgtactcattgatgtggacgtgcttgatgaatctgaaatgcttgtacttgttgagccacttaccgatgtactttcacttgttgattcactctcgcttgctgactctgacgcactatctgatgtcgacgcactcgttgagtctgaaatgcttgtacttgttgaatcacttaatgacgtacttgcgctattggagtcactcacacttgttgacgttgatgcactttctgacgttgacgtacttgttgaatctgaaacgcttgtgcttaatgattcactcatggatgtgcttgtactgtttgagtcactctcacttgttgatgcagacgtactatctgatgtcgatgtgcttgtcgattctgaaagactcgtacttgtcgattcacttaatgacgtacttgtactgtttgagtcacttatgctcgttgacgttgatgcactttctgacgttgacgcactcgttgagtctgaaagacttgtacttgttgactcactctcgctcgttgatgttgacgcactttctgacgttgacgcacttgttgaatctgaaacgcttgtacttgatgattcacttaacgatgtactttcactgtctgactcactctcgcttgctgactctgacgcactgtcggatgtcgatgtgcttgttgaatctgaaacgcttgtgcttgtcgactcacttaccgatgtgcttgcactgtttgagtcactctcacttgctgacgttgatgcactttctgatgtggatgtgcttgttgatcctgaaagactcgtacttaatgatccactgagcgatgtactttcacttgttgattcaccctcactcgttgatgtggatgcactttctgacgttgacacgattgttgaatctgaaacgcttgtgcttaatgattcacttaccgatgtgctggcgctgtttgagtcactctcgttcgttgatgttgacgcactgtcggatgttgatgtacttgttgagtctgaaatgcttgtacttgttgagccacttaacgatgtactttcactgtttgactcactctcactcgttgatgtggatgcactttctgatgtcgacatactcgttgagtctgaaacgctcgtacttaatgattcactcatggatgtgcttgcactgtttgaatcactctcgctcgttgatgttgacgcactgtcggatgttgatgtgcttgttgagtctgaaacgcttgtgcttgtcgactcacttaaagatgtgctggcactatttgagtcgcttacactcattgatgtggatgcactgtctgatgtcgacatactcgttgagtctgaaatgcttgtacttgttgagccacttaacgacgtacttgcgctatcggagtcgctctcgctcgttgatgttgatgcacttgctgatgtcgacgtactcgttgagtctgaaacgcttgtacttgttgagccacttaatgacgtacttgcgctattggagtcactcacgctcgttgatgttgatgcacttgctgacgttgacgcgcttgttgaatctgaaacgcttgtgcttgtcgactcacttaacgatgtactttcactgtttgagtcactctcacttgttgacgttgacgcactgtcggatgtcgatgtacttgttgaatctgaaacgcttgtgcttgtcgattcactcaatgacgtacttgcacttgttgattcactctctcttgttgacgttgatgcgctttctgatgttgacgcgcttgttgaatctgaaacgcttgtgcttgtcgagtcacttaaggacgtacttgctctgtttgagtcgcttacactcatagatgtagatgcactatctgatgttgatgtactcgttgagtctgaaatgcttgtacttgttgactcacttaaggatgtacttgcactgtccgagtcgctctcacttgttgacgttgatccactttctgatgtcgatgtgctcgttgagtctgaaagactcgtacttctcgagtcacttaatgacgtacttgtactgtttgaggcactcacactcgttgatgttgatgtacttgtcgattctgaaacgctcgtacttgtcgagtcacttaacgatgtacttgcactgtccgagtcgctctcacttgttgatgttgacgcactgtctgatgtcgacatactcgttgaatctgaaagactcgtacttgtcgattcacttaatgacgtacttgcactattcgagtcactcacactcgttgatgttgacgcactttctgacgttgacgcgcttgttgaatctgaaacgcttgtgcttactgattcacttgatgacgtacttgcactgtccgagtcgctctcacttgttgatgcagatgcactgtctgatgtcgatgtacttgttgagtctgaaacgcttgtacttgttgagccactcaatgatgtgcttgtactgtttgactcactcacactcgttgatgtggatgcactatctgatgtggatgtacttgttgattctgaatcacttgtgcttactgattcacttgatgacgtacttgcactgtccgagtcactcacactcgttgatgttgatgcactgtctgatgtcgatgtactcgttgaatctgaaacgctcgtacttaatgattcacttatggatgtgcttgtactgtttgactcactcacactcgttgatgttgatgcactgtctgatgttgatgtacttgttgagtctgaaatgcttgtacttgttgagccactcaacgatgtacttgctctttccgagtcgctctcacttgttgatgcagatgcactatcggatgttgatgtacttgttgagtctgaaacgcttgtacttaatgagccacttaacgatgtgctggcactgtttgagtcactcacactcgttgatgttgatgcactgtctgatgtcgatgtactcgttgaatctgaaagactcgtacttgtcgagccacttaaggatgtacttgctctttccgagtcgctctcacttgttgacgttgatgcactgtctgatgtcgatgtactcgttgaatctgaaagactcgtacttgtcgagccacttaacgatgtacttgcactgtctgactcactctcactcgttgatgtggacgcactgtcggatgtcgacgcgcttgttgaatctgaaacgcttgtgcttatcgactcgcttaatgacgtactttcacttgttgagtcactctcactcgttgacgttgatgcactgtcggatgtcgacgtactcgttgaatctgaaacgctcgtacttaatgattcacttatggatgtacttgcactttccgagtcgctcacacttgttgatgttgatgcactgtcggatgtcgacgcgcttgttgaatctgaaacgcttgtgcttgtcgactcgcttaatgacgtactttcacttgttgagtcactctcactcgttgacgttgatgcactttctgacgttgacgtacttgttgagtccgaaagacttgtgcttgtcgattcacttaatgacgtacttgtactgtctgactcactctcactcgttgacgttgatgcactgtcggatgtcgacgtactcgttgaatctgaaatgcttgtacttaatgatccacttaacgatgtgctggcactgtttgactcactctcactcgttgatgtggatgcactttctgacgttgacgcgcttgttgaatctgaaacgcttgtgcttaatgattcactcaacgatgtactttcacttgttgagtcactctcgcttgttgacgttgatgcactgtcggatgtcgacgcactcgttgagcctgaaagactcgtacttgtcgattcacttaatgacgtacttgtactgtctgactcactctcactcgttgacgttgatgcactgtcggatgtcgacgcactcgttgagcctgaaagactcgtacttgtcgattcacttaatgacgtacttgtactgtttgattcactctcgctcgctgacattgatgcactgtcggatgtcgacgtactcgttgaatctgaaacgcttgtacttgtcgattcacttaatgacgtacttgcactgtctgactcactctcactcgttgatgtggacgcactgtcggatgtcgatgtacttgttgaatctgaaacgcttgtgcttgtcgatttacttaatgacgtacttgcgctattggagtcacttacgctcgttgacgttgatgcgctatcagacgtcgacgtactcactgattctgataatagtttacttgtgcttgctgattcgctcgcttttattgatgcgctatcagacgtcgatgtgctcgttgagtctgaaatgcttgtacttgttgagccactcacacttgttgatgttgacgcactttctgacgttgacacgcttgctgaatctgaaacgcttgtgcttgtcgattcacttaatgacgtacttttactcgttgactcactctttcttgctgactctgatgcactatcagatgtcgacgtactcgctgattctgataattgtttacttgtgcttgctgattcgctcgcttggattgacgtactattcgacgtcgacgcacttaacgactctgagagactcttacttgttgataatgattga

SEQ ID NO: 3728 - DNA, 396 bp, Staphylococcus epidermidis
atgagtacatctgaaactttcacttctcaatctcctataaatagtgaaagtcaatttattggtgatagcttgtctgaagatacaatcgtgactcaatcaaaaaatacgaatatgcttaataaaactggaaaagattatgatttacaagaacaaagaggttatactgattcagaacaacacaatgaaacacaaagtaatcaagctgataatcactcaaacaacctcgatttacttcatcaaaatcgtttacaagataaagtcgttaaacaaccgactaaaggagaagatggagttgtaagcaacggttttatagtagcagtagcaatagtattggctatcttcggtttggcaaaaaaatctagaaaagacgatgatgatcaagatggtagtaaataa

SEQ ID NO: 3729 - DNA, 1200 bp, Staphylococcus epidermidis
atgtttaagaaattcgaatataaaatcttatataaaagaatattttttacatgcttaattttagttatatatattataggaagtaatatttcaatcgtaagtaatgaaaatttaagaactcataaagactccttttttaagttagctattactaatgtaggtggggatttacatacattaaatatattttcactaggacttgggccgtggttaagttcgatgattattttgacactaataaaccacaaaagtaatgataaggttaaaacacaaactcgtagggaacgacatttcaaagagcgagcgttaacacttatcattagtgctgctcaaggattttacattattcattcatatattaataaacatgcgattaaagatagtaatatgctcattttattattagtcttaattacaggaacgttgttaatggtgtggttagcagatcaaaatacaacgtatggcatttcgggacctatgccaattgttttaatgagtcttgttaaatctatatttaatacacattttcccaaattaaattcaagcgcatctttaattactatgattattgtcttattagtgctggccttatttatactcttctttattgagttaacagaatatcggatagaatataatgatattatgaatatttctgctaaagatataccatcatatttatcatggaaacttaatccagctggtagtatctctatcatggtgagtttgtcattatttatgttaacgaataatatcgttaatttcataggacgctttatcgtgaatcataattttgaaacacatgtctttaattttacaaatccagttggaattactatatatcttctgttacaaatgattttgggttactttttatcaagattattaattaatacgaaacgtaaatcaaaggaatttcttaaaaatgggaattacttcgagggtatacaacctggacagcagacagaaaaatttctagggagtaaagcacgtcgtatttgttggttcggttcaatagtagtagcgattgtactcgctataccaatgtattcagcgctgcttgtcccccacttacttaaagaagtttactttacaactcaaatgattgtatttgtctatattggaattaatatcgctgaaacaattagagcgtacttatactttgacagctataagcaaattttaaataaatattggtag

SEQ ID NO: 3730 - DNA, 1557 bp, Staphylococcus epidermidis
atgaaacgatttataccagcttggtatagccgtaacagatggtgggaaagtacctcaagaccattctatctaaaaaaacagtatacagattttgacgatatgattagtttaatgacaatgcatagttcgaataatgtggattatcaattgatagttttaagttttagtccatatcttagaacattcctccatcgatatgatttgtatgaaagtcattattggtctgtatttgatgagatacagggcgttggacatcaaacgcctcaagctattgattatcgcgatctttcatggccagaaggcactgaatttatttttactccctttcaaattcaagcgattacagatgataacacgttttctaaaattcacttcagccaagaggggtacctgatgtgggtagaggattacaagtatagtacaattcaaagacgatttgtattcgatgacagaggatttatatcggcagtgcgtacttatacacctgatggtgataacaataaaaaacactatttttcaaaagatggggaagaaatatttgttgaagacttaaatgttaatacagtaacgattaataaaaatttccaatcaaaatttaaaagggttacgtattcatctatggctgagttgatagaagagaaattccaatcatatgtagaaagagaattgaatgaagatgattctgttatagtggcatctgatgaacgtcataattcaatgatggcacgcactattgatgcatcgtctttatgtttttctatttttactgagcgaaataaagtggtgacacaagatttatatgactctatttctagagcatattattgtctcgttgatacacaagctaatcaaaatatgattgaacactacgcaggattgaacatgaatgatattaatcttttaagggtaacgccttttgatgcgaagtcattacctaaccaaagtagtcaattgtatgacacttatattggattatggatagatggtttggacgagattgaaatacgagagattgtaaacagcttatttcaatatattcaacataaagatggctataagttgaaaattttaactaagagtagagataatcttacggaaaatcttatagatgaagttgctcatctcaatgatttatatcaccaagagaaaaaggaaataagtgatgtaattgaagacgtgatacagaataaaaaagaaacaatcattgatattgaaacagtaccgtttgaagaagatcttgtaagcgttatttcaaaattaagagttgtagtagatttatctttagagccgaaactttttttacaaatctgttgtattggcgcgggtataccacaaattaataaaaagagaacagattatgttaaacatatgcataatggatatattattgatgacatatcgcaaactgtagaatctttagattattttttggcacatttaaaaaattggaattattcttatgcatattccatgagattaacggatgattttagttcaattaatattattcatcaaattaatcagttatttaaaggtgatgtttcaagtggcacgtaa

SEQ ID NO: 3731 - DNA, 1560 bp, Staphylococcus epidermidis
gtggcacgtaaatttagagtacttcaagtaggtggtcatgatttaggttctttatttaatcaaaaaagtaatgtcgaatgggattattttgatgttggtttgtttgattttgaaagtggctatcaagatgttgtagtacatattttagatgaaaaaggacaatttgattttgtttttgtacgtgaaaaatattctgattcattaatgaaacttttatcattagtcagtacaccgtataatactgtgattgacaatgagtattgggataatcaataccaacaagataagacaatacaacgtaattttataaaaccactcatttatgaaaataaagaacaattacaacaaaaactagaggcagttacatttcctgggcaatatggagataaagttaaacctattcattgtcgcgttagtattcattttgatggttcttatcaatttaatggaaatgagtctattgaagtatcaggacgatttggggaatcataccaacccctcattacatggagtcaaaatatcattgctgatgccaataaggtgaatcaaatatggccagaatttaaagttgaaggtgatgctaaaatccaatatacattgagattgacgcctgtttattcaactgatcaaccagtagaaaagctaatatatgaacaagacgatttagacactcccatagaactacctgctcgtccttatcaaacatatgtgagtgtatcaatcaaagctaaaggtaaaggaacattatttataggtgctattcataaacgttggtcacgcttggaattagggcagttcatattaggcggaaaacgatatagtgatgaaaataagcaagaatttatacattacttccatcctggagatttaaaaccaccactcaatgtatattttagtgggtatcgtactgctgagggctttgaagggtactttatgatgaaacgtatgaatgctccatttattttaatagctgatcctagaatcgaaggtggtgccttttacctagggtcagagaattatgaacaggcaatccgtaaggttatccaaaatgctttggattatttgggatttgcgaacaaccaattaattctttctggattatcaatgggatcatttggcgcactttattacgctacaaaattaaatccagcggctgttattgtaggaaaacctttgataaatctcggtactattgctaataatatgaaactcgttcgtccaaacgattttggaacgtcacttgatattttgcgattgaatcaaaatggcataactaacaaagatgttgttcagttagataatcatttttggaagcaaattcagcatagcgatttgtcaatgactacatttgcgattgcttacatggagcatgatgattatgacaaatatgcatttcaagatttattgcctgttcttacaaaacaacatgcacgtgtgataagtaaaagaattcctggtagacataatgatgattctgctactgttactcattggtttattaatttttatcatttaatcatggaagagcgatttgggagggtaacacatgcaagaagatag

SEQ ID NO: 3732 - DNA, 573 bp, Staphylococcus epidermidis
atgcaagaagataggaaatttgaagtcaaatggcgactagttaattcatcaacttttatgtatggtacaaaattacgctttaatcaagataatatctattttgagaaccctttgatgccatccggtacaatcattcacagttggtatatgttaactgattttgcagaagaccgtgtaagcccaaagctacctattttaaaaaaagggcgccaatatcaatttcaatttaattttgaagttgaacctgagggtgcggcttattttaaaatgaaattttatcgtaagaataaagaaattcttagtcatcaaattctaaaaaataaaaaagaaaatattgtctatcctagagaagcatattcatatgaattagaacttattaatgctggcatgaatcatctatcttttcacaatataattgtgcaagaattaagagaagatagtaatcaagcttatgaggcaacgcaatatatagatcctaagaaaaaacttaaagtaattaatcaaataataaccaatataaggacacatcatctagactcatcaaactatcacaggagtgatatgaatggctaa

SEQ ID NO: 3733 - DNA, 2391 bp, Staphylococcus epidermidis
atggctaaaggtgttaaccaaattattaataatattaggttaagaaaattgcgcaaaatattaaatcaaattaatgcgcttagtgaggagttctcaaattttagtgatgaagcacttcaagcgaagacaaaagaatttaaagtttatttaaatgataataaagcttcactcaatcacattctgccacaagcttatgcaacagttagagaggcttctaagcgcgttttaggtatgtatccaaaagatgtgcagattttaggagcaatcgctatgcatcaggggaatattgcagaaatgcaaacaggagaaggtaagacgcttacagctaccatgcctctgtacttaaatgcacttacaggtaaaggtgcttatctaatcacaacaaatgattacttagcaaaacgcgattttttagaaatgaaaccactatatgaatggctaggcttgtctgtatcattaggatttgtggacattccagaatatgaatacgctgaaaatgaaaaatatgaactgtaccaccatgacattgtttacacgactaatgggcgactagggtttgattatttaattgataatttagctgatgatattcgtgccaaatttttaccgaaattaaactttgctattattgatgaagtcgattctattatattagacgctgcccaaacgcctttagttatttctggtgcaccacgtgtacaatctaatttatttcacatcgttaaaacgtttgttgaaacacttgagaaagataaagacttcatagttaattttaataaaaaagaagtgtggctcactgatgagggctcggaaaaagcaagccattatttcaaagtgaatagtatataccaacagcaatattttgatttagttaggatgattcatttatcgcttagagctaagtatttattcaaatataatttagactattttatttttgatggtgagattgtgcttatagatagaataactggtcgtatgctacctggaacaaagcttcagtctggtttacatcaagctatagaggctctggaaaatgttgaaatttctcaagatatgagtgtgatggcaaccataacattccaaaacttatttaagcaatttgatgaattttcaggtatgactggaacaggtaaattaggggaaaaagaattctttgatttatattcaaaagttgttatagagattccgactcacagtccgattgaacgagatgatagacctgatagagtatttgctaatggtgacaaaaagaacgatgcaattttaaagacagtgattggtatacatgaaactcaacaacctgtgttactaattacacgtactgcagaagcggcagaatatttttcagctgagttatttaaacgtgatatacccaacaatttattaatcgctcaaaatgtagctaaagaggcacaaatgattgctgaggcgggacaattatctgcagttactgttgctacaagtatggcagggcgtggaactgatataaagttatcaaaagaggttcatgatatcggtggcttagcagtgattattaatgaacatatggataatagtcgtgttgatcgtcaattaagaggacgctcaggtcgccaaggagatcctggatattcacagatttttgtatcacttgatgatgatttagtaaaacgttggagtaactctaacttggcagaaaataaaaacctccaaacgatggatgcatctaaactagaaagtagtgcactctttaaaaaacgtgtaaagtcaattgttaataaagcgcaacgtgtatctgaagagactgctatgaaaaatagagaaatggcaaatgaattcgaaaaaagtattagtgttcaacgagataaaatttatgctgaacgtaatcacatacttgaagcaagcgattttgatgattttaattttgaacagcttgcacgagatgtgtttacaaaagacgttaaaaatcttgacttaagtagtgaacgtgcacttgtgaattatatatacgaaaacttaagttttgtcttcgatgaagatgtatcaaatattaatatgcaaaatgatgaagaaatcatacaattcttaatacaacaatttactcaacaatttaacaatcgtttagaagttgctgctgattcatatttaaaacttcgtttcattcaaaaatcaattttgaaagcgatagatagcgaatggattgaacaagtagataacttacaacaacttaaagccagtgtaaacaatcgacaaaatggacagcgtaatgtcatttttgaatatcataaagtggctcttgaaacgtatgaatatatgtctgaagatataaaaaggaagatggttagaaatttatgtttaagtattctagcctttgataaggacggagatatggtcattcatttcccataa

SEQ ID NO: 3734 - DNA, 1509 bp, Staphylococcus epidermidis
atgacgatttataatatcaattttggaatcggttgggccagtagtggtgttgaatatgcacaagtgtatcgagcaaaactattaaggcaattaccttatccaacaaaatttatatttttagattttattcaatcagaaaatattcaaacactcacaagcaacatagggtttaaagatgatgaagttatttggctatatcaatacttcacagacgtaaaaatcgctcctacaacgtacacagttgatgatttaatttcagagttaggtaatgaggttactcgaaaagaacaaaacggtaaagtattacgactctatttaaataatcagcaaacattcgtaacctgctatttaaaaaatgctaacgaacattacgttgatcgtgcagagtttgtggtgaatggaatgttaattaggaaagatttttatagctatgtaagaacattctcggagtattatgctccttttgacaataaagctaaaatatatatgcgtcaattttataatgaaaatggatcaattgcatatcgcgaatatatagatgaagatgaacatgtttttgtgtttgatgatgcacgtttatacagtaaacaagcactcgtcgcatactttatacgtcaattgcgattgaattcagaggatatcattattattgatcgagcaactgatgtgggacaagccatattagaaaacaagggatccagtaaagttggcgtagtcgttcacgctgaacatttcagtgaaggtgcgactgatgggactcacattttatggaataattattatgagtatcaattcgaaaatgcacagcatattgatttctttatcacagcgacagatttgcaaaggcagacactaagtgaacaatttaaacaatataagaatgattgtccacgtatacgtacaattccagtaggtagtatagaatcgttacaatatcctgaaaaagaaagaaaaccatattccatcatgaccgcatcacgtcttgctaacgaaaaacatgttgattggatagtggaagctgtgattaaagctaaacatcagttacctcaattgagttttgatatctacggacaaggagaagaacaagaaaaaattaaaaatattattaccaaacatcgtgctgaggattacatacaaattaaaggacatagaaatcttcgtacaatatatcagcaatatgaattattcatagcggcctcacaaagtgaagggttcggactgacattaatggaagcggttggctctggtttaggtatgattggatttgatgtgaattatggcagtccgacatttattcgacatcatcaaaatggctatttgataccgatagattttgaacaagcgtctactgatgatatcacaacgcaaatcgctcatatgattattcgatattttgaagatggtcccataagggcacatgaggtatcgtatgacattgcagaatcatttaaaacatcgcatattgttgatctatggagacaactcattgaagaggtgctatatgattaa

SEQ ID NO: 3735 - DNA, 1341 bp, Staphylococcus epidermidis
atgattaatttattcgaaaattataatcaagaaacacaggaattacatcaatctcttaagcgtgctggttacaatcactttacgattgtaattaatgatgatggatttttacctgatgatgtgacatcgccgtatcgttttttcgcagcatatcaaatttatgaagatgatacccctgctttttttaatgatattgatacgccgcctttttgggaaattaaaggagatgcgacaatggctaccattacagatatgggtgagcttagaggtgaaatcttttataaggaacattataagacacgtgtagttagccatgtagagtggcttgattcaaaacagcgtttgcgttcggttgattattatacaaaagaaggatttaaatttgctgaaacagtttacgatttgttaggtaatgcaatattaaaaaagtatatgacacgtgaaggtaaagaagtgatttatgagaattatgtaactaacgatgtagttgtagaatataaagggaaatcttatttttttgattcatatacagagtggattaaattttacttgagtgaaatgggcattgagataaaagaagttatatttaatactttatcaacaccatttttagcaatttatcatttgccgacattgaaaaaaggtattttattttggcaagaacaatctcagggttatgtcccaggaaatatgaaagttatgttatcaccaaaccttcaaagtcgctttgccgttattgtccctaatcagaatgaatacaaattgatcaaggaacaactatctagggaggaacaacaggcagtatatgcatctggttacttatatgacacgtataaacggaatcattattctaagaatgtattaacattaacaaattcagatcaattaccacatgttgaaacgttgatacgtttgcataaagattatcaatttcacataggcgctaaaactgagatgtcttcaaaattattaagtttatcgcaatatgaaaatgttaaattatatccaataattaaagaacaaacagttcaaaccttatatcaacaatgtgacatctatttagatattaatgaggggaacgaaatagggaatgctgtaagaagcgcatataatcatcaattgttaattatgggatataaagaggttgttcataatcgagatttcgttgcaatagaaaatcagtttcttgtaaatgatataagtcagttgagtaacgctttgaaagagataggaaatcatcgtggtcaatttgaaacacgtttagcactacaacaacgtcatgctaatgctgtgccggtatcaacatttaaatacgtattagtacaagcattaagtggttaa

SEQ ID NO: 3736 - DNA, 348 bp, Staphylococcus epidermidis
atggaaaattttgataaaagttatcatgataaaacgggtgatgtattaggggctttaagttatctaagtgtatttttcgcacctgtattgtttccattaatcgtatggattgttggacaaccaccagcatctacgtattcaagaaatgcattatttaaccatattttgagttgggtgtgtttggtattaggacttatatcatttgctgctggactatccttgattgattcgacaaatggagtcgctgtactagtgataggagtaattattggaggtattctacttatcgcttcgcttgtattatttattattaatattgtgaagggtatcaaattattgatgatatag

SEQ ID NO: 3737 - DNA, 477 bp, Staphylococcus epidermidis
atggaaacggtatattttgctggtggatgtctatggggaactcaagctttttttaatacgattccaggagttattcaaacagaagctagggcaaatggaacgtcgaaatgtttagatgctccttatgatggctatgctgaatgtgtgaagatacactttgatcctgcaaaaacttcaatacttatgctgatggattatttgtttgaaatgataaatccttatagtttaaatcaacaaggtcaagacaagggtcaaaaatatcgaacaggtgtgtatagtgaaagttcgaagcatttaaatgaagcaaaagactacattaagcgcagggaagacgcgaaacaagtaatggtcgaagtacaacctctaagtaattatgtgaagagtgcagaagaacatcagaatcatcttgagaaatttccggaggattattatttatgtcatgttcctccagcattgcttaataaatacaagaaataa

SEQ ID NO: 3738 - DNA, 357 bp, Staphylococcus epidermidis
atggttttacgttatgctacaaatttaaaactagctaaagaattatatgatgcaagtaaacctaaattaaaaggcgatcaaggtatgattgatactttcactaatacatttggtttaccggaaaactcagttaagttagcaggtggcgttgaagctgcagctgctggtttatttgctgctagttttttaaataaaaatatttcacgcttaggctcacttgcagcaatttcagtacttggtgttgcagcttacaaacattttgaagcagggcatggtaaaaagggtgcacaacatgctttagacttattaggtttatcaacacttagcttattagatactttttcttgtaaaaaataa

SEQ ID NO: 3739 - DNA, 1173 bp, Staphylococcus epidermidis
atggaagaaagtaaaaactataatctcattacgacaatcatgtttatttcaggtatcattgtaatggcaagtttatatacggctctacctcttacagcaactttcgcagaagactttcatgttcctaaatctatagcaactttaaacggtgttttattctcattaacatattcaatcagttgtctattttatggaacgatttctgaaaagtatggcagaattaaaactattttagtaggtatgagtgcattagttatcatctgtcttatgataggtattgttcattcatttacagtgttattaatattaagagcactacaaggcgtatttgctgcatcattttctcctgtagtcatgacttatacaactgaaacttatccacgtgtgaaacgtgtaacagcaattagtttcatcagtacaagttttatgttatcaggtgtgttagggcaaaatatgagtgaattagtcgtaagttatttgaattggcagtgggtatattttattttaacaatcttatatttaattctcgtattagttatttataaaaatgtacctgagagtccacataaaaatcctgatatacaactcattaagtttttcaataactttaaagatttcaaagacaatcttaaagttttctattgtttatttatttcactaacattactgattatgtttataagtatgtatgatattttaaatgaatatgtcacatcacaccaagttgggggagacatgtctgtgtcctcaatgatgaaattgttcggtgtgataggcatgttattatctctattagcagggcgtgtaagcagtcgtataggtatgaagcgcttgctaactatcgcattaacaacatgtattgtgtcgatcatactcatgggtgtaactacgaatattatacttattacaacatttagtgtgttgtttgttgcaggtatcgcatttgcgattcctactgttatttcaaaaataggtgtagttgttaaaaacaatcaaggtttctttttatctgttaatacatttgtattattcttaggaacagcgattgcacctattttaatgttatttgtaggcgaactgtctaactttttcttacagtttttaatgattgctattgtcggactgattgctttagttgtatcaatatttatgccaggtgaccaacgttcttga

SEQ ID NO: 3740 - DNA, 690 bp, Staphylococcus epidermidis
atgaattattcaccaaaacaaggtgttaaaagtcatggattgccacatgatccgttcaaaagtagcacagtacctagacctataggttggatttctacagtatctaaagaaggtaaaaataacttggcgccgtacagtcaatatcaaaatcttacatgggatcccccaatggtaatgtttgcggctaatcagtcagtgcttggcgatcatgaaagaaaagatacagttaaaaatgcggaagaaactggttggtttgtatggaatatggcaacatatgatttgcgtgaagcagtgaatttatcatccaaagcattacctccagaagatgatgaatttgactttgctggtgtgacgaaagaatcgtgtatcgaagctcctggaagtagggtaaaggaatcacctgttcattttgaatgtgaatatgttcaaacagtaagaattcccactggagaccctgtttcaactgtggatgtagtcatcggtcgtgtagcacaagtgcatattgacgataaagtaattatggacaacggaaaattagacattaagtcaatcagacctatagcacgtctcggttattatgattacacggttgtcgatgaaatatttgaaatgaaagcacctgcagcttcgaaagaagaattggctggacttgaaggtcgaaattttgacaacactaataatgaatcatga

SEQ ID NO: 3741 - DNA, 156 bp, Staphylococcus epidermidis
atgtataaaaattataaaatgactaaacatactctactaatggaaacttcagttcttatccccacaaatgatatttcacgacatgtaaatgttattgcagaaacaattcccgagactgaattcgataaattcagacattatcgttgcttaatataa

SEQ ID NO: 3742 - DNA, 177 bp, Staphylococcus epidermidis
atgtttaccatatcaatcatcgctatgattattggtgttgtgcttattgttttaagtcaaattatctatcattcaaaaccgatagatgctaaggaaaaaatgtttatacccggtgtatgcctttttttagtaggactcttaagtttaatcggtcactttgttaatggctacgtataa

SEQ ID NO: 3743 - DNA, 429 bp, Staphylococcus epidermidis
atggcaaattctatttactcaactacaatgatttcaaatggtggacgtgatggtcgcgtttttagtccagataatacatttgttcaaaaccttgcaacacctaaggaaatgggtggtcaaggaggcaacgatactaatcctgaacaattatttgctgctggatatagtgcatgctttaatagcgcgctatcattaatcttatctcaaaataaaataagtgatgccaacccagaagttgaaatcactattgaattacttaaagatgatactgacaatggttttaaactcggcgcagatattaaagtcacacttgaaaatatgtcccaacaagatgctgagaaatttgtggagcaagcacatcaattctgtccatactcaaaagcgacacgtggtaacattgacgttcagttagatgttacagcgcaataa

SEQ ID NO: 3744 - DNA, 2031 bp, Staphylococcus epidermidis
atgaagagaacagataaaattggtgtctacctcaagctgtcatgttctgcgttgttacttagtggttcgctggttggttatggcttcacaaaagatgcttttgcagattcagaaagtacatcatcaaatgttgaaaatacttctaatagtaactccatcgctgacaaaatccaacaagctaaagatgatattaaagatttgaaagaactttctgacgcagatatcaaaagttttgaagaacgtttagataaagtcgataatcaatcaagtattgaccgtattataaatgatgcaaaagataaaaataatcatttaaaatcgacagactctagtgccacatcatcaaaaactgaagatgacgatacatctgaaaaagataatgatgatatgactaaagacttagataaaatactgtcggatttagattcaattgctaaaaatgttgataaccgtcaacaaggtgaaaatagtgcttctaaacctagtgactcaacaaccgatgaaaaagatgattcaaataataaagtacacgatacaaatgctagtacacgcaatgcaactactgatgattctgaagagtcggttattgataaattagataaaatccaacaagattttaagtctgactctaataataagctttctgaacaaagcgatcagcaagcatcaccatctaataaaaacgaaaataacaaagaagaatctagtacgacaacaaatcaatccgatagtgatagtaaagacgataaaagtaatgatggtcgtcgctcaacattagaacgtatagcatcagatactgatcaaattagggattcaaaagatcaacatgtcacagatgaaaaacaagatatacaagcaattacacgttcactacaaggtagtgataagattgaaaaagcacttgctaaggtacaatctgacaatcaaccactagattctaattatataaataataaattaatgaatttaagatcactagatacaaaagtagaggataataacactttatctgatgataagaaacaagcgcttaaacaagaaattgataaaactaagcaaagtattgaccgacaaagaaatattattatagatcaactcaatggtgctagtaataaaaaacaagcaaccgaagatatcttaaatagtgttttcagcaaaaatgaagtagaagacataatgaaacgtattaaaacaaatggccgaagtaatgaagatatcgctaatcaaattgccaagcaaattgatggtcttgcattaacttctagtgatgatattttaaaatcaatgttagatcaatctaaagataaagaaagtttaattaaacaattgttgacgacacgacttggtaatgatgaagcagatcgtattgctaaaaaattgttaagccaaaacttgtcgaattctcaaatcgtagaacaattaaaacgtcatttcaatagtcaaggaacagctacagctgatgatatattgaatggtgtgattaatgatgctaaagacaaaagacaagcgattgaaacaatattacaaacccgtatcaataaagacaaagctaaaattatcgccgatgttattgcgcgtgtacaaaaggacaaatcagatatcatggatctcattcactctgcgattgaaggtaaggcaaatgatttattagatatagaaaaacgagcaaaacaagctaagaaagatttagaatatattttagatcctataaagaatagaccatccttgttagatcgtattaacaaaggtgtcggtgattctaattcaatatttgatagaccaagtttacttgataaacttcactcaagaggatctattcttgataaattagatcattcggcaccggagaatggattatctttagataataaaggtggccttttaagtgatttatttgacgacgatggtaatatctcattaccagcgacaggtgaagtcatcaaacaacattggataccagtggctgttgtactcatgtcattaggtggagcgctcatctttatggcgcgtagaaaaaaacaccaaaattaa

SEQ ID NO: 3745 - DNA, 1968 bp, Staphylococcus epidermidis
atgaagaaaaataaatttttagtatatttactatcgacggcgcttatcacgccaaccttcgctacacaaacagcttttgctgaagattcatctaataaaaatacaaattcagataaaatggaacaacatcaatcacaaaaagaaacatcaaaacaatctgaaaaagatgaatttaacaacgatgattctaaacacgattctgatgataaaaaaagcacttctgacagcaaggacaaagactctaataaaccattatcagctgactcaacacatcgtaactataaaatgaaagatgataatttagttgatcaactttatgataattttaagtctcagtcagtagatttttctaaatactgggaaccgaataaatacgaagacagttttagtttaacgtcactcatccaaaatttatttgattttgattctgatataacagattacgaacagccacaaaagacaagccattcttctaatgacgaaaaagatcaagtagaccaagcagatcaggcaaaacaaccatcacaacatcaagaaccatcacagtcgtctgctaaacaagatcaagaatcatcaaacgatgaaaaagaaaagacaactaaccatcaagccgattctgacgtcagtgatttacttggagaaatggataaagaagatcaagaaggcgaagacgtagatacaaacaaaaatcaatcttcttctgagcaacaacaaactcaagcgaatgatgatagctcagaacataacaagaaatattctagtattacagattcagcattagactctatattagatgaatatagtcaggacgctaagaaaacagaaaaagattacaataagagcaagaatacaagtcacactaaaacatctcaaagtgataatgccgacaaaaatccacaattaccaacagatgatgaattaaaacatcaatcaaaacctgcacaatcatttgaggatgacattaaacgctcaaatacacgttcaacaagtcttttccaacaactacctgaattagacaatggtgacttatcttctgattcatttaatgttgttgacagtcaagacacacgtgatttcattcaatcaattgctaaagatgcgcatcagattggaaaagaccaagatatatatgcatcagttatgattgctcaagctattttagaatctgactctggaaaaagttcacttgcacaatcaccaaatcataacttgtttggaatcaaaggcgactacaaaggacaatctgtaacttttaatactttagaagctgatagcagtaatcatatgttcagtatccaagcaggtttccgtaaatacccaagtactaaacaatctcttgaagattatgcagatttaatcaaacatggtatcgatggtaatccgtcaatttataaaccaacttggaagagtgaagctctatcatataaagatgctacttcacatctgtcacgctcatacgccacagatcctaattattctaaaaaattaaatagtattattaaacattatcatttaacatcttttgacaaagaaaaaatgcctaacatgaagaaatacaacaaatcaataggtacggatgtctctggtaatgacttcaaaccatttactgaaacttccggtacatcaccttacccacatggccaatgtacttggtatgtgtaccaccgtatgaatcaatttgatgcatccatttctggtgacttaggtgatgctcataattggaataatcgtgctgaaagtgaaggctatacggtaacgcacacacctaaaaatcatactgcagttgtgtttgaagctggacaattaggtgctgatacacagtatggtcatgttgctttcgttgaaaaagttaatgacgacggttcaattgttatttctgaatcaaatgttaaaggattaggtgtcatttcattcagaactattgatgcagaagatgctcaagatttagattacattaaaggtaaatag

SEQ ID NO: 3746 - DNA, 2859 bp, Staphylococcus epidermidis
atgaaaaacgcactaaaactttttatcacggatttaaaaagagttgctaaaacaccaggtgtatgggtcatcttagctggtttagcaattcttccttcattctatgcatggtttaacctctgggctatgtgggatccgtatggtcatacaggacatatcaaagttgccgtagtgaatgaagaccaaggtgaaaaagttcgtggtaagaatattaatgtaggaaataaaatggtcaaaactttaaaaaagaatgatagttttgactggcaatttgtgagtagagaaaaagccgaccatgaaattaagatgggaaaatattatgcaggtatttacataccgaagaaatttacacatgaaatcactggtactttaagaaaacatcctcaaaaggcggatatagattttaaagtaaatcagaagattaatgccgtagcagctaagttaaccgatacgggatcgtcgtttgtgattgataaagcaaataaacaatttaacaaaaccgtagcaaccgctttactttctgaagctaataaagtcggactatcaattgaagataatgtacctacaatcaataaaattaagagtgctgtatatcaagctaataattcattgcctaaaattaatcaatttgcagacaagattattgaactaaataaacatcaagacgatttggatgcttatgctaatcaatttagaagtttaggaaagtataaagggaatgtattagacgctcaagaaaaacttaatgctgttaattcgtctattccggcgcttaatgaaagggctaaattgatacttgcacttgatagctacatgcctaatattgaaagaattttaaatgttgctgctaatgacgttccagcacaatttcctagaatcaataggggtgtcgatattgcaagtgaaggtattgatgcagcgagtggtcagttaaatgatgcaaaaggttatttgactcaagctaaagcgagagtgggagactatcaagaagcagctggccgcgctcaagatgtgaacaaccaagcaaatcaaaatctaagaaatcaaacatcaactacaccccaaagcgctataaagtcatcgcattcggaagggaagagtcattcaagtattaaaacagtacctgtgagtcaatcaggtgagaatcaacccgtttatggtgataacattttatctaacagtgatgtaaaatcaatgaatacagctttaacagaagctttattatcattatctaatcaaacagatcaacaagcacaagctacccaacaagacattaagtcattaaaaaatatagcatatggtgttatcgcttcagataaaccatcagagtttaaagaaccattaaaaaatataaaatcacgcttagaaaacgcatctaagtataatcaacaatttatagatatcttgtcagagttggaaaaaagtgaacatgttgatctatctaatgaaattaagcaagtgaaagaagcaaacaatagcattaatgataatttaaaaagtactaatcaattaatagatgcattgtcaaatggtagctccggacaattagaagcagtcaatgtattacgtgacttacctaacttaaataaaaggttagatacattacgaaattacattaaaaaagaacttaatcgtaatttactagctgtttctaatgagattactgatcaacttaataaaggtcaaaatacattatcgacaatccaatctaaattaaatactattaaccgagtgattaacgctggtcaagatattttaaatagcggtaaaaagagaattgatacgattcaaactgcattgccagcaatcgaaaacgcatatataaatgcaatgcgaactgcacaagcttacttcccaacagctaaaaaagatgtcgcgaaagctgcagactttgtacgtaatgacttgcctggattagagagagaattagctaatgtaacacagtctgtaaaccaaaaaataccatctttatttagtcgttatgataatgctgtagatttattaaacgagaaacagcctcaagcaaaagaagcacttgcttcgcttgccgatttctcagaaaataaattgccagatgttgagaaagacttgaaaaaagcaaataaaatcttcaaaaagttagataaagatgatgctgtagataagctaatagatacattgaaaaatgatttgaagaaacaggcagatattgttgctaaccctattaataaaaaaacgacagatgtgttcccagtaaaagactatggttctggtatgacgccgttctatactgcattgtctatttgggttggaggattattaatggtcagcttattatctgtagataacaaacatgaacacttacaacctattatgacgaagagacaagtgtatcttggtaaatctggtttctttttcttattaggtatcatacaggcattaatagtatctatcggtgatttagttatccttaaagcatcgatagaatcaccgatattatttgtctctattgccgtgtttagttctctcgtatttaattcgattatttacacatctgtatcattgttaggtaaccctggtaaggctgttgctattatcttacttgtgttacaaattgctggtggaggaggtacattcccaattcaaacaacgccagaattcttccaagcgatatctccatatttaccattcacgtattctatcgacgcattacgtgaaacagttggaggtatagttccagagatactgattacgaaagtgatcattttaggtttattcggaatcggattcatggttgtaggttattgcttgaaacctgtgactgaccctattatccgtaaaattgctgaaaaagctgatgaaagtaaagtaactgaataa

SEQ ID NO: 3747 - DNA, 951 bp, Staphylococcus epidermidis
atggtactttttcttcaacccgtatttcaagaacgtttatggggtggcaccaatctcactcaatttggctacgatattccgaataattctaccggcgaatgctgggcaatttccgcacataaaaacggtcctaacacaattctcaacggaaaacataaggggaaatctataaaacaagtttgggacgaagataaagcacttttcggaaatgactcacgtaaagattttccacttctcactaaaattttagatgcacatgattgtttgtcagtacaagtacatcctgatgatgaatatgcgcttaaacatgaaggcgaatacggtaaaactgaatgttggtatattttagacgctcaacctggtgctgaaataatctatggtgttaatgctacaagtaaaaatgaacttgaacatatgattgatcatcatcaattcgactatttatttaaacatgtacctgttaaaccgggtgatttcttttatgtaccagccggtacagttcatgctattggttccggaatcctcattttggaaactcaacaatcttcagatacaacatatcgtatatacgattatgacagaaaagataaaaatggtcatacgcgtgaattacatttaaaccaaagtaaagatgttattgatatcactacaactgaacctaatacaacacctaagactgaaatgataaatggcaattgtcacactcaatttgttgccaatcatttctttacggttgaagaatggtctatcaaagacatattagattttcaaaaaccacacacttattgcctagtgtcaatgattaacggccacgggcaagtttcaatcaataacaaagtatataaaatcgataagggcgatcattttattttaacttctgaagatcaatatattaaatttgttggtaatatggatttaatagtcagttttagtaaagatgaggcatattaa

SEQ ID NO: 3748 - DNA, 1941 bp, Staphylococcus epidermidis
atgaaaatacttgcaattacatcatgtccaaatggaattgctcatacatatatggctcaagaaaaattagaacaagcagcaaaagatatgggcgttgatattaaggttgaaactcaaggaggcgtcggagcagaaaatgtgctcacttctaaagaaatcaaagaagctgatggaatcatcattgctgccgatagacaggtagatttatcaaggtttaatggtaaacctctcatcaatgaaagtgtacgtgaaggtattcatagacccaaggaattaatacaacgtgtgattgaccaagatgcacaaatttaccatgatcaaaatatttcttcaaatatatctagagaccaggaagaacctcataaaagtaatattcaaatggtatatcagcatttaatgaatggtgtttccttcatggttccatttatcgtcgttggcggtttactcatagctattgccttaactcttggaggacacaccactccaaaaggattagttatcaccgaagattcattttggaaatctattgaaaatattggtagtttatcgtttaaattcatggttcccatccttgctggttatatcgcggtgagtattgctgataagcctggtcttgttccaggtatgattggtggtgccattgctgctgatggtagtttatatggaagtgaagcaggagccggtttccttggtggtatcgtcgcaggtttcttagcgggctatattgcaaaatggattaaacagattaaagttcctaaagctatggctcctattatgcctattattattatacctattctatcttctttaatagttggtctcatttttatatttgtaataggcacaccaatttcaaatatatttggtgcattaacatcatggttaaaaggaatgcaaggtgctaacatcattattcttgctcttattattggcgcgatgattgcttttgatatgggaggtccagtaaacaaagtagcattcttattcggttctgcattaattactgaaggcaactacactgtgatgggaatggttgctgtagcagtatgtacaccaccgattggtttaggtttagctacatttgttcgtaaacaccaattcaataaagcagaacaagaaatgggtaaggcatcatttacgatgggattatttggtattactgaaggggcaatcccttttgctgcacaagatcctctaagaatcattccagccaatatgattggcgcgatgattgcttcagtaatagcggcggttggaggtgtcggtgataaagttgctcatggaggtcctattgtcgctgtactaggtggaataagtaatattttatggttctttatagctgttgtcgttggaagcttagtaaccatgttcacagtcttgttatttaagcgtcacacccctgctatagcaaaaagcaataatggaaatgatacttctgttggaactgaaaatgtattttctgatgaccaatctattaatcacagcaaacaactctcacatcatatggtgttcgataaatcactcattgaaattaccaaggaaccaatgacaagagatcaagctattgatagattacttactaagttatgccatcgtcattacattacgaatatagaagaggtaagaaccgcaatccttaaacgagaggctgagtcaacaactgctatcggaatgaacgttgcaataccacatgctaaatctcatgcagttaaacgtcctatcgtcgctgtattaaatcataaagcaggtgtagagtgggaaagtctagatgaatcaaatcctcagctcatttttcttattgcagttcccaatgataataacgatacacatttaaaactgctacaacggttatcacgaacgctcatgaaagataatacgcgtgatgagttaattcatgctcaaagtcgtgatgaaatatttaatattttaaaagagatataa

SEQ ID NO: 3749 - DNA, 1872 bp, Staphylococcus epidermidis
gtgattgatagacaaatcaaactcatcaaattgttattaaattatacagatacgtatataagtggccatgatattgccaaacagttaaatgtatctaatagaactatacgtaatgatattaaaactatacatactacatttctaaatgaattaattttaagtgtacaatctaaaggttatatgctaaatacatgtctttatacacctgatgagatacaatctgctttagagtcagttattgtaaaagagaataaattgcttatcacaattgcttataggttatttatggaaaagcatacattcactatcaaagagctatcttcaacttaccatttaacaaaatcaaaagtgattgattatgtaacacgtatacaaacgtgggctataaaatttgatatttatttatcaataaaaaagaagcaaggtatcatgatcgatgcgagtacaacgagtatcagtaatgctgtacttcatatcaatcaacttacagacgatgactttaaagttgaaaaccttattttacaagagttacctcaagcccatactagaaaaataaaacaaattatctcaaagcatatagataatcatcaattatcaacttctgaaaataaaatacaacaattacttgtgcatctaattttaattatcaaacattctcaaccagaggaagaagattggagcactgatacagaatctttaactattgcgaaaaagtgtataaaagatatcaatgaaacccttggatatcaacttaacaataaaacaagtgaatgcttttccttttttattagctaccatttcaataagtttgatttagggatccaacaactatttattcaaagttatatcgatcgactcattgaattaatggagcaacatattggttttcccttttcacaagatacaattttaaaagataatatgaacgtccactttagtcgtacatatttgcgattaatgagtcatgtttatctaaataatccattaacaagtcaaatcaaacgactatatccctttgtctttaatacactatatgatagtattcgacaattatcacaagataccaatatccaattaagcgaagatgagattgcctttttaactatacattttcagtcttctatcgaacgccataagtcatcacatattcatgttgtaattgcttgttattatggcttaggcatttcaacgttgcttgctgagaaaatcaaacaacttaatcatgcaatacagatcgtagatacattaaaacttgaagatattaacaactatcattttgaagggattgacttattaattactactcacgactttgatacaagtcaacttttacaaatacctaaagtcatacaagtatcacctttattttcagatgaagatgctaaaaaaatcgaattctttgtaaaagacatgcaaaacccattatcaaaagatgatatattatcaaaaattcagttgagtgttgagtccaatttcaaaatgaatcattcaaatcacattcttccaatttttgagaaatccaaagaaattttagattatcatcatgcaactctagatggctatatagaaagtgccatagatcgcgaaaaacaatcttcaacatatataggtaaagggatagcactcccacacggcaaccctgaaaaagtactgaaatcacacatgattatatttaaaccttctcaacctataacatggaaacaacatgaagttaaacttgttttctttttagcaatgagtaaaaaagatttaaatattaaccgtaaaattatacaaacaattgctcaattagaagaagatgacatccatcaattatgtcttttagatgatttacaactaaaaaacactttgtatgcacgttttaaagaataa

SEQ ID NO: 3750 - DNA, 135 bp, Staphylococcus epidermidis
atgtcaggtatcgttgaatcattacataacgctgtaaacgctggtttacacgtaaaacaagattgggtagacatgggattcggtattgcagatacagttgcaaaaatcgttgaccaagttttaaaatttgtttaa

SEQ ID NO: 3751 - DNA, 780 bp, Staphylococcus epidermidis
ttgagtaactcaaaaaaagtagccgttgtcacaggtgcagcacaaggtattggcttgaaaattgctgagcgtctatttgaagatggatatagcatcgcgcttgtagactttaatgaagcggtagctaaagagtcagctgaaaaattatcaaaagaagggcaagaggcagttgcttttaaagcagacgtttcaaatcgcgatcaagtatttagtgtgttaaatcaagtcgttgaacactttggcgatttaaatgtcctagttaataatgctggtcttggaccaatgacaccaattgaatcagtaacacctgaacaatttaatcaagttgtaggtgttaacgtaggtggtgtattctggggtatccaagctgcaattgaacaatttgataaattaggacatggcggtaaaattatcaatgccacatctcaagcaggtgttgaaggtaatgcaggcttatctctatacagcagtactaagtttgctgttagaggattgactcaagtagcagcacgtgatttagctgagaaaaatattacagtcaatgcatttgcacctggtattgttgaaacaccaatgatgaaaggtatcgctgaaaaacttgctgaagaaaacaaccaaccaatggaatggggttggaaacaatttacagatcaaattgccttaaaacgcttatctaaacctgaagatgtagctaatgtagtaagcttcttagcaggtagcgattcagattatattactggccaaacaatcatcgttgacggtggtatgagattccactaa

SEQ ID NO: 3752 - DNA, 120 bp, Staphylococcus epidermidis
atggggtgttccaccatgacggatttaaaaattaatgatatggatatagctgaaataaatggcttttgggtatatcaaaatactaaaaataaaaaatttacagttaatggtaaaaattga

SEQ ID NO: 3753 - DNA, 927 bp, Staphylococcus epidermidis
atgagaaaactgatatctaccattatcgtttcaacattattaattggaggatgttccacggtgcataaagaagcaaaacatacatcacaatcaattcctgaagaagttcccgcaagtcaatacaaaggtcaaggtttccacaaccagctgaaaaaagtgctatcgcacatgcgaaaaaaccatcgtgaagaatacgaaaaacttggcgaacaattttttaaagataattttagccttaatgttaaagccacaaatgttgtaggaagtggtgatggcgtcgaagtctacgttcattgcgatgatcatgacattgtgtttaatgcaagcatcccttttgataaggaagcaatacatgaagaaggctccatgcgaagcaatgataatggagataccatgagtaatatggttggaactgtgttaagtggttttgaatataaagcacaaaaagaaaaatatgataacttaacaaagttctttaaaaacaatgaagaaaaatatcaatataccggttttactaaagaagcaatacataagacacagaatgttggatatcaaaataattacttttacattactactagttccacgaaattacgagattatagaaaacattttgaacctttaattaaagaaagtaacgatgattttagaaagcatatgaaacaattaaagtctaaaaaagatacgtatcttaatacagaaataacaactacacttttcagtactcttgatgaatatgacgaaaaaatcattagaaaaaatagtatatccatggctaaagaaataagaaaagagccatctattccacataatttcacattccacttattatttagcaataacaaattaaaaatcaacgatccaaacataaataacaatcaaattaatgagtatggggtgttccaccatgacggatttaaaaattaa

SEQ ID NO: 3754 - DNA, 504 bp, Staphylococcus epidermidis
ttgaaaaaattttcagctacaatagtagtaatcattcttatatgcgcattgggcttttcattatatgcagctattaaccaccatacgaattctaataagaatgataaaaaaatagaacacaatcgcaaaaataaacaaaatgatacttcaaatcagaatcgtgatactaatcaacaccaagaccaaactcaaccaacaaataatgactataacaacgataatcaatcagatactgaacaaccagcacaacaacctaactatcatcaatacccaaataataatcaacagtctggttcaaataaaaataactcttcagaaaataacaaacagaaaccgaatcagaacaaaactaatcaatcagattatcaaccatcacaatcaacaccacaacagtcgtcacaacctaataataatcaatctgattcacaacaaaatggcaactcaaataataattccaacaatcaaaatcatggaacaaatgataatcagaataaaaatcgttaa

SEQ ID NO: 3755 - DNA, 1248 bp, Staphylococcus epidermidis
atgatgagcgtattatctaatgaagaaagagttgaaattttatccgatatagtctcaataaaaactgtaaatagtaatgaattagaggttgcacagtattttgaaagactatttagtcagtatggaattcgttcatatatagatattgttgcagacgggcgagcgaatttaatagcaacggttggttccagtcatccagttattgggatatctggacatatggatgttgtatctgaaggaaatcatgatgattggacgtatgatccttttacactaacagaggaccaaggctatttatacggtaggggagctgcggatatgaagtctggattagcagctttagccattgctcttattgaaattaaagaaagtggtaagttaacacagggaactattaaattcatggcaacagtgggtgaagaaatggaacaatcaggttcgcaacagttgtttgaaaaaggatatgctgatgatttagatgccttactcatagcagaaccatcatttcctagtttggtgtatgcacataaaggttcaatggactttagaataaaatctaaaggacgtgcttcacatagttcaataccatttttaggacaaaatgctattaaaccattattagagtttattcaaaatataaatcaagaatatgaaaaaataatgcaaacagtaaaaggtgagtccttagatttttcaaatatgattaataaattagagaatcaattacctagccatataacaaaagaaaaagcacaagagcttatacagggacttgttatgacaaatagtatcgttcaaggtggcacacaagtaaattcagtaccagattttgctacagctgaatttaatgtacgcacaataccagaatataataataacaaagtaaaagcgctatttaataaatatgtagagcaagcaaatcacaatggtgctagtttgactcaagaactttatcttgatttagaacctgtagtaacaacaggtcaaaatcgcttggtagagctaggatttgatattgcaaaaagccatttttctaacgaaagagatttaatcattactcctactgtagcagttactgatgcttccaacttattaaaaggaaaagatgaaaattttccatttttaatgtttggcccgggaaatggacctcatcaaataaatgagtgcgtagaaaaagccaattatttagaatttgtggaatactatatagagtttatcacttcatatttaaatgaagagaatgagtaa

SEQ ID NO: 3756 - DNA, 1524 bp, Staphylococcus epidermidis
atgaagaatttttctaaattcgcacttacaagtattgctgcattaactgtggcaagtcctttagtcaatacggaggttgacgctaaggataaagtatcagcaactcaaaacatcgatgcgaaagtaacccaagaatctcaagcaactgacgcattgaaagagttaccaaaatctgaaaatataaaaaagcattacaaagattataaggtcactgatactgaaaaagataacaaaggatttacgcattacacattgcaaccgaaagtgggcaacacgtatgcaccagacaaagaagtaaaagttcatacgaataaagagggtaaggtagttcttgtcaatggtgatactgatgctaagaaagttcaacctacgaataaggtattgataagtaaagaaagtgccacagataaagctttcgaagcaataaaaattgaccgtcaaaaagctaaaaacttaaaaagtgatgtcatcaaaaccaataaagttgagattgatggagaaaaaaataaatatgtatataacatagaaattattacaacttcaccaaaaatctctcattggaatgtgaaaattgacgctgaaactggtcaagtggttgataaattaaatatgatcaaagaagcagctactacaggtacaggtaaaggtgtactaggtgacacgaaacaaattaatattaatagtgtcagtggtggctatgcactacaagatttaactcaacaaggtacactttcagcttacaattacgatgcgaatactggtcaagcttacttaatgcaagataaagatagaaattttgatgatgatgaacaacgtgcaggtgtagatgcaaattattacgctaaagaaacgtatgactattataaaaatactttcggccgagaatcatatgataatcaaggcagcccaatcatttcactcgcacatgtaaataatttccaaggtcaagataacagaaacaatgcggcttggattggtgataaaatgatttacggtgacggagatggacgtacatttacagcgctgtctggtgcaaatgatgttgttgcacatgaaattacacatggtgtaacacagcaaactgctaatcttgtttaccgttctcaatcaggtgcattaaatgaaagtttttcagatgtatttggttacttcgttgatgatgaagatttcttaatgggtgaagatgtatacacacctggtgtaggcggagatgccttaagaagtatgtctaatccagagcgttttggacaaccatctcatatgaatgattttgtttatacaaattctgacaacggaggcgtacatacgaattcaggtattccgaacaaagcagcttacaacacaattcgtagtattggtaaacaacgttctgaacaaatttattatagagcattaactgtttatttaacttcaaattctgatttccaagatgctaaagcatcattacaacaagcagcacttgatttatatggcgacggtattgctcaacaagtaggtcaagcatgggacagtgttggtgtgtaa

SEQ ID NO: 3757 - DNA, 462 bp, Staphylococcus epidermidis
atgaaaaagagtaaacgacaagatttagtaactatgattgttaagcaaaatcacatttataaaaaagcagatattattgattacattgatgatcactttggtgtacgttatagcatgactactattgcgagagatttaagagaacttcatatttatcgcctgcctgtgaaggcaaatcaatatgaatacaaattacttacgcaacaatctcaattagactcaagagtaagactaaatgattatatagaaacagaaattattaacactatgattaaagaatcgtatatactaataaagacgacaccaggatttgcacaaagcataaattattatattgatcagttacaactgaaagagattataggaacgataagtggtaatgatacaattatgattcttacacattcccagtctatagctgaatatgtctattacaaaatatttaatcataattattcataa

SEQ ID NO: 3758 - DNA, 1236 bp, Staphylococcus epidermidis
atgacaaatggacctattcaagttaacagtgaaatcggcaaactaaagacggtattacttaaaagaccagggaaagaattagaaaacttagtgcctgattacttagatggattattgtttgatgatattccatttttaaaggtagctcaacaagagcatgatcattttgctcaagttcttcaagatgaaggaatagaagtgctttatttagaaaaattagcagcacaaagtatagaagattcaaatgtcagagagcaatttatagatgacgttttagcagaatctagaaaaactatcctaggtcatgaaaaagaaataaaaaactcttttcaaactttgtcaaatcaagcattaattaataagattatggctggcgtacgcaaagaagaaatacaacttgaatcgacacatcttgtagagtacatggatgataaatatccgttttatcttgacccaatgcctaatctatatttcacacgtgatcctcaagcttcaattggtagaggtatgacagtaaatcgtatgttttggagagcgagacgcagagaatcgattttcatttcatatattttaaaacatcatcctagatttaaagatgagaatattcctttatgggtggatcgtgactgtccgttcaacattgaaggtggagacgaactggtgttatctaaagatgtacttgcaatagggatatctgaacgtacttctgcacaagcaattgaacgtttagcacgacgtatttttaaaaatccgttatctacttttaaaaaggtggtggcgattgagattccaactagtcgaacatttatgcacttagatactgtttgtacaatgattgattacgacaaattcactacacattcagcaattcttaaatcagaaggaaacatgaatatatttattatcgaatacgatgataaagctgaagatatcaaaatccaacgttccagtcatcttaaacaaacattagaaaaagtgctcgatgttgatgaaattacattaataccaactggaaatggtgatatcatcgatggtgctcgtgaacaatggaatgatggttcgaatactttatgcatccgtcccggtgtggttgtaacttatgatcgtaattatgtttctaatcaattgttatgtgagcatggtatcaaagttattgaaattcctggaagtgaacttgtacgtggtcgaggaggccctcgatgtatgagtcaaccattaataagagaagatctatag

SEQ ID NO: 3759 - DNA, 1008 bp, Staphylococcus epidermidis
atgaaaaacatcaagaaaccctttgatttaaaaggtaagtcattgctaaaagagtatgatcttacaggtgaagaatttgaaggtctaatcgattttgctatgacattaaaaaaatataaacaacaaggcacaccacatcgatatttagagggtaagaacattgctttactcttcgaaaagacatctactcggacgcgtgccgcatttacagtcgcatctattgatctaggtgcacaccctgaatttttagggaaaaatgatattcaattaggaaaaaaagaatctgttgaggatactgctaaagttttaggcagaatgtttgatggaattgaatttagaggtttttcacaaaaaactgttgaacaattggccgaattctctggagtaccagtatggaatgggttaactgatgattggcatcctacacaaatgttagctgattatatgacaattaaagaaaattttggatatttaaaaggcatcaacctaacttatgtaggaaacggacgtaataatgttgcacattcgcttatggtggcgggtgcgatgcttggcgtaaatgtacgtatttgtacaccctcatcattaacaccgagagatgtatattttaatattgctaaagatcaagcgtctaattatggaggttcagttaagatgactgataacattcatactgctgtcaaagatgcagatgttatttatactgatgtttgggtatcaatgggtgaagaaagtgaattcgaaacacgtattcatttattgaaagactatcaagttaatagaaaaatgcttaatttaaccggtaaagtagatacgatatttttacattgtttaccagcttttcatgatacacaaacagaatatgggcagaatatttttgaaaaatatggcttaactgaaatggaagtgacagacgaaatctttagaagtgagcattctagagtgtttgatcaagctgaaaatcgaatgcatacgattaaagccgtgatggcagcaactttaggctag

SEQ ID NO: 3760 - DNA, 141 bp, Staphylococcus epidermidis
atgagtaacgacacatctttgatagtcattgtcagaagttctatatcagcctctcaacatgattttgaaaaaagttatttttattatgtgacaatatttgcaaaattaaatattcgtttatttaatgaagcatacacgtga

SEQ ID NO: 3761 - DNA, 1404 bp, Staphylococcus epidermidis
atgaatgacacaggagataaaagattaagtcgaacatcattaatcggtcttgttataggttcgatgattggtggcggtgctttcaatattcaatctgatatgggaggccacgctggaggattagcaattataattggatggttgattactgctataggaatgatttcattagcacttgtctttcaaaacctaactaatgaacgatctgatttagatggtggtatttatagttatgctcaagcaggttttggtgattttatagggtttgcaagtgcttggggatattggttctcagcttttttaggtaatgtcgcatatgcaacgttattaatgtcttctatagggaacttctttccaatatttaaagggggcaacacatttcctagtatcatagtggcatcaatattattgtggagtgtgcactttttaatattaaaaggagttgagacggctgctttaatcaatagtattgtcactattacaaaattaattcctatcttattagtgattatatgtatgattgtagcctttaattttaatacattcaggataggtttctttggaatggatggatatggatcattatcatttcatttcgctaatacgatgtcacaagttaaaagtacgatgttagtgacagtttgggtatttattggtattgaaggtgctgttgtattctccggaagagctaaaaataaaaaagatgttggaactgccactgttatcggacttatttcagtattgctcatttacttcttgctgactgtattagcacaaggtattgtgattcaaaatcatatttctaaacttgaggcaccatcaatggcacaaattttagcttatatagttggtgattggggagcaacatttgtcaatattggtcttattatttcagtattaggtgcatggctaggttggacattactcgccggagagttgccttttattgtagctaaagatggtttgtttcctaagtggtttgcaaaagaaaataaaaatggggcacctatgaacgccttattcattactaatgtattagttcaaatattccttattagtatgctgtttaccaaaagtgcttatcattttgcattttctctcgcggcaagtgctatactttatccatacatgttcagtgcgttttatcaggtgaaatatacaatagaatacaagttaactgcaacgcctaaacaatggattataggaattctagcatctatttatgcaatttggctggtttacgcgtcaggtatagattatttgttacttaccatgttgctctatatcccggggattatcgtctatgttgttcttcaaaaaaataatcaaaagcgacttacacaatttgactatattttcttcggtcttatcgttattttagcattgatagggttattacgatga

SEQ ID NO: 3762 - DNA, 687 bp, Staphylococcus epidermidis
atgactggaaatcaaatgttttgtagagaaaatgaacttgatgaaagttttaaacaattagcatcttatatcaatattcctgtaggcgtattactgccatttaaaagtcaatgttttgtgagacattacaacaaaggacaaattgtctactattcgtctgatgaaaccacgcatatttatctactcttaaaaggtaatattatgagagaaaattttaatttgaatggtgatgtatatcgatatctgaatagagaaaaagtgctctttcctttaaataacttatttcaagataaagttcctaatgaaatgtgtacagccctaacagattgcgaaatgattggaataccaagagatttaatagaatatttatgcaaaaatcacgaagagatttttgtgaaattattctccttattaagcgaaacacagtgtcaacatattgaatacaatatggctttaacgagtaaattagctaaagaacgcgtgactaagattttacgttacctatgtcaaacagtaggttatgatcatgacgagttttatgaaattaagcattttatgacaatacagttattgagtgatatggcaggaatatctagagaaacgacgagtcatatcataaatgaacttaaagaagagaaaatactctttaaaaacagtaaaaattggttggttagtaaagacttataa

SEQ ID NO: 3763 - DNA, 759 bp, Staphylococcus epidermidis
atggctttaataacaatgaattacaattcaccaacgataggaatgcatcaaaatttaacgattattttaccggaggatgtaacattctttgatagttcaacaacagcgaaacaattgcaatcaatgttgttattgcatggattgtctagcgatgaaacaacttacataagatatacaagtatcgagcgttatgcaaatgaacatcaacttgcgattataatgcctaacgtcgatcatagtggctatgcaaatatggtatatggacatagttactatgattacatattagaaatttacgaatatgtacatcaaattttaccactatctagaaaaagagaagataattttattgcaggacattcaatgggcggttatggaacgattaaatttgcgctaactcaaagtgataaatttgctaaagctgcaccactttcagcagttttcgaagcacaacgtttcattgacttggattggactgatttttcccctcaatctatcacaggcaacaatactcaaattaaaggtacagaactcgatacgtactacttacttgatcaagccatcgatgctaatgtagatattcctgaattgtttatcatgtgtggtaaagaagactttttatatcatgataaccttcaatttattgagacattaaataaaaaaggggtttcttataagtttgaagatggtccaggagatcatgattatgcttattgggatagagctattaaacgtgcgattaagtggtttgtccagtaa

SEQ ID NO: 3764 - DNA, 1167 bp, Staphylococcus epidermidis
atgaaaacagtatctaaatattttgtatatatgatgatattagttacgtttttcatagttgttagtgggtgttcgattaatcaatcttttagcgataaacaaaatacaaataaaacaatacgtgtggttgctgtaggtgataatttaattcacccagttgtatataaagatgcacaaattacggggaatagttttgattttaaacctatgtatcaaccagtaaaaaaagacattcaaaacgcagatatttcttttgttaatcaagaatcaccattaggtggggatgataggccttattcaggatttaaaaactttaatacaccgagtagtattgctcaggatttagtagatactggctttaattttgtaaacggtgcaaacaatcatgccttagatcaaggagagcaaggtgtaagaaatcatattcatacttggaacaaatttaaagatcaagttttgttcacgggtgtatatgaatcagaacaagcacaccgtcaaattcctattaaaacaattaaaggtgtgaaagttgctttattaagttacacatttggtacaaacgatcatcaaccaactcatgattatacggtagatacgtttgatgaaaataaaattaagcaagatgttaagaaagccaaacaacaaagtgatgtagtacttgtttcagcacattggggtaatgaaggtaagcatcagcctaacgccactcaaaaaaaatatgcacaaattttcgctgatgcaggtgttgatgtagttttaggtacacatcctcatgtgattcaaccagtaaaatgggttgacggtagagaagggaatcgtacacttgtagcatattcattagggaatttcttgaacggtcagtcaacagggaatgaaagtaatgatttattaggacggatagattttaaaattagtaagaaagataaacagtttcaagttcaagatgtgaagtggagaagtatggtgaattattacgaattaactcaacaccaaaaccagttccttaagtcgaactttaaagtgatgatgctagatgactataatgacaaagatgccactcatcatggtcgcaatcaaatggatagttcttcgatgagccctgcacacttacgagatatcacacgttcagttattgataaacaatatttagacaatcggagtttatag

SEQ ID NO: 3765 - DNA, 126 bp, Staphylococcus epidermidis
atgtgcaggcttatttgtatatttggaatttttaacttggaagttaaaacaaattctaaaactatagcaatggctaaagatatgattaagttcattaaaaaaggtgtcttaagaatgatttattag

SEQ ID NO: 3766 - DNA, 1650 bp, Staphylococcus epidermidis
atgaaacaacgcgtaggacaatatttaatggacgcggtttattcagcaggtgctgacaaagtttttggtgtcccaggagattttaatctagcctttttagacgatattattgcacataatgatattaaatggattggtaatacaaatgagcttaatgcaagttatgctgccgacggatatgcacgtattaatggcatcggtgcaatggtaacaacatttggagtgggtgaattaagtgctgtcaacggaatcgctggatcttatgctgagcgtgtgccagttattgccatcactggggcacctactcgagctgtagaacaagaaggcaaatacgttcaccattcccttggcgaaggaacttttgatgattatagaaaaatgtttgagcctattacaacagcgcaagcttatattacacctgataatgctaccacagaaattccaagagtaatcaatacggcgcttcaacaacgtcgtccagttcacattcatttacctattgatgtcgcactaacagagattgaaatttcaaacccattcaaaccagaagtcgaaccacaaaaaaacgttcaaagttatatcaatatggttcaagacaaacttgaatcggcatcacaacctgtcattattacaggacatgaaataaatagtttccatctgcataaagaactcgaacaattcgttaatcaaactcaaattccagttgttcagttatctttaggtaaaggtgcatttaatgaagaaaatccttattatatgggtatctttgatggttcaatagcagaacaagatattcaagattatgttaatcaaagtgatgctattttgaatattggtgctaaattaacagattctgcaacagctgggttctcatatcaatttgatattaatgaagtgattatgctaaatcataatgaatttaaaattaatgatacatgcatcgaagcattttcattaccaaatatattaaatggtttaaataagtatattcactacaaaaacactaatgatttcccacaatatgagagaccacaatcacacaattacgaacttagtgatcagccattaactcaagagacttatttcaatatgatgcaagattttttacaacaagatgatattttaatcgctgaacaaggtacatcattctttggtgcttatgacttagccttgtacaaagataatacttttatcgggcaaccattatggggatctatcggctatacactaccagcaacgctaggaacacaaattgcaaatccatatcgtcgaaacattctattaattggtgatggatcactacaattaactgttcaatcattatctacaatgattcgtcaaaatttaaaccctgtgatatttgtaattaataacgatggttatacagttgagagaatgattcatggtatgaaagaaccttacaatgacattcgcatgtgggattacaaatcattaccttctgtatttggtggtgacaatgttttagttcatgatgtaaacacttcagaagaactcatgctcaccttcgaaaatattaaatctaatagtgatcgcatgcactttgtagaagtgaaaatggctgttgaagatgcaccagttaaattaagtaatatagctaaagcattcgcatcacaaaacaaatcatcttaa

SEQ ID NO: 3767 - DNA, 447 bp, Staphylococcus epidermidis
atgtctaaaaataaaaatgattacgaacatatgctgttttacttcgcgtataagacttttattactacagcggatgaaattattgagcaatatggcatgagtcgccaacatcatcgattcttatttttcattaataaattaccgggtataacaattaaagaacttttgattacgcttgaaatatctaaacaaggatcgcatgcaacgttacgtaaattaaaagaagaaggtttaatcgtcgaacaaacatctaagcaggatagacgagtaaaaaaactttttaccactgaagcgggtgatgatttaataggtaagttaaaccaagcacaagatgaattaattcaacagacactacaaaaagtaggccatgattggtacgcgatgatggaagaactagctaattatcgtgaaggattcaaaacaattgaacatttgaaagaagattaa

SEQ ID NO: 3768 - DNA, 1491 bp, Staphylococcus epidermidis
atggtgaaagaagtagttctaggaattgatttaggcacaagcgcaataaaaattattgctgttgatcaactaggaaatgtcattgaatcagtaagcgaaacattaaagttataccaagagcatcctggttatagcgaacaagaccctaatgaatggtttgaggctactaagaaagggataaaagaattaattcaatcaacagaaatgtcagataagatagtaaaggggatttctttttcaggtcaaatgcatgggttggtcatagttgatgataatggcattcctttgagaaaagcgattttatggaatgatactagaaattcaatacaatgtagacaaattgaagatatatatggtgaaagattgaattacaatccgatattagaaggatttacacttcctaaaatgttatgggtacaacaacatgaacctgaaatttggaatcgagttgatgtttttatgttgcctaaagattatttacgttattgcttaacgcagacaattcatatggaatatagtgatgcatgtagtacattattattcaatcctgagaattatgaatggacaaaagatgttggagatacatttaacattggtgatatctatccacccttagtaaaatcacattcgtatgttggaaatgtaacttcatcactggctaaagaattaggattatctagtgatattgctgtatatgctgggggtggtgataatgcatgtggtgcaattggtgctggtgtcatccatgataaaagtgcattatgtagcataggtacttcaggtgttgtattaaatgttgaataccaacgtgtgacctcatatgatagtaatttacacttattcaatcatagtgttccagatacttattacgcaatgggagtaacgttggcagcaggctatagtttaaactggttaaaacaaactttttttgaaaatgaatcttttgaagagattttaaatttagctgcatcttcaaagataggtgccaatggactactatttacaccttacttagctggagaacgtacgccacatggtgatgctcaaatacgtggaagttttataggtatcagtgggcaacatactaaagctgactttgcgagagcagtaatcgaaggcataacgtattctttatatgattctataaagattatgagacgagctggtcatgaaatgaactctatcacttcaatcggtggtggtgctaagagtagattttggttacaacttcaagctgatatttttaatgtgcaaataaaaagattgaagcatgaagaaggcccaagcatgggagcggcaattttagcggcatacggtctaggatggtttaaaacaattgagtcttgtgtagaggcatttattaaagtagacgaggtgtttgagccgaataatgaaaatcatgacctttatgaacaatactattcagtttatgaagctatatataaacaaacgaaacagcttactgctgatttgttaacgataacgaattaa

SEQ ID NO: 3769 - DNA, 786 bp, Staphylococcus epidermidis
atgtttatttcaaaacaagaattatatgaaaagttacaatatgttacgccaagaacgtttgcctacttgaatgaaatagattattataacttattaatgataattgaagagcatcaaatatctattccaccgattcatcaacttcgaaaaacattgcgaggaagtaaaattatgaagcctaagaatcgcgtagacaattgttatattcatttaaaggatgaaattccgacccctattaacaatgaacaattaagtttcctgcatttttatccacgtcagcaaatacatttaattttgagtgcttattctagaatgaaaagtctaaagttacaatctcaaaaacattgtttaaagctcaaattccccttagatcagcattctattcgtaaagaaattacaccacctcaaagctctgataaagacaatgatattttaatttgtctattacaaaaattaatcaacgaaattaccaaatgtcaagttcctgtttctctaaagaataattctttcgaaataaaactaccaaactatatcataaaggttgatttaaactatcacgaacagcaagaccatttatatccattacaatatagcatccacgcatggcatagagatttccaatatctcgaaatctcaaataccttcacaataccgtctttgaatgatcttattttccatatacaaaagctttttttacttatatttcaattacctgaacatctcgcgagacaagaatattcattgagtcaatattatttttactcgcaatgccatacaaaaaattaa

SEQ ID NO: 3770 - DNA, 1044 bp, Staphylococcus epidermidis
atggatattattttaggagtagggactttagtactcgttcttattatcatgacgcttttcttaaattttgcgccatatggtaaacaaggtttacaagctttatcaggggctgcttgtgccacgtttttaccacaggcgttcttaagttacgcaattggtggcgtattccatgttaaatttttccaagaaattggtgatctagcagggagtttaagtggtatagctgttggtatattaacttgtctaaagttagaagtgtctccagtatttgcagtcattgtaggtttagtattacatgactcaaaattattacctgcgtttatcgcagcgtatgttgttgcatttggaatcaagtttgttgagaaaaaagttccagagggactagatttaattgttgttattttattggctccagcagttacatttggtcttgcaaacttaatttctccaggggttattgcagtacttaaacaaattggtagtgcaatcacttcagtaggtgataacaacccatatgcattagcagtcattttaggacttgttattcctgtaactggtatgacgccattaagctcaatggtacttacaagcttattaggtttaactggtattccaatggcaattggtgcgttaacatgtacaggagcatcttttgttaatggaatcttatttagcaaattaaaaattggtaataaaggtaatgccttcgcggtatttgtagagccgttaactcaaattgacttaattgccaaatatccgctacaactgtttggtgcgaatgccattattggtgttgtaaatgcttgtattgtcacatacagtggactagttattgatattaaaggtatggcaacacctatagcaggtgctattgtactttatggctttaacgatgctgtaagatctacaattacaattatcgcagtagcaattgcaagtgtgatattagcgtatgttattagtgctattattaataaatttaacttgatgaatgtcggattcaagttaccacgtagaaaaaaccaggttaaggagagtgtttaa

SEQ ID NO: 3771 - DNA, 684 bp, Staphylococcus epidermidis
atgatggctaaaagctatgattatcaaagtgctttcgatattattggaccagtaatgatgggaccttcaagttctcatacagcaggtgcagtaaaaattggtaattcagcgagagctgtgttaggagatatgcctaagcatatagaaattcgttattatgaatcttttgctaaaacgcatcaagggcatggtacagacgttgctattgtcggtggtgctatgggctacagcactttcgatagtagaattaaatcatccttagacatagcaaaagatgaaaatattacaattgatattattgaagatgaaggagaaagtattggtcaacatcctaactgtgcttatatcaaagcaaatacgaaagacggacgttatatagaagtgataggtatttctattggtggcggtacaatcaaactaaaaggtatcaatgtaaatggtttaaatgtggaactaaatcatgggcttccaatgttagttatagatggaaatatgaataaagctaaaataaatcatcttattaatgatttatcagatatggacttagacttaggtgaagaattaatagaaacaaatgataatgaaggtttagttgtatttcctttaaataaagcaatctcagaatcagcattaaatattattaaagataaacatagtgatttaaacgtttcctatatcaaatag

SEQ ID NO: 3772 - DNA, 900 bp, Staphylococcus epidermidis
atgtttgattcaattagagagacaatagattattcagttgaaaataacatcagttttgctgatatgatgattaatgatgaaatggaaagagaaggtaaatctcgcgaagaagtgcgtgatttaatgagacaaaacttaaatgttatgcgtgaggcagttgaaaaaggtacgactggcgatggtgtggaaagtgtaacaggttatacaggtcatgatgctgctaaacttcgagattacaacgagaataatcatgcattatcaggtcatgaaatgattgatgcagtcaaaggtgcagttgcaacgaacgaagtcaatgcagcaatgggtattatttgtgctactccgacagctggttcctcgggaacgattcccggcgtaatatttaaattagaaaaaactcataatattactgaagatcaaatgatagattttctattcacatcagctttattcgggcgagtagttgcaaacaacgcgagcgttgccggtgcaactggtggttgtcaagccgaagtgggttcggcatctgcaatggctgcagctgctgcagtatcaatttttaacgggtcaccagaacaatcaggacatgccatggcattggcaattagtaacttattaggcttagtttgcgatccagttgctggtttagttgaaattccatgtgtaatgcgtaatgctattggttcaggaaatgcattaatatctgcagaccttgcactagctggagttgaaagtcaaattccagttgatgaagtcataggtgctatggatagagtaggtcgtaatttacctgcatcattaagagaaacaggtttaggcggtttagcaggtacacctactggcgaaaaaattaaacgtaaaatattcggcgaagcagacaacatggttaaaaataaataa

SEQ ID NO: 3773 - DNA, 117 bp, Staphylococcus epidermidis
atgaaggttattttgggtttcactcaagtgtcagctcgatctataaataaagtcaaagggaaaaaatttttattaatggtgcttaatattaagaaaaatagcgactcagagatttga

SEQ ID NO: 3774 - DNA, 132 bp, Staphylococcus epidermidis
atggaaaaggttaaatcatatttaaaagacattcaaaacaacgaaaagtatcaaaaagatatagaatttcttgaaaagaaaagtaatggaagggaagacagaaaatttatattagatatattctttttatag

SEQ ID NO: 3775 - DNA, 186 bp, Staphylococcus epidermidis
atgtctgtaaaaaatataattaaacaatcttgggaagatcttaaaaatttagagttaaattttaagaatgtaagtattttggttgttgtaacatttatacttagtaatatttttactccattagtcggcgttcctgtcggtttattaggcagtgcatattggattcaaaatagaaaaagaaaataa

SEQ ID NO: 3776 - DNA, 885 bp, Staphylococcus epidermidis
gtgatcggcagtgctgttattgatgtgattttaaatgttaatagtataccaagtagtggatcagacgaatttgcccactctgagaagacaatagtaggtggttgcgcatataatgtaggcgatatacttagtcagttcaaagctaattatgatttgatggtgcccgttggcgatggtcttaatggaacaattattgaaaataagttaaaaaaagaaggcaaaacttcattattaaataatatattaggtgataatggttggacgttatgtatcgttgaaaataatggggaacgcacttttttaacgatacctggagttgaaatgacttggaaaaagaattggtttaaagaaattgatcttaataagtatgattatatttatgtgtcaggttattcttttgaacctccttcagacgaagttttattagaagaatttagtcgtttaaacgagaaaactacaattatttttgacccctcaccaaggattaataaaatgaactgtgagagtataaggaagttgcttgaaataaacacaatagtacatgccaacgaaggtgaaatattacaattgagtagtgagaatcatgtgaaagatgcggcattagaagtaagtaaacagactaatcaacctgtgatagttacattaggcaacaaaggtactcttatagcaaataagtgtaaagttaagattttagagggggaaaaggttcctgtaactgatactataggcgctggtgattcacacacagcagcttttatagcaggtttgctagataaccaaagtattgaaaaagcttgtatatggggaaacgaagtagcatctaaaattgtgcaagaacgaggtggaaatacggatatattcaatcctatagataaagaatattaa

SEQ ID NO: 3777 - DNA, 1335 bp, Staphylococcus epidermidis
atggaaaaagaagaaatctttcttcctgaaagtgaaaaaaatgggaaacctatcgacttattttttatatggtttgcagccaatctaggtattctcgggatagtttatggcgctgtcatagtaagttacggattgagctttttacaatcaattttgattgctataataggaccgttatcctttgttctagttggttatataagtgtagctggtagagatagtggagctataacttttatgctctcaagagcaccatttggatttaaaggcaatcatatacctgctttaattggctgggtaggtcaagttggttggttatctgttaatgtttctacaggaactttaactcttctggctttattcaatacttttggttttaagactagtacatttctaattttgatgagtttagcgatttttgctgggctagttattatatctgttcttttttcacaaaaagtacttgtatcagtacaaacatttttcacatatgtatttggtgcattaaccttattagttataacaattttaattactaatactgattggaacgcccttttttctatgaaatctgggtcttggcttaaaggttttctacctgcattagcctttgtaatagtagggactggattgagttggactaacgcagctgcagattatagccgttttcaaaaaaaatcgaacagttctttatcaataatcactagtgttacagctggcgcgtttatccctttatttctcattataagtactggaattttattagctacttcagagccacaattagcaaatgcagaaaatccaatattattaattagcgaagtactaccaaattggatgacagtaatttacttaatatctgctttaggtggccttactcctatgtgttttttaggtttaaagtcctcaagattaattatgagtacttttgatttgaaagtaaaaaattctacagttattattattcattcaattattattattgccattcctatttatgtcttagtagtttccagaaattttctcgctttttttgaaatgtttttaggagttttgggtattggattagctgcttggtctgcaattttcattgttgattatgcaacattgagaaaaaatataggctatgaaaaaaaattggtttgcgatccccagtataatagtctgaatattaaaacagtaatggtctggagtatagcagtaatagtaggtgcattaataaacatttttacttcttcaagttttgatataattgtaacatttatggttagcggatttttatactatatatttaatatttctttaaatactcacagaaagaaggctaaaaaatga

SEQ ID NO: 3778 - DNA, 987 bp, Staphylococcus epidermidis
atgaaagataaaatattaggaactttatatggccaagctattggagacgctttaggtatgccttcagaattatggaatcgcaacaaagttaaagatttttttgggaaaatcacaacttttttagatggcccttatgaaaataaggtagccagaaattttaccaaaggacagtttacggatgatactgcacaatcactactaatcattgatgcgctaaataaaaatcattttgaaccttcaaaaaaaatcatagcagacgaattgattgaatgggccaatgctacaaacgcatttaaaaataatattcttggcccaagttctaaagcagctttaactgcaataatacaaggagaggattcccaattatatacaaaaaatgcattaactaatgggtcggctatgagaattgctcctattggtactttattttctaaagatcaaaaagtagagcttgtaaattatgttaaggaaattagtgaagctactcacacaagtgatgttgcaatagctggagctagtatgattgcttatgcagtaacattggcagcggaagataagaattggaaagaaattatagaaggcgttttggatattcacgatatagctattaaagaaggagaacaaactttttctgcatcaatagcagaaagattaaaattagcagttcagtttgccaatcatttcgaaagtgaggaggaatattcgctctggctttatgatgtgataggatgcggaacatcattaactgaatcggtccccactgctttggcaattgcttatttttgtaaagaccccaataaatgcgcaattttttgtgcgaatattggtggggatactgacacaattggtgctatggcaactgctatatcgggggctaaatacggatatagtaattttaaaaaactttggatagagactatcgacaaacacaatagtgtgaacttagaacaatatgcaactacgctcgaaaaaaataaaatgttataa

SEQ ID NO: 3779 - DNA, 408 bp, Staphylococcus epidermidis
atgccaaaaaaacaaaattcaaaagaaaaaatcttaacagttcgtgtaagtcaatcgcaatacgaaaagatttgtgcacttgcggatattcgagagatgaatgtgaccgaatacatacgtcatacagccattggtaatcgcattaaaccgacaatcatcgaacaaattaaagaatccagtgaagtcagtgaattgtttaaaaaagacaacgaggcactcaaatcgaacaatcaggcactccagcatcatattcatcagttggaagatgaaatcgaccaactgagacaagaaaatgacgtctttcatcacttattacaacattttgatagtacagcatttttaaacttcaatacatatcgcgatgatcgtcaactgaaaaatgcgattaaacgattgaaagaacaataa

SEQ ID NO: 3780 - DNA, 129 bp, Staphylococcus epidermidis
atgggcacttctttatttattaatcatttatcaaattcagataagctcttagaaggattcaatcatgcatggctatttgcatcattaacactatttttaccactattactttttcagttaaattattaa

SEQ ID NO: 3781 - DNA, 729 bp, Staphylococcus epidermidis
atgagtatataccatttaacaaaattcaacatatcaagattactgaaaaatccttttaattatattggtttattatttgttttaatgatacctgtattttatacaatggctcaggttcataataataacaaggtttccggagaaactattttacatctttcgacatggttgtttgcattttggggagttatgattattactgcctttttagttagagatttttcccaaggtacatcacaattgtatttaaacaatctaaaaaatagagttaaatactttgtatctcagatgatatctattttcatctctagccttataatatttttagtattatatgtatttgtcttaataatgcaaaacataggtgatggaaaagctgtagaaaacgaaatgcttgtaaaagctctagggatatatatcctcttatttttattttatggtctgtttttattccttattactttattagtgaaaagttcatctttagttttttcaattggagtttttcttatattaatcatacctatagctacaaacttagtcccacttattccagagtatggagatgaagttaagaaaactataaaatatataccttttaattttttaattgataatgtttggcttggatctttaaaattaaacaattggcaaatttttatctcaatagcttcaacaatattattagctatagttgatttcttaacaatttctaaaagagactactaa

SEQ ID NO: 3782 - DNA, 858 bp, Staphylococcus epidermidis
atgaaaatagaaaatattactaagaagtacaaagataatactgtattagataatttaagtttttcatttgattctagtcgtatagtcggcttaattggaaaaaatggtgttggaaaaactactataatgaaaattatgaatggcaatattgtaaatttcaaaggcaaggttaatcttaatcaaaatattggatatttaattgaacatcctaaactatatcaagatttatctggtattaaaaacttaaaaactatcagcaatatattaggtgtgacattcgataaagattatgctaataaaattattaaagcatttgatatggaaagttatattaacaaaaaagtaaaaaaatactctttgggaatgaaacaaaaactagcaattgctgtctctctaataaataaacctaattatttaatactcgatgagcctactaacggaatggatcctgacggttctatagatgtattaaataccatcaaaaatatcactaacgaatttaatatgagagttttgatatctagtcataagttagaagacatagaattaatatgtgatagagctgtttttttacgtgatggaaaatttgttaaagatgttgatatgaataatacatcttcacaagagtacactgccatctcatttaatgaaaatgatgttgaaaaagctaaaaatcttttaaattcaaaatcatatggttcaatcaaaaggaaagaaaatattttgataacccataaactcaataattatcaaaatttattaaaagatttatctaaaaacaatatattcccaattaaaattgaagatagaacaaatacccttagagatacctattttgatattaataaaggagaataa

SEQ ID NO: 3783 - DNA, 339 bp, Staphylococcus epidermidis
atgaaagatttaattcattccaaaaacaatgccatgtattcaactatatcagagtatttaatacaaagcatctatgaggggaaatatgaaaacgaaaagtttccttctattagaaaagcggctgaaatatttaatgtaagtattattactataaaatcagcgtatcagattttagaaaaattagatattatagtagcaaatcctaaaactggatatataattagtgaagatgctaaagataaaatattagaaatgaaaaaagaagaattaaaacagctcatctttaaagcagaatcaatatataatcagtatagtatatctttttttgatttaatgtaa

SEQ ID NO: 3784 - DNA, 147 bp, Staphylococcus epidermidis
atgagagatatactaaaagtaacaaatagtagtgtctttgacgcaccgaacccccaacctatggccgtaggttgggggttcttttggtgtttggctatgtcgcctattttttactacgttgctctagccaaaaacgaaacaacgtaa

SEQ ID NO: 3785 - DNA, 858 bp, Staphylococcus epidermidis
atgtctggtgaaacagtagtatatagaaatgagatgaacttagtaccattaagacgttttacaagtactgaagtagatttattctttacattatgcaataaacttaaagaacaggatacaagaaaagtaattattccttttgaagaattaaaatatttaagtaactactatacgcgttctcaagaacgctttattaatgatttagagcacgtatacgataaaatgttgaatctaacatatgtggaacgtaatggtaggtcttttgaaaaatttgttttatttacttcatacaaagtagatttagacgaagaatgtttatctattagtgttaatcctgatttaaaacatattttaaattctataacagctgattttacgaaatttgaattaaaagaaatgacccatcttaaatctacttacgctaaaaatatgtttagattgcttaaacaatataaacatactggttatattaaaataaatatatctgattttaaaaatcgtctagatatacctaaaacttatcagatgaatgatataaccaaacgtgtattaaatccaataattaatgaactttcttcaatttttaataatcttaatatcaataaaattaaggcaaaaaaaggacgtaaaattgaatggctagagtttacctttgacgctgagaaacgtattcactccaagagacaaccggaaatgacagtttcaggcaaaaccaaacacatgataaatcgggaaaaaacaccaaaatggttagaagaaaggacttatgagaagagaaaagaaaagaaatatgacccacagcttgaaaaagatcgggaagcttttttaaaacaacttgaggttgattggggagaatag

SEQ ID NO: 3786 - DNA, 354 bp, Staphylococcus epidermidis
atgaattaccgagatttggacaagcgcaatcaacatttaacaacacaaaataatcgactcgaacaccatttagacatgttaaatgcacgtcatcaaacgatgaacgacatggtaagaaacgatacacgtattttgtttgcggggcttagatgtgcgttgaaagataggaacattgatttaagcgcagaaattaaatatcaacgtatgccagaagtcggtattgatcccgatacggtggatcagggggctttaacacatgcatatcaaggtaatgtgtcagggatagaccatcatataagaaaggcatcagcacctattaaaaaagagacagagaatgacttagaattagaataa

SEQ ID NO: 3787 - DNA, 531 bp, Staphylococcus epidermidis
atgcatatttatttaagtactttaacagaggtcgattatgaaacgtcactaaatagtatagaaaataattataatctaaatccagaatccagttggcaagatcgggcgcgcgttaaaaatctaagaaaacttgaaagctacaattatgaattagaagttatagctaagaatgaattgaatgaagttataggtcacgttgtgttagcagaggttaagttgtcgtctaaaaacaaaaaagcgatagcgttagccattggtgcactgtcagtagataaatctattcgaaaccaaggtttaggtcaagccctgttaaaagctgtagaagaacgtgctaaagaacaaggctattgtgctatttttgtaaataatcatcctcagtactttgagaaatctgattatgaagcagcccatttatataatatacatatagaagaaaaacgaaatcatcaatcattattagtaaaatttctaaaaccagttcaaaatgaatggtctggaatgacggtgtattatccggaagtactggattga

SEQ ID NO: 3788 - DNA, 1707 bp, Staphylococcus epidermidis
gtggattaccaagctttgtatcgtatgtatagaccgcaaagttttgatgatgtggttggacaaacgcatgtaactaaaacgctgcgtaatgcaatttcaaaaggtaaacaatcccatgcatatatttttagtggtccgagaggtacgggtaaaactagtattgcaaaggtttttgccaaagctattaattgtcttaatagtgacgatggtgaaccttgtaatgaatgtgcgatttgtaaaggaatcacacaaggtacgaataacgatgtaattgaaattgatgctgcaagtaataacggtgtagatgaaataaggaatattagagataaagttaagtacgcacctagtgaatctaagtataaagtatatattattgatgaggttcatatgttaactactggtgctttcaatgctttgcttaaaacattagaagaaccaccagcgcatgctatatttatcttggcaacaacagaaccacataaaattccacccactattatttcgagagcgcaacgatttgattttaaagcaattagcagtgaccaaattatagatagacttaagtatgtagctaattctcaatctttggattacgatgacgcagcattagaatttattgctaaagcctcagaaggtggtatgcgagatgcattaagcattatggatcaagcaatagcgtttggagacgaacgacttactttacaagatgctttaaatgttacaggtagtgttgatgaagcggcgttaaatgagttatttaatgacattgtaaaaagtgatgttaaagccgcatttaatagatatcatcattttatttcagaaggtaaagaagtcaacagactcattaatgatatgatttactttgttagagatacaattatgaataaaacgtctaacgaatccgttcattttgaatcacttattcatttcgacttagatatgttatacaagatgatagatatcatcaatgatacactagtatccattaggttcagtgtaaatcaaagtgttcattttgaagtgttgctagttaaacttgcagaaatgattaagacacagcctcaaactgtacaaaatgtagcaacagcatcggtagctaatgaaccagataatgagatgttattacaacgtttagaacaacttgaaaatgagcttaaaaccttaaaagaacaagggatcaaaactaataaagttagtcaacaacctaagaaaccaacacgtacgattcaacgatctaaaaatacgttttctatgcaacaaatagcgaaagtattagacaaagcaaacaaagatgatatcaaattgttgaagaaccattggcaagaagtgattgatcatgcaaaaagtaatgataaaaagtctttagtaagtttgctactgaattcagaaccagtagcagctagtgaagatcatgtgttagttaaatttgatgaagaaattcattgtgaaatagtaaataaagatgatgaaaagagaaacaatattgaaagtgtagtttgtaatatagttaataaaactgtcaaagtagttggagtgccggctgaccaatggctgagagtgagagcagagtacttacaaaatcgtaacaccaatgaaacacatcaaagcgaaaaacaaagcacacaacagtctcaacaaatagatattgctcaaaaagctaaagacttatttggtgaagaaactgtacacttagttgatgaagactga

SEQ ID NO: 3789 - DNA, 318 bp, Staphylococcus epidermidis
atgcgcggtggcggaaatatgcaacaaatgatgaaacaaatgcagaaaatgcaaaagaaaatggctcaagaacaagagaaattaaaagaagaacgcgttgctggaacagcaggcggaggtatggtgactgttactgtaacaggtcataaagaagttgtagatgtagaaattaaagaagaagctgtagatccagaagatgttgagatgcttcaagatttagtattggcggctacaaatgaagcgatgaataaagcagatgagttaacacaacaacgtttaggtaagcatactcaaggcttaaacatccctggaatgtga

SEQ ID NO: 3790 - DNA, 597 bp, Staphylococcus epidermidis
atgcattatccagaacctatatcaaagcttatcgatagttttatgaaattgccaggcattggaccaaagacggctcaacgtctggcttttcatactttagatatgaaagaagacgatgttgttaagtttgctaaagcactagttgatgttaaaagagaacttacctattgtagtgtttgtgggcatattacagaaaatgatccttgttatatatgtgaagataaacaacgagatcgttctgtcatatgtgtagttgaagatgacaaggatgtcatagcaatggaaaaaatgcgtgaatataaaggtttatatcacgtgcttcatggttcgatttcaccaatggatggtattgggcctgaagacatcaatatacctgcattagttgaacgcctcaaaaacgatgaagtgaaagagcttatattagctatgaatcctaacctagaaggtgagtctactgcaatgtatatatctaggttggttaaaccaattgggattaaagtcacaagactggcacaaggtttatctgtaggcggcgatttagaatatgctgatgaagtgactttatctaaagcaattgcaggtagaacggaaatgtaa

SEQ ID NO: 3791 - DNA, 501 bp, Staphylococcus epidermidis
ttgaaactaaaaaaaacatttggaacattagtaatgagtgctgttttattatcaactattagtccatttgtagatgccaaagaaagtaatattaaaaatgagccttctacaacaacagctaatagtagtaatcaagcgaaatatgtaacggtagatggagtgaaaataaatagaaacccgaatttaccagtgaatccagaggctcaaaaccgaattggagctacaaaggttgttaagactgctattaaattaataataaataataaaagtaaagcagttggtgtggtagaaaaagtaggtggtaaaaaggctgctaaagcctttaataaagcttatagtccattagtaaaagagttaaagcctatgttgaaatggagtgaagttcctgctaatgcggtaagagatgctggaattagagcgggccgagcagctggtttatcagaatctcaagctcatactttaggagtgagcttaaaagaagctatatcttggctattttaa

SEQ ID NO: 3792 - DNA, 510 bp, Staphylococcus epidermidis
ttgaacttgagtaatgaagacaagttgtatatcactaaattaactgaacggataaaacactcaaatgagcataaaatcaatattgagattgatgataagttaggcaaattgatacaacaaaaaatcgataaaaacctcgataaaaaaattccagattttcattcaacgcaaacaatggagcgattcaagcaatctttgttaagtattgagcagaaacaagaaagactagatgatagccttaaaagcgtacacaaatgggcgacttactttaagtcagcgttgatgttgacactatttgccgttttattgattagcgttgtcgctacattcatgggtggtttattcaatgttttaggatttgaccacatgtatcaaggcttagaataccaaataaagcactcagagggctttgtagcgtttttatggcatttaggatacttgataccttatttactattagcgacgcttatatggcttatattggctttagaacgcaaatatagatattaa

SEQ ID NO: 3793 - DNA, 852 bp, Staphylococcus epidermidis
ttggcaacaactaaaataagtagtacgaaatcaacgtcacgtgcaatcaattacgcagaaaaacgagcagttgtaaaaagcagtcataattgtgatatagacttcgccaaatcagcgttcaaaattactcgagaagtttacggcaaaacagggggcaatcaagggcatgtagtcattcaatcgtttaagcctggcgaagtaacgccagagcaatgtaatcaattaggtttagagctagccgaaagaatagcacccaatcatcaagttgcagtctatacgcatgatgatacagaccatgtacacaaccatattgttatcaattcaatcgacctcgaaacaggtaaaaaatttaataataataaaaaagcactctatgacatcagaaacgccagcgatgagatttgtaaaaaacataacttatctgtacctgaacgcaacgcatcaatgcgatatactcaagccgaaaaaggcttaattgaaaaaggtaaaagctcttggaaagacgaaattagagatgcgattgaacaatcacaagcgacaaattttgaggagcttgagagagatttgaaccaattagacatcacaatcgatcgtgtcacaaacaaaacaatcacttacagacacttgaaagaaaacaaaaaagtgagaggtaaaaatttaggtgaacaattcgataagggggcattagaaaatgagtttgcggtcgcaaatgaacggagagaattcgaacaacagttatcaaaacacgagccaaccgaaaccgagcacagatttagagacacagaaacgcattttgaacgtcctagaaaacttagaatcaaatcacgagaagacgactttgaacttgagtaa

SEQ ID NO: 3794 - DNA, 381 bp, Staphylococcus epidermidis
atgagcgaacaaagtcacagtttgggagagtctgaagctgttgggcaaaaccgtaaacccaaccgcaaagactcgaaacaaattaatgtgcgtgtgagcgaatccgaatattcaaagttgaagcaatctgctgaaactttaaatatgagtttgcctgcttttgttaaaaagaaggcaaaaggggctaagttggttgcaccaaaattggaggcaaaacaagcacaaaatatagtgcaacaacttaattatttgggaaacaacgtcaatcaaatggcaaaagcacttcatacatttggcgaccgtgtggaagttgatgaaatgaatgataagcttgaattcattcagaaggagatgatgaagatttggcaacaactaaaataa

SEQ ID NO: 3795 - DNA, 441 bp, Staphylococcus epidermidis
atgccaagtgcatttaacaaaaaagcaaaagcaattcatctcaacctcactcaagatgagtacaacaaaatacaaaagctagcagaaattcgtcatctcaacccaactagctataccaagcaggttgctttaggtaatcggattaagcctacagtgattgaatatcctcaagaacaaacaacgcttgatgattataatgactcgaatgattcgaatgaaatcatagaacagctcaaaaaggacaacgaggcactcaaatcagacaaacacgcacttcaacaacgtaatgaccaacttgaagatgatatagagcaattcaaacaggagaatgatgtatttcatcgtttgttagaacactttgatagtacagcatttatgaacttccatacgtatcgtgatgatgagttattaaaaaatgcgattaaacgattaaaagaataa

SEQ ID NO: 3796 - DNA, 867 bp, Staphylococcus epidermidis
atgagtggagaaaccgttatatataaaaacgaaatgaacttagtgcctttaagacgatttacagcaactgaaattaacttattttttgccatgtgtaataaattaaaagagcaagatactaatacattacatttgtcttttgatgaactgaaggaattaagtaattatagtccagaaacacgtaatataaacagatttgtagatgatttacaaagagtttacgataaaatgttagatattcgatatactattagaacagaaacgaaaataaagaaatttgttctgttttataaatatgaaattgatatatctgaaagatatttagaaattgctacttctccagatttaaaatatattttaaactccattactagtaattttactaaatttgaattaaaagaaatgacacatctcaaatctacttacgccaaaaatatgtttagaatacttaaacaatataaacacactggttatatgaaaattaaaattgatgattttagagaacgtttagatattccaaattcttatagaatgtctaatattaatcaatttgttctaaatccaatcataaaagaattatctacgatatttaaaaatcttcatattaataaaattaaagcgaaaaaaggacgtaaaattgagtggttagagtttacgtttgatgctgagaaacgcattcacagtaaacgacaaccacaaatggcgaatataggtaagtcacgacaatatatcaatcgtgagaaaacacctaaatggttagaagaacgtacttatgaaaagcaaccacaaaataagtacgatcctcaattagaaagtaaacgagaggcattccaacgtcgtttaaaagaaaaatggggagataattaa

SEQ ID NO: 3797 - DNA, 186 bp, Staphylococcus epidermidis
gtgagtattgaggatataaatcatagtgagcttttagatttaatagctaatactattccagaagatcgagagattaatactttcgtaaaaaacaaaataataattggttttgctaataattattttcctgaattgcaagtattagcaaatgatataaagtctgatatgggcaatttattaagttag

SEQ ID NO: 3798 - DNA, 567 bp, Staphylococcus epidermidis
atgaaaaaagaatttaaggaatggttaatagccataatagtagctatattactattatttttagtaaataattttttatttaaaccttatactgtatcaggattatcaatgtatccaacgtttaacaataaagataaagtagtagtcagcaaaatatccaaatcattaaatcacttaaagtctggagatgttattatatttcatcaaaatagcaataatgactttataaaacgattgattggtaaaccaggagatcaaattgaatataaaaatgacaagttatatatcaataaaaattatatcaaagaaccttaccttgactataataaaaaaatgaataactccagtgaaaatttaacagaagattttaatgtatcaaatataaagggatctaaaaataaaatgataatacctaaagataagtatttagttctcggagacaataggacaaacagtattgatagtagatattctgaggtggggttaatatctaaaaaacaaatcgtaggaaaagttattttaagattttggccttttaatgatatgaagtataattttaatcgatga

SEQ ID NO: 3799 - DNA, 726 bp, Staphylococcus epidermidis
atgaaacatgtatttaaagtctttttagccagtatgttagccactcttttaggttgtactgtcgtaacttctcatcatgcctctgcagctgaaaaccatccttcaaccaaacaagatactaaattagtcgctacctataagacttctcaagttgacgcaaaaacaatgaaacaattcaaatctatagctaaagaagatcctaatttccatattaaaaaacaacaaggtaaagttgtcgtagaagaattattccctaatccaaagaaacaaaaatcaaattatacagctaaccgtagcacaaacaatcatacaagagtattaaatttttctgattttataggaaatatggacggaaacaatactcataatacatcaaataacatatcaacatatagtaaacacaaaggcaaagtatataaagggccaactaaagatggccaacatgtaaaaaaggggatgcatgttcattgtaatcgatttaacggaacaaaatctgatcatagatactggtcaaaaaaacatcctagagcttatgtagatttttataaaagtgactgttggttccatgctagcaaatatcattgttattctatgaataatccaaaaggtatggttaagtgcgatggtttaaaccaactctatcataaaggtgtcaaagattgctcatcatggaaaggtaaacctaaacataaaaattggcctaaaacagcatggtatagaaattaa

SEQ ID NO: 3800 - DNA, 375 bp, Staphylococcus epidermidis
atgaaaaaaatagtttatatacttggtattattatagttttaggcttttgttatttttatgtaaatttaattttttttgatagttggacacgttattctgctgaaaaagaaataaataattatatttcaaatcatgatacaaagaaactaaaagaaatatccgcgaataataaaacatatcaacttttgaaacatactaaacatgtgacaataaaaggagatacagataatcaaggtggaggtcatatagggtattttactagtacgattaatggtaaagaaggagcgctttttgtacatcttaattttggtttgtttcctgaaattcctaaagtaaccaagttggaagtttttgataaaaatatttatgagtag

SEQ ID NO: 3801 - DNA, 453 bp, Staphylococcus epidermidis
atgccaaaaaaacaaagctcgaaagaaaaaatcttaaccgttcgcgtcagtcaagcgcaatacaaaaagatacaagatttagcctacatacgtagtatgaatgtcacagaatatatacgccaaacagctgtgggtaatcggattaaaccgacggtcattgaatatccaaaagaacaaacaacgatagatgattataattctaataatgatacgaatgattggtatgaaatcattgaacagctgaagaacgataacgagaaactcaaatctaacaatcaagaacttcagcaacatattcatcagctggaagatgagatagacccaatgagacaagaaaatgacgtttttcatcatttgttaaaatattttgatagtacagcatttatgaacttcaatacatatcgtgatgatcgcccattaaaaaatgcgattaaacgattgaaagaacaataa

SEQ ID NO: 3802 - DNA, 561 bp, Staphylococcus epidermidis
atgattaaaattggtgttttagccttacaaggtgctgtacgtgaacatatacgtcatattgaattaagtggttatgaaggcattgctataaaaagagtagagcaactagatgaaattgatggtctaatattacctggtggagagtctacaacattacgtcgtttaatggatttatatggatttaaagaaaagttacaacaattagatttgccaatgtttggaacatgtgctggattaattgttcttgcaaaaaatgttgaaaatgagtctggttatttaaataaattagatataactgttgagcgtaattcattcggtagacaagtcgatagctttgaatctgaacttgatattaaagggatagcaaatgatattgagggagtatttattagagcacctcatattgctaaagtggataacggagtggaaatacttagtaaagttggaggtaaaatagtagccgtcaaacaaggacaatacctcggtgtttctttccatccagaactaactgatgattatcgtatcactaagtattttattgaacacatgattaaacattaa

SEQ ID NO: 3803 - DNA, 888 bp, Staphylococcus epidermidis
atgtctaaaatagtaggatcagatcgagttaaaagaggaatggctgaaatgcaaaaaggcggtgtcattatggacgtcgttaatgcagaacaagctaaaattgctgaagaagccggagctgttgccgtaatggcattagagcgtgtaccatcagatattcgtgctgctggcggtgttgcacgtatggcgaatcctaaaatagttgaagaagttatgaatgccgtatcaattccggttatggctaaagccagaattggtcatattacagaagctagagttttagaatcgatgggtgttgactatatagatgagtctgaagtattaacgcctgcagacgaagaatatcatttaagaaaagatcaatttacagttccttttgtgtgtggctgtcgtaacttaggtgaagcagcacgacgcattggtgaaggtgcggcgatgttgcgtacgaaaggtgaacctggtactggtaatattgttgaagctgtccgtcatatgagacgtgttaattctgaagttagccgcttaacagttatgaatgatgatgaaattatgacatttgcaaaagatttgggtgcaccttatgaagtattaaaacaaattaaagataatggacgtcttcctgtagttaattttgcagctggtggtgttgctacgcctcaggatgcagcactaatgatggaattaggtgcagatggtgtatttgttggttcaggtatatttaaatctgaagatcctgaaaaatttgctaaagctatcgttcaagctacaacacattatcaagattatgagttaatcggaaaattggctagtgagctaggtacggctatgaaaggtctagatattaatcaaatttcactagaagaaagaatgcaagagcgtggttggtaa

SEQ ID NO: 3804 - DNA, 1365 bp, Staphylococcus epidermidis
ttgaaagtaaatcaaccactttatttatcgttatatgaaaagttaaaaaatcaaattatcgaaggtcaatatcaatcaaatgatagatttccatctaaacgacagttaagtaactatttatctgttagccacactacaatagaacatgcatatcaattacttgtagatgagggtttcatttattcgaaacctagatctggctacttcgtttccgatatagaatcgttgccagtgatacatcgacaaacaaatcaattaaacactgataacttagaaaagaagcaacgacaatataaatatgcttttaatttagctgaaattgattctgaaagttttcctatgcacatttttagaaaatatgcgaaagacgtttttgaagaccatcagctatcactattacaacgaggcgagcgtcaaggggaatatattttaaggcaacaaatttcacattacttatttaatagtcgtggcgtcacttgtcacccaaatcaaattattgttggatcatcaacaagccagttactcgatatgataaccaatttactaaaaaaagaagaatttattattgaacagccaagttatccacctattaaacatacgcttgataaaaaaggtataagttatattcaagtcccagttgaacaaaatggaatacaaatcgaccctattttaaatacaaataacaatattttgtatataacaccatctcatcaatttccaactggttatgtcaccaatttaaaaaaaagaacacaattaatcaattggtcccatcaagctaagcaaagatatattatcgaagatgattatgattcagaatttagatattttggcaaacccatacctgcattacaaagtttagacacaaaaggaaaagtcatttatattagtactttctcaaaatctttatatccaagctgtaggattgcatatattgttttgccacaaaatttaatgcacaaatataataatcaaaaatataaagagggaaatacagtgcctgtgcatgttcaacacatgattgctcaattcatgataagtgggaaatttgaaagacatttgaataaaatgcgaaagatatatagagataaacttgattatattttaaaacgattaaagccctacaatactcaaataaagattgaaggcgcactaactggaatgcattttacaataactgttaataatggattgtcaatgaaacaatgtttaaaaaatgcgaaaaaaaataatttaaaattaaaaccttatcattacgaaaattattctaaagtttatccaaaatttattttaggatttggggggataaaaaaagaagaattagaagatcatgttaatgcattaattcattcactcgttatataa

SEQ ID NO: 3805 - DNA, 117 bp, Staphylococcus epidermidis
atgagtgagaaaactaagaaaagcattcgtatagcattatcttttgcacaagtagtagtacagtcatttatagtttattatgcttacaagcaatataaattatctaaagaaaattaa

SEQ ID NO: 3806 - DNA, 189 bp, Staphylococcus epidermidis
atgagcgaagaaaaattcgaacaagcaaaaggaaatatcaaagagactattggagatgctactgataataaggatttaaaagcagaaggtaaaggagataaagcttctggtaaagccaaagaagtagtagatgatgttaaagataaagctaatgacttgattgataaagttaaaggagataaaaactaa

SEQ ID NO: 3807 - DNA, 189 bp, Staphylococcus epidermidis
atgttaattcatgaagaagacaaatggggagaattgaataaaagaactaaatataaatataaaaatttaattaaagaaatatctccagttgatttaacggaattaatgaaatcgactttaagagaaaatgaaaaacaattacaaaagcaaatagaattttggcagacaaaaggtaagaagctattttaa

SEQ ID NO: 3808 - DNA, 996 bp, Staphylococcus epidermidis
atgaaatcaataacgcaggcttcatttatgaaaggtattatgtttacatttacgattgcaataatcagttatatattagctaaatttcctattttacatacgattggggcattagctattgccatcatttttgcgatgatataccgccaagtcataggttatcctgagcatattcgcccaggtattacgtttgcatcgaaacgtttattaaaatttgcgattatcttatatgggttaaaattaaatatgggagatattctaggtaaaggttggaaattactacttattgatattatcgtaattatcttttcaataagtttaactttacttttgaatcaaattattaaaggaaataaagatatctctatactacttggtattggtacaggagtatgtggagctgcagctattgcagctacagcaccaatcttaaaatctaaagaaaaagacattgcaataagtgtaggtattattgcactagttggaactatatttgcacttatttatacagctatcgaggctatttttaacatacctactataacttatggtgcttggacaggtatcagtctacatgaaatcgctcaagtcgttttagcagcaggtattggcgggtcggaggcaatgacatttgctttacttggaaaattaggtcgtgtgtttttacttattccattaagtattgtcttaattttgtatatgcgttataagtcacactcaagtcaagtacaacaaaaaatcgatattccttactttctaattggatttattataatggcttgtatcaatacatttgttcctattccttcattacttatgaatattataaatgttattacaacgttatgtatgttaatggcgatggttgctctaggattgaatatcgttttaaaagaagttatttcaaaagcacttaaaccattcattgtgatctgtataacttcaatttgtctgtctggtgtgactctcttagttacgtctataatgtttaaataa

SEQ ID NO: 3809 - DNA, 627 bp, Staphylococcus epidermidis
atggatccgtataaggtattaattgaagtaatgaaaacagaaagttttactagagcagcagaaaatttatatacttcgcagccttctgtgagtcgtgatattaaacgtttagaattaaaatataatgttaaaatatttgaatttaaatctccatatttaaaactaactagagatggcgaaaagctattacaatacgcattgcaacgggaaagtattgaacaagaattatggcaaaacttaacatcggaatctgaaatcatctcaggcaccttaacaattggaagcagttatacatatggtgaatatttattatcagaacagcttaccagtcttatgcaacaataccctaagttacatattcatttacgtgttaataattcagattctgttataaatgatattaaacacaacagagtagatataggtattgtagaaaaggaaattcaagacaatgcaataaaatgtaaggaaataatggaagacgaaatggtgtatatttacaaaaaatcgattcaacctagaatggatatatgtttcgttagagaaaacatactaagattagctatgaagaaatctatgacgatagattttttcatagctattttttatagttatagagagaagtag

SEQ ID NO: 3810 - DNA, 147 bp, Staphylococcus epidermidis
atgtataaagattataatatgactcaacatactctaccaatagaaacttcagtacttatccccgcaaatgatatttcacgatatgtatatgatactgtagaaacaattctagagactgaattcagacatcatcgtggcttaatataa

SEQ ID NO: 3811 - DNA, 1941 bp, Staphylococcus epidermidis
atgagtttacccaagaagaaaataggaatttttgcgttcttcttattaacggtattcaccattactttgaagacatatttttcatattatgttgacttttctttaggtgtcaagggtttagtacaaaacttaatattgcttatgaatccttatagtttgattgcacttgtactaagtgttttcctattttttaaaggtaagaaggcattttggttcatctttattggaggatttttacttacgtttctactatacgcaaacgttgtgtacttcagatttttctcagatttcttaacttttagtacactaaaccaggcaggcaacgttgaatcaatgggtggtgcagtaagtgcttctttcaaatggtatgactttgtctacttcattgacactattatctatcttgctattttaatatttaaacgtaaatggttagataatagagcattcagtaaaaaattcgtacccgttgtgatggctacatcagtagcattatttttcttaaatttagcgtttgcagaaacagatcgtcccgaattattaacaagaacttttgaccataaatatcttgtgaaatacttaggaccatataacttcactgtttatgatggtgtaaaaacaatcgaaaataatcagcaaaaagcactagcttctgaagacgacttaactaaagtgctgaattacactaagcagaaacgtactgaacctaatcctgaatattatggtgcagcgaaaaagaaaaatataattaaaattcaccttgaaagtttccagactttcttaatcaataaaaaggtaaatggtaaagaggttacaccgtttttaaataaattatctagtggtaaccaagattttacgtatttcccaaactttttccatcaaacagggcaaggtaaaacatctgactcagagtttacaatggacaacagtttatatggcttgccgcaaggctcagcctattcactgaagggagataatacgtatcaatcattacctgctatactagaccaaaagcaaggttatacatctaatgtaatgcatggtgactacaaaacattttggaatcgagatcaagtttataaacatttcggtattgacaatttctatgatgctacttactatgacatgtctgacgacaatattgttaatcttggtttaaaagataaaccattctttaaagcatcagcagattatcaatctaaaatgaaaaagccgttttattcacacttaattactttaactaaccactatcctttcacattagatgaagaggatgcttctattgataaacctaataccggtgactcaacagtagacggttatatacaaacggcacactatctcgaccaagctttagaggaatatattactgaccttaagaaaaaaggtctatatgataactcagtcattatgatttacggtgaccattatggtatttctgaaaatcataataatgctatggaaaaattattaggtgagaagattacaccagctaaatttacagatttaaaccgcactggcttctggttaaaagttccaggtaaatcaggaggcgtaaataaagagtatgctgggcaaatggatgttatgcctacattactacatcttgttggtattgatagcaagaattacctaatgtttggttctgacatgttctctaaacaacacaataacgtagtaccgtttagaaatggtgattttatcactgaagattataagtatgtgaatggtaaaatttactcaaataaagataatgaattgcttactgaaaaacctaaagacttcgataaaaataaaaaacaagtagagaaagatcttgaaatgagtgacagcgtgttaaatggtgacttgttcagattctacaaaaatcctgactttaaaaaagtaaatcctggtaaatatgaatataaatcaggtccaaaagggaacgaaaaaaaatag

SEQ ID NO: 3812 - DNA, 1005 bp, Staphylococcus epidermidis
atgtcaatcataattgaaaatagtggtctatttagtagctttcaagattttggaagaaagggatatgaacatgaaggtgtcatcccgagtggcgcactagatgaattagcacatgaaatagccaaccgtctggttgcaaatgacaaaaatgaagcaacacttgaaatgactcaaaaaatggcaacaattcgtttcactgagccggcacttatagctttaacaggtggtaattttaaagctgaaactgaacatatgaaaatttatcctaataaattatatctcatcaatgaaggtgagacattgaaatttaatgaaaccagtcgtacatcacgtgtttatctagcagttggtggaggttttaaactagaaaaatggcttcattcagcatctacagattttaatgtggaaattggtggttttgagggaagaaagcttaagaaaggtgatgaaatagaattaaaacaccactattctcaacgacatcttaagctatttgaaaacttatctgacaaacgtacaactgattggggaattgatggttacgcattgtctttcaattatgtttcggatgtttttcatgttataaaaaataagggaacggaagattttaaaaaagaggcgacgcgtcgttttacaacggctgaatatagtgtgtctagtaaaacaaatagagtaggtatggtgcttgatggaccccaaatcaaagcatactatgatgatatgccggctcatcaatcagtaaaaagaggaaccattcaagttaagagagatggcacaccgattgtattattaaacgatcattatacattaggaagttatcctcaaataggtacaatcgcaagctatcatctaacaaaattagcccaaaaaccacaaggctcaaaattgaaatttcaatttatagatatcgaaactgcagaaaaaaacttaataaagtatagcaattggttaaatcaattgttccatggtattgaacaccgtatgcaattagaaatgttaaagtga

SEQ ID NO: 3813 - DNA, 732 bp, Staphylococcus epidermidis
atgaaaatatatagtcaaggcgaccaagccattgttgtttcaatagagaaaaatgtatctcaaagattgacagaagatttactttcattgagagcatatttaattgataaatcatatccatttattactgaaattgtagctacagagtctgacctaatgatttgttatgacgcaagagatatgattaaacatcaccatattcagtcaccatttttatatatgaaagctttaattgattctataaaattagaaattagacatcatcgacaacaacttcaagcaaaatatattcaaaaacaacaatctgttaatattccagttatatatgggggagaatttgggcctgatttacaacatttgttaaagcatcttaaactcaaattagaggattttgtaaaattacatactcaagaaaaatattttgtatcaatgatggggtattcaccaggatttccgtatcttactggaatgaataaaaaattgcatgtgaaccacacaagtgaaaagaaaaaattcatcccttgtggatcagttattatggaaggaaaaaaatgtggaatagttactactgatacatataatgattggttagttatcggatatacaccagttcaacttttctttcctgagcaacaaaactttacattattaaagctaggagacaatgtcacgtttgagtctaaagatatcaatgaaatagaactaggagattataaaacatgtcaatcataa

SEQ ID NO: 3814 - DNA, 207 bp, Staphylococcus epidermidis
atgacattattatggttagctatattaatacttcttactgtattaggtaaaaagatgtcaaaccaagccattaaaaacaatcaagtgcttattgctaagttaatagctactataactacattttgtgcgtttgtgttggtttatttgcttatgcaatctataatgccacatattattaaattgatgaatgtcttttatcatcattaa

SEQ ID NO: 3815 - DNA, 609 bp, Staphylococcus epidermidis
atgcatttatttgaaacaatgaaattggataagggattcattcctcgtcttgattaccattatcaacgtatttcaacttctagtgagcatctaggatttcaatttgatcatctattttggaaacagtttattcataatataaaaaccttgcattcaaaaggggtatatcgtttgaaggtgacgttaaacaaagaaggtgaattaaactatgagttatttccgatacccgataaacctttttttaccgctcgactagttcaacaaaaaaagaatattgataaagtaatcataactaataaaacaacagaacgtgattatttaacacataatcatttcacagacttaatactgatctatgatgaagatggtaaaattttagagtttgacattggcaacgtgatgatacaagaaagagataaattgtatacaccaacatataaaggagacatgctccccggctgtatgagacaatttcttatagatcaaggcaaagttatagaaaaagatttttatatcgaagaatttaaagaaaaaatcaaatcgagtcaaatcaacgtctatttaatcaatagcttaagagaggttgtcggtgttaaagtatatgtataa

SEQ ID NO: 3816 - DNA, 1152 bp, Staphylococcus epidermidis
atgcacattgaatttaagtatcgctattatgaaaatgaaaaggactatgaagactatcaattagaaatggataactttcaagattctaaaattgcatatcgtcttgatgaagtaggggatgtcattcactttgcagaacaagaacaacgtaacggaagctatgttgcactttatgttacttatgaagcagcacctttttttaataaggaaatggtggtcaataatgtgaaacaatcccatatttttgctgcagcttattcatttaaatcggtcaattcgataaaaaatataaaaaaagtaatgcccaataaaaatcatataaaaactgaaggattttatttttgtgaaagtgataaagcgatgattaacaagatcaaatcgattcataaagccattattgaaggggcaacgtatcaggtgaattacacaacccgcttaaaagcagaagttttctgtcctataagtcacttatattatcaacttactatgtcacaaaatggtaattataccgttttaatggacacacctgatataaaagtagcatcaatatcgcctgaacttttctttcaaaaaggtgactataaaggtaaatcaaatatgattgttagtaagccgatgaaagggactatgcctagagggaaaaatgttaaagaagatgagctatattataataatttaaaaacctcctctaaagatatggcggagaatgtgatgattgtagacttattacgtaacgatattacaagaattgctcaaagtggaactatagatgtacctgaattgttttcgattgagaaatatgacacagttttccaaatgaccagtacagtgtgtggccgattacaagatgacattcaattgatagatatgatgcgagcgctctttccttgtggttctattacaggtgcaccaaaaataaatacaatgcaatatatagctcagttggaggacatgccaagattcatttactgtggaacaattggcttattacttccaaaccaaaggatgatatttaatgtccctatacggacaattgagtataatcatgaagaagcggtttatggggtgggtgctggtataacaattgattcagtacccgaaaatgaagttcaggaatttcacgataaaactaaaattttggagcggttataa

SEQ ID NO: 3817 - DNA, 588 bp, Staphylococcus epidermidis
atgattttaatggtagataatcaagattcctttacatataacttaatagattatattaaagtacaaactactgaagaagtgaaaatcatttctgtaaatgatttgatgacacagcatctcgatgcattgaatccgagagcgattgtcatttcacctggacctgggaaacctagtgattatccaatactatcatccgtattagaaatatttcaccgtcacgttcccattttgggcgtctgtttaggttttcaattaatcattgaatactttggaggaaacattattcataatgataaacctattcatggacatattaccaagataaggcatagcaatgagggtatttttaaaggtctaccatcgtattttaacgtgatgcgataccattcacttatggctgacccctctacaatacctagcgcattaaaagtcacagctctgaacaacgagaatgttattatggctgttgcacatcataagtatcctatttatggtttacagtatcatcctgaatctatactaagtgaatatggtcacgaacaattaaatttattcttaaccgaggtaggggttaaatatgcacattga

SEQ ID NO: 3818 - DNA, 672 bp, Staphylococcus epidermidis
atgtcacaaaatgacttaaataaagaaaaagcacttgtcgtatttagtggtggtcaagatagtacgacatgcttattttacgctaaaaaacattttaaagaagtagaactcgttacatttaattacggacaaagacatgataaagaaattgaagttgcaaaaaaaattgcaaaagaacaaaatttgaaacatcatattttagatatgtcattactatctcaacttactcccaatgcacttacacaacatgagttaagtattgaagataatgatgatggtattcctaatactttcgtaccagctagaaatctattgtttttatcttttgctggcgcgttagcctatcaaattcatgctaaacatattattactggtgtttgtgaaacagatttttcaggttatccagattgtagagatagctttatcaaatctatgaatgtaactttaagtctttcaatggataaagactttgtcattcatacaccattaatgtggttagacaaagcacagacatgggcactcagcgataagctaggtgtgttagattatattcgccacaacacattaacatgttataacggtatcattggtgatggttgtggtgaatgtccagcatgtcacttaagagctcgaggtttaaaacattatcttgaacataaaggagaagaataa

SEQ ID NO: 3819 - DNA, 420 bp, Staphylococcus epidermidis
atgcaacaaatatatccaagtgtcactcacccatatcaattcgaacttaacaaagattttaacttttcagctgcacattacattccctttgaagaagcgggaaaatgtattcgtacacacggtcatacgtattacgtcaacttaacaatcgctggtaatacactagataaatgtggatttttagttaattttagagatttaaaaaagctagttcatgaacaatttgaccattatttgcttaatgacttacctgcttttaaggataaaagtccctcaacagaaattgtcgcacaaacgatttaccacattattcaaaaagagttaaatcaaagagagaatcaaccgaaatgtgttcaagtttatcttagagaaacaccttcaagttacgtagtttatagaccaaaggaagatcaagtgtaa

SEQ ID NO: 3820 - DNA, 714 bp, Staphylococcus epidermidis
atggctaaaatacccgttttagaaatatttggaccaacgattcaaggtgaaggtcgtgtaataggaagaaaaacaatgtttgtgcgtacagctggttgtgattatcgatgtagctggtgtgattctgcatttacttgggacggtagtgctaaagaagatatcaaattaatgactgctgaagaaatttatgatgcgttacttgaaataggtggtcatcgatttaatcacgtaactatatccggaggtaaccctgcgttaatcaaaggtatacaggaattagtagatttatttgaagacaaacatatttatacagctttagaaacacaaggtagtcgtttccaatcatggatgacacaaattgacgatttaacgattagtccaaaaccccctagttcgggaatgaaaactaatctagaaatattagattctgttataaatcaatgtacatttcattcacttaatttgaaagtggtgatttttgacgatgcagactatgattttgcaaaattaattcatcatcgctaccctaacatcccattctatctacaagtaggtaatccttatcttgatgataacgttgaccaacatacagataaattacttgaaaggtatgagcaattagtggatcgtgtaatgcaaagtagtgatatgaatcatgtctatgtactaccgcaattacacacattattatggagtaataaaaaaggtgtctaa

SEQ ID NO: 3821 - DNA, 600 bp, Staphylococcus epidermidis
atgattatatatatattaattaacatcgccatcgtcttgctaattcttggcttcgatttataccgacatcgtttcagacagcttaagtttagctccatattattatctgttttaatcaatagcatgattgatatttttgcgattaatcaattcaattttattacgatgtttaccgtcacgctatttatgatatggacacttttacaaatatatttaaatttcaagctatatccttttgtaatttctgaccaaaagtttattgctataatactagctattgttataagcttattgcaatttattacagataaatcgagcacacaatcggtgtacatgtccatcccatatttatcacccacgatatttataataggggcgattttactttttgtaggtactttcaaaatagacgaagttgaacgtctttcactatttcgtaaaattaaaagaccaatgacaacaggtacaattattattatcctatctctcatatcaacgatgattttaacgcccttttggtatgtctttttaatcatttatagcttactcattggttttatattatggcaaggtgttttcttcataaaagataaaaaataa

SEQ ID NO: 3822 - DNA, 156 bp, Staphylococcus epidermidis
atgtgtaaagaatataacatgactcaacatactctaccaatggaaagttcagttcttatccctacaaataatatttcacgacatgtaaatgatattgtagaaacaattcccgatactgaattcgatgaattcagtcatcatcgtggcttaatataa

SEQ ID NO: 3823 - DNA, 438 bp, Staphylococcus epidermidis
atgaatacaaaatatttattagcagtcggagcaattgttacatcacttacattaggcgcatgtggaaattctaactcggaaagcgatcacgctaatcacaaagataaacaacaagaagacagtaatgtaaaaacagacacaacaaaaaaattatctggtaattttgaatctaaaaacggagaaaaagtagaaggtaaagctaaaattgaaaatggcaaacttatgttagagaattacaaatcttctaaaggtccagacctatatgtttacctaactaaaaacggagatattaaatccggtaaaaagatttcaacagtagactacaataaatccaaacaaacttttgatttaaaaaatgtagatttagaaaaatacaatgaagtaacaatttattgcgaaaaagcacatgtaatttttggtggcgctaaattaaaataa

SEQ ID NO: 3824 - DNA, 474 bp, Staphylococcus epidermidis
atgaagaaaataagtttatttataatatttttaattcgtgtaatttcaggtattgttattttcagacaagggtgggagaaatttacaggtgattttacattaaacgggctagttccggtaattagagataacacagactctcctcaatggtataaatggttttttgaacatattgttgcacacacaacaggattatttaatataatcgtgcctttaggggaaatggcaattggtttaggtttaattttaggtatatttgcatacgctgcaagtttctttggagccttcgttatgataaattatattttagcagatatgatttttacgtaccctctacaattagctttctttattattttactcatgagccattctttattggctaaggtatcacttaaagaaatcatcgcttattttagagaccataataaccgaggtgaagataagcatgacccacttactaatcgtggatga

SEQ ID NO: 3825 - DNA, 690 bp, Staphylococcus epidermidis
atgacccacttactaatcgtggatgatgaaaaagatattgtagacatttgtcaaacgtatttcgaatatgaaggatatcaggttacgacaacaacatgtggtaaagaagcactaaaattattatcttcagatatagatattatgattttagacattatgatgcctgaagttagcggatacgatattgtcaaaaaaatgaaagatatgcaacttgatatacctttcatatatctaacagcaaaaactcaagaacatgacacgatatacgcactgacgttaggtgctgatgactatattaaaaaaccctttagcccaagagaactagtattacgtactaataaccttctcgctagaatgagtaaatcaaatcattctaataaaattgagcaattagaatttgatggtttagttttaaaaaatttaagcaagacacttaccattaacaatatagagatacctatgcgcattaaagaatttgaattgctatggtatcttgcttctagagaaggtgaagttatttctaaatccgaacttctagaaaaagtatggggatatgactattacgaagatgctaacactgtcaatgtccacatacatagaattcgcgagaaattagaaaaacatgattttttaccctacactattacaactgtgtggggccttggttataagtttgaaaggagccgataa

SEQ ID NO: 3826 - DNA, 948 bp, Staphylococcus epidermidis
atgacactcactttagccatcactactatgataacaagctgtttaacactttcgatttgtagtatttttattaatcctttaattcagaagattaagcaattcaatattaagactaagcaatttataaatcacgaaaaattcattgatgatgaaacatttcagtctcctagagaaattaaagagttgaatgattcttttaataaaatggcatatgaaatcaataatcaaatgaatatgataaaaaacgagcaacaagaaaaaactgaaatcatacaaaaccttgcacatgatttaaaaacacctttagctggtattcgatcatattctgaaggtttacgggatggcgtcattagtgatcctcaagaagttcatgaagcatatgaaatattaattaaacaagcaaatcgtttatcaattttatttgatgacattacacatgtgattaatttaaatactggacgttcttatcctttggaattaatacagctcgatcaattacttgttaatatattacaaccatacgaacaacacataaaacaagaaaatcgtacacttgaagttaatttctgcacagatattgatgcattctaccagtatcgacctccaatcgaacgtattttgaccaatttactagataatgcattaaaattttctaattctggtagccgtattgatattattatttctgagtgtaaagaaaacgacgtcattagtatttcaataaaagatgagggcataggtatcgttccagaacttcaatcacgtatctttgaaagaacgtttagagttgaagattctcgaaatactaagactggtggttcggggttaggattatacattgcaaatgagttagcacaacaaattgatgcctctattacagtccaaagtgatttagacattggaaccacgatgacacttaccttaaaaaaatttcaatttaaaaagtaa

SEQ ID NO: 3827 - DNA, 1107 bp, Staphylococcus epidermidis
atgaaaatcagagtcatcgtcccttgctataatgaaggcgaagtcgttttgaaaacttatgacaaattaactgaaataatgaagaaagatagtttaatcaaaaattatgaatacgatttactctttattaacgatggtagtacagatacgacaatacatcatatcaagaatattgttgcgtatgataaccatgttaaatatctttcattcagtcgaaactttggcaaagaagctgcaatgattgctggctatcagcatagcacaatgcacgacgcggtgattatgattgatggagatttacaacatccgcctgaatatattccacaaatgatagagggttacattgaaggttatgatcaagtggttgctaagagaaatcgtcagggagagaattttgtacgtaaaactttgtctcgttgttattataaattaattaatgcatttgtagaggatatccaatttgaagacggcgttggtgattttagattactcagtcgacgtgcagttcaagctttaacaacacttgatgaatataatcgtttctctaagggtctatttgaatggataggttatgaaacaaaagtatttcaatatgaaaatgtgacgcgtgaagatggagaatctaagtggacttttagaaagttactcaactatggtattgatggactcatctcttttaacaataagcctttacgcatgatgatatacttaggtatgttcacgttttctatcagtattttatatataatttatttattaataaatattttgattaatggtataaatatacctggttattttactacgattgctgctatattattgttgggtggtattcaattaatgtctattggcgtagtaggagaatatattggtcgtatttattatgaagttaaacatagaccgaagtatattgttgaaaactctaatattcagactgagaatctcgacatgagatataatgctttaaacctgaataaaaatagaaacaacaagcgtagtaatgatttatataaattaagttctttttataaagttaaaacatatagtgatacgtatgcatcaaattattctcaagatgaaggttttaaagagcgtgtacattaa

SEQ ID NO: 3828 - DNA, 840 bp, Staphylococcus epidermidis
atgacaaatgatgtccaaattttaaaaaacggttatccaatgcctgcagttggattaggagtttataagatagcggatgagcagatggaagaggttgtccgtacagctttagatgcaggatatcgtgcatttgatacggcatacttttatggaaatgaaaaagccttaggtagtgcattaaaacattcaaatgttgagagggacgagttattcataacatctaaactttggaatgattatcaaggttatgaccaaacaatagagtactttaataaatcattggacaatttagggttagactatttagatttatttttaattcattggccttgtgaaaatgatcaattgtatattgaatcatataaagccttagaacatttatatgaagaaggtaaaataaaagccattggtgtatgtaactttaagatacatcatttagaaaagttaatgaaagaaactaaaattacaccacaggtgaatcaaattgagttacatccgtactttaaccaacaagatgtacaagacttttgtgatgaacatgatattaaagtaacagcttggatgcctttaatgcgcaataaagggttgcttgatgaccctgtaattacagatattgctcatcgttatgataaaacacctgcacaaattgtcttacgttggcatcttgcacataatcgtattatcattcctaaatcacaaacacctaaacgtattaaagaaaattttgatatttttgattttaatcttgagttaacagatgttgcagaaatagatagtttaaataaaaatgctagacaaggaaaagatcctgatgatgtcagtattggagatttgaaataa

SEQ ID NO: 3829 - DNA, 1308 bp, Staphylococcus epidermidis
ttgattgcattaacaacagtattcgttgggtcagaatttgcactagtaaaagtgagatcaacgcgtattgaacaattagtagatgagggtaataagagcgcaaaaattgtcaaaaaaatgatagacaatcttgattattacttatctgcctgtcaattaggtattacagtaacatctttaggcttaggttggttaggtgaaccgacatttgaaaagatgatgcacccactattcgagttattacatttacctagtcctttaacaacgacgatttcatttgttgtttcattcattgttgtgacatatttacatgttgtattaggcgaattggcacctaaatcatttgctattcaacatacagaacaacttgcacttttatattcaagaccattattttattttggtaattttatgaaaccacttatatggttaatgaatggttcttctcgtgtgattgtcagaatgtttggatttgatccagatgctcaaactgatgcaatgtcagaagaagaaataaaaattattataaacaatagttataacggtggagagattaaccaaaccgagcttgcgtatatgcaaaatattttttcatttgatgaacgtcatgcaaaagatattatggtgccacgtacacaaatggttacgctcaacgaaccatttaatgtagatgaattattagatactatcaaagaacatcagtttacaagatatccaatcactgaagatggtgataaagaccatgtaaaaggttttataaatgtcaaagagtttttaacagaatatgcgtcaggtaaaccgattaaaatcgccaattatattcatgaattacccatgatttcagaaacaactagaataagtgatgctcttgtaagaatgcaaagagagcatgtacatattagtttgattatagatgagtatggtgggacagctggtattttaacaatggaagatattttagaagaaattgttggtgaaatcagagacgaatttgatgatgacgaagttaacgatatagttaaacttgatgatcatacttatcaaattaatggtcgtgttttacttgatgatttaaatgaaaaatttggcatagagtttgaagattcagaagatattgatactattggtggttggttacaatcacaaaatactaatttgcaaaaagatgacttcgttgatactgaatatgatcgttggacgattacagaaatcgacaatcatcaaattatttgggtcaacttaaattatgaatttaatagtggacgtccttctgttaatgaagaacaagaagatgacgaacgtgattaa

SEQ ID NO: 3830 - DNA, 1173 bp, Staphylococcus epidermidis
atgtcagaatatgttttaacgaatggcatcgtatatacagaaaatgaaatgattaacaatggatatgttcatattaaagatgggaaaattttagacgttggtaagtgtccttttcatccgtcatcgtcgcataatacaattgacattattgatgtaaaaaaacgacatatactgccaggatttatagatattcacatccatggggggtatggtgaagatgccatggatgcatctgaacaaggcttacaacatttagcagaatcactcctttctgaggggacaacatcttttttagcaacaacaatgacacagtcaacagtcaatattgagcgagcacttcaaactattgctaaatatactcaacaacaagatgttacaaatgctgccgaaattgtgggagtacatcttgaaggtccatttatttcagaacataaagtaggcgcacaacatcctcaattcgtacaacgtcctacggttgataaaataaagtcgtttcaggaagtagcgaatggactaattaagattattacttacgctcctgaagttgatggagcaacagaaacgttaaagacaatgaaaaatgatatcattttttcaatcggacatacggtggcaacgtttgatcaagcgaatacagctgtgagtcatggtgccaaacacatcactcatttgtataatgcagcgaccggctttcaacatagagaaccgggtgtatttggtgcagcctggttaaatcaagggttgcatactgaaatgattgtggatggtgttcattcacatcctgcatccatcgcacttgcatatagacttaaggggaatcaaagctgttatttaattacagatgcgatgagagctaaaggaatgccagaaggacattatgatttaggtggtcaggatgtgattgtaaagggaagtgaagcacgcctgtcttctggggctttagctggaagtatactcaaaatgaacgaaggacttaaaaatttaatacaatttacaggtgacacgattgagcatttatggagagtaacaagtttaaatcaagcgataacattaggtatagacgacataaaaggtagtattaaaatcgggaaagatgcagatattgttatcatagatgatgcatgtaatgttgaaacgacgattaaaaatggaaaatatcatgctttcaaatga

SEQ ID NO: 3831 - DNA, 1953 bp, Staphylococcus epidermidis
atgagaattactgaactgttaactaaagaaacaatagcgatggatttagatgcttctgataaaagtggggtgattactgagcttgttaatcaattggataaagcaggtaagttaagtgaccctgtatcgtttaaagaggcaattcataatcgtgaatctcagagcacaacaggaattggtgaaggtattgctataccacatgctaaagttgcagcagttaaaacacctgcaattgcattcggtaaatctaaagaaggtgtggattatcaaagtttagacatgcaacctgcacacttattctttatgattgcagcgcctgaaggtggagcacaaacgcatttagatgcgcttgcgaaactttctggaatattaatggatgagaaaatacgtgaaaaattaattcatgctgaatctcctgaagaagtgttaaacattatcgatgaagcggatgatgaggcaacaaaagaagaagaagcagaagcgaacgaaaatgcaactgtttcaactgacaactcaaatcaagataataatgagccatatgttttagctgttacagcatgcccaactgggattgcccacacatatatggcacgtgatgctttgaaaaagcaagctgagaagatgaacatcaaaattaaagttgaaacaaatggttctagtggtattaaaaaccatttaactgaacaagatatagaacgtgcaactggaataattgttgcagcagatgtccatgtagaaactgatcgttttgatgggaaaaatgtggttgaggttcctgttgctgatggtattaagcgtcccgaggaactaattaatacagctttagatacaaatcgtaaaccatttgtagcgcaaggtggatctaaaaaacatgacgataatgaagaaaagttaagtccaggaaaagcattctataaacacttaatgaatggtgtttctaatatgttaccacttgttatttcgggtggtatcttaatggcaattgtattcttattcggcgcaaactcatttaagcctgatagttcagaatataatgcatttgctgaacaattatggaatattggtaaaaatagtgcctttgctttaattattccaattttagctggtttcattgcacgtagtattgcagataaaccaggttttgcagctggtttagttggtggtatgttagctatttctggaggttctggctttattggtggaattattgctggtttcttagcaggttatttaactcaaggaattaaatatattacacgtaaattgccacaagcaattgaaggcttgaaacctactttaatctatccattactttcagtttcaattactggattgttaatggtgtatgtctttaatccgccagcagcttggttaaatcatttgctactaaatggtttaaatagtctgtcaggctctaatattatgttacttggtcttgtgattggagctatgatggcaattgacatgggcggtccatttaataaagcagcttatgtatttgctactgctgcattaacggaaggaaatgcagctcctattactgcagcgatgattggtggtatgattcctccattagctatcgctacagcaatgttaatctttagaagaaaattcactaaagagcaaagaggctcaattgtaccaaactatgtcatgggattatcatttattactgaaggtgccatcccattcgcagctgccgatccattacgtgtgattccttcaatgatggttggctcaggtgtggctggagcaattgctttaggtttaggatcaagtatcaaagcacctcatggtggaattttcgtcattattggtactgattttaaccatatacttcaaactcttattgctttagttgtgggtacgttagtttcagctttaatttatggtttcttgaaaccaaaagtaacagaaaatgaaattcaagcatctcaagctatggatgaatag

SEQ ID NO: 3832 - DNA, 921 bp, Staphylococcus epidermidis
atgatatatacagttaccttcaatccttcaatcgattacatcatttttactgatggatttgaaatatcaggattaaaccgggcaaaagcaacgtataaatttgcaggaggtaagggaatcaatgtatcaagagtacttaaaactttagatgttgattctacagccttaggattttcaggaggtttccctggagattttattgctcaaacacttgaggacagtaatatccaatcagattttgttcaagtagatgaggatacgcgtattaatgtaaaactaaaatcaggtcaagaaacagaaatcaatgcacccggacctaaagtgacacacgcgcaatttgaacaacttttatctcaaatacgtcgtactacaaacaacgatattgttattgtagctggaagtgtaccgaacagtattccaagtgatgcttatgcacaaatagcacaaatcactgaaaaaactggtgcgcaactagttgttgatgcagaaaaagatcttgttgaaacagtattaccatatcgaccattatttattaaaccaaacaaagatgaattagaagtaatgtttaacactacagtcaagagtgatgaagatgttataaaatatggtaaagaaattttgaaaaaaggggcacaatcagtcatcatttcacttggtggcgatggtgcaatatatgttgatcaacatcaaagcattaaagctgtgaatccacaaggacatgtagttaatacagtaggatctggtgatagtacagtggcaggtatggtagcagggttgtccatgggtcttaatgtagatgaagcttttcaacaggccgtagcttcaggaacagcgactgctttttcagaagatttagcgacaagagatgctatagaaaatattaaatctcaagtgacaatttctgtacttgatggggagtga

SEQ ID NO: 3833 - DNA, 759 bp, Staphylococcus epidermidis
gtgatatcagaaaaacgacagaatttaattttacaagaattaactaaaaaggactttttaacacttcaagatttagttaatagaacagggtgtagtgcatcaactatacgaagagatttatctaagttgcagaatatgggtaaattacaacgagtacatggtggtgctacaattcatcaaaatcgagttaaggaacctaagttatctgaaaaaagaactcagaatttacgtgaaaaacaagaaatcgctaaacgtgctgcatgtgatatccaagatcatgaatgtatatttctagatgcgggttcctcaacttttgagttaattcaatatattgaggcaaaagatattactgttgtaacaaacggaatgacacatgttgaagaactattaaagcacggtattaaaactttaatggttggtggccaagttaaacctacgacaatggctacagttggtgctaacgcgttagaaacattaagacgttattgttttgatcgtgcttttataggaatgaacggtattgatgtgaaatatggattaacaacccctgatgaacaagaagctttgattaaagaaacagctatgaaactatcaaatcacaaatatgtgcttgtcgatcaatcaaagtttaatcaaatttattttgcaagagttccaattttagatggacttaacatcataacttcgcaaaaggcaatgcaaagcaagatgactgaagcttacatgaatgaatttaattttataggagggagatcatga

SEQ ID NO: 3834 - DNA, 483 bp, Staphylococcus epidermidis
atgtctaaaactaaaaaaacaaatgcaatgcggattttagatagagctaaaataaattatcaaatgaatacttacgaagttactgacaagcatcaacatggagaagagattgcacaactcgtaggtgctaaaatagaagaagtctttaaaacacttgtactagagaattctaatcatgaacactatgtttttgtcattccagttaatgaaaccttagatatgaagaaggcggctcatgttgttaatgaaaagaaattgaatttaatgcctcttgatcaattaaaacaagtaacagggtatgttagaggaggatgttcacctatcggtatgaaacattcctttaaaacgacgattgatgcttccgctaaaaatttagaaaaagtttatattagcggaggtcaaagaggaatgcaaattatcattcatgtgaatgatttaattgacatgacaaaggctcaggtagaatctattacacagaattaa

SEQ ID NO: 3835 - DNA, 465 bp, Staphylococcus epidermidis
ttgaaaaacttatttttaagttctgttgcagttattttatcaatttgtttagtacttttattatttttagctacaaaccaaaatgcattagcgaaagtccataaaacaatttgtacttttactaaaataaaaacagtatctcataacgatatattccctaacttaaatatgaatcatgttgctgaagcttcagaaaaaaactctgatcaccaaaagaatgttaataaaacaaatcaacaaagtgtaagaacgcaagcatcttatgatttcaacccacaggaatgtaaagtaattgctttgaattacgctgagaatcatttaagcaaaaaatataatatagagcgtactttcaacgagtcgcttcattcagtatatgtattttctagtgaaaataaacttcatcaaactaaggttaaagtcaataaaagtgggactgtacatgcatcaaacatcaataatcattaa

SEQ ID NO: 3836 - DNA, 1164 bp, Staphylococcus epidermidis
atgaaaaaacaattattcattctttattttaatatatttcttatatttttagggattggattagttattcctgtacttcctgtatatttgaaggatttaggattaaaaggtagtgacttaggaatgctagttgctgcttttgcattatcacaaatgattatttcaccatttggtgggacactagctgataaattgggtaaaaaattaattatatgtatcggtttagtattctttgctgtctctgaatttatgttcgcagccggtcaaagttttaccattttaatcatttcacgtgttttaggtggctttagtgcaggcatggtcatgcctggtgtaacaggtatgattgcagatatttctccaggagctgataaagctaaaaactttggttacatgtcggcaattattaattcaggttttatattaggacctggatttggaggctttttagctgaaatttcacatagattacctttctatgttgctggaacattaggtgttgttgcattcattatgtcagttttattaattcataatcctcaaaaagcaactacagatggattccaccaatatcaacctgaattattcactaaaattaattggaaagtatttattactccagtcatattaacacttgtattagcatttggtttatctgcttttgaaacattattttctttatatacagctgacaaagtaaattatactcctaaagatatttcgatagctattatcggtggaggcgtgtttggcgcattattccaagtattcttctttgataaatttatgaaatatatgagtgaacttaattttattgcatggtcattactatattcagccattgttctcgttatattagtgcttgcaaacggttattggacgattatgattattagctttgttgtttttataggttttgatatgattagaccagctttaaccaattacttctcgaatatagcaggcaaacggcaaggttttgcaggtggattgaattcaacttttaccagtatgggtaactttataggtcctcttgtagctggtgcattattcgatgttaatttagagtttcctttatatatggctattgcggtttcattaagtggaattatcattatttttattgaaaaaggacttaagtcacgccgtaaagaagcaaattaa

SEQ ID NO: 3837 - DNA, 138 bp, Staphylococcus epidermidis
atgataacttttacagtgaggcatttcaaacaatttgaggtgttttctgtttatacagatgtgaaagcgaagaaaaattataccgtatgttcattagactttagtcaattggataaaggttttgtcgaaagtttatga

SEQ ID NO: 3838 - DNA, 618 bp, Staphylococcus epidermidis
atgcaatctcgttactttgcaagaatatacttcattatcttatttgttatatctatgactgaatcacatatttttaactttatgacgttaaatttatttttagcatacgtgccgtttgaactttgtctacttttaaaattgttcaaaccagtcaaagcttttgaatggcccttatttattgttttcggactcatatttctattattagttccaaacacattttatatgattaccgatctcatacacttaaaccaatttcaatttaactttttagctggattaaacatcacagaatggatttatttcacctatttaatacttggcgtactcttagcaatatacctcacaattcttatatttttagaaattgcacattttacgtcttatgtatggttaaatcgactattgatagttatattaatgttcttaaatggattaggtatttacatcggtcgattcttaagattacatactgtctatttattaaatgcacctttaaaaattgtgaaagaggtttttttaatcatagatgttaaagcgttactatttgtcgttttaatggtgctcatacaagcaacagtcatattgtttgttaaaggggtgagattataccaatga

SEQ ID NO: 3839 - DNA, 1374 bp, Staphylococcus epidermidis
atggctataggtgtcatattaaatagagtttttaggctaaataataatccattatttgattatatatatagtaataaagaatctataaatcattgttattttattattccaactgaagagtttgaagaagaagcaaaaaagaaagcacaatactattatgggtccatacagaagtttatgtatgaactacaacgatatgatatagaaccctttttgatgtcttatgataaattaatagacttttgtaaaaaacaagctatagacaaagttgttgttgcaggtgatattatgagttatcatcacgaagaatatgacattttacatcaaaggaaacgatttaaacaagctaatattcaagtaatatcattaagagcaaatcattattttaacccccgcaaaacacataataaacaaggggaaccatataaagtatttaccagtttttatagaaaatggcgtccttacttaatgattagagatgaatatgactatcatttagaagatatttcaaaggttgtagtgaaatctcaacataaaattaaagaagattatcattcatatggtataagtgaacgtgatgttcaaaatcgttggtctgaatttttatctcaagatatcgaaaattataaagaaaacagggaatacttgcctgaagtattaacaagccaactaagtatttacttagcttatggaatgatagatattatacaagttttcaacgatttacttcaaaattatgataaaaatgaacaaaattacgaaacttttatacgtgaattgatttttagagagttttattatgtattaatgaccaattatcccgaaacagctcatgttgcttttaaagaaaaataccaacaattgaaatggtcttataatgaagagaattttaaactgtggaaagatgggaatactggttttccaattattgatgcagcaatggaggaacttaaaacaactggatttatgcataatcgcatgagaatggtagtttctcaatttttaactaaagatttgtttattgactggatttggggtgagtcatttttcaaacaaaaattaatagattatgatgcagcttcaaatgttcacggatggcagtggtcagcttctactggaacagatgctgtaccatactttagaatgtttaatcctataagacaaagcgagcgttttgataataatgcacgatatataaaaacttacattccaagattaaatcaggtagatgctaagtatttacatgatactcataaattcgagcaacaaataaaggggcaaggtgttgaaataggtaaagactatcctaaacaaatgattgatcacaaagaaagtagacaacgtgtaatgtcagaattcaaagcattagattaa

SEQ ID NO: 3840 - DNA, 1557 bp, Staphylococcus epidermidis
atggctaaaggggaccaatatcaagctcatactgaaaaatatcatgataaaaagtctaaaaaaagttataaacctgtgtggattatcattagttttattattttaattacaatcttgttattacccacaccagcaggattacctgtaatggctaaagcagcactagctattttagctttcgctgtagttatgtgggttacagaagcagttacttatccagtttctgcaacattaattttaggattaatgatacttttactaggtttaagtccagttcaagatttatccgaaaaacttggaaaccctaaaagtggcgacataatactaaaaggtagcgatattttaggaacgaataacgcgcttagtcacgcttttagtggtttttcaacctcagccgtagcacttgtagctgcagcattatttttagcagtagctatgcaggaaaccaatttacataaacgacttgcattacttgtgctatcaattgttggaaataaaactagaaatatagtcattggtgctattttagtatctattgttctagcattctttgtaccatcagctacagcacgtgctggtgcagttgtcccaatattactgggaatgattgctgcatttaatgtgagtaaggatagtagacttgcttcattattaattattactgctgtacaagcagtttcgatatggaatataggtattaaaacggctgcagcacaaaatattgtagccatcaattttattaaccaaaatttaggacatgatgtatcatggggagagtggtttttatatgctgcgccgtggtcaatcattatgtctatagctctttattttataatgattaagtttatgccacctgaacatgatgcaattgaaggtggaaaagagttaattaaaaaggaacttaataaattaggaccagtcagtcatagagaatggcgactaattgtgatttcagtgcttttattattcttctggtcgactgagaaagtattgcatccgattgattcagcttcgattacactagttgctctaggtattatgctaatgccaaagattggtgttattacttggaaaggtgttgaaaagaagattccttgggggacgattatagtatttggtgtaggaatctcacttggtaatgtattacttaaaacaggagccgctcaatggttaagtgatcaaacatttggtttgatgggtcttaaacatttaccgatcatagcaactattgcgttaattaccttatttaatatattaatacatttaggttttgcaagtgcaacgagcttagcctctgcgttaatacctgtgtttatttctttgacttcaacactaaatttaggtgatcatgctattggttttgtattaatacaacaatttgtgattagttttggtttcctactacctgtcagtgcaccacaaaatatgcttgcatatggtactgggacttttaccgtaaaggattttttaaagacaggtatacctttaacgatagtaggttatattttagttatcgtatttagtttgacgtattggaaatggcttggtttagtgtaa

SEQ ID NO: 3841 - DNA, 942 bp, Staphylococcus epidermidis
atggtcaatagaagaaagatatcaattattggcgcgggacatacaggggggactctagcattcattcttgcacaaaaggaattaggagatattgtgttgattgaacgccagcaatcagagggtatggctaaaggaaaggcgttagatattttagaaagcggacccatttgggggtttgacacatctgtacatggttcagtaaatatagaaaatattaaagattcagacatagtggtgatgactgcaggtatacctaggaaatcaggaatgacaagagaagaattagttcaaactaatgaacaaatagtacgagaaactgcattacaaattgcaacgtatgcacctcattcaataattattgtattgactaatccggttgatgttatgacatatactgcatttaaagcatcaggttttcctaaagaacgtattattggtcaatctggaattttagacgctgcaagatatcgaacttttattgctcaagaacttaacgtgtctgtcaaagatgtaaatgggtttgttttaggtggacatggtgatacgatgttacctttgataaataacacacacattaatgggattccagttaagcatcttatttctgaagaaaagattgatcaaattgttgaacgtacacgtaagggtggtgcagaaattgttgcattactaggtcaaggctcagcatattatgcaccagcaactgctatatatgaaactatagatgcaatttttaatgatcggaaacggttattaccaagtattgcttatctagagggagaatacggttgttcagatatttgtttcggagttcctactataataggatatcaaggaatagaaaagattatagaggtagatatgaataatgatgagtatcaacaactacaacactctgcgcaagctgtgagtgaagtcaaaaactcactaaaattcaaataa

SEQ ID NO: 3842 - DNA, 294 bp, Staphylococcus epidermidis
atgaatgaagataaccgtaacaaacaaattaaatttgaaagaaacctaatcacttttccatatttaggttttgcctttattgttttgttatttaatattttttatacggatgtaaaaattacaatggtcttatttggtttattctttgcttacaatttaggaatgctttttatagccttcataagacattttaaacgtacacttatattaaccttaatactaacaatattaagtggtatagcattttttgtactactttatgtttttggattaaatcacgatatttttggatag

SEQ ID NO: 3843 - DNA, 927 bp, Staphylococcus epidermidis
atgaaaaataataaaaatgaaaagttgaaaatcacaatcgttagcggtttcctaggcagtggtaaaactacgttcctgacacattatattaatgaattattaaaaattgatgagaaaataacagtaattatgaacgaatttggatcatttgatgtagatggtaaccatttgagtgaattagtcaaagtgtatccattgttgaacggttgtgtttgttgtgatatgaaatcagatttagttcaacaaattgagatgctcagtcacaaccatgaaacggaccatattataatagaagcaactggtatcgcgcatcctattgaattgattatggcgtgtcaagatcctcgcatagttcagtttgttgaacgtccccacgttgttagtattgttgatgcacttcgctttttacaaagacaacagtatactgactccacaaagcgtctcatggaagaacaactcgaggtaagcgatgtgctcgtcgttaataaattagatttaatatctgttgaagacagagatgctttaaagaaccaacttaacgaagtaaacaaatatagttcaaaaatatatactacttatggacaagttaatatcgaggagttgtcacaatttcgtgatcaattggtaatgacacacacacattctcatcaccatggtataaatagtatgcaatacacatttacaacagctattgaccgacaattattttaccaatttattttgcgtatgcctgataatgttttaagattaaagggatatgtacaatttaaagatgaacccaatgtgacatatgagtttcaatattcatttggtatgccggattatgttgttattaatggggattatccgttaacaatagtattgattggtgaacaacttgatgttaacagactaaaaaataaactcgatgttttgcaattctcataa

SEQ ID NO: 3844 - DNA, 444 bp, Staphylococcus epidermidis
atgtctgaacaacataatttaaaagagcagctatgctttagtttgtacaatgctcaaagacaagttaatcgctactattctaacaaagtctttaaaaagtacaatctaacatacccacaatttcttgttttaacaatattatgggatgaatcacctgttaacgtcaaaaaggtcgttacagaattagcacttgatactggaactgtatcgccattactcaagagaatggaacaagttgatttaatcaaacgtgaacgttctgaagtagatcaacgtgaagtatttattcacttaacagacaaaagtgaaatgattaggcccgaattaagcaacgcatctgagaaagttgcaaccgcttcttctttatctaaagaagaggtcaaagaacttaatcgcttattaggtaaagtcatcgatgcatttatcgaaacaaaagaaaagtaa

SEQ ID NO: 3845 - DNA, 1695 bp, Staphylococcus epidermidis
atgaaatcacatattcattttagtatagatagagatttaatatgcgctatcatggtaggtgttttaggcggaattgtaacattagcaatgttctttttaagtggttatatgattactcaaagtgcgctaggtgcgccactctatgcattaatgattttagttgtatctgttaaattgtttggttttttaagagcaattacacgctatatagaaagattactttcacacaagacgacatttacaatgttacgtaatgtacgagttcaatttttaaaaatgctatatccagtcgttccagatatctatagaagatttaattcaagtgatcttattacaaaaatgataagccgtgtagaagctttacaaaacatatatctgagagtatattacccaccgattgtaatcggattaactgcaattgtttcagtaataactatgttgtttttatctccactacatgcattagtgattactttaagtatgttattaactttatggattgttccttggttaagtgctaagaaagcgcgtaaattaaagcaacaagtgacccaaacgcaaaaaacatttcttaaaagatattatgattataaagaaggtcatgaagaattaaaacgtttcaatcgcagcgatgacttcaaaaatacagtttcccagtctttacgacaatttgatgatatgcaacttaaggaacgccgatttctttctatttatgactacttgttaaacttaattgcgatgttctcaatatttatgtgtttaatgttaggtgcgcaacagattcatgatggtcagctcaatgctatttatattacaagtattatattgatgatattaactttatttgaacaagcagtacctatgagcaatgtggcatattataaagtagatacagacctggcacttgaagagatacacgaggttattgtacctaagtataaaattccttcagaacatacaaacttaaagcgttcgcaaaatcttttattagaaattaaaaatgtcacatttaaatatgaacatcaacatcattctactttaaaacagattaatctaaccattgaatatggtgataaggtggcaatcatcggtccttcaggatcaggtaaaagtactttacttcatgtattacttgggctatatcaaatagaagaaggagaagtgagattaaatggtaaggatatgaacagtatcaatgacaatgataaatatcaaacatttaatgcaatgcttcaatctcaatatatttttgatggttcaattcgtgataatttattttctgagcaatcagatgataagctccaaaaggttctcgaagatgttggattagaatatttaaatttagatagtatagttacgttagacggtcataatttatcaggtggggaagctcaacgtctaagtttagcgagattgctattaagaccttcggccgttttttggatattagatgaacctactacagcactagatattaataatacccaaaaaattataaatttgattgaatccttatcccaaacactcatcatagctacacatgatttagaaatacttccaagatttaataaaattatagtcatgaatgacggagaaataatagaaaatggttcatatcaagaattaatgcagcatgacggttatttaaaaaaagtaatagaaatgaatggaaacgaaatgaaattttttaattaa

SEQ ID NO: 3846 - DNA, 1635 bp, Staphylococcus epidermidis
gtgaaaaaactaacaaaaatggttttaagttataaattataccccgcactcatgttaatcatgagcgtttttttatcttttacggtcgttgcgcaaaacatttcaatttcacactttttaaatcacttactgtattatcaacaacaatctttattattattgttatcagttatttttatctcccttattttaagagcaacatttaatatgctgattcaatttttaggagatcatttggcatttaaagtaaaacatatgcttagagaacaagtgattttgaaaaaaagtgtccgttcaattggtgaagaaataaatattttaactgaaagtattgatggtatcggtccgttctttcagagttatttacctcaagtctttaaatcaatgttgattcccatcgttattattattaccatgtgttttgttcatttacctactgctattattatggtagttaccgcaccttttattccattgttttatgttatttttggacttaaaacaagagatgagtcaaaggatcaaatgacatatttaaaccagtttagtcaacgttttttaaatacagctaaaggtcttattacatttaaacttttaaatcaaacgaaacaatctgagcaacaactttataaagacagtacacgttttagagatttaacaatgcgtattttgaaaagtgcctttttatcaggacttatgcttgagttcataagtatgttagggattggattggtcgcattggaagcggctttaagcttagttgtatttaaccatatcaactttgtgactgcagcgatagcgattattttagctcctgaattttataatgcgattaaagatttaggtcaagcatttcatacaggtaagcaaagtgaaggtgctagcgatgtggtgttttcatttttagaatctgaagataaagctgattctcctacattaaaagtggatgagcaacagtttgaacaagttttaattaagcatgttgattttcaatacgctaatagtaatcatatggctttgaaaaacatttctttttcggtaaataaaggagaaaaggtcgctattgtgggaccgagtggtgcagggaaatccactttagctaagttgcttagtcaatcagtaacacccacacatggaacactttcatttaaccaagcatcattaaatatcggatttctaagtcagcgcccacatatatttgcagattctatcaaaaataatattgcaatgtatgatgatgagatatgtaatgagcaagtgattcaagtgcttgatgaagtggggttaaaagagaaagtactttcattaaaatatggtatctatacttctattggtgaaggtggggaaatgttatcaggtggacaaatgagacgtattgagttaagtcgtttattattattgaaaccagatattgttatttttgatgaaccagcgataggattagatattgaaactgaaaaggtcatacaacaagtattagagcatcatttttctacaacgacagtgtttattattgcacaccgtgattcaaccattcgaagtttagtacggcgtatatatctcgaaagtggtcatcttataaaagatgattcgataatttctgttacgcgtagtgaggtgaagatagatcaatga

SEQ ID NO: 3847 - DNA, 873 bp, Staphylococcus epidermidis
atgtttttacttgaattaataaaaggcatcatcttaggtatcgtagaaggacttaccgaattcgcccctgtttcatctactgggcacatgatacttgtcgatgatatgtggttaaagtcaactaattttctcggttctcaatcagcattcacatttaaagttgttatacagttgggttcagtatttgcggccgcctgggtatttagagaacgcttcttagaaattttacatattggccaacataaacctgaaccttccacttcgggagacagacgttcaaaaccacgacgtctgaatttaatacatgtattagtaggtatggtcccagcagggattttaggatttttatttgatgatttaattgaaaaatacttatttagtgtaccaacagtcttaattggtttatttataggtgccatttatatgattatagctgataagtattctaaaactgttcagcatcctcaaacagtagatcaaattaattatttccaagcatttgtcattggtatctctcaagcaatagctatgtggcctggatttagtagatccggttcaacgatttcaacaggtgttcttatgaaattgaatcataaagctgcatctgatttcacttttattatgtcggtaccaattatgttagctgcaagtggattatctttactaaaacattatgagtatattcatttagcacacataccattctacattttaggatttttagcggcatttattgttggattaattgcaattaaaacattcttacacttaattaataaagttaagttagtaccttttgctatttatagaattgtcttagttatttttatagcaatcctatacttcggattcggtattggcaaaggaatttaa

SEQ ID NO: 3848 - DNA, 465 bp, Staphylococcus epidermidis
atgaaatataagattgaaaaattggatgacagtagcgtcgtttatatgagaatgataggtacttatcaaagtgataaaaactttgaaatgatgaagacttttaagcattggattcagactaatcattattggaaatatgttgagaaatacggtgtgttaggtatagcattagataatcctctccacgttcaaagtaatcaatgtagatatgacgttgttttgagaatagatgaaacagtaaatgatcagacaatatctaaaagagattttacaggtggcatatatgctgtgtttaaagttagtcatacaaaaataaatatagagaagttctttagcaatttagaaaatattttaaatgaaagtcatttgcgtatgagaaatgaaccaattatagagagatacattgaagaagagggaacagataaagtgtgtgaaatgttagtgcctatctatgaagtaaattaa

SEQ ID NO: 3849 - DNA, 681 bp, Staphylococcus epidermidis
atggacaaaaagaaactcattaaaacacttatcaatgtattaccaatcgttatcgtaccattagtaactgaacgtaagcgtattaaagaacatccagatgtacagaaagtaactaatgctacatctaaagctacttcaaaaacaacttctgcaatttcaaataaagcttcagacgtcaaagagtacgtaggagataaaaagcaagaatttgataataagcgtgaattgaagaaaattgcgaaggaaaatgatccagcctacattgagaaaaaaggcgaaaaattagctaaacaaaatcgtaaagaagcagacaaaatggacaaaaagcttcaaaagaatattgagaaacgtcataaagaagaacaaaaacaacgtgaagctaatcagaaacaacgtattaaagacatgaaaaaaactcaaaaatacgaagagcaagttggcttaactcctggtaaaatagatgacgaaattgagaaaaaaggcgaaaaactagaaaaagataatcgtaaagatattaaaaaattagataaaaagcttcaaaagaatattgaaaaacgtcataaagaagaacaaaaacagcgtgaagaagcagagaaagctagaaaaaaagaatttaaaaaatatgaaaattacgtagctgacagtgtcgtaaaacagcataaggaatcaaatcattcttaa

SEQ ID NO: 3850 - DNA, 450 bp, Staphylococcus epidermidis
atgaagactaacgtaattatagatggagatgcttgtcctgttgttaattctgtcattgaattgacgaaagggacaggcatttttgttacaattttaagaagttttagccatttttcacaacaaatacaacccgaacatgtaaaaactgtatacgttgatgacggtcccgatgcggtagactataaaatagtcgaacttgctagcaataatgatatcgtcatcacacaagattatggacttgctagtctactgatagacaaagtacatactgtcatgcatcataaaggaaatatttatcactcaaacaacatccaaagcttattagatcaaagatatctaaatgctcaaataagaagacgaggtggtcgtcacaaaggccctcctcccttcacaacagaggatagacttaaattcgagcatgcttttagaaaaatcattaatcaaatatag

SEQ ID NO: 3851 - DNA, 567 bp, Staphylococcus epidermidis
atgaaaagaattgctgtttattgtggtgcaagtaaaggaaaaaacccctcttatgttaaagaggcatacgaattaggaaaatatatggctgaacaaggatacgagcttgtattcggagcaggatcagtcggcattatgggagctattcaagatggcgtacttgagcatggcggtaaagctatcggtgtcatgcctaaaatgttagatgaacgagaaataacaagccaaaaagtaagtgagcttatattagtagattctatgcatgaacgaaaaaataaaatgactgaacttgccgatgcttttattatggctccaggcggtgctggttcattagaagaattttttgaaatgtatagttgggctcaaattggtatacaccaaaagcctataggtgtatttaatttaaatggattctttgagccactacaacacttaatcgaccatatgattaaagaaggatttattgatgagaaatatcaaaagcttgcacctttatatgatactaaagaatcactcatcgaaggacttaaacattacaaaccacttggtgtacgtacatacgattaa

SEQ ID NO: 3852 - DNA, 549 bp, Staphylococcus epidermidis
atggttatttatattgaaactgaacgtttaaacttaagagattgggaaaccaaagatttattaccttttcaaaaaatgaatgctaatacgcaagtacgtagatacttccctagtttacttagttatcgtcgttctgagatagacatggaaaatatggataacataatacaagagagtggcctaggtttatttgctgtagagttgaaagagacgggagaatggttagggtttataggtgtgaattacgtttcaaaagatagccattacccttttaaagagttaccgttttatgaaataggttggaggctaattccagaagtatggggaaatggtctagctacagaaggggcagaagccgtaatgaaatatgctagagataaaggaattaaagaattatatagttttacttctgaaaataatttgccttctagaaaagtcatggaaaaattaggaatgacttttttagacaattttgaatatccgaatcttagtaaataccatccccttaaacgtcatgtaagatattataaagagctacttccctcttga

SEQ ID NO: 3853 - DNA, 297 bp, Staphylococcus epidermidis
atgcatgaacaagattttaatattctagaaggtaaaaagatgacattagtagaattaggtcgtgagttagagaatctaactggtcgtactattaaagatacaacaagtgatattaaacgagtcattgcacatttgcctaactttgaatcagatacagatacatttgtagcaacataccaccttaatcatcaaaatgattttattgatgcaacatttgttgcacctaaaaatcaaagtgatcgtttgaaagaaataccggtacacattaagttgattagttatatttctaaaaactaa

SEQ ID NO: 3854 - DNA, 423 bp, Staphylococcus epidermidis
atgagaaaatggttaaccttactattaattacaacattggtgttaactgcatgtggtaaaagtaacgaaaaagcttctttagaaaaaagcattgatcagttgaaaaaagaaaataaggatttaaaaaaacagaagaaaaagttacaagagcaaaaggataagcttaaacacaaacaggatagtctccaagaagatgtaaatgaattgcctgctaaaagcacatcccgagataagaaaaataaagataatcatgatgcaaaagaaaagtcttcagataatcaatcgacatctgctaatcatgatgatcaaactaacaaaataaaaagcaatcaagatgaacatgacagtcaatcctctaaaccacatacacagcagaagccctcacagaatgatagaaaaaataatcatcgacaagaacgatag

SEQ ID NO: 3855 - DNA, 690 bp, Staphylococcus epidermidis
atgaaatccactgcgcaattaacaaaggagaataatgtcaaagctttgcgactgaacaataccgatcgtgaaatatttgaaaattacatgacatatgtgcgtgctgacttacgagttaaccctcacgattcagaattaatgttaaaccgtactttgaaacacttaattcgtgcaggtgatactggaatgcttgcgatggagtttttcaaccatgatcctaaagcacatgctaaaaaagagataagggaactcccaaatgaaacatttaaaaacatttttaaatatataagtcataacttcattcttttaataggtattttttgttttctcaaaggattgattggcttttttatagggggcgatagtaatttactatatttatatacgtttcccctaactgtcattattggtttagtaattatatttttatttatttggatgaactttaaaacggtacaattacagtgctttaacaactcttattggacctggtggctcacctatggtgtcatcgcattattattaatcactcttttttatgttttttttataccgcaatcatttttagcgtttggaccatatattaaagttagtaattggactttcatcattattgcgataataatcatccctatttcattttatgtgaatcatcacttttataataaagaagcaaatacacgcatataa

SEQ ID NO: 3856 - DNA, 489 bp, Staphylococcus epidermidis
atgacagcgatattatggattttaattattatagcctttgcgttagcatttattggtttaattaaaccggtgataccatcacttttaatgttatggattggttttttaatttatcaatttggttttcatgatggtagattatcgtggattttttatgttgcaatgatcatctttaccattatgatattagtagctgattttgtgatgaataaatatttcgtcaatcgctttggaggaagtaaaataggtgaatacacagcgctcataggtgtgattgtaggttgtttcgtttttcctccctttggtattatcattattccttttgttgctgtgttcattgttgaattggttcaagggtttaactttcaacaagctataaaggtgagttttggctcagtgattgcatttttagcgagtacaattgctcaaggtctaataatgattgtaatggttatttggttctttttagatgtctttctaataaattaa

SEQ ID NO: 3857 - DNA, 1158 bp, Staphylococcus epidermidis
atgttgttactaggtatgggaatagcagtgactgtaccttatttaattttatttgctacaaaagatttggggatgacgacaacacaatatggactgctacttgcacttgctgcgataagtcagtttatagtcaattccattattgcaagattttctgatacacatcaccttaatagaaaaattctaatcatcactgctttgtttatgggggcagtgagcttctcaatttatttctacgttcatcaaatatggttattcatcgtgttatatgcgttgtttcaaggattatttgcaccagcaatgccacaattgtatgcctctgccagagaatcaatcaatgcttcaagttcacgtgatcgtgctaagtttgctaatactgttttacgttcaatgttttcacttggttttttatttgggccatttataggtgcacaacttattgagttaaaaggttattctggattatttggtggcacaatagctattattttatttactttaattttacaagtgtttttttataaaaatttaccggtaaaaaatcaaacttctgaacaacagcatattgagaaaatcgcaccaaatatgtttaaagataaatcattatttattccatttatagcgtttatattacttcatattgggcaatggatgtatacgatgaatatgccactttttgtgacagattatttaaatgaaaaggaaagatatgtaggctatttagcaagtttatgtgcaggtttagaagtgccgtttatggttatattaggtatattatcagctaaattgccaacacgaactttattgataattggttctgtatttggtggcgcattttactttagtattggtgtatttaaaaattttcatatgatgcttgttggacaaatatgtttagccatctttctagcaatattactaggtcttgggattagttattttcaagatattcttcctgattttccaggttatgcatcaacactttttgccaatgccatggtaataggacaacttggtggtaatttgctaggtggtgtgatgagtcattgggttggtttggaaaatgtattctttgtctcagcaagttctatcttcgtagggatgatactcatcttgtttacgaaagatcaaaaaattacaatagaagatgtggagtag

SEQ ID NO: 3858 - DNA, 855 bp, Staphylococcus epidermidis
atgaaaatagatgattatcgtttgctcattactttagatgagacaaaaactttacgcaaagcagcagaaattctatatatttctcaacctgcagttactcaacgtttaaaggcaattgaggctgcatttggagttgagatttttattcgtacaaaaaaacagctcattactacgactgaaggttcaatgattattgaacatgcgcgtgatatgctcaaacgtgaacgcttattttttgataaaatacaagcacatattggtgaagtgaacggtacaatttcaatcggttgctcttcgcttattggacaaacattgcttcctgaagtattaagtctttataattcgcaatttcccaatgtggagatacaggttcaagtaggatctactgaacaaataaaagcgcatcatcgagactaccatgtgatgattacacgtggaaataaagtaatgaatttatcgaatacacatttatttaatgatgaacattattttatatatcctaaggatcgtaaggaagatgtaactaaactgccttttattgaatttcaagcggatccaatttatattaaccaaattaaacaatggtataacgatcatttgggacatgattatcacgcgacaatcacagttgatcaagttgccacatgtaaagaaatgttgcttagtggtgtaggggtaactatactaccaaaaattatgatgaaaaatatcgataagaacatgtttgaatttgaaaaagtcactattgataaaaagccacttattcggtcaacatacatgagttatgacgcaagtatgctacaacttcctcaagtagacgcattcgtaaatttaatgttgaactttattagataa

SEQ ID NO: 3859 - DNA, 594 bp, Staphylococcus epidermidis
gtgaaagtaaaatatatagacaaacgtcactggcgtcgcctggtagagagagaatatacagaggttaaagttaataataatagatttaaaggtattataggcttggtcacgatgaaaaaggttcgtgagcctttagaggtgacggtagttggacaaaacataatagttgcagatgacaattataaatggttacagatactaccggataagaagcggtatagtatgactgtcatgtttgataataaagggaatccattagaatactactttgacattaatataaagaacattactcaaaaaggaaatgcacgtaccatcgatttatgtttagacgttctcgttctacctaatggtgagtatgaacttgtagatgaagatgatttaatgtacgcactacaaaataaacaaatttcaaagaagcaatatcatgaggcatatattatcgcccatcaattaatgattgaaatagaagataatttttcagaaatacaagataaggttatgcgttgttatcataaaatcaatcataaagcacagaaaatgaaacataaacgtccctataaagctaaaaagaaatcacaccgacgacattaa

SEQ ID NO: 3860 - DNA, 186 bp, Staphylococcus epidermidis
atgaaaatgaatccaagatatgttaaagtgttttttctatatttagtaagcacatttatttctaatcgcttaacaacgaataaatctttatgcaaaacattaatgcaaggcattttaggttatggtttatttgcattaggattaaagtatttaactattaagaaaaaacaacatcaagcgcaatag

SEQ ID NO: 3861 - DNA, 1146 bp, Staphylococcus epidermidis
atgctaactgaaaaagagcaagatattatcaaacaaactgtaccattattacaagataaaggaactgagattacttcaattttttatcctaagatgtttaaggctaacccagaattattaaacatgtttaaccaaacaaaccaaaagaaaggtatgcaatctgctgcattagcacaagcagtactagctgcagcaatgaatattaataatttaggtgcaattaagccagcaattatgcctgtggcacataagcactgtgctttacaagtttatcccgaacattatccaattgtaggtgaaaatttacttgctgcaattcaagatgtgacagggttagaaagtgacgacccagtaattcaaacatgggcaaaagcgtatggagaaattgcagatgtatttatcaaattagagcaagaaatttacaaccatatgttatggaaaggttttaaaccatttaaaatcacaaacattacacaagaaacaagtgatatcaaatctttcacagttgaatctgaagaatatgatttaagtcaattcgaaccgggtcaatacattaccgtagatgtttctagtgaaaagttaccatatagagctaaacgtcattattcaatcatagatggagatgaaaatcacttagtatttggtgtcaaacgtgatgtgactactgaacatgaaggtgaagtttcaacaattttacatgatgaaatatcagaaggtgacatgattaatttatctgctcctgtaggtggtttttcaatagaaaatactgaaagaccgcaattgtttattggttctggcgtaggtatgacaccattagtttcaatgtttaaaaaagctgcatcattaaacgttccaactcaaatgattcaagcggttgtgacagaagatgaacgaccatttgctcaaaaacttgatagcattacagataattatgagcaagcacagctacatttacacgtgaaagataaagaaggttatttagaagctaaagaattagaacaatatttaagtgaacagcctgaaatttatatttgtggtggtacgaaattcttacattcaattataaattctcttaaagaattaaattatgatatgaatcatgttcattttgaaacatttattcctcgtttaagtgttcaagtatag

SEQ ID NO: 3862 - DNA, 675 bp, Staphylococcus epidermidis
atgattacaaaagaagatattgttgcagatgttgtaacagattatcctaaaagtgcagatatatttagaaatgctggaatagatttttgttgtggcggacaagagagtatcgcttcagctgtcaattataaaccaaatattgacttaaattccttattaaataagttgaatcatattgataatacagaaggtaacagtaccattaatcctaaatttttaaatgttgaatctcttatacaatatatacaatcagcttatcacgaaacgcttaaagaagaatttaagaatcttacaccttacatgactaaattggcaaaagtacatggtcctagtcacccatacttattaaaattacaagacttatatcgcgagtttcgtgatagtatgttggatcatatacgtaaagaagatgaggaagattttccaaaactcattcaatatagtcaaggacaagatgtacaaaacattaaaatcatattagaagatttaattaatgaccacgaagatactgggcaattattaaatgttatgaatcaactaacctctgattatcaaaccccagaagaagcatgtggaacatggaagcttgtttaccaaagattacaaaatatcgaacgtcaaacacaccaacatgtacatcttgaaaaccatgtgttatttaaaaaggtaagttaa

SEQ ID NO: 3863 - DNA, 477 bp, Staphylococcus epidermidis
atgatgactgctaatgattggatagaccggttggaattaatttcgcatcctgaaggcggatattttaaagaaacaatgagaggcgacggtaaaggaagagcgtcttttagcagtatttattttctattaacacagcgcgatatatcacattttcatagaatagatgcagatgaagtatggtattatcatgctggtcagacgttgaagattcatatgataacccctaaaggtgaatatcatactgttaaattaggtagagatatagattgtggtgagtgtttacaatattgtgtgccaaaagggacaatttttgcttctactttagatagtgcagagggatatagtctagttggatgtatgtgtcaacctggatttgaatacgagcattttgaacttttaacacaagaatatttgattcgtcaatatccacaatatgaaagcataataaaaagattagctatatctcaagaagattaa

SEQ ID NO: 3864 - DNA, 717 bp, Staphylococcus epidermidis
atgggacgtaaatggaacaacattaaagagaaaaaagcccaaaaagataaaaatactagtagaatatatgccaaatttggtaaagaaatatatgtagctgcaaagtctggtgagcctaatccagagtcaaatcaaactttaagattagtattagaacgtgcaaaaacatattcagtacctaatcatattatagatagagctattgataaggctaaaggcgctggtgacgaaaactacgatcacttaagatatgaaggttttggtccgaatggttcaatgcttatagttgacgcattaacaaacaatgtaaatcgtacagcatcagatgtacgtgctgcgttcggtaagaatggaggaaatatgggagtatctggttcagtagcttatatgtttgaccatactgcaacctttggtgtagaaggtaaatctgtagatgaagtcttagaaacactaatggagcaagatattgatgtaagagatgtaattgatgacaatggcttgactattgtttacgcagaaccagatcaatttgcacaagttcaggatgcattacgtgaagctggcgttgaggaatttaaagtagcagagtttgaaatgttacctcaaactgatattgagttgtctgaagaggatcaagctatttttgaaaaattaatcgatgcacttgaagacttggaagatgttcaaaatgttttccataatgtagatttaaaataa

SEQ ID NO: 3865 - DNA, 360 bp, Staphylococcus epidermidis
ttgaatgagcagaaattaattaaattactagaattttacaaacaatataaagcattatctggatatatagataaaaaatataagttgacgttaaacgatcttgctgtactatatttagctaaaaaatattgcttagatgagcgaattcttatgcaaacttttctaaaactggctacaggagagttagatattagtagaactaagattttgatgtctattagaagattgatagacaaagaaaagttaaataaagtaagatcgaatagagatgaaagaaaaatttttctatatatggatgaaaataatatgagtgaatttgatgctttatttgaagatgttgaaaaattcttaagttattaa

SEQ ID NO: 3866 - DNA, 2175 bp, Staphylococcus epidermidis
atggcaaattcttgtttgcatatactttcaaaaaaagaatatacggcaacacgatgtcaagacggcattttattattttggcctatcgaagggagtatgcactttcaacaatttatgaaagaaaggatactctcagatgagttatatattgtgaataatatggatgtgtttagtatcagtgacaatggcatcacactagaagtatatatttctagtgattggtttacagagttaggctattctttttttaattaccattatatttcggatttaatacaatctaagaaagaaattaaagaactagttgctcaacttacgttgaattttttagataatgatgtggataaagagcaagatattatcaataaaattgttcatattcttgctaatgaggctattattgacaaaaaaattgctgaagaccaatatatgtatgattattatggtgagttaaaggatgaattgaattatatatataatcacatcgaagaaagacttactctaaaagatatttccaataaattatatgtttctaagtccaacctttctacgcagtttcatttgttattaggtatgggatttaaaaaatatatagatacacttaaaattagtaaatctatagagatgctacttacgacaactaaaacgataagccaaattagtgaaacgttaggatttagtaatgtatctacatattctagacaattcaaaaattatttaagtgtaacgcccaatgcatatcgtgcaatgaaaaaatatgataagtacaatggatgttctgatgatgatgtttcagaacacttaaaatcatgtgtacaatcattaatatgttctaaaatgccaacgaatgagttagataattatgatgaaattgttattgaccaatatccaatttctaatgtttcaacgttttattctgtcgttcaaattaattcaattgatgaaattaaaatgttgtttttgcaaggtattcataaaaaaatagggtatgaaggttcaaatattattttttgtattatgcctaacttatgccaatataagaatttgttctctcaagaagagatgaatgatatcattaaaattattattgaatatcgcttgcacgtcgcatttagcatcgataaaatcgagcaaatatatgaacttaatcaactttttacatatcaatatgaaaacttaaaaattatgaataaatgttctgtttcagattacaatgtgcaatttatatttaatttgaacgaaaaaagtattcgagaaatttatcgtaatatcttgaagatacaaaacatcgaattggaatataaaataggtttagatattagttgcatgtttaatgacactgcacaatttaaatcattagcttcgcaaataaagcgtttaaaatttgactatctttatattgataatgctagattaaagtcaccctatttacttgataatgaggaaggtttattactcaaaaatattctacaatttaagcatttaatagatgatttaaagcagtttgattttagtagtgaaaatttaatttttctaaatttatataatcatcaattactgaataataatgaaattgatttaagtaatagcgctccattactatttaaaacgatttcaaaactaaaagaacattttaaaggctacggattaaatgtattttcaaatcctaaagtctttaacgctgtacatttatttgatgagaatgggtttaaaacaacgtttggactgatttttaatcatttgagttggatgactaatcaaaaccaaattgaacaacgattctataatattattgaaaatgctgatcaatattatctctacttatatgattggcgtgtgattgaaagtgaatctaatgagagcgactttaaagacgttgatatatggattaactttgaagatgaagcgttaatagatgaatatatttgtgtgattgctaaagttgatgatgaaggtggcaatattaatcatatgatttctcaaaacttacgtcacaaatatgtttggtctacaccgttcttgatgagagttgaggagaactttagaccatacatgcacattatggaacatgactttaaaaagggcccattgaaaatcagaatgaaatataatgcagtatatttagttgaaatatataaaaaagataaaataaataaaaggcgtggcacaacttaa

SEQ ID NO: 3867 - DNA, 660 bp, Staphylococcus epidermidis
atgtcacaatcgacacaccaatcaactgatcataaaagacaatctcaagataagaaccaaacacatgcctatgcaaaagtttggttatattttatgtattattggatgatttttgggattggttgttattttggacaatatcttcctatgtcatggagaaaaccattgtctctaggattgttaattctgatattagcaacgttgtttattaaacgtgcgcgaaaatatggattagtgatctctcatatatacgctattattgtaggtttgctttcgtatgctctttttacgacttacttacaaaatttaggagcagaagtattctataaaaatattattcttgctattggtgcatttatagcttttggtattataggttactttttaataaaagacgcttcgagtatgggaaaatatttgtttgtgacattaattgcgctaattatagctgggattatagggatatttattaataatccaatttttcatactgtcattacaatagtgagcttattattgtttctcctttatactttatacgattttaatagaatgaaaagaggtcaattctcaccaagagaaatgggatttaatttgtttatcaacttattaaatatcatcgaagatatacttagtttagcaaatcgctttaaaaactaa

SEQ ID NO: 3868 - DNA, 801 bp, Staphylococcus epidermidis
ttgaaaaagttagcctttgcaattacagccgcttcaggcgcagcagcagttctatcacatcatgatgctgaagcttctacacaacataaggttcaatctggagaatccttatggactattgcacaacaatacaatacttcagtagaaagcattaagcagaataataatcttagcaacaatatggtattcccaggacaagttattaatgtaggtggaagtgcttcacaaaatactagttcaaacacttcttcaagttcagcatcttcacatactgtagtagcaggtgaatcattaaacatcatagctaataaatatggtgtttcagttgatgcattaatgcaagcaaatcatctaaatggttatttaattatgcctaaccaaatattaactatccctaatggtggttctggttcaggatcaggtggtacagcaactcaaactagcggtaattatacttcaccttcattcaaccatcaaaacttatacactgaaggtcaatgcacatggtatgtgttcgacaaacgttcacaagctggtaaacctatcagtacttactggtctgatgcaaaatactgggcgtcaaatgcagcgaatgatggttatcaagttgataatactccatctgttggtgcaattatgcaaagtacacctggaccatatggtcatgtagcatacgttgaacgtattaatggtgatggtagtattttaatttcagaaatgaattatgcaaatggtccatacaatatgaactatcgtactatcccagcttcagaagtatcttcatatgcatttatccactaa

SEQ ID NO: 3869 - DNA, 1011 bp, Staphylococcus epidermidis
atgtcatatattttaattgtcacgatagctatagttatattttcattaatatttgactttatcaatggtttccatgatacagctaatgctgtagctactgcggtttctactcgagcattaacaccaagaagagctattttattagcagcagtcatgaactttattggggcattgaccttcacaggtgttgctggaactattacaaaagatatcgttgatccattcaaattacaacatggtttagttgttgtgttagcagctattattgctgccattatttggaatttaatcacttggttgtatggaataccaagttcatcttctcacgcactaatcggatctatagcgggtgcagccattgcatcgcaaggttcgtttgcagtattacactatcaaggttttacaaaaattattatcgtattaatcatttcaccaattatagctttttgtgtaggttatatgatgtatacgattgttaaaatcgtttttaaaaattcaaatttaacacgtactaatcgtaattttaggtttttccaaatctttactgcagcattacaatcattctcacatggtacaaacgatgctcaaaaatctatgggtattatcacattagctttaattgtaggtaatttacaagatggtagtaatgttgaacctcaagtatgggttaaagttgcgtgtgcaacagctatgggattaggtacagcagtaggtggttggaaaatcatcaaaactgttggcggaaatattatgaaaattagacctgctaacggtgcagccgctgatatttcttcagcattaacgattttcgtagcgtcatcattacatttcccattatctactacacacgttgtgtcttcatctattctaggtgtaggtgcttcaaatcgtgcgaaaggtgttaaatggagtactgctcaacgtatggttgtaacatgggtgattactttacctatctcagctgttttagcagcaattatttattttattattcatctgttcttaaaataa

SEQ ID NO: 3870 - DNA, 648 bp, Staphylococcus epidermidis
atgacaatcgctcaaaatggaggatttttaatgtttagtaagaaaaaggataagttcatggttcaattagaagaaatggtattcaatctagaccgtgcagctattgaattcggcaaaatggacttcaatacacacttagatttgaaagcttattctgataatattaaaacgtatgagtcacatggtgacgaacttatgcatcaagttatttctgatctcaaccaaacattcattacaccaattgaacgtgaagatatcttatctttatgcaatgcaatagatgatgttctagatgctatggaagagacatcagcaatgtttgaaatgtattcaattgaatatacagatgagtacatggctgaatttgtagaaaacatacaaaaagcagttgccgaaatgaagctagctgtaggattacttgtagacaaaaagttatctcacatgcgcattcattctattaatattaaagaatttgagacaaattgcgacggtatcttaagacagtcgatgaaacacatcttcaacagtgaaacagatccaatcacattaattaaaataaaagatatttatcaaagcatggaagaaatagcagataagtgtcaagctgttgctaataattttgaaactataatcatgaaaaatagctaa

SEQ ID NO: 3871 - DNA, 1890 bp, Staphylococcus epidermidis
atgagctttaatgaaattatcttcaaaaactttaaacaaaatgtgacgcactatgctatttatttattatctcttgttatcagcgttgtattatattttagttttgtaactttaaaatatgcgcaccatttacacggtaatcaatcgtttcctgccatcaaagaaggttcacaagtaggaagttattttttatttatcattattgtggtctttttgctttatgctaattttttatttttgaaaagacgaggtcgtgaactatcgttattacaaattattggtctaacaaagaaagatatcatgaaaatgattatgttggagcaattgatgacatttatgatgacaactattgtaggtatcatattgggaatctttggttcgaaaattttactcatgattgtattgcgattattaggaatcaacgtgagtgtttctattatatttaattatcatgccattttagaaacgttattattaatagctgtgtcatatgtacttatagtctttcaaagctatgtatatttacttaaacgttctattaaagagttagcgtctgatgtaaataaaaaagagttcagtcatacacgcacaacacttggtgaagttgtattaggtttgctagggattattatgatagttagtggttatataatgtcgactaaattagtagataacgtagaaacaattattcaaccttttgctattttatttttaactgttataggatcatattttttctttagaagtacagtttcattgatatttaaagcgatacagcggttgagaaatggaacggtaagtgtcacagatgttatgttcacatcacctattatatatcgtgttaagaagaatgcattttctctaactgtaatgactgttgtgtcagcaataacagtttctgtattatgttttgcggcgttaagtcgtagtacgttaacaaatgaagtgttactgagttcaccacatgatgttacgttaaagaatcagaaacaagcaaatgaacttgcttttaaattaaataaccgtaatattgaacattactataattataaagaggtcgtgtatgcaaaagtttataaagatcatctttttagcgaaggtgtatatagaccgaaagaaatcacagtaacgagtgataaatatattccaaatgtaagtacgaaaaaagggcagacagatattattatacctagaggatctctcaaagatgttgttaaaacagacaaaaaaaggacggcttatgtaggaagtaagaagtttcgtttaaaagtaagtttgagaaaagggataaataaagtctattttatgtctgatgttgatcgtggtagaccgacacttattttaaatgatgaagattatcaaaaaattagagaacatataaaagaaaagaatattgtttcccaatatggttttgatcttaaaaataaaaatgatttaccagaattagaaaaattagttagtagtatcaatgaagatatagaaacaagaagtgaagcggcaagtgaaatttctagtttaactggtattttattatttgtgacatcgtttttaggaattacatttttaatcgcagcaggatgtataatttacattaaacagattgatgaaacggaagacgaacttgagaactacacgattcttcgtaagctaggatttacgcatcaagatatgtctaaaggtttgaaacttaaggtaatatttaattttggtttacctttaattattgcattactgcatgcatattttgcttcacttgcttatatgcatttaatgaatgtgacaaatcaaatacctatttttatagttatggcagtttatacagcaacttatgcagtatttgctattatagcttataatcattctaaaagaacaattaaacattcgatataa

SEQ ID NO: 3872 - DNA, 762 bp, Staphylococcus epidermidis
ttgtcgatattagaggtaagacagttgtcaaaagtctatggtgataagcaagctttccaagaagttttgaaagaaattaatttagatgttgatgaaggtgagtttatatcaattatgggaccttctggttcaggaaagacaactttattaaatgtacttagttcgattgattatatgactaaaggatctattacaatcaacgggaaacaacttgagaagttatctaataagcaattatctgatattagaaaaaaagatattggatttatttttcaagattataatattttaaataccttaaccgttaaagaaaatatcatgcttccactatcagttcaaaagttagataaacaaataatgcatgaacgttatcaacgtatagtagaagctttgaacattagtgatattagtgataaatatccatcagagttgtcaggtggacagcgtcaacgtacctcagcagcaagggcatttattaatttaccttcaattatatttgctgatgagcctacaggtgctttagattctaaaagtacactagatttacttaagcgtcttaaatatatgaatgaggaatttaacacaaccatacttatggtgacacatgatccagtagcggctagtttttcaaaccgtgttgtgatgttaaaggatggacaaatctttactgagttgtatcaaggtgatgatgataaacaaacgttttataaagaaattataagaacgcaaagtgtacttggtggcatcaattatgagctttaa

SEQ ID NO: 3873 - DNA, 903 bp, Staphylococcus epidermidis
gtgatattaaacgtaggattgagtatacttttcttattatttacgtttgttaaagaagtccgtctatctaaacatttttatgaagataaagaaattgaagaaattaagcataaagatttggcagaaaccccatttcaacaacaagtcatagattatctgtatcgtcatatagccgctcaaaaagagaaagtagtcgaacaacaattacaaattaaaaatcatgaacaaacaattacagagtttgttcatgatataaaaacacctgttacggctatgaaattattgatagatcaagagaatgatgatcagcgtaagcgagcgttattatttgaatggtctcgtattaatgagatgttagataagcaattatatttaacaaggcttgaaacacatcatcgtgatatgtattttgattatatttcattaaagagaatggttatagatgaaatacaagttactcgacatatcagtcaggcaaaagggataggttttgaattagattttaaagacgaacaaaaggtttatacagatgttaaatggtgccgtatgatgattaggcaagttctatctaactctttgaaatatagtgataattctacaataaatttaagtggttataacatagaaggacacgttgttttaaaaattaaagactacggtcgtggaattagtaaaagagatttaccacgtatatttgatagaggatttacttctacaacagaccgcaacgatactgcgtcttctggtatgggattataccttgtacaaagcgtgaaagaacaacttgggattgaagttaaagttgattcaatagtggggaaaggaacaacgttttatttcattttcccacaacaaaatgaaatcattgagcgcatgtctaaagtgacaagattgtcattttaa

SEQ ID NO: 3874 - DNA, 675 bp, Staphylococcus epidermidis
atgcaaatattattagtcgaagacgataatacgctttttcaagaattaaaaaaggaattagaacaatgggattttaatgtcgttggtgtcgaagattttagtcatgtgatggagacatttgaaacatttaatccagaaatagttattttggatgttcaattaccgaaatacgatgggttttattggtgtcgaaaaatgagacaacagtcgaacgttcctattttatttttatcatcaagagataatccaatggatcaagtgatgagtatggaacttggtgcagatgattatatgcaaaaaccattttatacaaacgtcttaattgctaagctacaagctatttatagacgcgtttatgaatttggagttgaagaaaagagaacgttaagttggcaagacgctactgtggatttatcaaaagatagtattcaaaaagatgataaaactatctttttgtctaaaacagagatgattattttagagatgttaatcaataaacgtaatcaaatcgtgacacgagacactctcattactgctttgtgggatgatgaagcttttgttagtgataatactttaacagttaatgttaatagattaagaaaaaaattatcagaaattgacatggatagtgcaattgaaaccaaagttggtaaaggatacttagctcatgaataa

SEQ ID NO: 3875 - DNA, 924 bp, Staphylococcus epidermidis
atgaagcctaaagtattgttagcaggtggcaccggctatattggtagatatttaagtcgagtcattgaacatgatgctcaattatttgctttatctaaatatcccaaacctgacaaaggatctacgaacaaaatcacatggttaaaacgcgatatatataatcataaagatgtagttgaagctatgaaaggtatagacattgcggtatattatttagatccaactaaacattctgctaaattaacacatgcaacagcacgagatttaaactttatagcggcagataactttggtagagctgcatcaataaataagctgaaaaagattgtgtatattccggggagccgtcatgataatgaagctattgaacgtttaggcgcttatggcgtaccagttgattgtacggatgttgaagtgaaacgtcctcatattaacgtagaattacaaacagctaaatatgatgatgttcgaacagcgatgaagatgattttaccaaagaaatggacgctcaatcaacttgtagactattttagtaggtggttagatgagacaaaaggaacttttgtacatactcaaaaacaagatcatcactacatcatttacaataggaacattaaaagacctttagctattttcaaaatggttaatacaacagaagatataattacattacatcttgttgatggtaaattgatgaaacctaaatcaaagaagcaagcaaaattagaatttagacttcttaaaggaacacgtttaattatggttcatttatacgattatatccctagattattttggccaatttactatttcatacaagcaccgattcaaggacttcttatgagaggttttgaaattgattgtagaattaagcattatcaaggtcgcattcaatcaggtgagaagattaaatatactaaataa

SEQ ID NO: 3876 - DNA, 507 bp, Staphylococcus epidermidis
atgacacatctcattcgtgaaattagtattaaagacgttgaaaactttatcagcctattaagccaaatatatgatgaatcagaatttacattctacaatccaggtgaatattcaccaacgatatcttccgcaagtcaacacttagaaaaatacatcacctcacctaccaaagcaatatatgtcgctgaaagtgatgagcaacttgttggatacgtatttgttaatactgaaacttatgaacgtacacagcacgaagctgtggtgtaccttggtgttagagaatattaccaacatcaaggtattggacaagcacttatcaatagaattgaagcatgggctttaaatcatcatattcgacgtattgaagctacggttgttactgaaaacattaacgcaatagaattgtttaaaggcatgggctttcaaatcgaaggtgaacttaaagataagctttttataaaccaaaaatattataacgaatatgtaatggctaaaatattaaattaa

SEQ ID NO: 3877 - DNA, 1068 bp, Staphylococcus epidermidis
ttgaaagggttagccatgatgaaagaaaagctaaaatggatatggataacaacactaatcatacttgttgtctcacttatattggcttttaatttgaagagtcattataaccatgttcatgataaacagaagagcaagacaaatgttcaaattaataacaaaaatgtaaaattatatagagatatctcatatggtaaaggtatacccaacagcaaattagacattattaccccagctgatatgagcaatgatacgaaattaccggtaattttttggatgcatggtggaggatttatcgctggagacaaacaatataaaaatcaattattgtcaaaagttgcagaacaaggatacatcattgtcaatgtaaattatgcgttagctccgcaatataaatatccaacgccgctagtacaactcaatcaagctgtaaagtttataaaagagaataagcatgagttacctattgattttgatcaagttgttattgggggagactctgctggcgctcagttaactagtcaatatgtagctatgcaaaccaatgaagacttgagagatgaaatgcattttgaacagcagttcaagccttcacaaataaaggctgctgtattttttggtggtttttataatatgaaaaccgttaaagcaactgagtttccgagaatacaattatttatgaaaagttatactggaacaagtcattgggaaacagattttaaaaacttatctcaaatgtcaacgctcaatcaagtgactcacgaatacccaccgacatttctttcggttggtgacgctgatcctttttatagtcaaaataaagaatttgcgcaaggtttgaaaacagaaaatattccagtagatacattattctatgatggttcgcatcacttacatcatcaatatcaatttcatctagataaaccggaatcaaaagagaatatcaaaaaagtactgctatttttaagtcgaaacacatcatcttctggagtggagagtaacgagtcatcacaaaatcagccaactcaaaatactaatgaagtatccttatacccttttgattcttaa

SEQ ID NO: 3878 - DNA, 1068 bp, Staphylococcus epidermidis
atggggctgaataaagaagctataaaaattggttttgcctatgtcggcattgttgtcggcgcaggattttcaacaggacaagaagtgatgcaatttttcacaccatttggtttatggtcatatattggagtgattatctcaggatttatacttggattcataggaagacaagtagctaagataggtactgcatttgaagcgaaaaatcacgagtccacattgcaatatgtgtttggaaaaaaatttagtaaagtttttgattatattcttgtctttttcttatttggtatagctgtcactatgatagccggatcaggttctacttttgagcaaagttttggaattcctacttggttaggcgcattaatcatgacagttttgatttacttaacattattattagattttaataaaattgtaagagctttaggactagttacaccatttttaatcataatggttattcttattgctgtgttttacctatttacaggtagtatttcattaggggaagtaaacagtgctatgcctgaaacgagtgcttggaaaggtatcttttggggattagtatacggcggattagcctttgctgtaggatttagtacgatagtagctatcggcggtgatgcgtctaagcgaagagtttcaggtgcaggagcaatgtttggtggtgtgctatacgctatcctacttgcgttaattaacttctcgcttcaaacagaatattcaaaaattaaagatgtggcaatacctacgcttaacctagcgaaaggtatacatccatggttaggtcttgtactcacagtcattatgttagctgtgatgtacaacacgattttaggtctttgttattcttttgcagcgcgtttcacagaaccttatagtaaaaaataccatatattcattattatcatgatggtgatggcatttattttaagtttcgtaggattcgctgatttaatcaatgtcttatacaaatttatgggtattgtcggattatttattgtagtagcagtattgattaaatattataaacgtaaaaaagatgatgaagagcatatcgcgtaa

SEQ ID NO: 3879 - DNA, 501 bp, Staphylococcus epidermidis
atgcaacatcttataaaaaaacatgtattgaatggcgagtttgaactagttagacagttaatgtccgaaacagattttatggaatttgaagaagcatacatctctagtgctcatgaagtagagagtatgatgttttatacatgtattctagatatgattaaggtagaagaatcatcagaattacatgatttagcattccttttacttgtttatcctttaagtgaatatgagggcgcactagattcagcttattatcatgcagattcttccataaaacttactgacggaaatgaagtgaagagtttattacaaatgttattgcttcatgctattcctgagccagttatttcggataaaaaagcgtttgatgtcgctaaacgaattctaaaactcgatccaagtaataatgttgcacgaaatgtacttaaagatacagcaaaacgtatggataatgtagttgtagacattaatgaattgaacaatcaaagagatgcacgctaa

SEQ ID NO: 3880 - DNA, 798 bp, Staphylococcus epidermidis
atgagtcgtttaagtggtgaacaagtgaaaattggctacggtgattctacgattattaataatttggatgtcgcaattcctgatggaaaggttacttctattattggacctaacgggtgtgggaaatcaactttattgaaagcgttatctagactattgtcaattaaagaaggtaaaattaatttggatggtaagagtattcatgccacatccacgaaagaaatagctaaaaaaatagcaattttaccacaatcaccagaggtcccagatggacttactgtaggagaacttgtttcttatgggcgttttccacatcaaaaaggatttggtcgtttaactgcagaagataaaaaagaaattgattgggcattgtcagttacaggtacaagtgaatttcgtcatcgtactataaatgatttaagtggtggacaaagacaacgcgtgtggattgcaatggcactagcccaacgtactgatattattttcttagatgaacctacaacttatttagatatttgtcatcaattagaaatattaaatttagtcaaaaagctcaacgaagaagaaggttgcactattgtgatggttttacatgacattaatcaagcaattcgcttctcagatcatctcattacgatgaaagctggagatattgttgctactggtcaaactgatgaagtgttaactaaggacattttagaaaaggtatttaatattgatggtgttttagatatagatccgagaacagggaaaccaattttagttacttacgatttattctgtcagacgtattcgtga

SEQ ID NO: 3881 - DNA, 834 bp, Staphylococcus epidermidis
gtgaataaaactatcagagatatcattttagttatgataggttcatttattttctctgcaggtatcaatgcatttgttatttcagggaatttgggtgagggtggtgtcactggtatagccatcgtattatattatgcttttcatatttcaccgggaataaccaatttcgttttaaatgctattttaattattgtgggttataaatatttgagtaaacgtagtacatatttaacaatttttgctacagtactcatttcaatctttctaggtttaactgaaacatggcatgtagaaactgggaatgttgtgattaatgctgtgttcggtgggacttgtgttggtttaggaattggtattatcgttttagcagggggaacaaccgctggaacggttattcttgcgagaattgttaataaatatttagatattagtacgccttacgctttgttattctttgaccttatcgttgtgcttatttcattgacagaaattcctttagtgaagtgcttagttacagttatgtctttatatataggtacaaaagtgatggaatttgttatagaaggattaaatactaaaaaggcaatgactattatatctagtcgccctaatgaggtagcaaaagctattgatcagcaagttggaagaggattaacaatattaaatggacacggttattacactagagaagaaaaagatgtactttacgtagtcatctctaaaacacaagtatctcgtgctaaacgaatcatcaaaaatattgacgaaaatgcctttttagttattcatgacgttcgtgatgtatatggtaatggttttttgttagatgagtaa

SEQ ID NO: 3882 - DNA, 909 bp, Staphylococcus epidermidis
atgtactttaatatacttccaaaaatcattggcggtattggttgggtacttgctaaagttacacgccaacctaagtttgaatcattttttggtgttgaaatgatgttcttaggtaatactgaagctcttgcagtttctagtgaacaacttaaacgaatgaatgaaatgcgggtactaactattgcgatgatgtctatgagttcagtttcaggagcaattgtgggcgcttatgtgcaaatgatacctggagaacttgtattgacggcaattccacttaatattattaacgcaattatagtttcttgtattttgaatcctgtatcagttgaagaacaagaagatgtcgtgtatagcattaaagatcaccaaactgaaagacaaccatttttctcatttcttggagattcagttttagcagctggaaagcttgtattaattatcattgcatttgtcattagctttgtagctttggctgacttaattgatagattgattcatttaatcacacatcttattgcaaatggtattggtgtcaaaggtagctttggtcttgatcaaatcttaggcgttttcatgtatccatttgctttactattaggtttaccgtttaatgaagcgtgggaagtagcacaacaaatggcgaagaaaattgtaacaaacgaatttgttgtgatgggggaaatttctaatcaagtcaatgcgatgacgcctcatcatagagcagttatatcaacatttttagtttcttttgcaaacttttcaactattggaatgattataggtacattgaaaggtattgttgataagaaaacgtcggatttcgtttccaaatatgtaccgatgatgttgttagcaggaattttagtatccttacttactgctgcatttgttggattatttgcttggtaa

SEQ ID NO: 3883 - DNA, 408 bp, Staphylococcus epidermidis
atgatttttggaagtatattaaagtacataagaatgtcaaataatggtacaactaataaaatagggaagagcgcgcttaccgccatgtccatcattttattagacgtgaagcttttaaatgcaaatccggtaccctcatgtgcggattctataacccatgctataccgttagctgctcctttaacccctgctcttccccatggaaaatatataaagaaccaagctaaaaacaaattcaaaataaccaaaataaaaatagatttccattgtatattcttcctatttctagagaaaataactcctatacctaggaaaataaataatccaatgatattaactaataaaaacatttggcacctacctatatgtatttttatactttcatgcattgattatgtaatcctgtaa

SEQ ID NO: 3884 - DNA, 1728 bp, Staphylococcus epidermidis
atgaaagaacaaaaccctttgtttttcttatttaaaagactctcatggccatatgggttaatcattgcagcggttatcattacttcgttgggaagtttaagtggtttattagtaccattattcaccgggcgtttagttgataaattttccgtcagtagtattaattggggaatgatagctatatttggctcgattttcttagttaatgcattgcttagcggtataggcctatatttgttaagtaaaattggtgaaaagattatttatgcgattcgttcattattgtgggaacatattattcaattaaaaatgccgttctttgataaaaatgaaagtggccaattaatgagtcgtctaacagatgatacaaaagtgattaatgaatttatttcacaaaagctacctaatttattgccttctgttttaactttaataggttcattagtcatgctatttatcatggattggaaattaactttattaacatttattactattcctgtatttattttaatcatcgttcctttgggacgtgtgatgcaaaaaatatctaccaatacgcaatctgaaattgcgaacttcagtggattattaggtagagtgcttaccgaaatgcgtttagttaaagtatctaatactgagcgtttagagttagataatgcgcatacaaatcttaaaaaaatatatagattaggattaaaacaggctaaaatatcagcagtcgtacagcccatttctggtgttgttatgctattaactattgcgattattttaggttttggtgcattagaaataggtactggagcaattactcctggaacacttatagctatgatattttatgtaatccagttatctatgccactgattaacttatcgacactagttacggattataaaaaagctgtgggtgcgagcagtcgtatatatgaaattatgcaagagcctattgaacctactgaagctttatcagaatctaaagacgttacgatcatcgacggcgaattagtatttgagcacgtggattttaaatatgacgttaaaaagattttggaagatgtgtcatttagtattccacaaggtgaagtgagcgcgtttgtaggaccttctggttcaggtaaaagtacgatttttaatttaattgagcgcatgtatgatattgaacgtggagatattaaatacggtaatcaaagtatttttgatattccactttcaaagtggcgcacaaaaattggttatgttatgcaatctaattcgatgatgagtggaacgataagagataatattttatatggtattaatagaaaagttgatgatgaagagttaatagagtatgctaaactagctaattgtcatgattttattatgcagtttgacgaaggttacgacacgatggttggtgagcgtggactcaaattatcaggtggtcaacgacaaaggatagatatcgctagaagttttgttaaaaatcctgatattttgttattagacgaggcgacagcgaacctagatagcgaaagtgaattgaaaattcaagaagcacttgaaacacttatggaaggcagaactactgtagtcattgctcatcgactttcaactataaaaaaagctggtcaaattgtatttattgataaaggtgaagttaccggtaagggaacgcatcatgaattgatggcaagtcatgataaatacagacattttgttacatctcaaaaattatcagattaa

SEQ ID NO: 3885 - DNA, 399 bp, Staphylococcus epidermidis
atgaaaagagtcattacttatggtacatatgacttgcttcattatggtcatattgaattacttagaagagctcgtgagatgggggattatcttatcgttgcgctttctactgatgaattcaaccaaatcaaaaacaaaaaatcatattatgattatgaacaacgtaagatgatgttagagtctattagatacgtagacttagttatccctgaagaaggatggggacagaaagaaaaagatgttgatcgttttgatgttgatgtatttgtgatgggtcatgattgggaaggggagtttgacttccttaaagataagtgtgaagtcatttatcttaaccgcacagaaggtatctcaactaccaaaatcaagcaagaattatacggaaaagatacaaaataa

SEQ ID NO: 3886 - DNA, 1065 bp, Staphylococcus epidermidis
atgaaattagcaataattattccagtgtataacgctgaagaaacgattaaacgtgctatactctcagttgatactagtgtgccttatgagattatttgtatcaatgatggttcaactgatcaaacacaacatgtacttacagaattacaacaaaaacatccacacattaaagtcattcatcagagtaatcaaggagcagctcgaagtagaaatgttggcttagaagctatgtctgaagatgttgatgcatttttatttttagacgcagatgatgagtttttacctagtaggattgatttaatggtgaatgcttttaataaaaacaaagaaaccgatgttgttatcggtcaaatggcaagagatgttaacggcgaatggcaagtcatttcgacccatcaatctatggtaaaagatgcgattgtcacacttgatcgtaaaccggatattttacaatcgataggacctggagcaaaattatttagctcgaagtatgctggattacgttttgatgaagatgtcgttttctgtgaagagcatacctttattgtcaaagcgttctctaaagcgcgagatattcaacttatacctaacattgtatatggctataatgagagagaaggatcagtaacagcgcaacgtgctgatacattcttaccttatatgagtgatgcgttaaaagttcgtcaacgcgtgatggaattactattattattagacgaaaaaatctactatagttatcgaatggataacctcatagtaagttacttaatacaggcacatttaaagaaaaataacaaaataacgcaatctttgcttgaaagtgttatagcgtatatgaaagctatgcagcatacacattactcgggagaggctatgtttcgaattgttagagctgttgaacagagtgcaacacattggacaaagcctttatacttacaatggaaaaaggcacttagtgaggttggaattggcagaccaggattaattcgttttaaacttcaagttatacctaaaaagatatccttttctggtaaagaatcactaaaaagaatttttaaaaaataa

SEQ ID NO: 3887 - DNA, 1092 bp, Staphylococcus epidermidis
atgagattgataattaaaaagatttatatcatagctattgtgcttttaaatatggtttttaaaccgtttaatataaattcgaagcacattgtgataatgatgacctttaagcaagatatactgcctattatagaggccttatgtagtgaaggataccatgtgacggttataggtaaaaaaatatatcagaaagatattaataacattaatcatgcatattttatacctgccggaaataaatatattatgagacatatgaaagtattaagtaaagcaaaggttattattttagatacgtattatttaatgatgggtggctatcagaagaaaaaagggcaaactgttattcaaacatggcatgctgctggtgcgcttaaaaattttggcttaactgatcatcaagttgatttaaaaaataaggctatggtaagacaatacaaaaaagtttatgatgctaccgattattatttggtaggtggggagaaaatggctcaatgttttatacaatcgtttgatgcatctccatcgcaaatgttaaagtttggacttccaagactgacccaatactttagaagcaatcttaagttagaacaacaacgattaaaaaagaaatatcatattacaaataaactcgcagtatatgttccgacttatagagaaggtcaagtagcacaacgtactattgataaagaaaactttgaacggcacttgccgaattatacgttattgagtcatttgcatccttcgactgttgattgtcaaacttctcattcaatcgatgttacttcattgttaattatggcggatattattataagtgattatagctcattacctattgaagcaagcgcacttaataaaccgacacttatttataattatgatgaacagcaatatgaaaaagtaagaggattgaatgaattttattatgctattccagaacgatacaaaatgagtaatgaagagtcaattatacaagcgatacaggataacgatgagcaatttcaatctttatttaatgattggcatcaatataactcaaaagatagtcttaaccagttagttcattttattaataagttggtgaaataa

SEQ ID NO: 3888 - DNA, 813 bp, Staphylococcus epidermidis
atgttcgcagttggaacggttttaaaagaacatattaaaaacttctatttaattcaaagactagcacaattccaaattaaaattaccaatcataataactatctaggtattgcatgggaagtgttgaatcctgctttacaaatcatggtgtattggcttgtttttggtttaggaattagaagcaatgcacctatacacggcattccgtttgtattttggttgttagttggtataagtatgtggttctttattaatcaaggtgtcctagaaggaactaaatcaatctcacagaaattcaatcaagtggcaaagatgaatttcccactctcaatcattcctacttatattgtaacaagtaggttctatggtcatttaggattattagcaattattataatagcttgtatgttcaatggaattatcccttcaattcacattgtacaattacttatatatgtaccttttgcatatttgctaacatcgtcggtggcacttttaacatccactttggggattttaattagagatacgcagatgattatgcaagcattaatgagaatattgttttatatgtctccaattttatgggtgccaaaaaatcacggcgtaagtggtttgattcatcaaattatgttatttaatccagtatattttatcgcagaatcataccgagcagcgatattgttccatcaatggtatttcatagatcattggaagttaatgctatataacgttattatcattctcttattctttatagtaggttctattttacatagacgctatagagatcactttgcggacttcttgtaa

SEQ ID NO: 3889 - DNA, 795 bp, Staphylococcus epidermidis
atgagcgtttcggtaaatattgaaaatttaacaaaagaataccgtatctatagaaataataaagatagaattaaagatgcattaatacctaaaaacaaaaataaaacattttacgctctggataacgtaagtttaacagcgcatgagggagatgtgataggtttagtcggcatcaacggttcaggtaagtctactttaagtaatatgattggtggctctatttcaccaagttccggtgaaataacgagacatggtgatgtgagtgtcatcgctattaatgcaggactaaatggacaattgacaggtgtagaaaatattgaatttaaaatgctctgcatgggctttaaaaggaaagaaattaaaaaattaatgccggaaattatagaatttagtgaactcggcgaatttatttatcaacctgttaaaaaatattcaagtggtatgcgtgcaaaacttggattttcaattaatattactgttaatcctgacatattagttattgacgaagcattatcagtaggcgatcaaacatttactcaaaaatgtttagataaaatttatgaatttaaagcggctaaaaaaacaatattttttgttagtcataatattagacaagtgcgtgaattttgtacaaaaatcgcttggattgagggcggtaaactaaaagaattcggcgaacttgaagaagtattacctgattatgaggcgtttcttaaaacttttaagaaaaaatctaaagcagaacaaaaggaatttagaaataaattagatgagtcacgttttgtcgtaaaataa

SEQ ID NO: 3890 - DNA, 795 bp, Staphylococcus epidermidis
atgcattttaaacgtgttgtaaagtggggattgaaaatgtatcaaaaccaaagaataaaagataaaattaacatattaggtgtaagttttgataatactacaatgctggaaatggtagaaaatattaaacaattcatatctagcaatacagatgataatttatttatagtgactgctaatcctgaaatcgtggattatgcaactgaacatgagctatatagaaatttaattaatcaagctgattatgtagttccagatggtacaggaatagtaaaagcttcaaagcgattaaaacagcccttaaaacggcgtgtgccaggaatagaacttcttgaagaatgtctgaaaatagcacatgtcagccatcagcgcgtatatctgcttggatctaaaaatgaaattgttgagtcagcagagaaaaaacttcaatctcaataccctaatatccactttgcacatcatcatggctatattcatctagaagatgaaacagtcataaaacgtataacaagttttaatcccgattacatttttgtaggaatgggatttccaaagcaagaacaatggattcaaaagcataaggacaagtttaagcacactgtgatgatgggcgtaggtgggtcgtttgaagtattcagtggctcaaagaaaagagcacctcaaatatttagaaagttaaatattgagtgggtatatcgtgtgcttattgattggaaacgcattgggagaatgataagtattcctaaatttatgttaaaggtagcaatacaaaaatataaaatgaaatcaaaataa

SEQ ID NO: 3891 - DNA, 747 bp, Staphylococcus epidermidis
atgatttatttacaaaattttattactacaactatccaattaaatatctatcttattttagttattggactgctttacgtaatcatccactattatagaaataaaggtgttaacgctttcttagatatttatttaaattatataccggtacttacacacgaatttggccacgtcttatttaacaaactcgctggtggaaaggccaaagatcttgtcattgtgacaagccctagagaaagaaaagtcacttcacaacaaggctatgcgattacacaatctaaaggatacttaggtcagtttattacaactataggtgggtatcttatgccaccattgatgtttttaactggattggtatctattcactatcaatatccaagtatatttattactatatatttatttatttttatatattatttctttattacttcccgtaaactatcacctttgattgtcattatactcatctcaagtttactctatttagtatttaaacaagaccatcaatggttcatttacgacattgtcacattaagttaccattttattttaggcgtacttttaggtgaaatattacaatcctcatggacgatttttcgtcttacctttcaacgacctaaaccttcttgggatggcagtgctttaacgaaagttactcgagtacccacctttatctttagtttagtgtggatattattcaatctctatactgtgtatttattaatcaaatacacaatactataa

SEQ ID NO: 3892 - DNA, 645 bp, Staphylococcus epidermidis
atgttaactgaagaaaaagaggattatttgaaagcaattttgactaatgatggcgacgtgtcctttgtatcaaataaaaaactatcgcaatttttaaatatcaaaccaccatcagtaagtgaaatggtagggcgtttagaaaaggaaggctatgttgaaacaaaacattataaaggtgcccgtttaactgaagaagggttaaagcaaacgttagacatcataaaacgacatcgattactagaattatttttaatagaaattttacaatataattgggaagaggttcatcaagaagctgaaatacttgaacatcggatatcagatttatttgtagagcgtttagataagattttaaattttccgaaaacatgccctcatggaggcgtcattcctagaggtgatcaatataaagaaatttttactacgtcaattcttaattttgaacctggagaacgtgttactgtacgacgagttcgtgataagacagagttgttagtttacttatcaagtaaggatatttatattggaaatacagttgaaattgtatccaaagatgataccaataaggttattattcttaagaggaatgatattgtaacaattttaagctatgaaaatgcgatgaatatttttgcagaaaaataa

SEQ ID NO: 3893 - DNA, 747 bp, Staphylococcus epidermidis
ttgctcgaagtgaatcatttgaatttatttttgggaaaaaagcacattcttaaagatattacattctcattacctataaatggtgaaatcattggtattgtaggacctaatggtgccggtaaatcatctcttctcaaagcatttatcggagaatttaaagcgaccggtaaacatacattatatgatcaccctatacatacacaacttagatatattacatatatcccacaaaaagctcatattgatttagattttcctataaaagtggatcaagtgatactatcaggatgttatgaagacattggatggtttaaaaaagcaagtgtagttgaaaaaacgaaacttaaccaattacttaatgatttagaactcgaccatatacgccatcgacaaattgcagaattaagtggtggacaattgcaacgtgttcttgttgcaagagcacttatgagtaatagtgatatttattgtttagacgaaccttttgttggcatcgacatttatagcgaacaacttattatgaagaaaattaaacatttaagacatatgggtaaattgattttaattgttcatcatgacttatcaaaagcagatcaatattttgaccgcattttattattaaatcaatcgttgcagtttttagggccaacaaaagaagcattatcatctgaacgattaaatgcaactttcattaattacaaagatgattcgcttttaacactatcctcacaagggagtacgaattag

SEQ ID NO: 3894 - DNA, 837 bp, Staphylococcus epidermidis
atgttagatttcattaaccatttgcttagttatcaatttttaaatcgtgcattaatcacatctattttagttgggattgtatgtggaacgatgggtagcattattgttttacgtggtctttctttaatgggtgatgccatgagtcatgctgttttaccaggtgttgctttatctttcttatttaatattccaatgtttatcggggcacttgtaacgggaatgcttgcaagtttgtttattggttttattacttcaaacagtaaaacaaaaccagatgctgcaataggaataagtttcactgcattcctagcatctggcgtcataattattagtttaatcaatagtacaacagatttatatcacattttatttggcaatttattagcaattacacatcaatcattttggacaacaattgtcattactgtactggttattttacttattattatcttttatagacctttaatgatttcaacatttgatgcaacttttagtcgtatgagcgggctgaacacaacattaattcactactttgtcatgttattactcgcacttgtaactgttgcgagcatacaaacagttggaattatccttgtagttgctttactaatcactccagcttctacagcttttttaatcagtaaacaactttatgccatgatggtaattgcaagcataatcagcgtgataagttcgattatcggtctatattttagttatatatataatattccaagtggagcaactattgtaatctgtacctttatgatttatattgtaacgctatcaattactagaattaaaaataaacaaaaaaggagcgctttaacgtga

SEQ ID NO: 3895 - DNA, 930 bp, Staphylococcus epidermidis
gtgaaaaaaattctcgctttagcaatagcatttttaattatccttgccgcatgtgggaatcacagtaaccatgaacatcactcacatgaaggaaaattaaaagttgtaactacaaactctattctctatgacatggttaaacgtgtcggtggaaataaggtcgatgttcatagcatcgttccagtaggacaagatccacatgaatatgaggttaaacctaaagatattaaagcattaacagatgctgacgttgtattttataatggtttaaacctagaaactggaaatggttggtttgaaaaagcacttgaccaagcaggaaaatcaacaaaagataaaaatgtgatagcagcatcaaataatgttaaaccaatatacttaaatggtgaggaaggtaacaaaaacaaacaagatccacatgcatggttaagtttagagaatggaattaaatacgtaaaaacaatacaaaaatcactagaacatcatgataaaaaagataagtctacatatgaaaaacaagggaatgcatatatatcaaaattagaagaacttaataaagatagtaaaaataaatttgatgacatacccaaaaatcaacgtgccatgatgacaagtgaaggtgcatttaaatattttgctcaacaattcgatgttaaaccaggttatatttgggagataaacacagaaaaacaaggtacacctggtcaaatgaaacaagccattaaatttgttaaagataatcatttaaaacatttattagtcgaaacaagcgtagataaaaaagctatgcaaagtttatcagaagaaactaagaaagatatttatggtgaagtatttaccgactctataggtaaggaaggtactaaaggtgactcatactataaaatgatgaaatctaatattgatacaatacatggtagtatgaaataa

SEQ ID NO: 3896 - DNA, 2040 bp, Staphylococcus epidermidis
gtggagatatttgaaactctactcatatttgtcgcactagttattgtgagctcctttgtacatactttcatacctaaagtacctcttgcatttatccaaatttttcttgggatgattttatacctcactcccattccagttgaattcaattttgattctgaattatttatggttacattgattgcaccactactattcgttgagggtgttaatgtttcaagagtacatttaaggaagtatatcaaacctgttatgatgatggctctaggtcttgtcataactaccgttataggcgtaggattgtttattcattggatttggcctgaattacctataggtgctgctttcgcaattgcggctatactttgtcctacagacgctgttgcggtacaagcaatcacgaaaggaaaggttttaccaaaaggttcaatgaccattcttgaaggtgaatctttacttaatgatgctgcaggtatcatttcatttaaaattgccgtaggtgtattgattactggaactttttccatttttgatgcgattcaacaatttttgattgcctctattggaggtgctattgttggtctaattataggcatggctttagtgagatttcgtttaacattaatgagacgtggcattgagaacattaacatgtttacatttatacaattgctgacgccgtttgtcacttatttgattgctgaattattccatgcatcagggattattgcagcagtagttgcgggactcgtgcatggatttgaacgtgaccgtatagctcaaacgagaacacaattacagatgagctataatcacacatggagtattttaggctacgttttaaatggttttgtgttttcaatcttaggttttttagtacctgaggtaatagtgaaaattattaaaactgaaccgcataatttattattcttaatcgtcatcacattgctagtcgctcttgcggtgtatctctttagatttgtgtgggtatatgtactttatccttatttctatttatctgtcagtccattccaaaaaatgatttctaaaaatgatgaagataaagttactgagagtaaacctaagcgtagcttatatgcactaatcatgactctatgtggtgtacatggaaccatttcactcgcaatcgccttaaccttgccatatttattagcaaatcatgaaacatttgcttatcgaaatgatttattatttattgcttccggaatggtaatattaagtttaattattgcacaagtcattctgcctttagtaacgcctgatagccctgaagtgaagataggtaatatgtcatttaaagaggcgagaatctacattttagaacatgttatcgattacctaaatcaaaaatcgacgtttgaaacgagttaccgttatggaaacgtcattaaagattaccacgataaactcacatttttaaaaacggttgaaaaggaagatgaaaactccaaagaactagaacgacttcaaaagattgcatttaacgtagaaacaaaaacgctagagaaattggttgatgatggcgaaattactgagagtgttcttgaaaactatatgcgttacgctgaacgaacagaagtgtataaacaagcttcgttattaagacgaattattgttggtttaagaggaatgctattgaaacgtcgtgtaaaaacaaaaattaattcggcatcatctcttagtgttactgataacttattagaattgggtaaaatcaataagcttgttcattataacgtcgtaagtcgtttagccaaagaagctactactgataataaactagaagtaggtatgatttgcgatggatatctgatgagaatagataacttaacaccaaacaatttctttaattccagacatgaagatacacttaccaaaattaaattaaatgctttaagagaacaacgtcgtattctaagagaactaattgaaaatgatgagataacagaaggtactgcattaaaattaagagaatccattaattatgatgaaatggtaattgtagatagtatgacataa

SEQ ID NO: 3897 - DNA, 465 bp, Staphylococcus epidermidis
atggaaatcataaaagacatcgttagtcttattgcttcgatacttattttcttaggaagtattattgcattaattagtgcaatagggattgtaaaatttcaagatgtctttctaagaagtcacgcctcaacgaaaagttctacattgtcagtattactaactgtagttggtgtactgatctattttattgtgaattcaggttttttcagtgtcagattattattatcactagtttttatcaatcttacatctccggttggaatgcatttgataagtagagcggcctaccgtaatggtgcatatatgtacaggaaagacgatgcatctagacaatctactatcttattaagccaaaaagagtttaatacgccagaagaattaaaaaaacgtgcaaaactacgagaagaaagacgagaaaaattatactataaagaaaaagaatatattaataaaatggacgattga

SEQ ID NO: 3898 - DNA, 303 bp, Staphylococcus epidermidis
atgattgaaatgttcactcaaatatttattataagtgcattagtgatttttggtatggcactacttgtttgtctagtcagattaattaaaggtcccactactgctgatagagttgtatcatttgatgcctcgagtgctgttgttatgtctattgttggtgtgatgagcgttatttttaactcagtgtcttatttagattcaatcatgttaattgcaattatttcgtttgtcagttcggtctcaatttcaagattcatcggggaaggacgtgtcttcaatggaaatcataaaagacatcgttag

SEQ ID NO: 3899 - DNA, 483 bp, Staphylococcus epidermidis
gtgaagcaagttgtattaaatattgttatcgcgttcctttgggtactctttcaagatgaagatgaatttaaatttacaaccttctttgctggatttttaattggtttaattgtgatttatattctacatcgcttttttggtgaagaattttatttgaaaaagatatgggtggctattaaatttttagctgtatacctataccagcttattacttctagtataagtaccataaattacatcttatttaagacgaatgaagttaatccaggtttactcacatatgaaacttcattaaaaagtaattgggctattacttttttaacgattttaattattattactccaggatcgacagttattcgaatttctaaaaatactaataaattttttattcacagtattgatgtgtcagaaaaagataaagaaaatcttctaaaaagtattaagcagtatgaggatttaattttggaggtgacacgatga

SEQ ID NO: 3900 - DNA, 1500 bp, Staphylococcus epidermidis
atgagtaatttaataatattgcctatgttgttgccttttgtatgtgctttaattttagtcttcactaaaaataaaaatcgtatttcgaaaatcctatccattacaactatgattgttaatacaatgatttcaattgctttacttatttatgtcgttaatcataaaccgataacacttgattttgggggatggaaagcacctttcggcattcaatttctaggtgattcactgagtctgcttatggtgtcagtatcatcttttgttgttacgctaataatggcatacggctttggtagaggggagaagcgagtcaatcgatttcaccttcctacatttattcttttattaacagtaggtgttattggttcgtttttaacttctgatttatttaacctatacgtgatgtttgaaattatgcttcttgcttcgtttgtacttgttacattaggacaatctgttgaacaattacgtgcagcgatagtatatgttgttctgaatattttaggttcgtggttgcttttattaggaattggcatgttatataagacagtcggaacacttaatttctcacatttagcgatgcgattgaatcatatggaaaataaccaaacaataacgatgatatctttagtatttctagttgcttttagttcaaaggcagcactagtgattttcatgtggttacctaaagcatatgcagtgcttaatacggaacttgccgcgttatttgcagcattgatgacaaaagttggagcttatgcgcttattcgtttttttactttactattcgaccatcatccaagcgtcacgcatacattgctcgtgtttatggcttgtatcacaatgattatcggtgcatttggtgtcatcgcttacaaagatattaagaaaattgcggcttatcaagttattttgtctattggattcattattttaggtttaggttctcatactatatcaggtgtaaatggtgctatcttctatttagccaatgatattatcgttaagacattattgttttttgtaattggtagtcttgtttatatgtcaggctatcgaaattatcagtatttaagtggactggcaaaaagagaaccattctttggtgttgcatttgtcgtggtaatttttgctataggtggcgtgcctccatttagtggctttccgggtaaagtcttaatattccaaggggctattacaaatggtaattatattggtttagcacttatgattgtgacaagtttaattgctatgtatagtctttttagagtgatgtttataatgtattttggtgatgctgacggagaacaggtacaatttagaccactacctatttatcgtaaaggtttacttagtgttttagttgtagtggtattagcgatgggtattgcagcccctgttgttctgaaagtaacagaggatgcaacaaatcttaatatgaaagaagatgtctttcaaaagaatgtaaatacacatttgaaggaggttaatcataagtga

SEQ ID NO: 3901 - DNA, 345 bp, Staphylococcus epidermidis
atgaatttaatattactccttgtgataggatttttagtgtttattggaacttatatgattttatctattaatttaattcgtattgttattggtatttctatttatacacacgccggtaatttaattattatgagtatggggaaatatggacctcatatgtctgaaccgctaattcaaggtcatgctcaaaactttgttgatcctttattacaagctatcgttttaacagctattgtgattggatttggtatgactgcgtttttattggtgttaatatatagaacttacagagtaactaaagaggatgaaataagtgcattgaaaggtgatgaagatgatgagtaa

SEQ ID NO: 3902 - DNA, 426 bp, Staphylococcus epidermidis
atgaaagagaatgatgtagtacttaaatcagttacaaaaattgtagtgtttattttgttaacatttggattttatgtattttttgctggccataataatccaggtggtggctttattggtggcttgatttttagctcggcatttatcttaatgtttcttgcctttgatgtaaatgaagtgttgaaaagcttgcctattgattttaaaaaattaatgattataggttcactcatatctgttgcaactgcatcagtgcctatgttttttgggaagccatttttatatcaaactgaagcaaatgtaacatttccattactaggacatgttcatgttactactgtgactttatttgagcttggcatcttattaacagtagtaggtgtgattgttacagttatgctatctataagtgggggtagatcatga

SEQ ID NO: 3903 - DNA, 2403 bp, Staphylococcus epidermidis
atgagtttagtatatcttatggcgactaatttattagtcatgctcatagttttattcactctgagtcatcgtcaactaagaaaggttgcgggctatattacattaatagctcctattgtgacatctgcatattttattatgaaaataccagatgtgattcgaaataagtttattgctgttcaattaccatggatgccttcaattgatattaatttagatttaagattagatggtttaagtttaatgttcggcttaattatttcactaataggtgtgggtgtgtttttttatgccacgcaatatttatctcacagtacggacaatcttcctagatttttcatctatttactattatttatgttcagtatgattggcattgtaatagctaataataccatcttaatgtatgtattttgggaactcacaagtatttcctcattcttgcttatatcctattggtacaataatggtgaaagtcaattaggcgccattcaatctttcatgattacagtgtttggtgggctagcgttattaacaggatttatcattttatatatcattacaggaacaaacacaattactgatatccttaatcaacgcaatgcaatttcacgacatcctttatttataccaatgattttgatgctattattaggtgcttttaccaaatctgcacaatttccgtttcatatttggttaccaaaggccatggcagcacctacaccagtaagtgcttatcttcattcggcaacaatggtaaaggctggaatctttttactatttagatttacacctttattgggacttagtaatgtttatatttatacagtgacatttgttggtctaataactatgttatttggatctttaactgctttacgacaatacgacttaaaaggtatactcgcttattctacaataagtcaattaggtatgattatgacaatggtaggtctaggtggcggttatgctcagcacacatcagatgaattgtctaagttttatattttagttttatttgctggcttattccatttaatgaatcatgcggtttttaaatgtgcattatttatgggcgttggtatcattgatcacgagtccggaacacgtgatattcgtttgctaaatggtatgcgtaaagtcttccctaaaatgcatattgtcatgttgctcgctgcattatctatggcaggtgttccttttttaaatggctttttaagtaaggaaatgtttttagattcgttaactaaagcaaacgaacttgatcaatatggcttcgtattaacgtttgtgattgtttcaataggtgtcatcgcgagtatattgacttttacttatgcactttacatgataaaagaaacattctggggaaattacaatatagaaaaatttaaacgtaaacaaatacatgaaccatggctatttagtttaccagctgtgattttaatgttactcattccagttatcttctttgttccaaacgtttttggcaactttgttattttgcccgcaaccagatctgtatctgggataggtgcggaggttgatgcatttgtgccacatatttctcagtggcatggtgtgaatcttccattaattttaagtatagttgttattattattggacttattttagctctagttgtgaattggaaagaggttacgcatcaaataatcaaaagtgcttcgattacagatggctatcggaaaatttatagagaatttgaattatactcagcccgtggtatacgtgcattgatgaataataaattgaattattacatcatgattacattatttatttttgtagctattgtagtttatggatatttgactgtgggttttcctcatgtacatcagcttcatattagttctttcggaccgttggaagttatcttatcagttgtaacattgattatcggcatttcattaatctttattcgtcaacgactaacgatggtggtattgaatggaatgattggattcgcagttacattatattttattgcaatgaaagctccagatttagctttaacacagttagttgttgaaactattacgacaatcttatttattgttagtttttcgagactacctaacatccctcgagttaaggcaaatttaaaaaaagagaccttcaaaatcattgtgtcacttgttatggcattgacggtggtatcacttatttttgttgctcaacaagcagatggtatgccttcaattgctaaattttatgaagatgcatatgaacttacaggtggaaaaaatattgtcaatgctatactaggtgacttcagagctttagatactatgtttgaaggactagtgttaatcatagctggattaggtatttatacgttacttaattacaaagataggagggggcaagatgaaagagaatga

SEQ ID NO: 3904 - DNA, 207 bp, Staphylococcus epidermidis
atgaatgaagtcaatcaagtgacgattatctttactcaaatcaaacataattctgaaggtaaagtagtcgaacataagcgtcgtttttctaacattaatccgcttgtttctaatgatcaaatcaaatcttttcgttccatcattgaacgtatcagtggcgaagagtatgacaaagtcgagatcgttaaaacagaatctttaatttaa

SEQ ID NO: 3905 - DNA, 225 bp, Staphylococcus epidermidis
atgtcaaaaactttggaactcatatttaaatcaaatcttaataaacccgtcaaattactattacccgattttaacgctattactacagaacaattaattaaagaaagtatgaaccaacttttagaattagacattttaagatttagtttgggaaagcctgtcaaaatttatgctgcacaacttattgataaaagtacaacagttatatttgaagataaaaattaa

SEQ ID NO: 3906 - DNA, 141 bp, Staphylococcus epidermidis
atgttccgaggtcatacagccgatactattttgatgaatccttataataaaatgcacattaaacaagttttagtattaaaaaaagtgagacatcattttgaatttgatatctcacttcatattaataaaagaacaatgtaa

SEQ ID NO: 3907 - DNA, 894 bp, Staphylococcus epidermidis
atgttacttcctattcaaacttcaatcaactcaagactaagccaatttacccgttcatcattttatgcttcaaccatatcttttgctgtcggaacaatatgcttacttgtgcttaatatcattattcacccacaagtattaacaccagaattcttttctaaacaaacacttaactatacttggttcctaggaggactattaggtgttatctatttaactggaaacttattattattaccaagattaggcgcagcacttactgttgttattacggttacagggcaaattattatgggagtaatcattgatacatttggattattgggcgcccatcaacaatcttttacaatatttaaaggtattggaattatatttttaattactggaataatatttatgaattatgttcgtagacatcctgttaataggcataagaatacaccaatagtattctggttgcttattggattcgtatttggtttcgctccgccaatccaaacaacaattaacagcacactggctcaacacacacactcatccatatttgcttcactcatatcatttagcgttggtacaatagcgttatttatattaacattagtatttaatcgtagtctgaaaatatcatctactcataaaacactaggtaagattaaatctatttattttattggagggatactaggaatggcattcgtaacatctaatattattttaatgcctttcttaggagcagctttaactactataattgctatgatgggccaaatgattatgggtattattatcgatcatttcggtttgttgggttcacctaaaaacaaaataacatcacgtaagttaggtggattattatgtatagctataggtattattttattacgattattttaa

SEQ ID NO: 3908 - DNA, 954 bp, Staphylococcus epidermidis
atgaccaagcaacgcatcgttatttcttcattactattcattttcattctcacaacttgtagttttagttacattactttctctaaattaacttctgaaacagaagatattaaaaatataaaaactataaaagcaaagcccaaattactcctttcaacaactggtatacaagcccctcttaacagctatattttctattacactcccactttaggacaactccaaaaacttttagtaaaaaatcatagcaaagtatctaaaaacactccagtgttagaatattacaattatgaaaaagatcatttatatgaggaactccaaaatacacttagtaatgaacgtaacaacaaaactttaaattctaaaaatgatttacattattattcattccttaatcagctaaaattacaaatgattcaaactaaatcctcaattaaatccactttattttcaccaattaatggaagtatttcatatattaattctatcccttcaaaaccaaacgaaaagatagtgcaaattaatagcaacgaacgtattattcgtgctaatatatcagaatctgagttgaatttattaaaaataaatcaaaatatttctgtaacatctagtgaccacactcaatttactagtaaaattaaagaaatttcgaatataccatcaaaaataaaaaatggcgtctcatattacgacattttactttctacacaacccaattatcaaattggaacacactttaaaatcaaattagcctcaaatgacatagagttacctacgtcagctattgttcaaaaacgctatgttttaattctaaaaaacgggaaaattacaaaaagagaagtaacatacaaaaagagtttaaaaagtgggtatattaatataactaaaggcttattgatagatgaaaaagttgttaaaaatcctacttctaaattaataaacatttatatataa

SEQ ID NO: 3909 - DNA, 375 bp, Staphylococcus epidermidis
atggctatttcaaaaatcaatgactgctttgaattattagctatggtcacttatgctgacagattaaaaggaataattaaaaaagaattctcaatcagctttgaagaatttgcagtattaacttatattagtgagaataaagaagaggaatattatcttaaagatattatcaatcacttaaattataaacaacctcaagttgttaaagctgttaaaaatttatctcaagaaaattactttaataaaaaacgtaatgaacacgatgaaagaactgttttaatcttagtagattctaagcagcgtaaaaaaatcgatgatttacttaaacgagtaaacaaccgtatcacagaagcaaataatgaaaatgaagtataa

SEQ ID NO: 3910 - DNA, 777 bp, Staphylococcus epidermidis
atgaataaaattcaaatttgtaatcagattgaacttaactatattgatgaaggcgaaggcatccccatcattttaattcatggattagatggaaacttggcaggatttaaggatttaaaaaatgaactcaagaagcagtatagagtaattacttatgatgtcagaggtcatggaaaatcttcacgaacagaatcatatgaattaaaagatcatgttgaagatttaaatgatttaatgggagcattaaatatcgattctgcacatattttaggacatgatatggggggcatcattgcgagtgaatttactgaaaaatatcaatataaagtgattacattgacaattgtttcggccaaaagtgaagacattgcaaatggtttcaacaaattaatggttgattaccaagaagaattagcagggtttaataaatctgaggcaatgattattttattctctaaattatttaaagagaaagataaagcaatgaaatggtatcaaagccaaaaattatacaatagaccaactccggaagaaagtgcaattgcagtacgtgcattgcttaatattaaagatttaactcgtgttcatcataatgtgtccatacctactttaattgtgaatggtaagtatgacccactcatacaaaataaaagtcattatgatatggatcaatattatgatcaagttacaaaaattgtatttgataattcaggacatgcaccacatatcgaggaaccagaaaaattcttgaaactctacttagattttgttagttaa

SEQ ID NO: 3911 - DNA, 720 bp, Staphylococcus epidermidis
atgcgtacgaatgataaagtattactcgaaaatattaatgattattttagtcacaaaggaatgtcaccacacttaattgatgatataaaagaaaaatatcgacaagatattaaaaagtctgaagaaaaagatcaagattacattgaatatagaggtaaatcacctgcgcaattaatattaacaattcagcgtaatttgtttgcattacaactcaatccaatgattttctttatcattaactttattcttatttcatatttgtacgataaacaatatgtaccttttcaagcaattaccggtataagcttgttttattgcttagttatatttccaataacactcattttatatgtgcgtattgccaaaaaaaattatctatacagtaataagtatgaaatgagaactggaataatcattggtattattgcttttattctagtaattatgcaagggtttcactttaactgggctattattcctatttctatctatggtcatcagtttgtatttttcgctggaattattttaagtcttgttggtatattctttaaacgtatagaatttgtaggagttggcttactattttgtcaaaaaacaatagatgcaatggtaactgacccggaaattgcacaatttttctctttagcaatttggattatacttgttgtgctaatcattttttatacgatacgtttatctgaacgcactaaatcatcataa

SEQ ID NO: 3912 - DNA, 123 bp, Staphylococcus epidermidis
ttgaaatttgaagagtttaaagttgaaatcataatttgtaaaatggatttcactttagctcttcttttcattttagttgctaatgatgatatgattaatcattatgttcaagtaaaattgtaa

SEQ ID NO: 3913 - DNA, 510 bp, Staphylococcus epidermidis
atgaagaaactaataacatcattacttgttttaggattagttttaactggagtaagcgttggaaacaacgttgaagcggcaactggtaattcaatgaaaacagtacaacaattaaacaaaggtgataaatcattagaaaacgttaagataggcgaatcaatgaagagtgtattaaaaaagtatagtcatcctatctattcttataacccaaatagtaatgaaaagtattacgaatttagaactgataaaggtgttttgctagtaacagctaatggtaaaaaagaaagaggaaatgttacacgcgtatcaatgacatataatgatgcaaacggcccttcatacaaagccgtaaaacaacaacttggtcataaagctataagtcgtgtacattataataatgttacaggtaactttggctatattcaaaaagatcaagcaagttatcaattcagttcaaattcaccaaaggataaaaatgtgaagttatatcgtatagatttaaataaataa

SEQ ID NO: 3914 - DNA, 798 bp, Staphylococcus epidermidis
atggcaatggatttaattactaaacaagacggtacaacattacactatagtactatgggacaaggatatcctgtcgtactcgtgcataccgcttttgataattatgctgtttttaatgatttagctaaggtattagcaaagtcttttcaggttgtgcttatcgatttgagaggacatggttactctgataagcctagaaatatagagttttatgactttgctgacgatataaaatttttattagatgctatatatatagatgaagcagcatttattgggcacgagatgggggcacttattgctgctgatatgtctgttagaaatcctggctatatatcctcaatcacattagttaatcctacttcaatagaaggtgaattgcctgaagaacgcttgttcagaaaatatgcacataaaatacgtaactgggaagatgataagcaagaaaaatttttagataaacgtagatattataaagcgcgtaagatgaataaatttttaaagcatgtcgttgatacaaatagtatttctactaaagaagaaattcaagctgttaaagatgtcttcaaatctgaaggtattgcagatgttttcaagcatgttcaagttcctacgcttattgttgctggagaacacggagaacgtacaactacactagaagctaaagaagtcgcagatttgattcaacactgtgaatttaacgtctatcaacattcaagtgcatatccttttgttgaagaacagtctcaatttactcaagagacaacaaacttcattcaacaacatgcacctaaataa

SEQ ID NO: 3915 - DNA, 729 bp, Staphylococcus epidermidis
atgaatttaaactgcattaaggctatcgtctttgatttagaaggtactctattagatagagtaaaatcgcgtgaaaagtttatagaagagcaatatgaacggtttcatgattattttattcatgtgcaattagcagattataagaataaatttattgaattagacgatgatgaagacaacgataaacctgatttatataaggaaatcattaaacaatttcatatcgaccgtcttaaatggaaagatttatttaatgactttgaaatgcatttctatcgttacgttttcccttactatgatactttgtatacattagaaaagttatcgaaacatcattacatgattggtgtgattgcaaatgggaaatccaaaattaaacaatttagattgcattcattgggtattatgcacgttattaattatttaactacttctgaaactgtaggctatcgtaagccacatcctaaaatctttgaagatatgattgatcaattgggggttaaaccatctgaaataatgtatgtcggagatgatgcattaaacgatgttgctcctgcacgtgcaatggggatggtaagtgtgtggtataaacaagaagatgcagaattggagccattaacagaagaagtagattatacaattactaccatagaggaattgcttaaaattttaccagataattttgaaacagaaggagaagaacaacatggcaatggatttaattactaa

SEQ ID NO: 3916 - DNA, 945 bp, Staphylococcus epidermidis
atgaataaatatagaagtgtcattatatggttatttattttaatattaagcatgagcttaagtttaagctgggatgtaggaaaacttgatgatgtttttaatcaaaccatactattccaggttcgtttacctagattacttgaagccatgctcactggtgcagtacttacattagctggccaagtgtatcaaattgtgttaaataatccacttgcagatagttttacattgggattagctagtggtgcatcattaggatctggaattgctttatttttgggacttagttttttatggttccctatattttccattattttcagtttaatcacactgttacttgttttaagtgtttcagcgatgttagccaaaggatatcctgttcaaatgcttatattaacgggattactatttggtgcactattaaatgcattattgtatttgcttgttttgattaatcctaagaagatgaatccaattgctagttatctgttcggtggttttgcatcagctgaatatcaggatgttatgattattagtttgatagcatctgtcgcaatcatagtattatttttaatgcaaaaaggaattaaattactgcaagttggtgaattgaaaagtcagtctctaggattaaatgtacaacaagtaacgtatattgttcttatagtagcctccatcatgacagcagttgtggtcgcatacgttggagttattggttttataggcatgattattccacaactgattagaaaattttattggcgttatcaaataggtttacaaatgttattgaatataatcataggtgctgtagtcatgataattgcagattttataggaagtacaatgatacaacctatacaaattcctgtaggcatcgtgatggcattgctcggtgtaccagtcctattttatattttaattaaacagactaacatatga

SEQ ID NO: 3917 - DNA, 888 bp, Staphylococcus epidermidis
atgaaaagtaaactatggatagttatatgtgcattgattgtagtactggctgcatgtggtcaagatgccaatcattcatctaataataaagacactgaaaaaagcgataaaaaatatcatagaattatttcgctcattcctagtaacacagaaattttatatcgcttaggaatcggagaagatatagttggtgtatccactgtggatgattatcctaaagatgtaaaaaaaggtaaaaaacaattcgatgcgatgaatttaaataaagaagaattaataaaagctaaaccggatttgattttagcgcatgagtcacagaaaaattctgcaggtaaagtgctaaagtcacttaaagataagggagtaaaagtcgtttatgtgaaagatgcacaatcgattgatgaaacttatgatacttttaaatcaattggacaattaacggatcgtgaaaaacaagctaaagaacttgttgatgaaacaaaacacaatgtagaaaaaatcattaactccgttcctaaacatcataagaaacaagaagtgtttatggaagtatcgtctaaaccagacatttacactgccggaaaagataccttctttaacgatatgttagagaaactagatgctaaaaatagttttgatgatgttaaaggttggaaatcagtaagtaaagaaagcattattaaacgtaatcctgatattctgatttccacagaaggtaaatcaaaatcagactacatagaaatgataaaaaaacgtggcggttttgataaaattaatgctgttaaaaatacacgtattgaaacagtagatggggatgaagtttctcgaccaggtcctcgtattgatgaaggtctaaaggatttaagagacgatatatataaaaaatag

SEQ ID NO: 3918 - DNA, 366 bp, Staphylococcus epidermidis
ttggggtcggggccccaacacagagaatttcaacgagaaattctacagacaaggcaagttggggttggggccccaacacagaaaatttcatcgagaaattccacagacaaggcaagttggggttggggccccaacacagagaatttcaacgagaaattctacggacaaagcaagttggggttggggccccaacacagagaatttcaacgagaaattctacagacaaagcaagttggggttaaatatattaatagatttaattcaaagttgtcttttttcatattttgtgaaaatcaaataaaattgtatctacaaatattggtatattttgatatgatgaataggaacattaaaaataatttgtga

SEQ ID NO: 3919 - DNA, 756 bp, Staphylococcus epidermidis
atgacgaaagaacgcttcagtcccaaaacgctttctgacattaccggagttagtatacgcacgcttcattattatcatgaaaaggggttactcgtgccacaacaaatgagtgctaatgggtaccgatattataatgttcaagatatttcaaagttacaatatattctctttttaaaggaattagatttaacattaaagcaaatacagacgtattttgaaggtgatagtgattttagaactaaaatattacatgataatttttatcacattgttaaaaaaagagatcgcttaaacgatattatccgtacgttagaacatcattttcacaaagataacgatgagattgaggtaactacaatgcaaaatttcaatttaaatgaacagtatgaaaaagaagcagcaagtaagtatggagatattcattattatcaagcatataaagataaacaaaaatgtaaggatgaatcagaacagcaaaatcattttgaggaaattaataagcaattaaatatgttttttgacgaaatgaatcaactatacttaaacaaagtttctatacttgaagcaagtggaaaaactaagaaattacaatgtattttgaaagaacaagttcctaattgtgacaatcaatttttagaatatatagctcagatttatattgaggacgagcgatttgtaaagtttattaacaagcaacgtgaacgtggtttgaatttatacatttctgacgcgataaaaacatttattaaattataa

SEQ ID NO: 3920 - DNA, 636 bp, Staphylococcus epidermidis
atgttatcaatagaaaaattatatcaaattctatatcaaaatatgggtcctcaatattggtggccagcagaaacgccaatagaaatgatgcttggggcaattctagtccaaaatactaattggaacaatgcagatatagcgttatcaagattaaaagaagaaacttcttttaatgcacagacgatattgaaaatgcctttagaatcgttgcagcaagtgatacgttcgagtggtttctataaaaataaagctaaggctatacaggcattgttactatggttaaatcaacatcattttgattatagtagtatagctaagttatacggtgatagcttaagaaaagaattactcaccatccgtggtataggtgaagagaccgctgatgtcttaatagtatatatttttaaaggtaaagaattcatacctgatagttatactagacgtatttttagaaaattgggatatcaacatacagaaagttatcataaattgaaacaggaattaacacttcctgaatcattttcaaatcaagatgcaaatgagtttcacgctttattagataattttgggaaaaattattttaatggtaaggggaaacaacgctatacctttttagatacctattttaaaaaataa

SEQ ID NO: 3921 - DNA, 1662 bp, Staphylococcus epidermidis
atgaatataatcgatcaggttaaacagacgctaatagaagaaatagaagctagtattagaaaagctaacctcgcagaagatattccagaaattaaaattgaaatacctaaagatactaaaaatggagattattcttctaatattgctatggttttaacaaaaattgctaagcgtaatccacgtgaaattgcgcaagctattgtcgatcatttagatacaagcaaagcacacgttaaacaggttgatattgctgggccaggtttcatcaacttttatctggataatcaatatttaacagacattattccagaagctatcacaaaaggtgatcgatttggatatgcaacacaatctaagaatactaacattttattagaatatgtatcagctaatccaacaggagacttacatattggtcatgctaggaatgcagctgtaggcgattctttagctaatattctcattgcggctggttacaatgttacacgtgaatattatattaatgacgcaggtaatcaaatcactaatttagcacgatcaattgaagcacgatacttcgaagctttaggtgatacgagttatgagatgccggcagacggttataatggtaaagacattattgaaatcggtaaagatctcgctgttaaacatccagaaataaaagactactctgatgaagaacgcttaaaaacgtttagacaacttggtgtcgattatgaaatggaaaaattaaaaaaggatttatctgattttaacgtgcactttgataattggtttagcgaaacatctttatatgaaaatggcgcgattaaaaatacattatctaaaatgaaagagctaggctatacgtatgaagcagatggcgcgacttggttacgtacaagtgactttaaagacgataaagatcgtgtattaataaaaaaagacggtaattacacttatttcacaccagatacggcctatcactacaataagattaatagaggaaatgatattttaattgatttaatgggtgctgatcaccacggttatattaaccgtctcaaagctagcttagaaacatttggtgtagacagcgatcgtcttgaaattcaaattatgcaaatggttcgccttatgcaaaacggagaagaagtgaagatgagtaagcgtacaggcaatgcgattactttacgtgaaattatggatgaagtcggtatcgatgctgcacgttatttcttaacaatgcgtagtcctgattctcattttgactttgatttagagttagctaaagagcaatctcaagacaatccaatttattacgcacaatatgctcatgcaagaatttgttctattctaaagcaagctaaagaacaaggtattgaagtgtctactgatgcagacttttctaaaataaataatgataaagcaatagacttattaaaaaaagtagcagaattcgaatcgacgatagagagtgcagccgaacatcgcgcacctcatcgtctaactaattatattcaggatctagctgcagcattccataaattttacaatgctgaaaaagtgcttacagatgatacggaaaaaactaaagcacatgtagctatgattgaagcggtgcgtattaccttgcacaatgcattagcattagtaggtgttacagcaccagaatctatgtaa

SEQ ID NO: 3922 - DNA, 417 bp, Staphylococcus epidermidis
ttgaataaaaatattaacattcaaacccgtcaagttttgaaacagaatggtgaaaagcagagatttgagtttactacaaaaggttcttggcaacaaaaatttgcagattttatacgttacgaagaacaaattgaagatgctaaagttaatgttacgattaaaattgaagatagcggtgtaaagttaattcgtaaaggcgacattaatatgaacttacatttcgtcgaaggacatgagacgacaacactctatgatgtacctgctggaaaaatacctttaactgttaaaacactaagccttatgcatttcgttactcataatggcggtaaacttaaaatacattatgagttatatcaagatgaacaaaagatgggttcttatcaatatgaaataaattataaggagataagcgaatga

SEQ ID NO: 3923 - DNA, 393 bp, Staphylococcus epidermidis
atgcaatttaaattaaaagaagataaaattttagagtttttagatttaaatttcccacaacaaacatttgaaaaggggcgtctcctaattgggcaaaataagagacaaccattacacgtttattattttggagaaaaattcttggctcttttaaatgtaaattttaacacttttgaatatattaaagtagatgaagtcgattataatgatataaaaaaaatcactttaaaagacggactacttttaaaaaaaatgtttattgagacagaggattttatgtttaactatagtacatctaaagctcttttaagtgattttcaaaataataattttaatcactttattcaaaataaaaaagagcgtgtaatatttgaagatggacatttcatctaa

SEQ ID NO: 3924 - DNA, 1023 bp, Staphylococcus epidermidis
atgaaagcagctgtagtaaccaaagatcacaaagtaagtattgaagaaaaacgtttaagagaattaaaacctggagaagcattagtaaagactgaatattgtggtgtatgtcacactgatttacatgttaaaaatgcagatttcggtgacgtaacaggtgtaacgctgggacatgagggaattggacgtgtcattgaagttgctgataacgtagattcattaaaggtaggggatcgtgtatctatagcatggatgtatgcagcatgtggtaattgtgagtattgcacaactggtagagaaacattatgcagggatgttctcaatgccggatatactgttgacggggcaatggctgaagaagtcattgttgatgcgaattatgcagttaaagttccagaaaatcttgatccagcggctgcttcatctattacctgtgcaggtgtgacaacatataaagcagtaaaagtgagtggcatcgaaccaggacaatggttaggcgtatttggtgtgggtggattaggtaatttagcattgcaatacgccaaaaacgtaatgggagcgaaagttgttgcattcgacattaatgatgataaattaaattttgctaaagagcttggtgctgatgcaatcataaattcaactaatgttgatcctattgaggaagttaatcgtctaacgaataataaaggattagatgcaacggtgattactgctgtagctaaaacaccttttaatcaagcagtggatgttgttaaggcgggtgcacgtgtggtagcagtaggacttccagtagacaaaatggatttagatattccgcgtttagtgcttgatggaattgaagtcgttggttcattagttggtaccagacaagatttaagagaagcatttcaatttgctgccgaaaataaagttattcctaaagtccaattaagacaattatctgaaattaacgatatttttgatgaaatggaaaagggaacaatcacaggtcgaatggtcattgatatgagaagctcgcactaa

SEQ ID NO: 3925 - DNA, 1275 bp, Staphylococcus epidermidis
atgaaagtgaagtcgcaagttttatatggaaaatctgaaattgaaatcaatgtgcctgatgatagcacaatcatagagcctcaaaacatcaatgctattcaagactatgaatcagcaattaaaaatgtattaagaaaccccacaaattctaaacctttaaaagaaatggtaaacagtaatgatattgtttctattgttattagtgatataacacgtccaacgcctaaccatattcttgtacctttactaattgaggaattaaatcatgttcctcgtgagaatttcgtaattattaatggtacagggactcatcgagatcaaacgcgagatgaattgattcaaatgttaggtgaagatattgtaaattcagtaaaaatcgttcacaatcattgctcagaaaaagaaagtctagctaaagtgggacacagtcaatatggatgtgatgtatatttaaacaaagcatatgtagaatccgattttaaaattgtaacaggttttattgaacctcacttttttgccggattttcagggggacctaaagggataatgcctggaattgcaggtttagaaacaattcaaacttttcataatgcaaagatgattggcgattcgagatcaacgtggggaaatttagaagataatcctgttcaagacatggcacgggaagttaaccgtatgtgtaaacctgactttttacttaacgttgcattgaataaaagtaaagaaattactgcagcatttgctggtgaaatctttgatacacacaaagaaggatgcgcatatgtaaaagaacatgcaatgtttaaatgtgatcaacactttgatattgttatcgcatcaaattctggctatcctttagatcaaaatttatatcaaacagtaaaagggatgagtgcagcgagtaaagttgtaaaaaaagacggtcatattattatggtatctgaatgtgcagatggctttcctgatcatggtaaatttgccgaaattttcaaaatggcagacacacctcaaggtattttagaacttattcacgatccaaactttaaggaagttgaccaatggcaagtacaaaaacaagcaagtattcaaacttttgccaatgtgcatgtttattcagaacttactgaccaacaacttaaagactcgatgttaatcccaacctctaacattgaacatacaatacaagaattagaacatcgatatggtcgtaaattaaccattggtgttatgccacaaggtcctttaacgataccgtacgtagaagacaaagaataa

SEQ ID NO: 3926 - DNA, 828 bp, Staphylococcus epidermidis
atgactgaattaaatactaaagaaatgaaattagacgcactattgaaagacatgcagagtgtagtcattgccttctcaggtggagtagatagtagcttgttactgaaaaaagcgattgatgttttaggtgttaactatgttaaacctgttgtagtaaaatcagaattatttagaaatgaagagtttgaactagcgcttaaacttggacaaagtctaggtgttgaagtattagaaactgaaatgtctgaacttcaagatgcgaatatcgttaaaaacacgcctgaaagttggtactatagcaagcgcttgatgtatagtcaacttgagaatattaagaataaactaggatttaattatgtgctagacggtatgattatggatgacttagatgattttcgtcccggattaaaagcaagagacgactttggtgtgcgtagcgttttacaagaagcaaaactatataaatctgaagttagagaattaagtcatcaacatgacttgcctgtatggaataaaccagccttatgtagtctagcatcaagaataccttatggtgaggaattaagtttcacaaaagttaacaagatcaacgaagcagaaaaattcattttaagcctaggtatcaaccacgtacgagtacgctatcatcacaacatagcacgcattgaagtaacagaagatcaattaactaatcttcttaaattgaaagacagtatcatattacatttgaaagaattaggatttgactatgtaacaatggatttagaaggctatcgtacaggtagtatgaatgaaatcattgatatcaaatctacaagttttaaataa

SEQ ID NO: 3927 - DNA, 777 bp, Staphylococcus epidermidis
atgagccatagttataattctatagaagaggtgctcaaagctgtaaaatcaaatcaactatctattaatgatgctaaagcccaactcagtcattatgacgaattgggctttgctaaaattgacttacatagagcacagcgtcaagggtttcccgaagttatctttgggcaaggaaaaacaaaagaacaaattactaaaattatctctagtttgatatttcataatgaagttattctagtgacacgtgttgatgaaatgaaagcaaaatatattttacaacattatccaaagttagaatatcatcaaactgcacagttaattagcacgccactgaatgatataccacaatctaaatattatgtttctgtactttgtgctggaacttctgatttacctattgcagaagaagctgcgttaaccgctgaaatcatgggagtaagtgtaaaacgattttatgatgtcggggtttcaggaattcatcgcttattatccaacattcatgatatacgcaaaggtaaagtttcaatcgttatagctggaatggaaggcgctttagcaagtgttgttggaggattagtcaaccaccctgtatatgcagtaccaacgagtataggttatggagcaaacttgaatggggttaccaccctattatcaatgataaatagttgcgcacccggaaccagcgtattaaatatcaataatggatttggtggcggttacaacgctgcacagattatccatatgctagaaaataaagagagtgaggtatctttatga

SEQ ID NO: 3928 - DNA, 1188 bp, Staphylococcus epidermidis
atgacaaaagcattgtatttagattgccacgcaggtattgccggagatatgctactttctgctttagttgatttaggcgcacaccctgaagacattgaatcagaactaaaaaagttacctttagatcaatttaagctacattttcaaaaaagagtaaaacaaggtattcatgcaatgacattaaacattgatgttaaagaatcaaatcatcatcgtcacgttaatgatatatttaaaatgatagatgacagcactcttccggaaagggttaaatatcgcagtaagaaaatttttgaaatcattggccaagcagaagctaaaattcatggcatgtcgtttgaagaagttcactttcatgaagtaggggcaatggactctattatcgatattattggtggttgtattgcactagaacaactagggattaacacattatactgttcagctattccaacaggtcatggtaaaatccatattgctcatggcatttatccaatccctgcacctgctactgctgaaattcttaaaggtatcccaatcgcacattttgatgttcaaagtgaactcacaacccctactggtgctgcatttgctaagggactcgtttcatcgtttgggccatttccttcagcaacaatacaacatataggctatggtgctggcagtaaggattttaatttccctaatatattaagggttattcaatttgactctgaattcgagcaacaagatagcgttcaagtaatagagtgtcaaatagatgatatgacacctgaagcattaggtgattttatgaataatgcgttagaacaaggtgctttagatgcttactatacgcctatatttatgaaaaaaagtcgcccaagcacgcagttaacgttaatatgtagattacatgataagatatatttcgaacaacttatcttacaagaaacaagttctttaggcgtcagaagtacttctgttaatagaaagaccttgaatcgcgcgttcaaaattctttctacacaacacggctctgtttccattaaatttggtctacaaaatggaaaaattatgaaaatgaaacccgagtatgaagatttgaagaaaatggctaaaactacaaaccaaccgtttcaagtaattcataacgaggtattacaacaactctatcaaacatatcgtataggagacacacttcaataa

SEQ ID NO: 3929 - DNA, 507 bp, Staphylococcus epidermidis
ttgtctgagaaaaaaggcttcaatttcaatattataaaaaatgatccactagatggtcataaaggaaccaatattggttcaattagtttagataatattgccccggtttttatagatgttgaaaatcagaaggcatttgttgatattggtggtatgcatgcacgtgctgaagttgaaaagggtgtcaagtggattactgacaaatcgcaagttgaaggtgaggaggctaaagcatattggctatgttgggtgacgaccgaacgtagtgaacaaggaccatattatgcgggtgtgactgcatgctatttattagttaacaaaagtattagacgtggttataagagcatgccagaacatgttaatatgatggataagtccatgaaacatcaatttatcatcgaccaaatcggtgatgataacaaacaaattttaaaagaatttctacagaatcataacgttgaaatgtggaataattctagtgaagaactatatcgagcatttgaatag

SEQ ID NO: 3930 - DNA, 1299 bp, Staphylococcus epidermidis
atgacgctatcatcatatgcaacgagtaaattaacagaagaaaaggtatttaaagatccaattcaccgatttatccacgtacaggatcaattgatttgggatttaattaaaacaaaagaattccaacgcttgagacgtattaaacaactaggtactttgtatttatcttttcatacagccgaacatagtcgttttgggcactctttgggtgtttatgaaattgtgcgtcgaatgattgatgagacatttataggacaagacgcgtgggataatacagatcggccactagcgttgtgtgctgcgttgttacatgatttaggtcatggtcctttctctcatagttttgaaaaaatatttaatacagaccatgaagcatttacacaagctattattacaggaaatactgaggttaatggtgtactaagtcgagtctctgataactttcctaaacaagtagctgatgtaattaataaaacgcacgataataagcttgttatttctatgatttcctcacaaattgatgctgatcgaatggactatttacaaagagatgcatattttacaggggtaacgtatggctcatttgatatggagcgtattttaaggttgatgagaccatctaaagaagaagtgttaattaaagatagtggtatgcatgctgtcgaaaatttcattatgagtcgttatcaaatgtattggcaaatatattttcatccagtaagccgtggtggggaagttttattaaacaattgtttaaaacgagctaagcagctttataatgaaggatatgaatttaaaatgtatccaaaagacttcataccattctttgaagaaacaatgacgattgaacaatatgtggaacttgatgaagcagttgtattgtattacttgaagaaatggattcatgaaaatgatccaatattaagtgatttatcaagacgatttatcaatagagatttatttaaatatattcctttcgacggttcaattattaccatttcggaattgcaagaattatttgaagcgggtggtattaatcctgattattactttgtaagtgaagcattttcagatttaccttatgattatgatcgcccgggatcaaatcgcaaaccgattcatttattaaaaagtaatggtggaattacagaaataagtaatcaatcattggtaatcaatagtattacagggattaatagagaagaccataaattatattatcctaaagaaatgattttaaaaattaaagattatcaagttaaaggttctattattaacttgcttaatgaattaaactaa

SEQ ID NO: 3931 - DNA, 477 bp, Staphylococcus epidermidis
atgtatagtgtcagacaagcaactgaaaaagatgctgtagcgataagagatgttgcgacaaaagcttggtataacacatatttaaatatttatgctgcttcaacagttaatgaactgttggccgcttcatataatgaaacgcatttaaaaaagagactaaatgagcaattatttttagtggcagaagaagatagtgagattgttggttttgcaaatttcatttatggtgaagagctttatttatctgcacactatgttaaacctgaatctcagcataaaggttatggaactcgtttgctagaagcggggttaaaaaggtttaaagaccagtatgaaacagtttatctagaagttgataacaataatagcaatggcatcgaatattatcagaatcatggattcgagattattcgctcatatcaacctgaaatgtatggtgaaatcatggatttagctttaatgaagaaatcattttaa

SEQ ID NO: 3932 - DNA, 939 bp, Staphylococcus epidermidis
atggtaaaacaagtacgattaggtaaatctgatgtcaatgtttttcctatcgcattaggcacaaatgcagtaggtggtcataatttatatcctaatttggatgaagagcaaggtaaagaagttgtacgtcaagctattgataatggtataacattattagatacagcatatatctatgggccagaacgttctgaagaattagttggacaagttgtaaaagaatatccacgcgagaaagtgcaaattgcaacaaaaggttcgcatgttattaaagaaaatggagaagttgttcaaaataacgatccagaatatttaaaacagcaagttgaaaatagtttggaacgtcttcaagtggattatattgatttgtattatattcattttcctgatgacgatacaccaaaagataaagcagtggcggctctcaaagagcttaaagatgaaggtaaaattaaagcaataggtgtatctaatttctctttagaacaattaaaagaagcgaataaagatggatatgttgatgttgttcaattagaatacaatttattacatcgtgaaaatgaagaagtaatggcatatgctgcagaaaataatattacatttgttccttacttcccacttgcttcaggtatactagctggcaagtacgatgaaaatcaaacatttgaggatcatcgtgcagaacgtcctgattttcaaccagacgtattcaaagataatgtgcgtcgtgtaaaagcattaactgatattgcagaggcacatgatacaacgattgccaatgtcgtattagcattttatcttacacgtccatcactagatgttgtcatccctggtgcaaaacgtgcagagcaagttgttgaaaatattgatgctgcaaatattgaattatcgcaaggtgaaatagacaaaattgatagtttattcccaattaaaaaataa

SEQ ID NO: 3933 - DNA, 423 bp, Staphylococcus epidermidis
atgaatttagaattcaatattgcagtacatgtactatgttttcttgctcaacatgatcaagaacaatttaatagtaaagaattagctaaattaacatgtctgaaccctgtacaacttaggcgagttctagcatatttaactgaacacaactatatcaaagttcagcgtggtaaagcaggaggctatcaagccaatcaacatactgctcaagtagatttagccaagttatatcaacactttgttttagataaaaataatagccaaagacgatttactggcgattctgacagtcattgtcaaatttctaagaaaattgctcatacaatgtcacattattattctcaagaacatcaaataatattagatttttacaaaaataaaaatattacagatgttttggcagatattttacaggagggataa

SEQ ID NO: 3934 - DNA, 1332 bp, Staphylococcus epidermidis
atgaaaaattatgatttgattattattggttttggaaaagcaggtaaaacattagcggcacatgctgctagtcacggacaaaaggttgcagtggtagaacaatcaacaaagatgtatggcggtacatgcattaatatcggatgtataccgactaaatcattaattcatgatggtattgaaggtagttcattcaaagaggctattactagaaaaaaagaagtcgtacaggcattgaataacaagaactatcaaggcttaaattcaaaggacaatatagatgttctaaattataaagctaattttatttctaacgaggtaatagaactacaagataataatggaacaattcaagaaacaattacagcagataagatagtaatcaacactggttcacgtgcaaatatcccagatatcaaagggatagatacagctcaaaatatatatgcttctactggattactaaatattgactatcaacctcaagaacttgttattattggtggtggttatatcgctctcgaattcgcttcaatgtttgcaaattttggaacacatgtaacaattcttgagcgtggtgatgctatcatgacaaatgaagatcaagacattgcaaatcttattgtcaaagatttacaagataaaggtgtgactataaacactaatactagtactattgcattttcaaacaataaagatcaaactatcatacacacaaatcatggagaaatatcagctgatactgtgctcttagccacaggtcgtaagccaaatacaaatcacttaggtcttgaaaatacagatgtaaaaatcggaaaacaaggtgaagtaattgtaaatacacatttgcaaagtacagtgaaacacatatacgctgcaggtgatgttaaaggtggattgcaatttacgtatatttcactcgatgattatagaatcattaaatcacatctatttggtgatggttctagaacaactgaaaatcgtggtgcaataccttatacggtctttattgatcctcctctatctagagtaggactaattgcaagtgaggcgaaattacaaggatacgatattctagaaaataaagtctttgtcagtaacataccccgtcacaaaatcaataatgattccagaggtttatttaaagcagtgattaataaagatacaaaagaaattttaggagcgtcattatatggcaaagaatcagaagaactgattaacttaatcaaacttgctatagatcaacatattccttacacagtattaagagataatatatacacacatccgacaatgaccgaatcttttaatgacttgtttttagaaccactttga

SEQ ID NO: 3935 - DNA, 342 bp, Staphylococcus epidermidis
atgaaaaataaatttttaatctgtgatgagtgtcaggctgtgaatttaaaatctttgaagcgaaaattagaaaaattagatccggaagctgaaattgaaataggctgtcaatcttattgtggaccaggtcggcgtaaaacatttgcatttgttaataatcgaccacttgctgcgttaaccgaagaagaacttatggaaaaggttacaaaacaattaaaaaaaccacgtgatccagaagaagaagagcgacttagaaaacgtaacgaagaacgaaaacgtcgtaaagaagaacaagattgcaaacttaaggaaaagttaaagaagcgcaaagcagagaaataa

SEQ ID NO: 3936 - DNA, 1077 bp, Staphylococcus epidermidis
atgattcaggtaaaagcccccggaaaactttatattgcaggcgagtatgcagtaaccgaaccaggatataaatctattcttattgcagtaaatcgctttgtaacggcgacaattgaggcgtcaaataaagttgaaggtagtattcattccaaaacattacattatgaaccagttaaatttgaccgtaatgaagatagaattgaaatctcagatgttcaagctgctaagcaactgaaatatgttgtgacagctatagaagtgtttgaacagtatgtgcgcagttgtaatatgaatttaaagcactttcatttaaccattgatagtaacttagcagataactctggtcagaagtacggattaggttcaagcgccgctgttttagtatctgttgttaaagctttgaatgaattctatggtttggaattatcaaacctttatatttataaattagctgtaattgcaaatatgaaattacaaagtttaagttcatgtggtgatattgcggttagtgtctacagtggttggcttgcatatagtacgttcgaccatgactgggtgaaacagcaaatggaagaaacatcggtgaatgatgttttggaaaaaaattggccaggcttacatatcgaacctttacaagctcccgaaaatatggaagtccttattggatggactgggtccccagcttcttctccacacttagtgagtgaagtcaaacgtttaaaatcagatccaagtttttatggtgattttttagatcaatctcatgcttgtgtagaaagtttaatccaagcttttaaaactaataatatcaaaggtgttcaaaagatgatacgtataaacagacgtattattcaatctatggataacgaagcatcagttgaaattgaaacagataagctaaaaaaattatgtgatgtcggtgaaaagcacggtggcgcttctaaaacttcaggtgctggtggtggcgattgcggcattactattatcaataaggtaattgataaaaatattatttataacgaatggcaaatgaatgatatcaaaccattgaaatttaaaatttaccatggacaataa

SEQ ID NO: 3937 - DNA, 984 bp, Staphylococcus epidermidis
ttggtgaaaagtggcaaagcacgagcacatacaaatattgcgttgattaagtattgggggaaagctgatgaaacttacattattcctatgaataatagtttatcagttaccttagatcgattttatactgaaacaaaagtgacttttgaccctgattttactgaagatcgccttattttaaatggaaatgaagtgaatgccaaagagaaagaaaagattcaaaactatatgaatatagtgagaaatttggctggaaatcgtttgcatgcgcgaattgaaagtgagaatcatgtgccaacagcagctggacttgcttcttcagcgagtgcttacgctgctttagctgccgcttgtaatgaagctttgtcattgaacttatcagatacagacttatcacgtttagctcgacgtggttcaggttctgcttctagaagtatttttggtggatttgctgaatgggaaaaagggcatgatgatttgacctcatatgcacatggaattaattccaatggttgggaaaaagatttatcaatgatatttgtagtgattaataatcagtcaaaaaaagtatctagtaggtcaggtatgtcactaacaagagatacttctagattctatcaatattggttggatcacgttgatgaagatttaaatgaagctaaagaggcagttaaaaaccaagattttcaacgcttaggcgaagtcattgaagcaaatggtttacgtatgcatgccactaacttaggtgctcaacctccttttacgtatttagtgcaagaaagctacgatgctatggcgattgtggaacagtgtcgaaaagccaatttaccttgttactttacaatggatgcgggtcccaatgtaaaagttttagtagaaaagaaaaataaacaagctgtgatggaacaatttttaaaagtatttgacgaatcgaagattatagcaagtgatatcatcagctctggcgttgaaattattaagtaa

SEQ ID NO: 3938 - DNA, 921 bp, Staphylococcus epidermidis
atgactagacaaggatacggagaatctactggaaagattattctaatgggtgaacacgcagttacatttggtcaaccggcaatcgcaattccatttaatgctgggaaaattaaagtcctcattgaaagtttagatgaaggaaattattcttctatcacaagtgacgtatatgacggaatgttgtacgatgctcccgaacatctaaagtctatcattaatcgctttgttgaaaaaagtggagtgaaagaaccactatcagtaaaaattcaaactaacttgcctccatcaagaggtttaggttcaagtgctgcagtagcagtagcgtttgtacgtgccagttatgattttatggatcaacctttagatgacaaaacattgattaaagaagcaaattgggcggagcaaatcgcacatggtaagccaagtggtatcgatacgcaaacgattgtgtcaaataaacccgtatggtttaaacaagggcaggccgaaacattaaaatcactaaaattgaatggttatatggttgtcattgataccggagtaaaggggtctaccaaacaagcagtagaagatgttcacgtattgtgtgaatctgatgaatatatgaaatatgtagagcacattggtacacttgttcacagagctagtgaatcgattgaacagcatgatttccatcatttggctgacatatttaacgcatgtcaagaagacttgagacatttaacagtaagtcacgataaaattgaaagattacttcaaattgggaaagaacatggtgccattgctggtaaactaactggtggaggaagaggtggcagcatgcttcttcttgcggaaaatttacaaactgcaaaaactattgttgctgcagttgaaaaggctggcgcagcacatacatggattgaacatttaggaggttaa

SEQ ID NO: 3939 - DNA, 840 bp, Staphylococcus epidermidis
atggacttagcaactaaatattttaatcaaatcaactggcgttatgtcgatcattcaagtggtttagagcccatgcaatcttttgcgtttgatgacactttttccgaaagcgttggtaaagatttatcttgtaatgtagtacgaacgtggatacatcaacacaccgtgattttgggcattcatgattcgcgtttaccatttttaagtgatggtattcgttttcttacagatgaacaaggatataatgcgattgttagaaattctggtggcttgggtgtcgtattagatcaaggaatattaaatatatctttgatttttaaaggacaaaccgaaacgactattgatgaagcctttacagtgatgtatttattgattagtaaaatgtttgaggatgaagatgttagtatcgatactaaagaaattgagcaatcgtattgcccaggaaaatttgatttaagtattaatgataagaaatttgccgggatttctcagcgacgagtacgtggtggtatcgcagtgcaaatatacttatgtattgaaggttctggctcagaacgggcattaatgatgcaacagttttatcaacgtgcacttaaagggcagactactaagtttcactatccagacatagatccctcatgtatggcatctttagaaactcttttaaatagagaaattaaagtgcaagatgttatgtttttattattatatgcactaaaagatttaggggccaacttaaatatggatcctattacagaagatgagtggacacgttacgaggggtactatgataagatgctagaacgcaatgcgaaaataaatgaaaaattagatttttag

SEQ ID NO: 3940 - DNA, 990 bp, Staphylococcus epidermidis
atggctgatttattatctgtattacaagacaaattatccggaaaaaatgtaaaaatagtattacctgaaggtgaagatgaacgagtgctcattgctgcgactcagctacaaaaaactgactatgtttcacctatcgttttaggaaacgaagataatattaaatctcttgcgtctaaacacgctttagatttaacgcaaattgaaatcatagatccagcgacgagtgaacttaaagatgagcttgtagatgcttttgttgaaagacgtaaaggtaaggcaactaaagaacaggcagttgaattattagataatgtaaattatttcggaacaatgcttgtgtatactggaaaggctgaaggtttagtgagtggtgctgcacattctactggagatacagtaagaccagcattacaaattatcaaaactaaacctggtgtatctagaacatctggtattttctttatgattaaaggtgatgaacaatatatttttggagattgtgctattaatccagaattagatgctcagggacttgctgaaattgcagtagagagtgccaaatcagcacaaagctttggaatggaccctaaagtagctatgttaagcttttctacaaaaggttctgctaaatcggatgatgttactaaagtgcaagaagcattgaagttagctcaagaaaaagctgaagcggatcaattagagcatgtagttattgatggggaattccaatttgacgctgctattgttcctagcgtagcagagaagaaagcacctggtgcaaaaattcaaggtgatgcgaatgtatttgttttccctagtctagaagcaggtaatattggttataagattgctcaacgtttaggtggatacgatgcagtaggaccggtcctacaaggattaaactctccagtcaatgatttatctcgtggttgctcaactgaagacgtttataacttatctattattacagctgctcaagccttacaataa

SEQ ID NO: 3941 - DNA, 750 bp, Staphylococcus epidermidis
atgagtgaagcagcagaaactttagatggttggtatagcttacatttattttatgcagtagactggacaacttttcgtttaattgctgaagatgatcgtgaagcaatgatcactgaattagaaacatttgttaaagataaagcagttgctagagaatcacatcaaggtgatcatgcaatttataacattacaggtcaaaaagcggaccttttactatggtttttacgtccagagatgaaagagctaaatcaaattgaaaatgagtttaataaattacgtatcgcagactatctcattccaacttattcctatgtgtcagtgatagaattaagtaattatttagcaggcaaatctgatgaggatccttatgaaaatccccacgttaaggcacgattataccctgaattaccacattctgaatatatatgtttctatccaatggataaacgacgcaatgaaacttataactggtacatgttacctatcgaagaccgtaaaactttaatgtataaccatgggatgataggtcgtaaatatgctggtaaaatcaaacagtttatcacaggttcagtaggttttgatgactacgaatggggtgttacattattttcaaatgatgtacttcaattcaaaaaaattgtctatgaaatgcgttttgatgaaacgactgctcgttatggcgaatttggtagtttctatattgggcacattttaaacattgaagacttcaaacaattttttagtatataa

SEQ ID NO: 3942 - DNA, 765 bp, Staphylococcus epidermidis
atgaataaggatacaattgaaacatctcatgaagcattgataaaagatgttgttatgattactgctcgtatattactagaatctggagcagaaggtacacgggtagaggataccatggcacgtattgctacaaaattgggctatcctgaaagtaatagtttcgtgactaatactgtaattgaatttgttttacataacgaagcatatcctcggttgtataggattaaaactcgagatacgaacttaataaaaatttctcaagctaatgaaatctcacgtcaaattacaaatggcacgatgacgcttgaagaagctaagtatcaattagaggaaatatatgttgctaaaagagatagcagtctacccttcaaaggaattgccgcagcaattatcgctacgagcttcctctatctacagggaggtcgtctggttgatatcatcacagctgtattagctggaacgattggatacttagtagtagaaatattagatcgaaagctacacgcacaatttattccagaatttataggttctttggtaataggtattatttctgtaattggacatgcatttgttcctagcggagatttagctacaattatcattgccgcggtcatgcctattgtacctggagtacttattacaaatgctattcaagatttattcggaggacatatgttaatgtttacaacaaaatctttagaagctttagttactgcctttggtataggcgctggtgtaagttcaatattaattttagtctag

SEQ ID NO: 3943 - DNA, 453 bp, Staphylococcus epidermidis
atgttttggatatttaattttatatttagctttcttgcttcactctttttctgtgtcatatttgatgcccctaggaagttgtattttgcttgtggctttgtcggcgcttgtggatggatggtttatactgtattatttaacggctttgagctccatacgatttactcaagctttttcggaagtttagcgttaggtctacttagtcattacatggctcgtcgaaaaaaagagcctgtaattatttttatggttacaggtattatacctctagttccaggtggacttgcttatgatgccactaaaaacttagtgttattacactttggtaaggcgattaacacaatgcttgaagtgacattaatagcaggtgctattgctttgggtttattatttgctgatcaaatttctaaaatcgttatttcaggttttgcgcgtaccagaaaaggattgtaa

SEQ ID NO: 3944 - DNA, 1491 bp, Staphylococcus epidermidis
atggaaaataaaaataacaatgtagatagaggtaaccttaagcagaatctttccgagaaatttgtatgggctattgcatatggttcgtgtatcggatggggcgcttttatattaccaggagattggattaaacaatcagggcctattgcttcttcaataggtatagtaatcggtgcgttattgatgattcttattgcagtaagttatggcgcactcgttgaaaaatttcctgtttctggtggcgcatttgcttttagttttttaagttttggaagatatgtaagctttttctcttcatggtttttaacatttggctatgtttgtgttgttgcgttaaatgcgacagcattcagtttgttgattaaatttttattaccaaatgttttgaacaacggaaagttatatacagtagctggttgggatgtttacataactgaaattgttatcgcaacagtgctacttatagtgtttatgttgattactattagaggtgccagtgtgtctggttcgttacaatattacttctgtgtagcaatggtccttgtagttgcacttatgtttataggttctttctttagcagtcactttagtttgagtcatttagagccattagcaagtgtagataaaggatggtttcaatcaatcattatgattgtctctattgcaccatgggcgtacgtagggtttgataatataccgcaaactgcagaagaatttaacttttctcctaacaagacgtttaaacttattgtttatagtttactagctgcgtcactcacttatgtagtgatgttactttacacaggctggctaggtacacaagcaacaagtttaaatggtaacttatggcttaccggtgcagtgactcaagatgcattcggttttattggccttgcagtattagcagtggcaattattatggggatttttactggattaaatggatttttaatgagttcgagtcgcttactattttcaatggggcgctctggcattatgccaacagtatttagtaaattacacagtaaacataaaacaccatatgtcgctattatcttcttagtagctgtatctttaattgctccttggttaggtagaacggcattaacatggattgtagatatgtcatctacaggtgtttcaattgcatattttattacttgtttatctgctacgaaattatttagttttaataaacagagtaatacgtatgcaccagtttataaaatttttggtattataggatcgattgtatcctttgtgttcttatgtttattgcttattccaggttctcctgcagcactttcgataccatcatacatcgctttaggaatttggttggtaataggattaatcttttttatcattcgcttgccaaaacttaagaaaatgaataatgatgaattgagtcgattgattttaaatcattctgaagacgaagttttagagatgattcatgaacctggccaatctaattcaacgaataaataa

SEQ ID NO: 3945 - DNA, 372 bp, Staphylococcus epidermidis
atgatgaaagtttttattattttaggtgcattaaatgcaatgatggctgtcggtactggggcatttggagcacatggattggaaggtaaattatcagataaatacatgtcaatatgggaaaaagcaacaacttatcaaatgtatcatggattaggtctgttagttataggtttaataagtggtacaacatcaatgaatgtaaattgggctggttggttattattctttggtattgtctttttcagtggttccttgtatttcttagccttaacacaagttcgtattttaggtgcaattacgccaataggtggtgttctatttataattggttggcttgttcttgtaattgctacacttaaattcgcagggtaa

SEQ ID NO: 3946 - DNA, 360 bp, Staphylococcus epidermidis
atgaacaaagaacagattctacaattgattgagcaagaattggtacaagcagatgaagctcagacagatactgaatttgaaaagcatatgtatgctatacacatgctcacatctcttgttagttctcatcaaagtcgttcaacaatagagaaattaaatcgttctaaaccaatgaatagtaatataaaagatgattatgagatgaaacaacagacttcacaaaaacatgatgtaactgcagctgaaatagaagcaatgggtggtaaagtaccacaatcaatgaaaaagcatcatacttctaataatatgatgattacagatgatcatgttggtaatggtgaatctatttttgatttttaa

SEQ ID NO: 3947 - DNA, 651 bp, Staphylococcus epidermidis
atgaaatggtcagaggtatttcatgatataacaacacgccatgattttcaggcgatgcatgactttttagaaaaagaatatacgactcaaatcgtttatccagataaaaaaaatatctatcaagcatttgatttaacgccttttgaagatatcaaggttgttattttaggacaagatccttatcacggtcctaatcaagcacatggtttagcattttcagtgcaacctcatgctaaatttccaccatctttaagaaatatgtatcaagaactagaaaatgatatagggtgtcatagaacttcgccccatttacaagactgggcaagagaaggtgtcttgctattaaatacggtattgactgttcgacaaggtgaagcacattcacatcgaaatattgggtgggaaacatttacggatgaaatcatacaagctgtttctaattatcgtgagcatgttgtttttattctttggggaagacctgctcaacaaaaggaacgattcattgatacatctaaacatttaattattaaatcgccacatcctagtccactatcggcttttagaggattttttggttctaaaccttattcaactacaaataattatttaaaatctaaaggaaaaacaccagttcagtggtgtgaaagttag

SEQ ID NO: 3948 - DNA, 981 bp, Staphylococcus epidermidis
atgtgtacggctatttctttatatacaaaacaacgttatcattatttagctagaacgatggactttgcatttgaatttaatggtatcccaaccattgttccacgtcattatcactaccaatttgatctagattcagacatgcgtcttgaatatggttttgttggaacaaatttaaaagtaggacgttatagatttggtgatggtataaacgaaaaaggtttagctatttcgaaccattacttcactggtgaagcctcatacagtacccataaacgttatggttattttaacttagcacctgaggagtttattgtttgggttttaggttttaataaaagtattagcgaattaaaacaaaaggttaagaagatcaatattatgaatgaaaaaaatacaactttgaatatcgttcctcctttacatttcatggtcactgatgaaacaggacataccgtagccatagaacctcacaatggcttattaatagttaaagataattatgttcataccttaacaaatgcgcctaaattagattggcatctatctaacttaagaaattatgcttatttaacaccacagaaatcaaccaatcaattaataggtaaagtgctagtaagatcaatgggttgtgaagcaggaacaaatggcttaccgggtggttatacttcaacagaacgttttatacgggctacatatttaagacaccaactacgctgttcacataatgaagatgaaaatttaatgaattgttttaaagttctagaatcagtcagtatccctcaaggtgcagttatcgatgccaataaaatacattacacacaatatcaattagtgatggaaagtaaagaaagaagctattatattaagccatactttagtaatcaaattttcaaaataaaattaactgaagatcttttatgtaagaatgagttgacattcttacctattaatcacgaattaaagataacatcaatacagtaa

SEQ ID NO: 3949 - DNA, 834 bp, Staphylococcus epidermidis
atgatggctttaaaaaaagtattaacgatagctggttcagatacaagtgctggtgccggtatgcaagcagatcttaaaacgttccaagaacttgatgtatatggaatggtagctttaacatctattgtgacaatggataaagaaacatggtcccatgatgtaacacccattgatatgaatgtcttcgaaaaacaacttgaaacagcaatatcaattggacctaatgctattaaaacagggatgttaggaacacaagacattattaaacgtgccggagatgtttttgttgaatctggtgcagactattttgtagttgatccagtaatggtttgtaaaggtgaagacgaagtacttaacccaggaaacacagaagcaatgattcaatatttactacctaaagctacagttgttaccccgaatttattcgaagcaggtcaactctctggtttaggaaaattaacatcaattgaggatatgaaaaaagctgctcaagtgatttatgacaaaggcacacctcatgtcattattaaaggtggcaaagcactcgatcaagataaatcttatgacttgtactatgatggccaacaattttatcaattaactactgacatgttccaacaaagttataatcatggtgcaggatgcacatttgctgctgccacaacagcttatcttgcgaacggtaaatctccaaaagaagcaatcattgctgctaaagcatttgtagcttcagcaatcaaaaatggttggaaaatgaatgactttgtaggacctgttgatcatggtgcatataaccgtattgaacagattaacgttgaagtcactgaggtttaa

SEQ ID NO: 3950 - DNA, 156 bp, Staphylococcus epidermidis
atgtataaagactataacatgactcaacatactctactaatggaaacttcagttcatatccccacaaatgatatttcacgacatgtaaatgatattgcagaaacaattcccgatactgaattcgatgaattcagacattatcgtagcttaatataa

SEQ ID NO: 3951 - DNA, 261 bp, Staphylococcus epidermidis
atgaaatttacaatagaaatggtgaatgaatatttaactatagttaatgatgagaatccgatccatcgttccattgtaccgggacaactcatatgtgaaaaagtattttctgaacttaatgtgaattggatgaattacaaaattaagtacttaaaaccaataaatatagatgaggaagtacaatttttaataaaagaaaatgatgaaattatagtttttaaaacgtatgatgatatcaaactaacaattactagaagttga

SEQ ID NO: 3952 - DNA, 363 bp, Staphylococcus epidermidis
atgcagctttatttgaaagatggtatggaaattagagaagttcaatttacaaatgaagaagttcaaaattattgtgaattgcttaatataaagtatgaccattatgttcctactcttatgtgtgccaagttatggccacaatttgagttgtttcaatctttttcaaagaagcctatcatattaaaagagacacacattaagacacaacatcaacttcaggtcgattgtacctatgaagcgacattgcataaggtttcacaaaaattaattaaaaatattattaagtatacatatggactcgaaataaataaagataaaaaacattgtatgtatataaaacaaatatttatcgaggtaagataa

SEQ ID NO: 3953 - DNA, 1149 bp, Staphylococcus epidermidis
atgaaacaacctgttattattgcagcaaaacgtatagccttcggtaagtatggtggccgattgaagcatttagaacctgaatcattactagaacctttatttaatcattttacagatcagtatccaaaagtaatgtctcttttggatgacgtcattataggtaatacggtaggtaatggtgggaatttagctagaaaatcattactcgaagcaggattagattttaaaatacctggtataacaattgatcgtcaatgtggttcaggtcttgaagccgttatacaagcctgtaggatggtacaaagtggtgctggaacaatatatattgcaggtggtgttgagagtaccagtagagctccttggaaaatcaaacgcccgcagtcagtttatgaatctgagtttccacaattttttgaacgggcgccttttgcaagagaaggagaagacccttcaatgattgaagccgccgaaaatgtagcgaaaaaatatcacatcagtagaaatgaacaagatgactttgcttatcgcagtcatcagttggcatcaaaaaacatgaataacggtaatatttcccaagaaattttaccgttcaaagtgaaaggtgaatgttttaatcaagatgaaagtattaaacctcaactcactctcaaaacactaggcagacttaaaccgcttttaaatgaaggaacagtcacagtaggaaacagttgtatgaaaaatgatggtgcagtattactgattgttatggaagaaaatcgggcacgtcaattaggattcaccgaagggattaagtttgtaaatagtgctactgtaggtgttcaacctcagtatttaggagtgggtccagtgccagcagtaaatcaattattagctcgggaacgattaactataaatgatataaatgtagtagaattaaatgaagcatttagctctcaagttattgctagtcaacaacaacttaacatacctttgaataagttgaattgttggggtggagcaattgctacagggcatccatatggtgcaagtggagcagcgttagtcacacgtttattttatatgaaacatcaatttagaactgtagcaactatgggaataggtggaggaataggaaatgcagctttatttgaaagatggtatggaaattag

SEQ ID NO: 3954 - DNA, 1362 bp, Staphylococcus epidermidis
atgaaaaaaataatggaatatttacagcattatattaatcaatacccgcatcgattagctttagtgtttgaagatcgatatctaacgtatggagaattaagtaaagaaattcatcaggctagtatgcgctataatgaagtaaaattaaacgaaaaagtagggctaatggatgaccatcctgtaaataatattattaactattttgcggtacatcaaagaggtggaattccttgcttttttaatcatcaatggagtaatgaaaggatacatcaacttgtaaaaagttatgacatacaatggttaattaaagataatcatcttaccttaaatcatgataactcaatttatagtgatgaggttatcccacgtaatgttatacatataggtttcacgtcaggaactacaggtttacccaaagcattttatagaaatgaacattcttggatagtttcttttaaggaaaatgagaaattactccagaattgtgaagaaaccattgtagcacctggtcctttatcacattcactttcattgtacgcatgtatttatgcattaagtactggaaaaacatttataggtcaaaaaaattttaatccactatctcttatgcgtcttattaatcagttgaacaaatcgacagcaatatttgtagtgccaacgatggtacaacaacttatttctacacaacgacattgttcattgattaaaagtattttgagtagtggtgctaaacttacattgcaacagtttcaacaaatcagcactttatatccacaagcaaatttaatagaattttttgggacatctgaagcaagttttataagctacaattttaaccaatcatgtcctgctcattctgtaggtaaacttttccctcatgtcgaaacacaattattaaatcaagatgatgatgcagtaggattattagccgttagaagtgaaatggtgtttagtggttatgtgggacagagcaatcaagaggggtcatggattaaaacaggtgacttcgcttatattaaaaatcaacatttgtttttagtaggtagagagagtgaccgtattatagttgggggaatcaatgtatatccaacagctattgaaagtttaattatggatattgaaggcattgatgaggcgcttgtcatcggtataccacatgctaaatttggagaaatagcgatattgctttattcaggtaaagtacaattgaattaccgacaaattaaatcttttttaatgaaacaactttcaagacaagaagttccatcaaaattaaagaaaattgaccatatgatttatacagaatcgggaaagattgctagaaaagagatgaaaaataaatttattaatggagagttataa

SEQ ID NO: 3955 - DNA, 648 bp, Staphylococcus epidermidis
atgaattttgatagttatatttttgattttgatggaacgctaattgatacaacaacgtgtcatgttaaagctatacaaagcgcttttaaaagattaaatttagatgaacctacagaacaagctattttacatacatatcatttaaatttatataacaattttaaaacgctagcttcacatgaattgtctttttatcaaatagaaaaattaatagatgaatatcatcgttgttttagcaacgatgaaatacatcaatcaaaagaatataccggaataagtgaagcattacaatttttacataaccaaaagaaaaaaatatttgtagtatctaataaagagacactaacaacgcaaaggtatttagattatctcggattaagccgttttataactgattcattaggtgtctgtattaaaaatgaagacaaacttctttgtgaaatgatccaaaatttgatacaaaaacatcatttaatggtaggtaaaaccgtgtatataggggacacagcacaagatatcaagaatgcgaatcaagctcatgtgcaaacatgcgctgttacatggggagcacaatctgcacacgaattgttgcatgaaaatcctcattatgttgttaatgatccagaagaacttttaacaattttataa

SEQ ID NO: 3956 - DNA, 549 bp, Staphylococcus epidermidis
atgagtgaatttaataattatcgtcttattcttgaagagttagatgctactttatctcaagtagataatacagaatatgaacgttttgctaatgatgttataggtgcagatcgcatatttacagctggtaaaggtcgttcaggttttgttgcaaatagttttgcaatgcgcttaaatcaattaggtaaaaatgcctacgttgtaggtgagtcaacaacaccttcaattaaagaacatgatttgtttattattatttcaggttcaggttctacagaacatctaagattattagctgaaaaagcacaatctgtcggtgcaaaaattgtcttattaactacaaatgcggattcgccaatcggtaatcttgcagagacagttgttgaattgcatgcaggtactaaacatgatgttgaaggttcaaagcaaccacttggtagtttatttgaacaggcctcacttatattcttagatagtattgtattacctttaatggatgcatttcacattagtgaaaaagcaatgcaagagaatcatgctaatttagaataa

SEQ ID NO: 3957 - DNA, 633 bp, Staphylococcus epidermidis
ttggaactacaattagccattgatttattaaataaagaagaagcagcaaaattagctcaaaaagttgaagaatatgtagatattgttgaaatcggtacaccaattgtaattaacgaaggcttacctgcagttcaacatttaaatgaaaatattaataatgctaaagtattagctgacttgaaaattatggatgcagcagattacgaagtaagccaagcagtaaaatatggtgcagatattgttacaattttaggtgttgctgaagatgcttcaattaaagcagcagttgaagaagcgcataaacatggaaaagcattgcttgttgatatgatagcagtgcaaaacttagaacaacgtgctaaagaactagatgagatgggtgcagactatatcgcagttcatacaggttacgacttacaagcagaaggaaaatctccattagatagcttgcgtacagttaaatctgtaatcaaaaactctaaggttgcagtagcaggtggtattaaaccagatactatcaaagatattgtagctgaagatccagatttagttattgttggtggcggtattgcgaatgctgacgaccctgtagaagcagcaaaacaatgtcgagcagctattgaaggtaaataa

SEQ ID NO: 3958 - DNA, 732 bp, Staphylococcus epidermidis
ttgaaaattattaatttagattcaaaaaatcttgcgtcattttatgtagcatgcgagttgtttaaacagataaagcagtcccctcataccaaacttggtttagcaactggtggaactatgactgacgtatatcattacttagtaaatttattaaccaaaaataaagctgatgtgtcgcaggttgaaacatttaatttagatgaatatgtaggtttaaaagcaagccatcagcaaagttaccatacctatatgaataaagtgctatttgagcaatatcctcattttgctaaaaatcacattcatattcctgatggctattcagaaaatctagaagcagaagcggaattatataacaaattattagatgaaagaggtccaattgatattcaaattttaggaattggagaaaatggtcacattggttttaatgaaccaggaacagacttcaatagtgaaacacatgtggtgaacttaacagaaagcaccataaaagcaaatagtcgattttttgacaatgaaacggatgttcctaaacaagcagtttcaatgggattagcaagtattttaaaagctaaaaggattatcctacttgcatttggtccaaagaaaaaagaggctataagtaaactgttaaatgaacaggttaccgaagatgtacctgcgaccattttacacacacatcctaatgtagaagtttatgtagatgatgatgcagcaccagattgtttataa

SEQ ID NO: 3959 - DNA, 360 bp, Staphylococcus epidermidis
ttggaaccaattaaagaacaagaagtgctagatttattaacttcttacgcaaatcagcctgtttacctacacgttgaaacaacaaatggtgcttatgcaaatcatttcgatcaacgcgtatttaacgctggaacatttttaagaaatattgtcgtgacttttgaacatgcacaacttaaagggggcgacaaagatccatatcgtgtaggtcttaaattaaaagatggtggctgggtttacgtgcaaggacttacgcactatgaagttaataagaataacgaatttttaattgcaggttttaattatgaagggcaattggctgctacaatagaaataagtaaacagccatttactatataa

SEQ ID NO: 3960 - DNA, 666 bp, Staphylococcus epidermidis
atgactgatgaaagacacgtacttgtgattttccctcatcctgatgatgaaaccttttcgtctgctggaactatcgcaagttacattgaaaaaggtattcccgtcacatatgcatgtctcaccctaggacaaatgggacgtaatctaggtaatcctccttttgcaacaagagaatctttaccacttatacgtgaacgtgagttagaagaagcatgcaaagcaattgggattacagatttaaggaaaatggggttaagagataaaactgttgaatttgaaccttacgatcaaatggatcaaatgattcaatcacttattgacgagacaaatccatcattaattatttcgttctatcctaaatttgcagtccacccagatcacgaagcaactgcagaagctgtagtacgtacagttgggcgcatgcatgtgtcagatcgcccacgtcttacacttgtagcgtttagcaatgatgcaccggaaattcttggggaacctgatattcaaaatgacatatcgcaatatagtgatataaaactcaaagctttcgaagcgcacgcttcacaaacaggaccatttttaaaacaacttgccagtcccgaaatagatggtcaagcacaaagtttcttaaaaatagagccattttggacatatcactttgaatcttaa

SEQ ID NO: 3961 - DNA, 879 bp, Staphylococcus epidermidis
atgacagaatttgacttatccactagagagggtcgttggaaacatttcggttctgttgaccctgtcaaaggtacgaaaccaactactaaaaatgaaatgaccgatttacaaagcactcacaaaaatttcttatttgaaatagaggaagtaggcattaaaaatttaacttatccagttttaattgatcagtatcaaacagctggtttatttagtttttcaacgagtttaaataaaaatgaaaaaggcattaatatgagtcgcatattagaaagcgttgaaaaacattatgataatggcattgaacttgaatttaacacactacatcaattgttgcgtactctacaagataagatgaatcaaaatgctgcaggtgttgatgtgtcaggtaaatggttctttgatcgttatagtcctgttacacatattaaagctgtaggtcatgcagatgttacttatggtttagctattgaaaatcataccgttacacgcaaagaattaactattcaagccaaagtaacaacactatgtccttgctcaaaagaaattagtgaatattctgcacataatcaacgtggtatcgttacagttaaagcatatttagataaaaataatgatgtcatcgatgattataaaaataaaattttagacgctatggaagccaacgctagttctatcttatatccaatcttaaaacgtcctgatgaaaaacgagtaacagaacgtgcttatgaaaacccacgatttgttgaagatttaattcgactaattgcagcagacttagttgaatttgattggattgaagggttcgatattgaatgtcgtaatgaagagtctatccaccagcatgatgctttcgcacgcctgaaatatcgcaaataa

SEQ ID NO: 3962 - DNA, 318 bp, Staphylococcus epidermidis
atgtcatatattcaattatctaacatattaaaagtcattgcgaatcctagcagattagaaattttagatttattatcttgtggtgaattgtgtgcgtgtgatttacttatacattttaacttttcacaaccaacactaagccaccatatgaagttacttgttgattgcaaattagtgtttgcaaacaaagttggcaataaacaaatatacgaacttaatcaccgcttatttgaacaagtgacaaatcaattaaatttacttcattcaactcataaccaatgtatttgtcatactataaagaaaggtgaaatttcatga

SEQ ID NO: 3963 - DNA, 1293 bp, Staphylococcus epidermidis
atgactactgtattagcaattgtaatatttttcatcactttaaccttaatcatttggcaacctaaagggttagacataggtatttcagcaatcattggagcacttttagttattattacgggtgtagtaaattttacagatatattagaagtgatcggaattgtttggaatgctacactaacttttgtctcagtcattcttatatcattgattcttgatgagataggattctttgaatggtcagctattcatatggttaaggcatctaatggacatggattaaagatgtttatatatatcatgatattaggggcgcttattgcagcattctttgctaatgatggtgcagccttaattttgacgcctattgttttagcaatgataagaaatttaggtttcaataataagttagtatttccttttattatagcttgtgggtttatcgcagattccacctcattgccacttgttgtaagtaatttagttaacattgtatcagcagattactttggtattaaatttgttgaatatttaatgcgtatgtttatacctaatttattttctctattagctagtatcttagttttatggttttactttagaaaatccattcctaaaacttttgatatatcaagtatttctgaacctaaagatgctatacgagacacacgattatttaaaatttcatggattattttagctttattacttataggttacttagtgagtgagttcatacatatacctgtatcatttatcactggagctatagctgtgatttttattttattagcgcgtcagtctaatgtagtgcatacgaaacaagttatcaaaggggctccgtggaatatcgtgatattttctatcggtatgtatcttgttatttttggcttaaagaatgtagggatgacattgattttagcagatattttatcatcaatagctcagcacggactttttagcagtattatgggcatgggatttgtatccgcatttctttcagcaattatgaataatatgcctaccgtacttattgatgcaatagccatcgatcaatcgcatgctataagttctataaaagaaggaatgatttatgccaatgtgattggagcagatttaggaccaaaaatcacacccattggatctcttgctacattattatggttacatgttttagttcaaaaaggagttaaaatttcttggggtacttactttaaaacgggtattgtaattactatacctgtattattctttactttgttaggtctttacctaacacttattatcttttaa

SEQ ID NO: 3964 - DNA, 399 bp, Staphylococcus epidermidis
atgcaaaagaaaactatttattttatttgtactggtaattcttgtcgcagtcaaatggctgaaggttttggaaaattaatattaggtgataaatggaatgtatattctgctggcattgaaacacatggtgttaatccgcatgctataaaagctatgaaagaagtcggtattgatatttcacatcacacttctgacctgataaacaatgacattttaatagcgtctgatatagttgtcacattgtgtagtgatgcagatgcaaactgtccagttttacctaaaaacgtcactaaagaacattggggatttgatgatcctgctggtaaagattggtcagaatttcaacgtgtaagagatgagattaaagcagcgatcgaaatatttgctcatagagtgtaa

SEQ ID NO: 3965 - DNA, 1503 bp, Staphylococcus epidermidis
atgtactattttgtaggtaataacatcggtcataaaactgctggtataaaaaaagcaatgattaatcgattaaacctatttaaagcatatcattatcaagctaaaatcttattactagcatggaatcgctatttaactcaaacagcatcgcaatatattaatagcgaagattatataaacatgtatgattattttcaagaagcaagtaacgtaacatcagtgttcagtaaaaattggattcattactggagaaatgaatgtggctatactataaaacctgtttctgagacaaatgacgttcggatttatgatcaacaacaatttataatgtatgcgcattttgctgatgaagcttatcaaaaaattgattatattaattactttgatacatctagaagaaaaataaaaagagagttatacgatacacgtggatttttaagttgcgttagagttttatcaacggaccaaaaaatacaagcagagtactatctttctcctgaaggaaaagtgaaaattgaaaagtattatgatattaattcaaatcatccctatgtggcaaaaaagattatattaaatcatttaggtaaaacgcactttttaaacaatgaaactgagctaggtgctttttttattgaaacaatatatcaaagtaatgacttattctttagcgatcgtaaccttgttacatcacatatatttaacatagttgcatcttacatccctgttattgcagtgttacatagcactcatgttaaagatgttactgatttaacgcattcaccaatcaaaaatgtttataaaggggtttttgaacatttacaaaggtataaagccatcattgtttcaacacaacagcaaaaagctgacgtaattgagagaatcagaggagtcattccagtatatgctattccagttggttattcatcttttgaaatgaacgatgactataataaaaataactatgttttacctaaaaaaattatttctgtcgcaagatactcacctgaaaagcaattgatacaacaaattgaacttattaataggcttaaagatacgtttccaaatatcgaactacatatgtatggttttggtaaagaagaacaacatttaaaagaacgcattcaagaattaggactagaaaaacacgtaatattaagaggttttttaaaagatttaactgatgagtatcaagatgcatatctaaatttaataacaagtaatatggaaggcttttccttagcattattagaatgtgaatcacatggtgtaccttctatcagttatgatattcaatatggtccaggtgaattgatacaggacggtaagaatggatatttaatagaaaagaataatcaacacatgctatttgaaaaagtaaaattattgctcaacaacccccaacttcaacaatctttttctcaccattgtattgaaactgcacaaaagtattctcaaacacaaatcatgttactgtggaaaaatttacttcaacattttaactaa

SEQ ID NO: 3966 - DNA, 3177 bp, Staphylococcus epidermidis
atgattaataaaaaaaataatttactaactaaaaagaaacctatagcaaataaatccaataaatatgcaattagaaaattcacagtaggtacagcgtctattgtaataggtgcaacattattgtttggtttaggtcataatgaggccaaagctgaggagaatacagtacaagacgttaaagattcgaatacggatgatgaattatcagatagcaatgatcagtccagtaatgaagaaaagaatgatgtaatcaataatagtcagtcaataaacaccgatgatgataaccaaataaataaaaaagaagaaacgaatagcaacgatgccatagaaaatcgctctaaagatataacacagtcaacaacaaatgtagatgaaaacgaagcaacatttttacaaaagacccctcaagataatactcagcttaaagaagaagtggtaaaagaaccctcatcagtcgaatcctcaaattcatcaatggatactgcccaacaaccatctcatacaacaataaatagtgaagcatctattcaaacaagtgataatgaagaaaattcacgcgtatcagattttgctaactctaaaataaaagaaattaacactgaatccgataaagaagagaatactatagagcaacctaataaagtaagagaagattcaacaacaagtcagccgtctagctatagaaatatagatgaaaaaatttcaaatcaagatgagttattaaatttaccaataaatgaatatgaaaataaggctagaccattatctacaacatctgcccaatcacccatcaagcgtgtaaccgtaaatcaattagcagcagaacaaggttcgaatgttaatcatttaattaaagttactgatcaaagtattactgaaggatatgatgatagtgatggtattattaaagcacatgatgctgaaaacttaatctatgatgtaacttttgaagtagatgataaggtgaaatctggtgatacgatgacagtgaatatagataagaatacagttccatcagatttaaccgatagttttgcaataccaaaaataaaagataattctggagaaatcatcgctacaggtacttatgacaacacaaataaacaaattacctacacttttacagattatgtagataaatatgaaaatatcaaagcgcaccttaaattaacatcatacattgataaatcaaaggttccaaataataacactaagttagatgtagaatataagacggccctttcatcagtaaataaaacaattacggttgaatatcaaaaacctaacgaaaatcggactgctaaccttcaaagtatgttcacaaacatagatacgaaaaaccatacagttgagcaaacgatttatattaaccctcttcgttattcagccaaagaaacaaatgtaaatatttcagggaatggtgatgaaggttcaacaattatcgacgatagtacaatcattaaagtttataaggttggagataatcaaaatttaccagatagtaacagaatttatgattacagtgaatatgaagatgtcacaaatgatgattatgcccaattaggaaataataatgacgtgaatattaattttggtaatatagattcaccatatattattaaagttattagtaaatatgaccctaataaggacgattacacgacgatacagcaaactgtgacaatgcaaacgactataaatgagtatactggtgagtttagaacagcatcctatgataatacaattgctttctctacaagttcaggtcaaggacaaggtgacttgcctcctgaaaaaacttataaaatcggagattacgtatgggaagatgtagataaagatggtattcaaaatacaaatgataatgaaaaaccgcttagtaatgtattggtaactttgacgtatcctgatggaacttcaaagtcagttagaacagatgaagatggaaaatatcaatttgatgggttgaaaaacggattgacttataaaattacattcgaaacgccggaaggatatacgccgacgcttaaacattcaggaacaaatcctgaactagactcagaaggtaattctgtatgggtaactattaacggacaagacgatatgactattgatagcggattttatcaaacacctaaatacagcttagggaactatgtatggtatgacactaataaagatggtattcaaggtgatgatgaaaaaggaatctctggagtgaaagtgacgttaaaagatgaaaacgggaatatcattagtacaacaacaactgatgaaaatggaaagtatcaatttgataatttaaatagtggtaattatattgttcattttgataaaccttcaggtatgactcaaacaacaacagattctggtgatgatgacgaacaggatgctgattgggaagaagtccatgtaacaattactgatcatgatgattttagtatagataacggatactatgatgacgaatcggattccgatagtgactcagattcagacagcgattcagattccgatagtgactcagattcagacagcgattcagattccgatagtgactcagattcagacagcgattcagattccgatagtgactcagattcagatagtgattcagattcagacagcgattcagattccgatagtgactcagattcagacagcgattcagattccgatagtgactcagattccgacaacgattcagactcagatagtgattcagattcagatagtgattcagattccgatagtgactcagattcagacagcgattcagactcagatagtgattcagactcagatagtgactcagattcagacagcgattcagactcagatagtgattcagattcagatagtgactcagattcagacagtgactcagattcagacagcgattcagattcagatagtgactcagattcagacagcgactcagactcagacagtgactcagattcagacagcgactcagattccgatagtgattcagactcagacaacgactcagatttaggcaatagctcagataagagtacaaaagataaattacctgatacaggagctaatgaagattatggctctaaaggcacgttacttggaactctgtttgcaggtttaggagcgttattattagggaaacgtcgcaaaaatagaaaaaataaaaattaa

SEQ ID NO: 3967 - DNA, 567 bp, Staphylococcus epidermidis
atgaaaggtttaattattatagggagtgctcaaatagggtctcatacgaacgctttatcgaagtatttaaaagggcaactcggtgaacacgatgttgaggtggaaatctttgacctagctgagaaacccattcatcaattggattttgctggtacaacacaagcagttgatgaaattaaaaacaatgtcaaatctttacaaaataaagcaatggaagcagatttcttaattttaggaacgccaaattatcatggatcgttttcaggtattcttaaaaatgcacttgaccaccttaatatggaccatttcaaaatgaaacccgtgggactcatttgcaatagtggaggaatagtaagttctgagccattatcacacttaagagtcatcgtacgtagtttacttggtattgctgtaccaacgcaaattgctacacatgactctgattatgctaaattagaagatggtaccttatacttagaagataatgaatttcaactacgtgcaaaattgttcgttgatcaaattgtatctttcgtaacaaatagtccatatgaacacttaaaataa

SEQ ID NO: 3968 - DNA, 879 bp, Staphylococcus epidermidis
atgataaagctaatagcaactgatatggatggaacattacttaacgctggtcatgaaatcaccactatgaaccaagaagcgataaaatttgcgcaagcgcacggcattacagtagttattgcaactggcagagcgttttacgaggcacaaacacctgttgctgaaacagacttaaaagtaccttacatatgtttgaatggtgcagaagttcgtgatgaatcatttaatataacgagtacatcgcatcttaatcatgatttagtacacaaaattacgacagcacttaaaaataatcatatttattatcaaatttacacaaaccgtggcatatatacagaagatcctaaacgtgatttagcaatctatatagatattgcagaacgtgcgggtcaaaaagcagatgtagccaagatacgaaataatatacaaaaacgcatagataacggtactttaaaagttgtagataattatgattcaattgaagatattcctggagaacttattatgaaggtgttagcttttgatgcagatttaagtaaaatcgaccaagtaggtcaagcgttagcatcatcaccaaatttagcagtatcttcatcatcaagaggtaatctagaaatcactcattcagacgctcaaaaaggcattgccttatcagctattgctcatcaattgggtatagatttaacagatgtgatagcaataggagataatttaaatgatatttcaatgctagaacgagtaggttatccagtagcaatgaataatgctacagacgaagttaaacatattgctaaatatgtcacagaaaccaacgaaaatagtggagttggaaaagcaatcatgaaaatattaaaagaggaaaataatttagaggtgtaa

SEQ ID NO: 3969 - DNA, 507 bp, Staphylococcus epidermidis
atgaaaaaaaatcatgattacatgcgcttagcaattaatgaagcatacaaagccaaagcattaggagaagttccaatcggagcagttattgttaaagaggatcaagtcattgcacgtgcacataatttaagagaaacattgcagcaacctactgcccacgcagagcacatagcgatagaacgggcgtcagaagttgtcggcagttggagattagaagaatgtacgttgtatgttacattagagccctgtgttatgtgtgcgggcactattattatgagccgtattcccaaggttgtgtatggtgctactgatcccaaaggaggttgttcaggaagtcttatgaatttattagaacaaccccagtttaatcatagggcaatcgtagaaaaaggaattttagaagaagagtgtgcagaactattgagaagtttttttaaggaaatacgtgaaaagaaaaaagcagaaaaacaggggaagatacaaaaggatataaatttgttaaaatga

SEQ ID NO: 3970 - DNA, 618 bp, Staphylococcus epidermidis
atgaataaaccatttattgcaatcgaaggacctataggtgttggtaaatcctctcttgctcaccgtttaagcaagacgtttggtttttatgaagagaaggaaattgttgatgaaaatccatttctatctgatttttatgatgatatagaaaaatggagttttcaaactgaaatgttctttttatgtaacagatataaacagattagagatattgagtcgctaaatcaaggtatagttagcgattatcacattcataaaaataaaatttttgctaaaaatactttagatgctaaagaatttgataaattcagtcgtatttttgatattttaactgaagatatcgaaatgccaaatacaattatctttttagatgctgatttagatgtattaaaatctagaattgcacaacgtaatcgtagctttgaatctcaaatagaagatgactatttacttactttaaaaaaagattatcttgcttattatgaatcattaaagaatgacggtgcaaatgtcattcgaattgatacgtcgcaacaagatttcgttaaaaatgattacgattaccaaaatattttaaatttagtaaaacctatgattggagaaaataaagatgaataa

SEQ ID NO: 3971 - DNA, 663 bp, Staphylococcus epidermidis
atgaataattatggtattcctcaaaatgcagtaataaccattgctggtactgtaggggttggtaaatctacgttaacacaagcacttgctgacaagttaaattttaaaacttcctttgagaatgtagaccataatccttatttagataaattttatcataattttgaacgttggagctttcatcttcaaatttactttcttgctgaacgttttaaggaacaaaaacgcatgtttgagtatggtggcggattcgttcaagatcgttcaatttatgaagatgtggatatttttgcaaaaatgcacgaagaacaaggaacaatgagtgctgacgactaccacacgtattacgaattatttaatgcaatggttatgacaccttattttccaaagcctgatgttctgatttatctagaatgtgattatgatgaagtgattgatcgtattcaacagcggggacgtgacatggaaatcaatacagatccagaatattggaaaaaactatttaaacggtatgaaaattggattaacaattttaatgcatgtcctgttgttcgacttaatattaacgaatatgacatacacgaagacgtagactcccttgatccagtcattgataaaattgctcaagttattaaagcataccgacaagtggatacgagataa

SEQ ID NO: 3972 - DNA, 753 bp, Staphylococcus epidermidis
atgaaaaaaactgcaattatcacaggaagtagtcgtggattaggcgctaaaattgcaataactttactagaaaaaggctacaatgttgttgttaattacaaacaaaataaggataaagctgaaaaattaattagaaattataatcaaagtagggctatagctcttcaagctgatgtgacagacagaaacgatgtgaatcgaatgattcaaactgccacacaacattttggaaaaatagatatagtcattaataatgcacttgttggttttaaatttgatccaaatcagcaaaaatcgtttaaagatttaacttgggaagattatcaacaacaacttaatggtactttaaaaggagcatttaatgtgactcaaagcgtcataccacaatttatagaacaacaaagtggatgcattgttagcattggaaccaatttgtatcaaaatccagtcgtaccttatcatgagtatacaacagcaaaggcaggtctcattggctttactcgtaatattgctgcagaacttggacaatatggtattacagcaaatgttgtttctggaggattactcaaaacgactgatgcaagtgcagtcactacacctgaagtatttgatttaattgctcaaactacacctcttagaaaagtaacatcacctcaagatgtagccaatatggtcgtatatctcgcttcagatgaagcacgtggcgtaacaggtcaaaatattaccgttgacggtggtttaacaatgaactaa

SEQ ID NO: 3973 - DNA, 1305 bp, Staphylococcus epidermidis
atgacaaataatcactttcttaacataggtgtgttactgtacggatgtggtcatcatcaagcggcatggcgtatgaaagattctaatattgaggatatcggcaacatatcttattatcagcatttagctcaaatagctgaaaaaggtcttttggatatcgtcttttttgcagataatcaagcctttaatgcaagtgataatactactatgcccgctttttggtttgatcctataattaacttatcagctattgcacaagttacatcacatataggattagtgccaacaatatcgagtacattttcaaatccattcaccgcttctcgtcaattattaagtctagactacttatctcatggccgtgtgggttggaatttagtcacatccatgacagatattgaagcccaaaatcacagtcttcaatgcttaccagaaagacatgagcgctacaaaaaagcagatgaatttgcatcggtaatgaatcagctattcacttcttggtcaactgcatcttatgtaccagataaaaacaacaacaaaattattgagtctaaagatattaaacctttttatcatgagggagactattttcaagtacgaggaccacatacaacaccacaaagtcctcaaggtaaaccagtatctatgcaagccggtgcgtcaaaagaaggtattgcattagcagcaaaatatgctgatgctgtttactctgtttcatgggatatcaagcaagcacgtagttataaaaagaaattgtctgatgctatttctaaaactcaacatccagatagaaaaattaaaattttccctggtttagtaacttatgtaggtgaaacccatgaaaaagcattatcaaaaaaagcagaacttgatcaaaaattacccattgaagatgctttaaagcaactcagtttttttgttcaacaagattgttcagattgggaattagatgaaccagttcctcccttacctcctgttaaaaatttcaaaggtccaattggtcgatatgaaacagttttagccattataaaagataaacaaccgactgtaagagaattattaggttacttaagtgccggtggtggtcatcttactcttataggtacacctgaggagatagtggatgagatggagcagtggtttaatgaaggcgttgcagacggctttaatctgatgccaccttcattaccccatagccttgaagattttgtaaaatacattataccagaactacaacgtcgtgctttatttaaaaattcttataatcaatctacactacatacattattaaatctcgactcataa

SEQ ID NO: 3974 - DNA, 696 bp, Staphylococcus epidermidis
gtggaatggatattatttgataaagatggtacattgattgagtttgacagtagttgggaaaaaattggcgtacgtctcgttgatcaacttttagaaacctttccagtacatgataaggaagcggcacatcgccaattaggcattatcgataaaaaaattaagccagattctgttatgggatcgggttcattaggtgaaattatagagtcttttaatggtgtaacaggtaaagaaacatcagattggacaaaggatacgagtcaggaactcattgattcaagagtgcctgaaaacaattggattgatggtgtacaagaaactattcaagctcttagaaatgaaggatatcacataggtatagtaacaagtgatactaaaaaaggagtcgatcaatttctggaggaaacgcaaactagaaatctctttgatttagtaatttctacagagacacacgcagaagaaaagccacattctaaagttttagatccactatttaatgcttttgatgttgaaccagaaaaggtagcaatagtaggagatacggccaacgatatgaaaaccgcgattaatgcaaatttaggattagctatcggtgtgctaacaggcgtggctaaaaaagaggaactctacgacgcagatgtcatcattaatagtgcaaaagatgttaaacaagttatagagcaatacggaaaataa

SEQ ID NO: 3975 - DNA, 1695 bp, Staphylococcus epidermidis
atgacaaagcaaaatatatttatagatgacatttattgggaacgtgtccaactctacgtcaaaggacattttgacggagtaaaacctacaagaaatttccttcttagaaacctaacagaaacaaagctattaaatgctaatcatgttaatattcaagaatcaacttttgaggcaagatttaatattgctattttagaaaaaggcaattttttaagtacaggtaattatatattaatcaaccgacaagaagatgaatacgtctgccaaattaatccaaaatttttgaatgataaaaaaaagcaaatgactttagaggagttaagagattacgactcacttgagacccaatcgttacaaaaaagttatttattaaaaaaatatggtaagagttttcaaagatataataacaaagagattaaatcttacgtcattgttccagcaatttcccaagaaattaatgagtttatttttaaagttcaatataaatctgaaataaagaaaataagtaaacttaagcatttatcattcatattacataaaactttgaagaaaattagtttcaatgtgagagataaaatctatttgtcgatatttaacatttccaaaacagtatataagaataataaaaatcatgttttgtttacatcagattctagagcaaatatgtcaggaaattttaaatttatatacgaagaaatgcttaaacaacaattggacaaaacacttgtcattcattccatttttaaacctaatatagcaaataggagatcgtttattgataaattaaaattcccatattttttaggaaaatctaaatatattttggttgatgattatcatccgatgatatataaacttcaatttagagaaaaccaagaaatagttcaagtatggcatgccgtgggtgctttcaagactgtaggatttagtagaactgggaaaaagggaggacctttcatagactctattggccataggaattatagtaaagcttatgtttcgtcaaataatgatattctttactatgctgaagcttttggaattgaagaacataaggttattccaacaggtgttccacgtacggatgtcttgttcgatgaatcttataaaacacgcattaaacaaagtttagaaacaaaattaccaattataaaaaataaaaaagtcattctttttgcacctacatttagaggaagtggacatcgcacagcacactatcctttctttaaaattaattttgcaagattagctagttattgtgaaaaacatcaagctactgttttgtttaaaatgcatccttttgttagaaataaattaaatatcccagcaatttataataaatattttttagatatttcaaattaccgcgaagtaaatgatgtattgttcattacggatattttaatctctgattattcttctttaatctatgaattttcagtttttaaaaaaccaatgcttttttatgcttttgatttggaagattatatttacacgagagatttttatgaaccttatgaaacctttgttcctggtaaaatagtgaaaacttttgatgaacttattttagcgttagaaaataatgattttgaatttgaaaaggtaaaaccgtttttaaataagaattttaaatataaagatggtaaatcgagtgaacgattagttaaagatttatttaacaaattttttcagtaa

SEQ ID NO: 3976 - DNA, 1032 bp, Staphylococcus epidermidis
atgattaatcaagtatatcaattagtaagtccaagacaatttgaagcaacatttaaaactattgatttacataatcataatagcaaagttattgttcgacccttatatttgtcaatttgtgcagccgatttgagatattattgtggaaatagagatagcaaaattttatctaagaaattacctatgtcattgattcatgaaagtgtaggtgaaattgtatacgactctgaacatcgactaaaaaatggaactaaagttgttatgattcccaatacaccgtctaaatcgcataatatcattgcagaaaattatttaacttctagtcattttaagtcaagtggttatgatggttttatgcaagattatatagtcatgaaacctgatagagtagtcactttaccacaagaaattgatttgagtgtagcgtcgtatactgaattagttacagttagtgttcatgcaatagatcgttttaaagcaaaagcaataccacaatttgaatcattggggatatggggggacggtaatttaggatatatcactgcagttttactaaaaaaactatatcctactactaaaattatagtttttggaaaaacattatataaattaagccgtttttcatttgtagatgaaatcattcaaattgacaatattcctcaacatatcaaaattgatcatgcatttgaatgtgtgggtggtaaaggaagtcagcaggctattgaacaaattatcaatattattaatcctgaagggagtatcgctttattaggagtgagcgaattgtctatacaagtgaatacaagaatggttttagaaaaaggtttaactataattggtagtagcagaagtggtttaaaggattttgaaaaaactattgaattgtatcgtaaatatcctgaagttcttaatcaattagcattacttaaaggtaaagaatttgaaataaataccatagaagacctcattacagcgttcgaatatgatatttctaacgcatggggaaaaacagttttaaaatggaatatttaa

SEQ ID NO: 3977 - DNA, 717 bp, Staphylococcus epidermidis
atgatttatgcgggtatattagcaggtggtattggttctagaatgggaaatgttccattacccaaacaatttttattattacaaggaaaacctattattattcatacagtagaaaaatttttaatgtataaggactttgatgaaatcattattgccacgcctcaaaagtggatcaattatatgctcgatttgctaaacaattatcgattagacgataagaaaataaaagtaatacaaggcggcgacgacagaaatcacactataatgaatattatagaaagcattgagcaacataaaaaattaaatgatgaagatataatcgttacccatgatgcagttagaccatttctaacaaatcgaattattagagagaatgtggaatatgctagtcaatatggcgctgtagatacggttgttaatgctgttgatactatcatttcttcaaatgatgcacaatttatttctgagattccaattagaagtgagatgtatcaaggacagacgcctcaaacttttaaaataaaagagttaaaggatagctatttatcgttaactgaatctcaaaaggaaatattaactgacgcgtgtaaaatactcgtagaattgggtaagccagtaaaattagtcaaaggagagttatttaacataaaaattacaacaccatatgatttaaaagttgcgaattcaattattactggagctgttgataatgattaa

SEQ ID NO: 3978 - DNA, 1077 bp, Staphylococcus epidermidis
atgtcagaaaaaataaaattcgaaaaaagagagtctttaaaagaaaagcctgatacagcaaacttgggatttggacaatatttcacagactatatgctaagtgttgattatgacgctgatcaaggatggcatgatatgaagattgtgccgtacgcaccatttgaaatttcaccagcagcgcaagggttacattatgggcaagcagtttttgaaggccttaaagcttataaacataatggcgaagttgtattattccgtccagaccaaaatttcaaacgtattaataattctttagcacgtttagaaatgccagaagttgatgaagcagcattattagaaggattgaagcagcttatcgatgttgaacgagattgggtacctgaaggcgaaggtcagtcgttatatattcgtccttttgtatttgctactgaaggtattttgggtgtacgttcttcacatcaatataaattactaattattttatctccgtcaggggcttattatggtggtgacacattaaagtcaactaaaatttatgtcgaagatgaatatgtacgtgcagtacgcggaggtgtaggtttcgctaaagttgcaggtaactatgcggccagcttactcgcacaaacaaacgctaataaattaggttatgaccaagtattatggcttgatggtgttgaacaaaaatatgttgaagaagttggtagtatgaatattttcttcgtagaaaatggcaaagtagttacgccagcattaaacggtagtatcttgcctggtattactagaaagtcaattattcaattagctgaagatttaggttatgaagttgaagagagaagagtttctatagaagagctgtttaacgcatatgataaaggtgaacttacagaagtatttggttcaggtacagcagctgttatctctcctgtaggtacacttcgctatgaagatagagaaattgttattaataacaatgaacctggtaaaatcactcaaaaattatatgacatatatactggtattcaaagtggcaaattggaagataaatacggatggagagtagaagttcctaagtattaa

SEQ ID NO: 3979 - DNA, 954 bp, Staphylococcus epidermidis
atgaaaaaaataataatcactggagcactcggtcaaattggtactgaattagttattaagtgtagagaaagatatggaactaatgtattagctactgatataagaaagccagaaccacactctccagttaaagacggtccttttgaaatcttagatgttacagatagaaatcgtttatttgaaacagtgagatatttcaatgtcgatacacttatgcatatggctgcactgctttctgctacagcggaaaagaaaccactagttgcctgggatttgaatatggggggacttataaatacacttgaagcagcaagaaggtatcaattaaaattttttacgccaagttcaataggagcttttggtatttcgacacctaaagtaaatacacctcaattaacaatacaacaaccaacgactatgtatggtataaacaaagtaactggggaattattatgtcagtattattatgtcaaatttggagtggatacacgtagcgttagatttcctgggttaatttcacatgttaaagaacctggcggtggcacaacggattatgcagttgatatgtattttgaggcagttaaaaaaggacattatacaagctatattaatcgttacacttatatggatatgatgtacatggaagacgctattgatgcgattatcaaattaatggaagaagacagtgttaaattaaaaacaagaaatggctataacttaagtgcaatgagtattgaacctgaaatgttaaaacaagctatacaagtatactatccagattttaccttagactatgacattgatttagagcgtcaagatattgcattaagttggccagatagtatagatacgagctgtgctgaggatgagtggggatttgatcctaaatatgatttaccaactatgactaaagtgatgttagaggcaattgagaaaaaacaaaaagaatactga

SEQ ID NO: 3980 - DNA, 951 bp, Staphylococcus epidermidis
atgaaatatatagatgagcaaacacaagctcaattattaaacatgaatgaagtcattttagaagtagaaaaagctttgcaagctttttcagagaataagacgataacaccattaagatatgttttgccatttaatgagcaaaatcgttatttagtgatgccagcattatccgatgaattaaatatcgttggacttaaaacagtctcatttgcacctgaaaattcaaaaaaagagaaagcgactattactggatcggttattttaagtgactatgaaacaggagaaacattgtctatattagatggtggttttcttactaaagtaagaacaggtgcaatttcaggtgtagctactaaatatctagcaaaagaaaacgctaaaacacttagtgtaataggggcaggtgtacaagctgaaggtctgattgaagcgatacttgctgttagggatattgaaaacattcacatcgctagtagaacgtttgaaaaagcagaaaattttgctcaaaatatacgaaatcgatttaatattaaagtgagtgtatttaaatcggcagatgaagcgatagacagtgcagatattgtagttacagcaacaaatgcaagtcagcccgtttatacccattctttacatccaggcgtgcatttaaatgcagtcggatcctttaaaccagatatgcaagaaataccttcagaaacaatgcttgttgctaataaaattgttgttgaatctatggaagcagctttagaagaaacaggtgatttaaaaattcctcaatcagaaggaatattaactaaaaatatgctacatagtgaattaggcgacattatttctggtgaaaaagtgggtcgcgaaactgaagaagaagtgacagtctttaaatcggtcggtctagcaattgtggatatcattgtggcacaatatttttataaaaaattaatacaatcttag

SEQ ID NO: 3981 - DNA, 510 bp, Staphylococcus epidermidis
gtggaggaaataagaccaataacctatcaagataaagaggcatactattattatattcaagagtggtatgaaaatgaggaaaaagtgataccagggaatacagacattgccaattataattcatttaacaatatggttgatcggcttaattctagtgaagttgatgagggctttgtaccgactacaacactattttattttaaagattcaattattataggtgctgttgatatcagacatcaattaaatgataaactatcaaatattggtggtcatgtgggatacggtgtagctaaatcttatagagggaaaggttacgctactatccttctagaaaaggctttagatgaacttaagacattaaatgtagaggtcgtacttatgacatgtaatccacttaattttgcttctcaaacagtgatgaagaaatgtggtggatatcaaattgaatcctatattaaaaaaaatggtaaacctgttcatcgatatcatatacctaatacaaaataa

SEQ ID NO: 3982 - DNA, 1188 bp, Staphylococcus epidermidis
atggaagaagtgatacatgtgtttgattggtttcaattagcaagtaataaagaaaagagaatggtgcaattacgacgatatttgcatcaatacccagaactttcttttgaggaaaaacgtacgcatgattttattgtaaatcaattgagccaattagcatgcaccatagaaacaccagttggacgtaatggtataaaagcaacttttaaaggatctgattcaaatggaccaacgattgcattacgagcagatttcgatgcactacctgttcaagaattaaatgatgtaccctatcgttcaaaaaataaagggtgcatgcatgcttgtggacatgacggacatacagctattttgcttggagtagctgaaattgttcatgagcatcgtcatttattgaaaggtaatgttgtttttatattccaatatggtgaggaaattatgccaggtggttctcaagagatgattgatgatggctgtctacagaatgtcgataaaatatatggcacacacttatggagtggttatccatctgggacaatctattctagacctggagcaataatggcttcaccagatgaatttagtgtgactatatatggaaaaggtggtcacggtgcaaaaccacacgaaacaatagaccctattgtcattatggctgagtttattttaagtgcccaaaaaataatttctcgaacaattgatccagtaaaggaagctgttcttactttcggaatgattcaagcaggatcaacagatagtgttattccagatacagctttttgtaaaggtactgtacgtacttttgacacaaaattacaaagtcatgttcaaaataaaatggataagctcttacaaggtttatctttatcaaacgatattacatatgaattggaatatattaaaggttatttaccagtacacaatcatcaacaatcatatgatgtagtcaaacaagcagctaatgatttacatttaagatttaatgagtcagacttaatgatgattggtgaggacttttcacattaccttaaagtacgacctggtgcattcttcttaactggttgtggtaataaagacaaaggcattactgcacctcatcataatcctcattttgacattgatgaatcttcattaaaatatgcagctagtgaatttttaaaaatattagaaattgaaaatgttttttaa

SEQ ID NO: 3983 - DNA, 1185 bp, Staphylococcus epidermidis
atggcaaaagaaaaatttgatcgctcaaaagaacatgccaatattggtactatcggtcacgttgaccatggtaaaacaactttaacagctgctatcgcaactgtattagctaaaaatggtgacactgttgcacaatcatacgatatgattgacaacgctccagaagaaaaagaacgtggtattacaatcaatactgcacatatcgaataccaaactgacaaacgtcactatgctcacgttgactgcccaggacacgctgactatgttaaaaacatgatcactggtgcagctcaaatggacggcggtatcttagttgtatctgctgctgacggtccaatgccacaaactcgtgaacacatcttattatcacgtaacgttggtgtaccagcattagttgtattcttaaacaaagttgacatggtagacgacgaagaattattagaattagttgaaatggaagttcgtgacttattaagcgaatatgacttcccaggtgacgatgtacctgtaatcgctggttctgcattaaaagcattagaaggcgatgctgaatacgaacaaaaaatcttagacttaatgcaagcagttgatgattacattccaactccagaacgtgattctgacaaaccattcatgatgccagttgaggacgtattctcaatcactggtcgtggtactgttgctacaggccgtgttgaacgtggtcaaatcaaagttggtgaagaagttgaaatcatcggtatgcacgaaacttctaaaacaactgttactggtgtagaaatgttccgtaaattattagactacgctgaagctggtgacaacatcggtgctttattacgtggtgttgcacgtgaagacgtacaacgtggtcaagtattagctgctcctggttctattacaccacacacaaaattcaaagctgaagtatacgtattatctaaagatgaaggtggacgtcacactccattcttcactaactatcgcccacaattctatttccgtactactgacgtaactggtgttgtaaacttaccagaaggtacagaaatggttatgcctggcgacaacgttgaaatgacagttgaattaatcgctccaatcgctatcgaagacggaactcgtttctcaattcgtgaaggtggacgtactgttggatcaggcgttgtaactgaaatctttgaataa

SEQ ID NO: 3984 - DNA, 2082 bp, Staphylococcus epidermidis
atggcaagagacttttctttgaaaaatactcgtaatatcggtatcatggctcacattgatgctggtaagacaactacgactgaacgtattctttactacacaggtcgtatccataaaattggtgaaacacatgaaggtgcttcacaaatggactggatggaacaagagcaagaccgtggtattactatcacatctgctgctacaactgcacaatggcaaggtcaccgtgtaaacatcattgatactcctggacacgtagacttcacagttgaagttgaacgttcattacgtgtacttgatggtgccgttactgtacttgatgcacaatcaggtgtagaacctcaaactgaaacagtttggcgtcaagcaacaacttatggtgtacctcgtattgtttttgtaaacaaaatggacaaattaggtgcgaactttgaatattcagtaagcactttacatgatcgtttacaagcaaatgcagcacctattcaattacctattggtgcagaagatgaatttgaagcaatcattgacttagtagaaatgaaatgctttaaatatacaaacgacctaggtacagaaatcgatgaaatcgaaattccagaagaccataaagaaagagctgaagaagctcgcgctcaattaattgaagctgttgctgaaaacaacgacgatttaatggagaaatatcttggggatgaagagatttcagttgatgaattaaaagatgctatccgccaagctactactgacgtagaattctacccagtactttgtggtacagcgttcaaaaacaaaggtgttcaattaatgcttaatgcagtaattgattatttaccttcaccattagatgttaaaccaattattggtcatcgtgcgaacaaccctgatgaagaagttgttgctaaaccagatgattcagcagaatttgctgctttggcatttaaagttatgactgacccttatgttggtaaattaacattcttccgtgtatactctggaacattatcttcaggttcatatgtgaagaactcttctaaagataaacgtgaacgtgttggacgtttattacaaatgcacgcgaactcacgtcaagaaattgacactgtttattcaggtgaaattgcagctgcagtaggccttaaagaaacaggtactggtgatactttatgtggagagaaaaatgacattatcttggaatcaatggaattcccagaaccagttatccacttatcagttgaaccaaaatctaaagctgaccaagataaaatgactcaagctttagttaaattacaagaagaagacccaacattccatgcacacacagatgaagaaactggacaagttatcatcggtggtatgggtgaattacacttagatattttagttgaccgtatgaagaaagaattcaacgttgaatgtaacgtaggtgctccaatggtttcttatcgtgaaacatttaaacaacctgcacaagttcaaggtaaattctcacgtcaatctggtggtcgtggtcaatatggtgatgttcatattgaattcactcctaacgaaacaggtggcggtttcgaattcgaaaacgctattgttggtggtgtagttcctcgtgaatacattccatcagttgaacaaggtcttaaagatgctatggaaaatggtgtcttagctggttatccattaattgatgttaaagctaaattatttgatggttcttatcatgatgtcgattcatctgaaatggccttcaaaattgctgcatcattagcgcttaaagaagctgctaaaaaatgtgatccagttatcttagaaccaatgatgaaagttactatcgaaatgcctgaagaatatatgggtgatatcatgggtgacgtgactgctcgtcgtggacgtgtagacggtatggaaccacgtggtaatgctcaagttgttaacgcatatgtaccactttcagaaatgtttggttatgcaacttcattacgttctaacacgcaaggtcgcggtacttacacaatgtactttgaccactatgcagaagttcctaaatcaattgctgaagaaatcatcaagaaaaataaagatgaataa

SEQ ID NO: 3985 - DNA, 471 bp, Staphylococcus epidermidis
atgcctcgtaaaggatcagtacctaaaagagatgtattaccagatccaattcataactctaagttagttactaaattaattaacaaaattatgttagacggtaaacgtggaacagctcaaagaattctttattctgcatttgatcttgttgaacaacgtagtggtcgtgatgcattagaagtgttcgaagaagcaattaataatatcatgccagtattagaagttaaagctcgtcgtgtaggtggttctaactaccaagtaccagttgaggtgcgcccagaacgtcgtactactcttggattacgttggttagttaactatgcgcgtcttcgtggtgaaaaaactatggaagaccgtttagctaacgaaatcttagatgctgcaaataatacaggtggtgcagtcaaaaaacgtgaagacactcacaaaatggctgaagcgaacaaagcatttgctcactaccgttggtaa

SEQ ID NO: 3986 - DNA, 414 bp, Staphylococcus epidermidis
atgccaactattaaccaattagtacgtaaaccaagaaaaagcaaaacgaaacaatcagattcaccagctttaaacagaggtttcaatagtaaaaagaaacaatttactaacttaaactcacctcaaaaacgtggtgtatgtactcgtgtaggtacaatgacacctaaaaaacctaactctgcgttacgtaaatatgcacgtgtgcgtttatcaaataacattgaagttaacgcatacattcctggtatcggacacaacttacaagaacacagtgttgtacttgttcgtggtggacgagtgaaagacttacctggtgtgcgttaccatatcgtacgtggtgcacttgatacttcaggtgttgatggacgtagacaaggacgttcattatacggaactaaaaaaccaaaaaattaa

SEQ ID NO: 3987 - DNA, 261 bp, Staphylococcus epidermidis
atgtctaatgaaaaagttgcacgctttaacaaacaacaatatgtagttggtcttaaagaaacgcttaaagcgttaaagaaaggtcaagttacatcattgattattgctcaagacgttgaagttcatttgctaactcgcgtgttaagctatatcaatcataaaaatataccagtatcatttttttctagccaacgtgcgttaggaaaatatgtaggtattaatgttaatgcgacaatagttgcattaataagtgagaattag

SEQ ID NO: 3988 - DNA, 3624 bp, Staphylococcus epidermidis
ttgattgatgtaaataatttccattatatgaaaataggattagcttcacctgaaaaaattcgctcttggtcttatggtgaagttaagaaacctgaaacaataaattaccgtacacttaagcctgaaaaagatggtctattctgtgaaagaattttcggacctactaaagattgggaatgtagttgtggtaagtacaaacgtgtacgctacaaaggtatggtatgtgatagatgtggcgttgaagtaacaaaatcaaaagtgcgtcgtgaaagaatgggtcatattgaattagcagcacccgtatctcacatttggtatttcaaaggaattccaagtcgtatggggctattattagatatgtctcctagagcattagaagaagtaatatacttcgcttcatatgttgtagttgatccaggaccaactggacttgaaaagaaaacattattatctgaagctgaattcagagaatattatgacaagtacccaaatcaatttgttgccaaaatgggtgcagaaggtattaaagacctattagaagaaattgatttagatgaagaattaaaagagttacgtgatgagcttgaatctgcaacaggtcaaagattaacacgtgcgattaaacgtttagaggtagttgagtcatttagaaattctgggaataatccttcttggatgattttagatgtattacctattataccacctgaaattcgtccgatggttcaattagacggtggacgtttcgctacaagtgatttaaatgacttgtatcgtcgtgttatcaaccgtaacaaccgtttgaaacgtttattagaccttggagcaccaggtatcatcgttcaaaatgaaaaacgtatgttacaagaagcagtcgatgctttaattgacaatggtcgtcgtggtcgacctgtaacaggaccaggtaaccgtccattgaaatctctttcacatatgcttaaaggtaagcaaggacgtttccgtcaaaacttattaggtaaacgtgttgactattcaggacgttcagttatcgcagttggaccaagcttgaaaatgtatcaatgtggtttaccaaaagaaatggcgcttgaattatttaaaccattcgttatgaaagagttagttcaacgtgaaattgctacaaacattaaaaatgctaaaagtaaaattgaacgtatggacgatgaagtttgggatgtgcttgaagatgttataactgagcatccagtgctattaaaccgtgctccaacattacacagattaggtattcaggcatttgaacctactctagtagaaggtcgtgcaattcgccttcaccctcttgttacaactgcttataatgcagactttgatggtgaccaaatggctgttcacgttccgttatcaaaagaagctcaagctgaagcacgtatgcttatgcttgcagcacaaaacatcctaaaccctaaagatggtaagccggttgtaacaccatcacaagatatggttttaggtaactattacctaacattagagcgaaaagatgccgtgaatactggtgcaatctttaacgatactaatgaggttttaaaagcttatgcaaatggttatgtacatctacacactcgtattggtgttcatgctaattcattcaataatccaacgtttactgatgagcaaaatagcaaaattttagctacatcagtaggtaaaattattttcaatgaaattattcctgattcatttgcatacatcaatgaaccaagtcaagctaacctagaaagaacgacacctgataaatactttgttgatcctacgcaattaggtgaaggtggactaaaagaatactttgataatacagaacttattgaacctttcaacaaaaagttcttaggaaatatcatcgcagaagtattcaatagatttagcattactgatacttcaatgatgcttgatagaatgaaagatttaggattcaaattctcatctaaagctggtattactgttggtgtttctgacattgttgtacttccagataaacaagacattttagatgaacatgaaaaattagttgaacgtgtgactaaacaatataatcgtggtttaatcactgaagacgagcgttacaatgcggttgtagaaatttggactgacgcaaaagaccaaattcaaggcgaattaatgcagtctcttgagaaaactaacccaatattcatgatgagtgattctggtgcccgtggtaatgcatcaaacttcactcaattagctggtatgcgtggtttaatggcagcaccatctggtaagattatagaattaccaatcacatcttcattccgtgaaggtttaacggtattagaatactttatttctacacacggtgcgcgtaaaggtcttgccgatacagcacttaaaacagctgactctggttaccttactcgtcgtcttgttgatgtagcacaagatgttatcgttcgtgaagaagattgtggtacagaccgtggtttattagtttctgatataaaagaaggaactgaaatgattgaaccatttatcgaacgtatcgaaggtcgttattctaaagaaacaattcgccatcctgaaacagacgaagtaattattcgtccagacgaattaataacaccagatattgcaaaacaaatcactgatgcaggtattgagcaaatgtatatacgctcagcatttacatgtaacacacgtcatggtgtatgtgaaaaatgttatggtaaaaaccttgctactggtgaaaaagttgaagtgggtgaagcagttggtacaattgccgctcaatctatcggtgaaccaggtacccaacttacaatgcgtacattccacactggtggggtagcaggaagtgacatcactcaaggtcttcctcgtatccaagaaatctttgaggcacgtaatccaaaaggtcaagctgtgattactgaaatcgaaggtgtagttgatgatattaaattagcaaaagatcgccaacaagaaataattgttaaaggtgctaatgaaactagatcttatctagcatcaggtacttcaagacttaaagttgaaataggtcaatctgttgaacgtggtgaagttctaacagaaggatcaattgaacctaaaaactatttatctgtagcaggcctaaatgcaactgaaagttacctattaaaagaagtacaaaaagtttaccgtatgcaaggtgttgaaattgacgacaaacacgttgaagttatggtaagacaaatgttacgtaaagttcgcatcattgaggctggtgacactaaattattaccaggttcattagttgatattcataactttactgacgctaacagagatgcattcaaacatcgtaaacgtccagctacagctaaaccagtattacttggtattactaaagcttctctggaaactgaaagcttcttatcagcagcttcattccaagaaacaacacgtgtgcttactgatgcagctattaaaggtaaacgtgatgatttacttggtcttaaagagaatgttattattggtaagttaattcctgctggtactggtatgagacgttacagtgatattcaatacgataaagctactgcaccagtaacagaaacaagtgaagaagttgaaacgatagaataa

SEQ ID NO: 3989 - DNA, 3552 bp, Staphylococcus epidermidis
ttggcaggtcaagttgtccaatatggaagacatcgtaaacgtagaaattacgcgagaatttcagaagtattagaattaccaaacttaatagaaattcaaacaaaatcttatgattggttccttaaagaaggtttattagaaatgttcagagatatttctccaattgaagatttcactggcaacctatctttagaatttgtagattacagattaggtgaacctaaatatgatttagaagaatcaaaaaaccgtgacgctacttatgctgcacctcttcgtgtgaaagtgcgtcttattattaaagaaactggtgaagttaaagaacaagaagtcttcatgggtgattttccactgatgacagatacaggtacgttcgtaattaatggtgctgaacgtgttatcgtatctcaattagttcgttcaccatccgtgtattttaacgagaaaatcgataaaaatggacgtgaaaactatgatgcaacaatcattcctaaccgtggtgcttggttagagtatgagacagatgctaaagatgttgtatatgttcgtatcgatagaacacgtaaattaccattgactgtattactacgtgcgctaggtttctcaactgatcaagaaattgttgacttattaggagacagcgaatatttacgtaatacattagaaaaagatgggacagaaaatacagaacaggctttattagagatttatgaacgtttacgtcctggcgaaccaccaacagtagaaaatgctaaaagtttattatattctcgtttcttcgaccctaaacgctatgatttagccagtgtaggtcgttataaagcgaacaaaaaattacacctaaaacatcgtttgttcaatcaaaaattagcagaaccaattgttaacagtgaaactggtgaaattgttgttgacgaaggaacagtgttagatcgtcgtaaacttgacgaaatcatggacgtattagaaacaaacgctaatagcgaagtatttgaacttgaaggtagcgtaattgacgaacctgtagaaatccaatctattaaagtgtatgtgcctaacgatgaagaaggtcgtacgactactgtcattggtaatgcattacctgattctgaagttaaatgtattactccagcagatattgttgcctcaatgagttatttcttcaacttattgaatggcattggttatacagatgatattgatcatctaggtaatcgtcgtttacgttctgtcggtgagctattacaaaatcaattccgtatcggtttatccagaatggaacgtgttgttcgtgaaagaatgtcaatacaagatacagattctattacgccacaacaactcattaatatcagaccagttattgcatcaatcaaagaattctttggtagttcacaattatctcaattcatggaccaagctaacccgttagcagagttaacgcacaaacgtcgtttatctgctctagggcctggtggattaacacgtgaacgtgctcaaatggaagtgcgtgacgttcactactctcactatgggcgtatgtgtccaattgaaacacctgagggtcctaatattggtttaataaactcattgtcaagttatgctagagtgaatgaatttggttttattgaaacgccatatcgtaaagtggatttagatacaaactcaatcactgatcaaatagattatttgacagctgatgaagaggatagttacgttgttgcacaggctaattctagacttgatgaaaatggtcgtttcttagatgatgaagttgtttgtcgtttccgtggtaataacactgttatggctaaagaaaaaatggattacatggacgtatcaccaaaacaagttgtttcagcagcaacagcatgtattccattcttagaaaatgacgactctaaccgtgcgttaatgggagcaaacatgcaacgtcaagcggtgcctttaatgaatccggaagctccatttgtgggtacaggtatggaacacgtagccgcaagagactctggtgctgcaattactgctaagcatagaggacgcgttgagcatgttgaatctaatgaaattttagttcgtcgtttagtcgaagaaaatggaactgaacatgaaggtgaattagatcgttatcctttagcgaagttcaagcgttcaaactctggtacttgttataaccaacgtccgattgtatcaattggtgatgttgttgaatacaatgagattttagcggacggtccttcaatggaattaggagaaatggcattaggacgaaatgtagttgtcggtttcatgacatgggacggttacaactatgaggatgctgtaattatgagtgaacgactagttaaagatgatgtatatacatctattcatattgaagagtatgagtcagaagctcgtgatacgaaattaggacctgaggaaatcacacgtgatattccaaacgtatctgaaagtgcacttaagaacttagatgatcgtggtatcgtttatgttggtgcagaagttaaagatggtgacatcttagtaggtaaagtaacgcctaaaggtgtaactgaattaacagctgaagagagattattacacgctatctttggtgaaaaagcacgtgaagttcgtgatacatcattacgtgtacctcatggtgctggcggtatcgttttagatgttaaagtctttaatcgtgaagaaggagacgacactctatctcctggagttaaccaattagtacgtgtatatattgtccaaaaacgtaaaatacatgttggggacaaaatgtgtggtcgtcacggtaacaaaggtgttatttctaagattgttccagaagaagatatgccttatttaccagatggtcgaccaatcgatattatgttaaacccattaggtgtaccatcacgtatgaacattggacaagtattagaattacatttaggtatggcagctaaaaacttaggaattcacgttgcttccccagtgtttgatggtgccaacgatgatgacgtttggtcaactatcgaagaagctggaatggcgcgtgacggtaaaactgttctatacgatggacgaactggtgaaccattcgataatcgtatttcagttggtgtcatgtacatgcttaaacttgcacacatggtagatgataagttacatgcacgttctactggaccatactcacttgttacacaacaaccattaggtggtaaagcacaattcggtggtcaacgtttcggtgagatggaggtatgggcacttgaagcttatggtgctgcttatactttacaagaaatcttaacttataaatctgatgatactgtaggtcgtgttaaaacttacgagtctatagttaaaggtgagaacatttctagacctagtgttccagaatcattccgagtattgatgaaagaactacaaagtttaggtctagatgttaaagtgatggatgagcatgataatgaaatcgaaatggctgatgttgatgacgaagatgcagcagaacgcaaagtagatttacaacaaaagagtgctccagaatcacaaaaagaaactactgattaa

SEQ ID NO: 3990 - DNA, 735 bp, Staphylococcus epidermidis
atgcaaatacaacctgaattctttgagaagttaaaaccccgttattccaataacggggtttttcaattaattaatacaagcatactaaatgcttttggattgaatgataaaaatagaggtgaagaaatgagtcattattatgatgaacaacctgatgttaaaagtaacccaaaaagaattagttatcaaattaaaaatgcgcaactagagcttactactgatgctggagttttttcaaaagataatgtagattttggatctgacttactaattaaaacttttttaaaagaacatcctccaggcccaagtaaaaccatcgcggatgtaggatgtggatatggtcctatcggtttagcaataggaaaagtatctccacaccatcaaatcacaatgttggatattaacaatagagccttggcgttggcagaaataaataagacgaaaaatcaagtggataatgtaacgattatagaaagcgattgtttatctgctgtcaatcatcagtgctttgattacattttaactaatccccctattagagctggtaaggacattgttcatcgaatctttgaacaagcgtttgacagactcaagactacgggtgaactttatgtcgtcattcaaaaaaagcaaggtatgccttcagctaaaaagaaaatagaagaactatttggcaatgtagaaattatagctaagagtaaaggatattatattttgaaaagtataaaaggttga

SEQ ID NO: 3991 - DNA, 369 bp, Staphylococcus epidermidis
atggctaatcaagaacaaatcattgaagcaattaaagaaatgtcagtattagaattaaacgatttagtaaaagcaattgaagaagaatttggtgtaactgcagcagctccagtagcagcagcaggtgcagctggtggcggagatgcagcagctgaaaaaactgaatttgatgttgaattaacttcagctggatcttcaaaaattaaagttgttaaagcagttaaagaagcaactggcttaggattaaaagatgctaaagaattagtagatggagctcctaaagtaattaaagaagctatgcctaaagaagatgctgaaaaacttaaagaacaattagaagaagttggagctagcgtagaattaaaatag

SEQ ID NO: 3992 - DNA, 501 bp, Staphylococcus epidermidis
atgtctgctatcattgaagcaaaaaaacaacaagtcgatactatcgctgaacaacttaaaaattcagtttcaacagttatcgttgactaccgtggtttaactgtagcagaagttactgaattacgttcacaattacgtgaagcaggtgttgagtataaagtatacaaaaacactatggttcgtcgtgctgctgaacaagcaggtatcgaaggcttggatgaattcttaacaggtcctacagcaatcgcaacttctactgaagatgttgttgcaccagcaaaagttattgcaggatttgcaaaagaacatgaagctttagaagttaaaacaggcgttatggaaggtaacgttatctctgctgaagaagttaaaacagttggttcattaccttcacacgatggtcttgtatctatgcttttatctgtattacaagcacctgtacgcaacttcgcttatgcagttaaagctgttggagaacaaaaagaagaaagcgctgaataa

SEQ ID NO: 3993 - DNA, 696 bp, Staphylococcus epidermidis
atggctaaaaaaggtaaaaagtatcaagaagcagctagtaaagttgaccgcactcaatactatagtgttgaagaagcaatcaaattagctaaagaaactagcgttgctaatttcgacgcttctgttgaagttgcattccgtttaggaattgatacacgtaaaaatgaccaacaaatccgtggtgcagtagtattaccacacggtactggtaaatcacaacgtgtactcgttttcgctaaaggcgataaaatcactgaagctgaagaagcaggtgcagattatgtaggtgaagcagattacgtacaaaaaatccaacaaggttggtttgatttcgacgtagttgtagctacacctgatatgatgggtgaagttggtaaacttggtcgagtattaggacctaaaggtttaatgcctaaccctaaaactggcactgtaacaatggatgttaaaaaagcagttgaagaaatcaaagctggtaaggtagaataccgtgctgaaaaagcaggtattgtacatgcatcaattggtaaagtgtcattcgatgaagaaaaattagttgataacttcagaactttacaagatgtattagcgaaagctaaaccagcttctgctaaaggtacttacttcaaatctgttgctgttacaacaacaatgggtcctggagtaaaagttgatacttcatctttcaaactataa

SEQ ID NO: 3994 - DNA, 423 bp, Staphylococcus epidermidis
gtggctaaaaaagtagaaaaagtagttaaattgcaaattcctgcaggtaaagcgaatccagcaccaccagttggtccagcattaggtcaagcaggtgtgaacattatgggattctgtaaagaattcaatgctcgtacgcaagaacaagcaggtttaatcattccggtagaaatcagtgtttatgaagaccgttcatttacattcattacaaaaactccgccggctccagtactacttaaaaaagcagctggtgttgaaaaaggttctggtgaacctaataaaactaaagttgcaacagtaactaaagatcaagtacgcgaaattgctcaaacaaaaatgcaagacttaaatgctgcagacgaagaagcggcaatgcgtattattgaaggtactgcacgtagcatgggtatcactgtacaataa

SEQ ID NO: 3995 - DNA, 549 bp, Staphylococcus epidermidis
atgtctgaagaagtaggcgctaagcgttggtatgctgtacatacctattcaggatatgaaaataaagttaaaaagaatttagaaaaaagagtagaatctatgaatatgactgaacaaatttttagagttgtcataccagaagaggaagaaactcaagttaaggatgggaaagctaaaaagcttgtgaagaaaacatttcctggatatgtattagttgagttaatcatgacagatgagtcgtggtatgtagttagaaatactcctggagtaacaggatttgtcggatctgcaggtgcaggatcaaaacctaaccctctacttcctgaagaagtacgcttcattcttaagcaaatgggtcttaaagagaaaacaatagatgttgaactcgatgttggggaacaagttcgtatccaatcaggtccttttgctaatcaaattggagaagtacaagagattgaagcggataaattcaagcttactgtacttgttgatatgtttggtcgtgaaacacctgtagaagttgaatttgaccaaattgaaaaattataa

SEQ ID NO: 3996 - DNA, 186 bp, Staphylococcus epidermidis
atgatggctaaaaaagaaagtttctttaaaggcgttaagtcagaaatggaaaagacgagttggccaactaaggaagaattatttaaatatacaataatagttgtatcaacagtgatattcttcttagtctttttctatgccttagacataggaattaatgcattaaaacaattatttttaggttag

SEQ ID NO: 3997 - DNA, 144 bp, Staphylococcus epidermidis
gtgaagaaagtacctttgaattgtgagaattgtggcaatcggaattacaatgttcctaaaaaggaaggctcagcaacgagacttactttaaaaaaatactgtccaagatgtaacgcgcatacagttcataaagaatcgaaataa

SEQ ID NO: 3998 - DNA, 576 bp, Staphylococcus epidermidis
atgaatctgaataaacagcaacatgaatatacagcactgtgtctatcgcaaacagaaaataaatcttctgaagaactatttgagtctttaatagaagagctaaagccactgatttacaataaaataaggtatatctcccataataagtatgacattgaagacatgtatcaagagattgttattaaattctaccgtgccttgcaaaaattcgactatcaacaaggtgtaccaatagaacactatatttattttttaattcgttcggttaaatatgactatcttagaaaagtaaaagcgaattataaacgtcaacctctacttgttaatgaatacattgttgaatataacgctactttggcattaaacgatatagaaagatcgataattagaaaagaattaacattagcttttaaaagaagcgaagtcaaactcagtcgaatggaaagacgtatcattcgattactacttaatgattacaagccaaaggagattgctatggttttaaatttggaatccaaagttgtttataatgcgattcaacgtagtaaatgtaaacttaaaagaagttttgaataa

SEQ ID NO: 3999 - DNA, 528 bp, Staphylococcus epidermidis
atgaagaaaagatacttaattatagatggttacaatatgattggccaatcctcaacacttagcactgttgctaaagagaatttagaagaagctagagagcaattattagacacaattgccaactacaatgcattaatagcagatgaaattgtctgtgtatttgatgcctatgaacagtcagggatagaaagggaatacttctatcatggtgtcaaaacaatctttactaaagaaaaagaaactgcagatagttttatagaacgctacgtgtatgaattatataataaacacacgacacacattaccgttgtaacaagtgatatgagtgaacaacatgctatttttggttcaggtgcatatcgtatttcttcaagagaaatgtggcgtgaattaaaagaaaatgaggttgttgttaacaagtcacttgatgattttagcgaaaagaaaccaagaattagaattccgttatctaatgagatacttgaagaatttgaaaagattagacgtggcaatcagaaaaaagactaa

SEQ ID NO: 4000 - DNA, 768 bp, Staphylococcus epidermidis
atgaaaggtagtgtgaatgtggaagatatagtgatagtaggtagacacgcagttaaagaagcaattatatcaggtcacgccataaataagattttgattcaagacggtataaaaaagcaacaaattaacgacattttaaaaaatgcaaaatcacaaaaattaattgtacaaacggtaccaaaatctaaattagattttttagcaaatgcacctcaccagggtgtggctgctttagtagccccatatgaatatgcaaacttcgatgaatttttacaaaaacaaaagaaaaaagcccgttattcaactgttatcattttagatggtttagaagacccgcataatcttggctctatattaagaacagcagatgcttctggtgttgatgcggttattatacctaaaagacgatcagttgcgctaacacagaccgttgcaaaagcttctacaggagcgattcagcatgttccggttataagggttactaatctttcgaaaactatcgacgaattaaaagacaacggcttttggattgcggggacagaagctaataatgcaacggattatagagatttacaagcagatatgtcactaggtattgtaataggtagtgaggggcaaggtatgagtcgtttagtgagtgataagtgtgattttcatattaagattccaatggttggacatgtcaatagcttgaacgcgtctgtggctgcaagtttaatgatgtatgaagtatatcgtaaacgtcatcagttagaggaaaagtcatga

SEQ ID NO: 4001 - DNA, 387 bp, Staphylococcus epidermidis
atgaacgtaaaacttcttaatcctttaacattggcatatatgggtgatgcagtacttgatcaacatgtgcgtgaatatatcgtgctaaaattacaaagtaaacctcatcgtttgcaccaagtatcgaaaagttacgtttcagcgaaaagtcaagctaagactttagagtatttgttagatattgactggtttacagaggaagagctaagtgttttaaaacgaggacgtaacgctaaaagttatacaaaagctaaaaatactgacattcaaacttatcgtaaaagttcagcgttagaagctgttatcggatttttatatttagaccatcaatcagaacgattagaaaacttattagaaacaattgttaggatagtggatgaaaggtag

SEQ ID NO: 4002 - DNA, 1401 bp, Staphylococcus epidermidis
atgattacattatataataccttaacacgtcggaaagagacgtttgagcccattgaaccaggtaaggtcaaaatgtatgtatgtgggccaacagtttacaattatattcatattggaaatgcacgaccagctattaattatgatgtagtcagaagatatttcgaatataagggatatgaagtcatctatgtttctaatttcacagacgttgatgataaactcattaatcgctctaaagaacttaatgaaagtgttcctgaaattgctgaaaagtatattaaagctttttatgaggacgttggtgctttgaatgtgaaaaaggctacatctaatccgcgtgtgatgcatcatatgggtgaaattattgattttattaaagaattagtagatgaaggttatgcatatgaaagtgacggtgatgtctattttagaacacgtcaatttgatggatatggtaaattaagtcatcaatcattagatgatttgaaagttggcgctcgtattgaagctggagaacaaaaagaagatgcgctagattttactttatggaagaaagctaaaccaggtgaaattagttggaatagtccatttggtaaaggtagaccaggttggcacattgaatgttcagtaatggcttatcatgaactagggtctacaatagatattcacgcaggtggttcagatttacaatttccgcatcatgaaaatgaaattgctcaatcagaggctcataatcatgcacctttcgcaaattattggatgcataatggttttattaatattgataatgagaaaatgagtaagtctctaggaaatttcattttagttcacgatatcattaaagaagtcgatccagacgtattacgattctttatgattagtgtgcattatcgtagcccaataaactacaatttagaattagtaggtgcggcgcgaagtggtcttgaacgtatacgtaatagctacaagttaattgaggaaagagaacaaattgcctcagatttggaagaacaatcagaatatatacaacaaatagataaaatactaaatcaatttgaaacggtaatggatgatgactttaatactgctaatgcagtaactgcatggtatgacttagctaaacttgcaaataaatatgtattagaaaatacaacttcaacaaaagttttaaatagatttaaagaagtgtacagcatttttagtgacgtccttggtgtaccacttaagagtaaagaaactgaagagttactagatgaagacattgaacaattgattgaggagcgtaatgaagcacgtaaaaataaagatttcgctcgagcagatgaaattagagatatgttaaaagcacgtcatatcattttagaagataccccccaaggtgtaagatttaaacgtggctaa

SEQ ID NO: 4003 - DNA, 642 bp, Staphylococcus epidermidis
gtgttaaaaagaatgagagacgatataaagatggtgtttgaacaggatcctgcagcgcgctcgactttagaagtaataactacttacgctggattacatgcagtttggagtcacttaattgcccataaattatataaaaatagacgctatgtagcagccagaatgatttctcaactatcacgtttttttaccggaattgaaatacatccaggtgcaaaaatcggtaagcgtttatttatcgaccatggcatgggtgtagttattggagaaacatgtacaattggtgataatgttactatttatcaaggagttactttaggtggtacaggcaaagaaaaaggaaaacgccatcctgatattggtgataatgttttgatagcagctggatctaagatattaggtaatataaaaattgaatcaaatgtgaatattggagctaattccgtagtattacagtctgttcctagttatacaactgtagtaggtataccaggtcacattgttaaacaagaaggtagacgtattggtaaaacatttgatcaccgtaacttacctgatccactttacgaacaaattaaacacttagaaagacagcttgaaaaagctaagaatggagagattcaagatgattacattatataa

SEQ ID NO: 4004 - DNA, 1455 bp, Staphylococcus epidermidis
atgagtgaacgtatcagagtaagatatgcgccaagtccaacaggatatttgcatattggtaatgcaagaacagcattattcaattatttatttgctaaacattataatggtgattttgttgttcgcatcgaagatacagatagtaaacgtaatttagaagatggtgaatcttcacaattcgataatctaaaatggttaggtttggattgggatgaatctgtcgataaagataaaggttttggaccttatcgtcaatctgaacgtgcagaaatctataatccactaattcaacagctattagaggaagacaaagcatataaatgttatatgactgaagaagagttagaagcagagcgtgaagctcaaattgctcgtggagagatgccaagatatggtggacaacatgcgcacttaacagaagaacagcgtcaacagtacgaagcggaagggcgtaaaccatcaattcgtttccgtgtgcctaaagatcaaacatatactttcaatgacatggttaaaggagaaatttcctttgaatctgacaatatcggagactgggtaattgtaaaaaaagatggtgttccgacttataattttgcagttgccgtagatgatcattatatgcaaatatcagatgttatacgtggtgatgaccatgtttcaaatacacctaagcagttaatgatatatgaagcatttggatgggaagcacctcgttttggtcatatgtcactcattgttaatgaagagcgtaaaaaattaagcaagcgagatggtcaaatcctacaatttatcgagcaatatcgtgacttaggatatcttccagaagcattatttaactttattacattgttaggttggtcacctgaaggtgaagaggaaatcttttctaaagaagaatttataaagatttttgatgaaaaacgcttgtctaagtctccagctatgttcgatagacaaaaacttgcttgggttaacaatcagtatatgaaaacaaaagatacagaaacagtattcgaacttgcattacctcatttaatcaaggctaatcttatacctgaaaacccatcagaaaaggatagagaatggggacgtaaattaatagcgttgtatcaaaaagaaatgagttacgctggtgaaattgttccattatcagaaatgttcttccatgaaatgccggaacttggaaaagatgaacaagaggtattacaaggagaacaagtgccagaactaatgaaccatttatatggtaaattagaatctttagaatcgtttgaggcaactgaaattaagaaaatgattaaagaagttcaaaaagaaactggtattaaaggtaaacaattatttatgcctattcgtgttgctgttactggacaaatgcatggtcctgaattacctaacacaattgaagtattaggcaaagataaagtattgtcacgcttaaaaaaccttgtttaa

SEQ ID NO: 4005 - DNA, 1059 bp, Staphylococcus epidermidis
ttgaatataacaaaagcaattgttgtagcaatctatatcattgttggtgcagcacttggtgttataattatacccgaagttgttacagatcttggcattcatcaccatgcggttatcactaattattatgtagatggtttcatagggatcattatattttttataatatttggattgttcattaataaagtaacatatgcttttaaacaatttgaacaattaatcatgagacgtagtgcggtagaaatattatttgctacaattggtttaattattggtttatttatttcagtgatggtttcttttatcttagaaatgataggtaattccatattaaatcactttgtacctatgataatcactattattttatgttatttagggtttcaatttggtctgaaaaaaagagatgaaatgcttatgtttttaccagagaatatggcacgttccatgtctaataatatacgaagagcgacacctaagattgtagatacaagtgccattatcgatggaaggatattagatattatacgttgcggatttatcgatggtgatatattgataccacaaggcgttataaatgaattacaggttatagcggatgctaaagatagcgtgaaacgtgaaaaaggtcaaagaggattagatattttgaatcaactttatgatttagattatcctacacgcgttatacatccaactcaatcccatagtgatatagatacattattaattaaattagcacaacagtatcatgcacatgtgattacgactgattttaatttaaataaagtatgtcacgttcaaggaattacagcactcaacgttaatgatttatcggaagcaatcaaacctaatgtacatcaaggcgaccagttaagtattttattaacgaagataggtaaagagccaggacaaggcgtaggatatttagatgatggtacaatggtggttgttgataacgcgaagagttacattggtcaacaagttaatttagaggtcgtaagtttgttacaaacatcatcaggaagaattgtttttgcgaaatttgttgactga

SEQ ID NO: 4006 - DNA, 1374 bp, Staphylococcus epidermidis
atggccaagaaaaaagtaatattcgaatgtatggcatgtggctatcaatctcctaagtggatgggcaagtgccctaactgcggtgcgtggaatcaaatggaagaaatagtagaaaaggttgctcatcctaaacatggtgtaaaaacaaaagaaacagcaggtaaggtacaaaagttaaatagtgttaagcatgaagctacccctagattacttacagaatcaaaggaatttaaccgtgttttaggtggaggtattgtaagtggttcgttagtactaataggtggagacccaggtattggtaagtcgactttattgctacaaatttgtgctgcgctgtcacaaaataagaatgttttatatattactggtgaggaatctattaatcaaactaagttgcgcgctgatcgtttagaagaagattctagtcatcttaatgttttagctgaaactgatttagaagtgatacatcaaactgtaaaagaagagagacctgacttacttgttgttgattcgattcaaacaatctatcatccggaaattagttccgcacctggatcggtatcacaagtaagagagagtacgcagagtttaatgaacattgctaaacaaatgaatattgccacatttattgtgggacacgtaacaaaagaaggacaaatcgccggaccaagattattggaacatatggttgatacagttctttattttgaaggagatgagcatcacgcatatcgtatccttagagcagtaaaaaatagatttggttctacaaatgagatggggattttcgaaatgaagcaaagtggattaaaaggtgtacttaatccttctgaaatgtttttagaagaacgttctacaaatgttccgggctctacaatcgtccccactatggaaggaacaagaccactactcattgaagtccaagcgcttgttacaccaacaacatttaataatcctagacgaatggctacaggtatagatcataatcgattaagtttacttatggcggttctagaaaaaaaggaaaactatttactccaacaacaagatgcctatattaaagtagcaggtggcgtcaaattaacagaacctgctgttgatttaagcattattgttgcgacagcttcaagttttaaagatcaagctgttgatggattagattgttttgtgggtgaagttggattaacaggtgaagtacgcagagtatctcgcatagagcaacgtgttcaagaagcgaccaaactagggtttaaaagagctattattccacagacaaatattggaggttggacattcccagaaggcatccaagtcgttggtgtttcatcagtacatgaagctttgaaatatgcattacattcaaaacagcgataa

SEQ ID NO: 4007 - DNA, 2454 bp, Staphylococcus epidermidis
atgttatttggtagattgacagagcgtgcacaacgtgtgttggcacatgcacaagaggaagcaattcgtttgaaccattctaatattggaacagaacatcttttgcttggtttaatgaaagagccagaaggtatagcagcaaaggtattagtaagttttaatattactgaagataaagtcatcgaagaagttgaaaaacttatcggtcacggtcaagagcaaatgggcacactacattatacaccgagagcaaaaaaagtaattgaactgtctatggatgaagctcgaaagctacatcataactttgtaggaacagagcatatactattaggtttaattagagaaaatgaaggtgttgcagcacgtgtatttgcaaacctagatttaaatattactaaagcacgtgcccaagttgtaaaagctttaggaagtccagaaatgagtaataaaaatgcgcaagctaataagtctaataacacgcctactttagatggattagctagagatttaactgttattgctaaagatggaacgttagatccagtcgtaggacgagataaagaaattactcgtgtaattgaagttttaagtcgtcgtactaaaaataatcctgtgctaattggtgaacccggtgttggtaaaacagcaattgctgaagggcttgcgcaagcaattgttaaaaatgaagtaccagaaactttaaaagacaaacgtgtaatgtcattagatatgggtacagtcgtagctggcactaaatatcgtggtgaatttgaagaaagattgaaaaaagttatggaggaaatccatcaagctggtaatgttattctatttatcgatgaacttcatactttagttggcgctggtggcgcagaaggagcaattgatgcatctaatattttaaaacctgctttagctcgtggagaattgcaatgtataggtgccacaacattagatgaatatcgtaaaaatatagaaaaagacgctgcattagaacgtcgttttcaaccaattcaagtggatgaacctacagttgaagacacgattgaaatcttaaaaggattacgtgaccgttatgaggctcatcacagaattaatatctcagatgaagctttagaagcggctgctaaattgagtgatcgctatgtttcagatcgtttcttgccagataaagccattgacttaattgatgaggcaagttcaaaagttagacttaaaagtcatacaacgccaagtaatttaaaagagattgaacaagaaattgataaagtaaaaaatgaaaaagatgctgcagttcatgctcaagaatttgaaaatgccgctaatttaagagataagcaatctaaacttgaaaagcaatatgaagatgctaaaaatgaatggaaaaatgcacaaggtggtttagatactgccttatctgaagaaaatatcgctgaagtaatagctggttggacaggtattcctttaactaaaattaatgaaactgaatcagatcgtttattgaatcttgaagatacacttcataaacgtgtcattggacaaaacgatgctgtcaattcaattagtaaagctgttagaagagctcgtgctggtcttaaagatccaaaacgtccaatcggtagttttattttcttaggacctacaggtgtgggtaaaactgaattggctcgtgctttagctgaatctatgtttggtgaagacgatgcaatgattcgcgtagatatgagtgaatttatggagaaacatgctgtcagtcgattagttggtgcacctccaggatatgtaggacatgatgacggcggtcaattgactgaaaaagttagacgtaaaccatactctgtgattttatttgatgaaattgagaaagcacatcctgacgtatttaatattcttctacaagttttagatgatggtcatttaacagatactaaaggtcgtactgtggacttccgtaatactgtgattattatgacttctaatgtgggagctcaagaattacaggaccaacgctttgctggttttggaggtgcttcagaaggtagtgactacgaaactgtcagaaaaacaatgatgaaagaattaaaaaattcattccgaccagaattcttaaaccgtgttgatgacattattgtcttccacaaacttacaaaagatgaattaaaagaaattgttacaatgatggtaaataaacttactcaccgtctttcagagcaaaatattaatattgttgttactgataaagcgaaagaaaaaattgcagaagaaggatatgatcctgaatatggtgctagaccactcattagagcaattcaaaaaacggttgaagataatttaagcgaattgattttagatggaaataaaattgaaggtaaagaagtaacaattgatcatgatggtaaagaatttaagtatgatatttatgaaattacagctaaaaaagaaacaacagaatcataa

SEQ ID NO: 4008 - DNA, 1005 bp, Staphylococcus epidermidis
atgagtaatatccatactaatattagtgagtggatgaagatgtctgaggagacacctgttattatttcttccagaattcgattagctagaaatcttgaaaaccatgtccacccacttatgttcccttcagagcaagaaggatatcgagtgataaatgaagttcaagatgcgctttccaacttaactttaaatcgattagatacgatggatcaacaaagtaaaatgaaattggttgcgaaacatcttgtgagtcctgaactagtgaaacaacctgcttcagcagtaatgttaaatgatgatgaatcggtaagtgttatgataaacgaagaagatcatatacgaatacaggctctaggaactgatttatcgctaaaggatttatatcaacgcgcttctaaaattgatgatgaattagataaagcgttagacattagttatgatgagcatttaggatatttaactacctgtcctactaatattggtacaggaatgcgtgcaagtgtgatgttacatttacctggactctccattatgaaaagaatgaacagaattgcacaaacaattaatcgttttggatttacaattcgaggtatatacggagaagggtcacaagtatatggtcacatttatcaggtttcaaaccaacttacactagggaaaacagaagaagacattatcgataacttaactgaagttgtaaatcaaattataaatgaagaaaagcaaataagagaaagacttgataaacacaattctgtagagacactggatagagtttatcgatcattaggtgtactacaaaacagtagaattatttctatggaagaagcctcatatcgtttgagcgaagtgaaactaggtattgatttgaattatattttgcttgaaaattttaaatttaatgaattaatggtagcaatacagtcaccatttttaatagatgacgatgataatagaacagtaaatgaaaaaagagctgatttattaagagaacatataaaatag

SEQ ID NO: 4009 - DNA, 564 bp, Staphylococcus epidermidis
ttgctttgtgaaaattgccattttaatgaagcggaagttaaacttactgttaaaggtatagatagtacgcatgaaaaatgggtatgttcagtatgtgcccaaggagaaaacccctggttacattctaacgatgataatacgtatcatacacaccaagacgatatagaagaagcatttgtagtgaaacagatacttcaacaccttgctgcaaaacatggtattaattttcatgagatggcatttaaagaagaaaaaaaatgcccaacgtgtcagatgacacttaaggatattgcacatgttggtaagcttgggtgtgctgattgttatgctacgtttaaagaagacatcattgatatagttcaacgtgttcaaggtggtcaatttgaacatgtaggaaaaacaccacaatcatcgtataagaaacttgcaataaaaaagcaaattgaagaaaaatcaaaatatctaaataaattgatagatggtcaagagtttgaagaggcagcgattgttcgtgatgaaattaaagctttaaaaagtgagagcgaggtgtctcatgatgagtaa

SEQ ID NO: 4010 - DNA, 462 bp, Staphylococcus epidermidis
atgcacaatatgtccgacatcatagaacaatacattaagcggttatttgaagaagcagatgaagatgttgtagaaatacaacgcgctcatattgctcaacgtttcgattgtgttccttctcaacttaactatgttattaagacacgttttactaatgaacatggttatgaaatagaaagtaaacgtggtggcggtggttacattcgaatcactaaaattgaaaataaagatgctacaggttatattaatcacttactacaattaataggtccatctatttctcaacaacaagggtattatgtcatagatggtttgttagataaaggtttgatcaatgaaagagaagctaaaatgatacagaccattattgatagagaaactttaaaaatggatgttgttgcacgcgatattattagagctaatatcttaaaacgattactaccagttattaattattactag

SEQ ID NO: 4011 - DNA, 1215 bp, Staphylococcus epidermidis
atgcatattgtgattgggatattaggaatcattttctttttagcactcgcagttttatttagttcagacagaaaaaatattcgctggcgatatgttggattgctattagtaattcaactaatatttgcatttatattacttaaaactaatttgggaatttcagttattgggagtatttcagatggttttaattatttattagctaaagcagcggtcggtgtcaattttgtatttggtggctttaaatttattgatcctaaacaaccaccattcttctttagcgttttgttacctattgtttttatttcagcattgattggtatattacaatatacacgaatacttccactaattattaacttactgggctttttaatttcaaaaattaatggaatgggccgtttagaatcttacaatgcggtcgcggcagcaattctaggacaatctgaagtctttatctcattaaaaaaacaattaccttacatacctaaacaacgcttatatacattaactgcttcagcgatgtcaacggtatcagcatcaattataggcgcttattttacacttattgaaccaaaatatgttgttactgcagtagtgcttaacttgtttggtggttttatcattgcatctatcattaatccttataaagtcaatgaggaagacgacaaattattaattgatgagaacgaaacaaaaaaacaatctttctttgaaatgcttggggagtatatactagatggatttaaagtagcagttattgtaggcgctatgctgataggttatattgcaattattgctttattaaatggaatggtgagtggaatcttaagctttatgtctggtggtgctattcaatggaacttccaaacgcttattggatttatttttgcacctttcgctttcctaactggaataccgtggcaagatgcagttcaatctggttcagtaatggctacaaaattactatctaatgaatttgtagcaatgcaagatttaggtaaagcgactggattatcggaacatgctaaaggaattacctctgtcttcttagtatcattcgcaaactttagttcaattggtattatttcaggagctattaaatcattgaatgatgaaaaaggtgacgttgttgctcgtttcggaataaaattattatttggtgcaacacttgtttcgtttatatcagcggctattgcaggattctttatctaa

SEQ ID NO: 4012 - DNA, 258 bp, Staphylococcus epidermidis
atgaaaagtaaaacaccaacagaagctcgtaaagatttttatcaattattaaaacgtgtgaatagtgatcataaaccagtatatattgagggcaaaaatgatgagagtaatgctgtgattataggtatggaagattggcgtagtattaaagaaactatatatcttgaagctacaggaacaatgcaaaaagttagagaacgtgaacaagacaacagtggttatacaaacatagatgatattgattgggctagactttaa

SEQ ID NO: 4013 - DNA, 267 bp, Staphylococcus epidermidis
atggctaaatataaaatcaacataaagaattcagcgaagacagatttaaagaagataaaacgttctcacttacaagaacaatttttgaaaatcgtagaaatactaaaatatgatccatatcaacaaagtcaatcctttgaaaaattgcaccctaaacatttaggacgatactcaagacgtatcaatcatcaacatagagttgtctatacaattgatgaggaaaataaagaagtattaatattagcagcttggtctcattatgaatga

SEQ ID NO: 4014 - DNA, 171 bp, Staphylococcus epidermidis
atgaaaattaatgatgaactcattgaaaatttattgaaagataaatcaggattgcgtcaagaaaatacgaaaaacctaacaaaaacacttgttgaaaaatataaagatccaaatacatctcaaaaaacaaaaaaagaaattagagagctttttcgacgactatataagtag

SEQ ID NO: 4015 - DNA, 354 bp, Staphylococcus epidermidis
atgaattaccgagatttggacaagcgcaatcaacatttaacaacacaaaataatcaactcgaacaccatttagacatgttaaatgcacgtcatcaagcgatgaacgccatggtaagaaatgatacacgtattttgtttgcgggacttagatgtgcattgaaagataggaatattgaattaagcgcagaaattaaatatcaacgtatgccagaagtcggtattgatcccgatacggtggatcagggggctttaacacatgcatatcaaggtgatgtgtcagggatagaccatcatataagaaaggcatcagcacctattaaaaaagagacagagaatgacttagaattagaataa

SEQ ID NO: 4016 - DNA, 519 bp, Staphylococcus epidermidis
gtgatacgattaaacaaacaaaaacgtttctccataaaacctctgtggcaagttaaaatagtgagatttcctaaggtttttaaacaaactattattattgaaatttctcgttttataccaagcatgcgtctaaaacgctctatttatcgcaagtttttaaaaatggctataggtcagaatacagcatttgcatataaagttttacctgacttgttttatccagagttaatttctgttggcaacaatagtgttattggttataatacaacaatattaacgaatgaagtacttattgatgaagggcgacaaggtagagtcaccattgggcatcatacattgattggtgcgaatgtaacgattttaccaggagttagaataggaaaccatgtaaaagtcggagctggtacggtcatcactaaagatatacctgattatagctttgtatttggtaatcctatgcatataaaagttgatagaggaggtgacaattggcacgtgaagacaataagataccaatga

SEQ ID NO: 4017 - DNA, 300 bp, Staphylococcus epidermidis
atggcacgtgaagacaataagataataccaatgattttcgacgaaactttttaccgcaaaatggctatacaaaaatggcaacaacaagattataataaagcagcaagttactatagcaaagtgctcgaattgtcacctgaagattatgatattcaattacattatgcacaatgtttaacgaaaataaatttaggtagaaaagcagagcaaatattttacgaaaatattgtaaatgattttcatgtggcagatagtttcgatgagttaaggcaattaaagatagagtggagtgaaccataa

SEQ ID NO: 4018 - DNA, 591 bp, Staphylococcus epidermidis
atggataaagctacaaaatatgcacttcaattaagggtgattgctcaagaaagctatcctaatgtcgatagacattcctttctagtcgaaaaattacgcttacttattcaacaattaaaacaatctattcatcatctcaaacaattagatgatgccatgattcaattagcacaacaactcgattattttgaaaatattcattcgatacctggtattggtaagctaagcacagctatgattattggggagattggtgatattaagcgatttaaatcaaataaacaactcaatgcttttgttggcattgatatcaaacgatatcaatcaggtcatacacactgtagagataccatcaacaagcgtggtaataaaaaagcgagaaaacttttattttgggtgattatgaatataataagagggcagcatcattatgacaatcatgtcgtcgattattactacaaactaagaaagcagcctaatgagaaacctcataagactgccatcattgcttgtataaatcgattattaaaaacaattcattatcttgtaatgaatcataaattgtacgattatcaaatgtcaccacattag

SEQ ID NO: 4019 - DNA, 777 bp, Staphylococcus epidermidis
atgtgtaataagctaaaagaacaagatactaataaattatatttaagttttgaagaacttaaatatttaagtaattataactatgaaactagaaatcttaatcgttttattggagatttacaaaatatttataaaaagatgctcgagataacttatcgaagagaagatgaggatgtaatagagttttttgtacttttcaatcactttaaaattcataaaacggagaagtatcttgaaatttccactaatcctgacttaaagtttgttttaaatgatattactcgtaattttacaaaattcgaattaaaagaactgactaatttaaaatcttcgtactctaaaaccatgtttcgcttacttaaacaatataaacatactggatatttaaaattatcaatggaagattttagaactcgattagacgtatcaaagtcttatcaaatgtgtgacattactaaacgtgtattaaaaccaatatctaaagaacttacacctatttttaataatcttaatattaataaagttaaagctaaaaaaggtcgaaaaattgaatacttagaatttatctttgacgctgagaaacgtattcacaacaaacgacagccacaaataactaatataggtaagtcgcgccaatatactaatcgtgaaaagacacctaaatggttagatgataagatatataaacaatctcaagagtcacatgacgaagatgcaaaattaaaacaagatcgagaggcatttcaacgtcaattagaagaaaaatgggaggaataa

SEQ ID NO: 4020 - DNA, 774 bp, Staphylococcus epidermidis
atgaaaaaaatcgctacagctacaattgcaactgcaggaatcgctactttcgcttttgcacaccatgacgcacaagcagcagaacaaaataataatgggtacaatcctaacgacccttattcatatagctatacttacacaatcgatgctgaaggtaactaccactacacttggaaaggtaactggagtccagatcgtgtaaatacttcatataactataatagttataataactacaacaactatggttacaataactatagcaactacaataactacagtaattacaacaattacaacaactatcaatcaaataacacgcaatcacaaagaacaactcaaccgactggtggtttaggcgcaagctattcaacatcaagtagtaatgttcacgttacaacaacttctgcaccatcatcaaacggtgtatctttatcaaacgctcgctcagcatctggtaacttatacacttcaggtcaatgtacatattatgtatttgacagagtaggtggcaaaatcggttcaacatggggtaacgcaaacaactgggcaaacgctgcagcacgttctggttacacagtaaacaattcaccagctaaaggtgcaatcttacaaacatcacaaggtgcatacggacacgtagcatacgttgaaggtgtaaacagcaatggttcaatcagagtttcagaaatgaactacggtcacggtgcaggtgttgtcacttcacgtacaatctctgcgagccaagctgcttcatataattatattcactaa

SEQ ID NO: 4021 - DNA, 483 bp, Staphylococcus epidermidis
atgtcatctgacacaaacagtttagcacatacaaaatggaattgtaagtatcacatagtctttgcaccaaaatatagaagacaagtgatatacggaaaaatcaaaagagatattggagttattttacgtcaattatgtgaaagaaaaggcgtagaaataatagaagcagaagcatctaaaaatcatattcatatgttagttagtattccacctaaattaggagtatcctcatttgttggatatttaaaaggtaaaagcagtttaatgatttttgatagacatgctaatttaaaatatagatatggaaatagaaagttttggtgtaaaggattttatgtagatacagtaggtagaaataaaaaggtaattgaaaattacattcgtaatcaattacaagaagatatcgttgcagatcaaatttcaatggaagaatacctagatccctttacaggagaagaaattaaaaaaagacgaaaaaaatag

SEQ ID NO: 4022 - DNA, 207 bp, Staphylococcus epidermidis
gtgtgtggtggtggggggggtggtgggggtgggggaggggggggtgggggggtggggtgggtgtggtgggggggggtgggggggggggtgggtgtggggtggggtgggggggggggtggtgtgggtgtgggggggggggggtggtggggttgggtggggggggggggggggagggggtgtggggggtgggggggggtggggggttag

SEQ ID NO: 4023 - DNA, 231 bp, Staphylococcus epidermidis
ttgaaattaaatccatatttgatagaaattaataatattaagattattaaacaaatggtagaggctggaaatgggtttgcaattatttcaaaatcagcacttcatccagaagattatgaaaaattaatgataacaactttaaatgtgaaacgtcactattaccttgctcaacatgttgataaatatataggtaaaaatattagagctgtcattgaaatgattatgaagtag

SEQ ID NO: 4024 - DNA, 1464 bp, Staphylococcus epidermidis
atgggcgaatttaaaggatttatgaaatatgataaacagtcgctatcagaattgtctttggtagaccgtctttcgaatcatgaagcgtttcaacaacgcttcactaaagaagatgcttcgattcagggtgcgcgctgtatggattgtggaacacctttttgtcaaactgggcaatcttatggaagagaaacaataggatgccctattggtaattatatacctgagtggaacgacttagtctatcatcaagattttaaagctgcttacgaaagattgagagagacgaataattttcctgaatttacaggaagagtttgtcctgcaccatgtgagcaatcatgtgttatgaaaattaatagagaatccgtggcgattaaaggtattgaacgtacaattattgatgaagcatatgagaatgagtgggttcatcccgcatatcctgaagatcataaagaccaacgagttgctatcgtaggtagtggtccagcgggacttacagcagctgaagaattaaactttaaaggctataaagttactgtttatgaaaaggcgcatgaaccaggcggcttgctaatgtatggtataccaaatatgaaactagataaagacgtaatacgtcgacgtgtatcacttatgaaagatgctggggttttatttaaaacaggcgttgaaattggcgtcgatgtgagccgtgaaacacttgaagaaaattatgatgctattattttatgcacaggtgctcaaaatgcgagagatttaccattggaaggacgaatgggctctggtattcattttgcaatggactatcttactgaacaaacacagtatctaaatggtgagattgaaagtttgagcattactgctaaagataagaatgtaattattataggtgctggtgatactggtgcagactgtgtagcgacagcattacgtgaaaactgtaaatctattgttcaatttaataaatatacgaaacagcctgaagagattacttttgaaagtaatacttcctggccattagcaatgcctgttttcaaaatggattatgcgcataaggaatatgaagctaaatttggtcaagaaccaagagcctatggtgtacaaacaatgcgctatgatgttgacgagttaggaaatgttaaaggcttatatacacaaatattaaaagaaacgcctgatggcatggtgatggaagatggaccagaacgattttggccggctgatttagtcttattatctatagggtttgttggtactgaaaccactgttccacatgcgtttgatatacacaccgagcgtaataaaattgtagctaatgatacaaattatcaaactaatcacgctaaaatatttgctgcaggagatgcaagacgaggtcagagtttggttgtttgggcaataaaagaaggtcgtgaagtagcacattctgttgatcaatacttaagtaaagaagttctagtgtaa

SEQ ID NO: 4025 - DNA, 4497 bp, Staphylococcus epidermidis
atgtacaatgagaaattaaaaaagggactatacgattatcgtgaagagcatgatgcgtgtggtattggattttatgccaatatggataataaaagatctcacgatattatagaaaaatctttagaaatgttaagacggttagatcatcgtggtggagtaggtgccgatggtattactggtgatggtgcaggaattatgacggagataccataccaattgttcgaacaattaacagaattcaaagttcccggcgaaggatattatgccgtgggattatttttttctaaagagaaagttaaagattcaattcacgaagagatgtttaatcaatattttgaaagtgaaggttttaaagtcattggatatagagatgtgccagtagatactcgcgctattgctcaacatgttgcagatactatgccttatattcaacaagtatttgttgacatcacaggtgtaaaagaagttgaaaaacgattgtttttagcaagaaagcaaattgaaaaatatagtgaaacacaatccatagatttatattttacaagtctctctcatagaacgattgtttataaaggttggttacgttcggatcaaattaaaggtttatatttagacctacaaaatgaggcatatcaatcaaaattaggacttgtacactcccgctttagtactaatacatttccaagttggaaacgtgcacatcccaatcgcatgcttatgcacaatggtgaaattaataccattaagggtaacgtaaactggatgcgagcacgccaaaataaactagttgaaacattatttgaagatgagaaagataaggtgcattttattgttgatgaagatggtagtgactcatcaatagttgataatgcgttagagttcttatcattagcaatggagcctgaaaaagcagcgatgttattaattccagagccatggttatacaatgaatctaacgataaaaaagttcgctctttctatgaattttatagttatttaatggagccatgggatggaccaactatgatttccttttgcaatggagataagataggtgcattgactgatagaaatggattaagacctgggcgttatacaataactaaagacaattttattgttttttcttccgaagtaggtgtcattgatgttccagaagaaaatgtagcatttaaaggacaacttaatcctggaaagttattacttgtagactttttacaaaataaggttgtagaaaataatgagctaaaaactaatattgctaatgagttgccctacgaacaatggctaaaagattataaaaataaaaatgatttggataatatttattaccaatcttccgactgggatgatcaaacactcttccgcttacagaaacaatttgcttacactaaagaagatatcaataaatatatgacagatttagtcatcaataaaaaagatcccatcggagcgatgggatatgatgcacctattgcagttcttaatgataagcctgagtcactatttaattattttaaacaattatttgcacaagttaccaatccacccatcgatgcttatcgagaaaagattgtaactagtgaactttcatatttaggttcagaagggaacctcttatgtcctgatgaatcagttttagaaagaattcaattaaaaaaaccagttttaaatgaagcgcaattatcatcaatcgatcattcgtattttaatgtaacgtatttatctacactttatacagatgatttggaaagtagcttaaatgaactagggaaccgagcaatacaggctgtacatgaaggtgcgaaaattttggtgttagacgatacgtctttaactcacgaaaatagttatgcaatgccaattttattagcattaagtcacgtgcatcaattattaattcgagaaggattaagaatggagaccagcctcattgcgcagtccggtgaaacacgagaagttcatcacgttgcatgtttacttggttatggtgcaaacgctgtagttccatatttagcgcaacgaacgattgaacaattaacgcgtcaaggtcaactttcaggaactgtcgctgaaaatgttgctacgtataccaatgtattgtcagaaggcgttattaaagtgatggctaaaatgggcatttctactgtacaaagttatcaaggagcacagatatttgaagcggtaggtttatcgaatagcgtcattgaaaaatattttacaggtacacagtcaaaattatctggtataagtattgaacaaatagacaaagagaataaagcgagacaaagtgatgactctgattatcttgaatccggaagtgtattccaatggagacagcaaggtcagcatcatgcatttaatcctcgtacgatttttttattgcagcatgcatgtagagaaaatgattacgagttatttaaaaaattctccaaagctgtaaatttaaaacgtacggatcatattagacatttattagaattcaagacacgccaatctattgatattagtcgtgttgaaccagcaagtgaaatcgtgaaacgttttaatacaggagcaatgagttacggctctatctcagcagaggcacatgagacgttggctcaagctatgaatcaaattggaggtaaaagtaatagtggagaaggtggtgaagattcttcacgttatgaaattcaaaaggatggaagtaataagataagtgcgattaagcaagttgcatcaggtcgttttggggtgacgagtgattacttgcaacatgcaaaagaaattcaaattaaagtcgcacaaggcgctaaaccaggggaaggtggacaactaccaggttcaaaagtatatccatggattgctgagactaggggttcgacaccaggtataggattaatttcaccaccaccacaccatgacatttattcaattgaggacttagcacagctcattcatgatttaaaaaatgcaaatagaagagctgatattgcagttaagcttgtatcaaaaactggcgttggaactatagcttcaggggtagctaaagctttcgccgataaaattgttataagtggttatgatggaggtacaggtgcatcgcctaaaacaagtattcaacatgcaggtttgccatgggagataggccttgccgaaacacatcaaacacttaaattaaatgatttgcgtagtcgcgtaaaattagaaacggatggtaagttactgacgggtaaagatgtagcttatgcttgtgcgcttggtgcagaagaatttggtttcgcaacagcaccacttgttgttttggggtgtattatgatgagggtttgtcataacgatacgtgtccagtaggggttgcaacacaaaacaaagatttaagagctttgtttagaggtaaggcacagcatgtagttaactttatgtattttatagctgaagaattacgtgaaattttggcttcacttggtatagaaacagtagaagagttagtaggaagaacagatcttcttcaacgttcgacgcaattgaaaccaaatagtaaagcagcttcgcttcaaatagaacgtttaatagaacaatttgacggggttaatacgaaagagatatcacaaaaccatcatcttgatgaaggattcgatttgaattatctgtacccagacgcacgctatagtattgaaaacggtcactcttttaccggaaattatgttgttaataatgaacagcgagatgtaggtgtaattacaggtagtgcgatagctaaacaatatggagaagaaggattacctgaagatacgatacttgcttacactgaaggtcatgcaggtcaaagcttagctgcatatgcaccacgcggattaacaatccatcataccggtgatgctaatgactacgtaggtaaaggattgtccggtggaactgtcatcgtaaatgctccaaatagtcaacgtgaaaatgaaattatagcaggaaatgtaaacttttacggagcttctagaggtaaagcgtttatcaatggtaaagcgggtgagcgtttctgtatcagaaatagtggcgcagatgttgtagtagaaggtattggtgatcatggacttgaatatatgacagggggacatgtcattatcttaggagatgttggaaagaactttggccaaggtatgagcgggggcgtaagttatattttcccttctgacgtggagaaatttaaaaaggttaatgcgcttgaaactttagaattcagtagcatacgttttgatgaggaaaaatctcttatcaaagacatgcttgaagcacattttaagcatacacgtagtaacaaagcacgccaattacttgaccaatttgacaatattgaaaagttagcaattaaagttattccgaaagattacaaattaatgatgcaaaaaattgatttgaaaaaacgtcaaatggaacgtgaagatgaagcaacactggcagcgttttatgatgacagagaaacaattgaacaagagctacagccagcagtcatttattaa

SEQ ID NO: 4026 - DNA, 882 bp, Staphylococcus epidermidis
atggatataaaacaacttagatactttgtagaggttgcacgtcgagagcatatttcagatgcggcattagaactaaacattgcacagtctgcgattagtcgtcaaatcactcaactcgaaaaagaattgggggtgacattatttaaaagaagtgggagaaatatcatattaactgttgaaggtagacagttactctcacaggcaactcaaatactagaattaatggataaaaccattcactcatttcaacaacacgtatcacataaccaacagacaatttatattggatatgaagaaagtgatgcctctcaaatgattcttcccctaattcaaacatttgaacaacaaagtaacagtaccatgattccgcaacttacaaaacatgataaattattagatcaaatcctttccaatcaattggatcttgcaatcactgaatttactcctgtgttagaacgggaaacacatttacgcgtcatgcctttatttgaagaaaattattatatgtatgtgcccaaatcacatccgctagctatgactgtacatcccccgctatctcaatttacaaatcaatcactatactgtctcgaaccaatgacaagctcaataaaaagtaaattgattgaaaagactaaggcacaagtacgaatgatttcagatatgaaactcgctcaacatattttgagtcatgataagggatttattatttctagtcaaaattctttactatatgatcacgtaaattggactaaaatccctttaaatcatacagaattaaaacgaacgctatgtgtagttatgcgaaaagataataagaaaaacgacattaatatagcatggaatttaatttacacattattaaataaatcgactatatattaa

SEQ ID NO: 4027 - DNA, 1113 bp, Staphylococcus epidermidis
atgcaatccaagaatttttttaaaacaccttttacttggatgatgataatctttagttgcctgtttttaggtacgttaatattcacgttttttaacgatagattttataatatgcctataggacaaatcactcaaattactgatatccaatcacaaaaggtaacagacgagcacaaaaataaagatattaagtacaaagagaagataacattcaagattctaaatggtgaattcaaggggcaaacaacgacaattccccaccaatatgtgaaatctcaagctgattcagaatcattttccaaaaatgacaaggttcttttacatatttctaaaaatcctaaagacgcaactattatagagaaaaaacgagatactattgttgtcataatagccggcttatttttacttactgttttagttgttggaaaaaaagtaggacttcaatctatattatctcttatcgttaataccattgccgttatgggagctattttaatacatgatcaatatggggctataagtttattctttttgatgacttgtgctattatcatttccacttctttcactttactacttgtaacaggttggcatagccgaaccttaattactattgtaagtacgctgattggtacgttcttatgtgttggaattaccgaagtcatcatcaaatttaccgggggaaatggaataaaatacgaaacaatcactttccttactctccctcctaaggatgtctttctagcttccgtactaataggtacacttggagcagtgatggatgtttctattactattgcaagtgggatgtacgaaattttaaaacgtagccctcaaatttccatgaaacgttgggctcttgccggaagacatatcggtcaggatataatgggaacaatgactaatatacttctcttttcatatctatctggtagcttacctatgtttctaatttatttaaaaaatgctaacactattacttatactatttcgatgaattggtcattagaagttgctcgagcattaactggtgggataggtatcgttttaactattcctataacaattgctttaatggaactatggtttaaactgcgaggtgttaatcaatga

SEQ ID NO: 4028 - DNA, 786 bp, Staphylococcus epidermidis
atgagtgcaattactattttaggtttcttattattgttgataatggttattttcggaggtaaaaaaggactcatttcttttttcactttgtttttaaattttatcattcttgtaataagtattcttttaattatatatggtgtgccaatctatcttgtcacatttatattttgctttatcatagccgcaattaatttatttgtattaaatagttacaatgtaaaaacacaagcggcttttctaggtactttagtaacaatacttatattaatactcatgatatacttttcagttgagatgggtcacttacaaggttttgccaccgaacagcaggatgaaacatatgtgtattcaatgaatattggtattaatatggtacaatttatggtatttacaattgttcttgcagtgatagccgcagtcattgatttagcaataacaattagttcccctatgtatgaactaaatgagactaatccaaatttaaatcagcatcaattatttcagtctggtatgcgtgtgggtagagagatattagcaacttctgccaacaccatttatttagcatttttcggaggacaattaactttattcttctggttctttaaattaaaatattcatttggacacatcattaattcgaagatattcacacaggaatttatagctattttacttggtggtatcgccgttgcaattagcattcccattactgcatggattacagcatttatgattaaacatgtcagtcagaagaagactcttacgaatcaacaaaataaataa

SEQ ID NO: 4029 - DNA, 387 bp, Staphylococcus epidermidis
atgattaaatgtgtttgcttggttgaagaaaagaatcatcagttactacttgtacaagttcgacatagagataagtattatttcccgggtggtaaaattgatgagggtgagagccttgtggaagctttacagagagaattgaaggaagaattgcgcttagaattagctaaagatgaattagaatttattggaactattgtcggagaagcctatccacaacctaatatgttgactgaacttaatggatttaaagttaatcgagctatagattggtcaaaagttgaaaccgatcatgaaattactgacatgaaatggttcgatatcaatgacagtgaaaatatagcgcctgcagtgaatacgtggattaaggaatttatcaatgattaa

SEQ ID NO: 4030 - DNA, 279 bp, Staphylococcus epidermidis
atgactaaacaagcaaacgcttcacgtttatcaagattattcaatgtagcaggattcattgtagatggttataacggaattcgctataatgctaagaataaacaacttgtctatttatcattaggtctaagcgcacttggaacaatcattgatttttacatttctattaaatccgcatctaaacttcgtaagttaagtgcacttggatcatttgcaatcaatggggtacgcttattcacaagttttaaaaaagttagagatgaatatgactatcactaa

SEQ ID NO: 4031 - DNA, 1506 bp, Staphylococcus epidermidis
atgatatacacagtaacaaccacccttccattatcccacggtggtagaactcaagctttactcagacgaattaaactgttagatgaagaatttaaaattccaagtaaaattctcaccactaattatcatggtaattatcctagtatttataaaaaatacagacaagaaaacaaagttacagaaaatatacaattcgagaatatgtatgaatggttatcaaatttcaaactttttaaagtcccaaaaacattgattactaggaatccaaaatacattaaaacacctagaaagattaaaggacttattgataagcaaggaaaaaagagtggtcttattcattattataataatgaatgtcatgtgagatctcgaaagtattatggacagtctaatgttcttgaatatgaggacttcatttctcccacatcaggattgaaatatgagcgccatcaatataacttatacggccaacttcatagaaaagaatattattatgatgactcttctttaaaacatagcgacgaattatttgatattgagggctctatatactgcaagagatatttcaaaactaaaccaaacagcaaaattaatggcgtagaaatatatagaaataaaaaactttataagacctttaaaaatgataaattattagctcagttttattttcagaatagattcaaagatcaagatatcgtctttaatgatgctcgatttttagataaaccattacttaagcaaacgcaccaaacaaaaaatattcttgttttacatagctcgcatttatcaggggaccaaataaaaaaatcatatcgatttgctttaaatcaatcaaaaaatgtttataagtatattgttctcactcaccaacaaaagcacgatatacagcaacatttccatataagtgacgaccaattccaactagtaccacattttatcgaattagatacggaggtagaacaagattcctcaaacaatcaaaatcgctttatatatataggccgttttagcgcagagaaacagattgatcatattattagagcttatcacaagtttttgcaaagtggttaccaaacagaattacatttatttggtagagatgaagataatcaaattccattgatgaatactttgatttcagaattaaaattatcggataaagttaaaatatttaaatataccaatcaacctttacaagaatttaagaattctaaagcctctctacttacaagtcaatatgagggatttggcttaacacttatggaaagtatagaaatggggtgtccagtcctatcttataacgttcgttacggtccaagtgaaattattcaaaacgggataaatggctatctcattgaaaaaaatgatattgatagtttatcaaaacatatgattaacatcattgagcacccactacaaaaagtgaaaaataaagacactttaaaatataacgccgcagtgaataattacaaacaatttatgcaaagcttagacttattaaaatag

SEQ ID NO: 4032 - DNA, 975 bp, Staphylococcus epidermidis
gtgcaaaaaaaatatattactgccattattggaacaactgcccttagcgcattggcatcaactcatgcacaagctgcaacaacgcatacagtaaaaagtggagaatctgtatggtcaatttctcacaaatatgggattagtattgctaaattaaaatcacttaatggattgacttccaatttaatattccctaatcaagtattgaaagtatcaggctcatcttcaagagcaacgtcaacaaatagtggcacagtttatacagttaaagctggagattcattatcttctattgctgcaaaatacggtacaacgtatcaaaaaatcatgcaacttaatgggttaaataactatcttattttccctggacaaaagttgaaagtttctggtaaagcgacgagttccagtcgtgcaaaagctagtgggtctagtggtcgtactgcaacatatactgttaagtatggagactcactatctgcaattgctagtaaatatgggacaacgtatcaaaaaattatgcaattaaatggattaactaatttctttatctatcctggacagaagttaaaagtgcctggaggtagttctagtagctcatcttctaataatactagatcaaacggtggctattattcaccaacttttaaccatcaaaacttgtatacttggggacaatgcacatggcacgtatttaatagacgtgctgaaataggaaaaggtatcagtacatactggtggaatgcaaataattgggacaatgcatcagctgctgatggatatactattgattatcgtcctacagtaggctcaattgcacaaactgacgctggttactatggtcacgtagcgtttgtagagcgcgtgaatagcgatggaagtattttagtttcagaaatgaattggagtgcagctcctggaaatatgacatatagaacaattccagcttatcaagtgagaaattacaaatttattcattaa

SEQ ID NO: 4033 - DNA, 846 bp, Staphylococcus epidermidis
atgaaaaagattttaagttttttaatcgttgcaattttagttttatcagcatgtggcggtaataatggtaaaaaggtaaccataggtgttgcatccaacgacacgaaggcttgggaaaaagttaaagaattagctaaaaaagatgatattgatttagaaatcaagcacttttcagattacaatgttccaaacaaagcacttagtgacggggatattgatttaaatgccttccaacactttgcttttttagatcaatataaaaaagctcataaagataccaatattgaagcacttagcactacagtattagctccattaggtatttattcagataaagttaagaacattaaagatattaaaaaaggtgcgcaagttgctattccgaatgatgtatctaaccaagctcgagcacttaagttattagaatctgcaggtttaattaagcttaagaagaactttggattaaacggaacaacaaaagatattgaaagtaatcctaaagatttaaaaattaaagctgttgatgcacaacaaacagcgcgtgcactttctgatgtggatatatcagttatcaataacggtgttgcaacaaaagcaggaaaagacgctaaaaaggatcctatttatttagaaaaagcaagttcagatgcagtaaaaccatatattaatgttgtagctgtcaactctaaagacaaagataataaaacctacaaaaaaattatagaactttatcattcaaaagaagctcaaaaagcattaaaagaagacactaaagacggtgaaaaaccagtagatctttctaaaaaggaaatcgaagaaatcgaaaatgagttggcaaaaaaataa

SEQ ID NO: 4034 - DNA, 660 bp, Staphylococcus epidermidis
atgtttggttcaagtttagattcatctcaattattacaagctctatacgaaacattgtatatggtgactgtatcacttgtaatcggtgctttaataggtatacctcttggcatcttgttagtggtaactagaaaaaacggtatatggtcgaatacaatattgcatcaagtattaaatcctatcattaatattttaagatcaattccgttcattattttattaatagccatagtgccttttactaaattgctagttggcacatctatcggcacaacagccgccatagtaccactcacggtttatgtagcaccttatatcgcacgcttagtagaaaactcattactggaagtcgatgatgggattattgaagcagctaaagcaatgggtgcatcacctcttcaaattatacgttattttttattgccagaagcacttggttcattaattctagctataactacagctattattggtctcataggtagtacagcaatggctggtgctgttggtggtggcggtataggtgatttggctttagtgtatggttatcaacggttcgatacaattgtcattgtgattacagtcattgtacttattattattgttcaaattatacaaacgttaggtaactttatcgctagggttatccgtagaaattaa

SEQ ID NO: 4035 - DNA, 1026 bp, Staphylococcus epidermidis
gtgattgaattcaaaaatgttaacaaagtttttcgcaaaaaaagagaaactattcaagctttgaaaaatgtatcatttaagattgaccaacatgatatttttggtgttattggttatagtggtgctggtaaaagtacattagttcggttagtcaatcaacttgagacagtatcagatggtcaagttattgttgatggtcatgagattgatacatataaagaaaaagatttacgtgatattaaaaaagatatcggtatgatctttcaacatttcaatttgcttaattctaaatcagtctataaaaatgttgcaatgccacttattttaagtaagacaaataagaaagaaattaaggaaaaagttgacgaaatgttagaatttgtggggcttgctgataaaaaagatcaatttccagatgaattatcaggtggacaaaaacaacgtgttgccatcgcaagagcattagtaacgcatcctaaaatattattatgtgatgaagcgacaagtgctctggatccagctactacaagctcaattttaaatttattaagtaatgtgaatcgaacatttggtgtgacgattatggtgattacacatgaaatgagcgtaattcaaaaaatttgtcatcgtgtagctgtcatggaaaatggcgaagtgatagaaatggggacagttaaagatgtctttagtcatccacaaacgaacactgcaaaaaatttcgtttcgacggtgattaacactgagccttcaaaagagttacgggcctcttttaactcgagaaaagattcaaatttcacagattataaactgtttttagactctgaacaaattcaattgccaatattgaacgagcttatcaacgagcatcatcttaacgttaacgtattattttcttctatgtcagaaattcaagatgaaacggtttgttatttgtggttgagatttgagcatgatgagtcatttaatgattttaaacttactgattacctttcaaaacgacatattcggtatgaggaggttatataa

SEQ ID NO: 4036 - DNA, 1146 bp, Staphylococcus epidermidis
atgaataaaaaaacgcaaatgatacatgggggacatacgacagacaactatactggagcagtgacaacacctatttatcaaacaagtacttatttacaagatgatattggtgatttaagacaagggtacgaatattcacgtactgcaaatcctacacgtgcgtctcttgaaagtgttattgctaatttagaacatggtaagcatggttttgcttttggttcaggaatggcagcaattagtgcagttatcatgttattagataaaggagatcacttagttcttaattctgatgtttatggtggcacatatcgtgcattaactaaagtatttactcgctttggtatagacgtagattttgttgatacaactaaaattgaaaacattgaacaatatattaaacctgaaactaaaatgttatatgtagaaacaccttcaaatccattattgcgtgtgactgatattaaagcatcagcaaaaattgcaaaaaaatatgatttgatatctgtagtcgataatacatttatgacaccttactaccaaaaccctttagactttggtattgatatcgtattgcattcggctactaaatatattggaggccatagtgatgttgtagctggtcttgttgctactgctgatgatgatttagcagaacgtctaggctttatttcaaattctacaggtggtgtacttggacctcaagatagctatttattaatcagaggtattaaaacgctaggtctaagaatggagcaaataaaccgaaacgttgaaggtattgtgcaaatgttacaaaagcaccctaaagttcaacaagtattccatcctagtattaaggaacatatgaactatactatccatcaaaatcaagcaactgggcatacaggggtagtatcttttgaagttaaagatacagaagcggctaaacaagtgattcacgcaacaaactactttacactggcagagagtttaggggcagttgaaagtctaatttctgtaccggcacttatgacgcatgcgtccatcccatcagatgtaagagccaaggaaggtattacggatggtctcattcgtttatctattggtattgaagacacagaagacttagttaatgatttagaacaagccttaaatactttgagataa

SEQ ID NO: 4037 - DNA, 909 bp, Staphylococcus epidermidis
atgattgcatacgatttgataggacaaactccattagttttattagaaagctttagtgacgagaatgttaaaatatacgccaaacttgagcaatttaatcctggtggtagcatcaaagaccgtctagggaagtacttaattgaaaaagcaatagatgaaggacgacttaaagaaggggatacaatagtcgaagcgactgctggtaatacaggcattggacttgctattgcttctaatcggcacaaagtaaaatgtatcatctttgctccagaaggatttgcagaagaaaaaatttcaattatgaaagcattgggtgcagatgttagacgtacccccaaagctgagggaatgactggcgcacagcaagaggcgttggcatacgcaacacgatatggatatttatatatgaatcaattcgaaactaaagataatcctggggcatatacacaaacacttgccaaacaactcacagatgaactttcacatattgattattttgtggcaggtgttgggtccggtggtacgtttacaggagttgcacaacacttaaaaacgtatgatgtaaaaaattatattgtagaaccagaaggctctgtcttaaatggtggtgtcagtcatcctcatgcaactgaagggattggttctgaaaagtggccatcatttttagaaaaagaattagtagatggtatttttactgttgccgataaagatgcttttaataatgttaaacttgtcgcgaataaagaaggattgttagttggtagttcttcgggagcggcattacaaggagcgttggaattaaaaaaaagcattcaaaatggtgtgattgttaccatctttccagatggaagcgatcgatacatgtccaaacaaatattcaactataaggagagttttaataatgaataa

SEQ ID NO: 4038 - DNA, 540 bp, Staphylococcus epidermidis
atgacgaaacaagatttatctttatctgtatttaccaatgaaaattataagaatcttcattacacatcatctagttttagaaattctatgtatgatgaattagaggttaataaaagtcgctttaaaaactgtaattttaatgaaggtatttttaagaatatagaagcaatttgtaattgtaaatttacaacgtgcgggtttaataattgtattttcgaagatgttcatttttacaaaaaccaatttaaagattcaacatttgtgaatacaccatttgatcaatccgtatttaatagcactttattccaaaatgcaatgttcgatagcaatctcattcgtagcgtaaaatggactgatatcatttttaaaaacgtttctttcaaaaatgtagaaattgaaggaacaacatttaaagatgtaaaattcaaaaattgtgagttcaaaaatgtaattattactaattcaactatgtcgcaaaagttaatgaatgaattacaaaaacaagatgttactttagaaaatatagacacttctatttaa

SEQ ID NO: 4039 - DNA, 1329 bp, Staphylococcus epidermidis
ttgagtggtcattcacaatggaagacgtctaccggttttatattagctagcgcaggttctgcaataggattgggtgcaatgtggaagttcccatatatggcaggtatatacggcggtggcgcttttctattaatgtttttaatttttactatatttgtaggactaccactgttaattatggaatttacggtaggtaaaatgggtcgtacatatacaacgcaaatatataagaaattaacgggaaagaaatggcttaatattatcggatggaatggtaatttagccgtatttatactatttggtttttatagtgttattggtggttggattattatatatataggttatgtcatagcacaaatcatggtttttaaatcaagtacgctgacaaatattcaatttgaaacaatcattagtaatccatggttgactgttttaggtcaaggcatatttattttgataacaatggtaattgttatgttaggtgttgaaaaaggtttagaaaaagcttctaaaataatgatgcctctattatttatctttttaattatcgttgtagcacaatccttaactttagaaggtgctttagaaggtgtacgttatatactgcaacctcgagttgaagatatgtctattcaaggtgtactatttgcgttagggcaatcgttttttacgctgtccctaggtacaactggaatgattacttatgcaagctatgcacctaaaaatatgacgataaagtcttcagcactttcaattgtcgtaatgaatatattaatttctgtcttggctggattagctatatttcctgcgcttaaaacatttggttaccaaccccaagaaggccctggcttattatttaaggttttaccactagtatttagcgaaatgacttttggtacattcttttactttatatttttactattattcttatttgcggcattaacgtcttctatatcattattagagttaaatgtatctaattttactaaaaatgataatagtaaaagacaaaaagtggcaatcataggtagtatacttgtatttatcattagtatcccagcaacattatcttttagtagtctaagtcatttgcgttttggcgctggtacgatatttgataatatggattttattgtatctaatattcttatgccattaggggcactaggaacaacattagtggttggccaattactagataaaaaattattaaaagaaagctttgggaaagacaaattcaacctatttttaccgtggtattatttaattaagttcatcatgcctattgttattattttagtatttatagttcaattattttaa

SEQ ID NO: 4040 - DNA, 243 bp, Staphylococcus epidermidis
atgaaacgtacatttttattaacttatacaaccgtatcaggaaaaacatatacggaatttaaaacatttgaaaatggtcccgattacgatacatgtgtatcacgaattatagatgaatttgatgaattggcatacttatatattaaaaaagatgttgtacattatattaatgttgatcacattgaaagtctagacattgaagaagtgacagagggacaacacattacttatgattttgaataa

SEQ ID NO: 4041 - DNA, 729 bp, Staphylococcus epidermidis
atgaaagttaaatcaccacaatcaatctacttaaaaggacatcgtcaacaagctgtattgttattacattcttttacgggaactgtacgtgatgtaaaacatttagcacaacagttgaatgaagagggatttacttgttacgtgcctagttatccaggccacggtttgccgcttaaggaatttacccaacacaatatcaatgattggtgggaacaagttaccgcagcatatcaatttttaagaaatgaaggatacagtagaattaatgtgacaggcgtatcattaggcggattatttactttaaggttagctgaacattttgatttagaacgtatagctgtgatgtcagccccacataaaaagcgtgaaagcgagattgcgtggcgtcttgaaaggtatgggcatcgaatgaatgaaattttgagtttaagcgaagaagagcgtcgtcaccaaatggaaaccatcttgtcctatgataaagaaattgaagtgtttcaaggtgtaattgatgaaattatggcttatcttgcaaatattacagtaccagtgaatattatgtatggcgaagaagatgacccattatatgctcaaagtgcgcaatacatttatgataatgtaaatagtcaagataaagaactgctcaaatttgaaaaaagcggtcatcttatgacgtatggcgatcatgcatacagagtagaacaatctattattcaatttttcagtaaataa

SEQ ID NO: 4042 - DNA, 672 bp, Staphylococcus epidermidis
atgaattttaaatatatgaatatagcaaaagggataattccaattttaataagcatgattattcttttaagctttatctctactcatgtgctagcgcaaaatcagtggttgagaatggttgatcttagcgtacaagagtggtttagtaatcaatttggggatcccaatagagtgtttggacatggtttcatcaacaatataatgacgttttgcgctacctttggtgatgttaagatcattttaattgtggctaccattattgcagtgctactcacgttttacaagaaggttccacaagcaatatggctaatcataacgatgactagtggcgcattgattaattatttaattaagcaaacgattgaaaggtcaaggcccgagaatcatttaattgttgatacaggatggtcttttcctagtgggcattctaatattaatacattattctttttaatgattatgatcattattatcccgttaatccgacagcgtgcttttaaatttataatcacaattttaagtattgtattttggattagcgttttaataagtagactgtattttcatgcacactacttttctgacgttgtaggaggcgtaagtttagctattatttgggtgtcgttatttatattagtgtcacctttattaaatttttggggagaaaagtaa

SEQ ID NO: 4043 - DNA, 249 bp, Staphylococcus epidermidis
ttgtttactaaaaaaatattgatttatattgcgctccttattaccttaattcgtttttttattccattacatccagactttgatacgttgttagtatggttgtttattctttacataattccaattattttatgtatcattggctttaaatcagataaactcatcgctactatgattatgattccaaatttaatgggtataggttatcgtctattcatcttctttaatgactttttgcatttaaaataa

SEQ ID NO: 4044 - DNA, 369 bp, Staphylococcus epidermidis
atgaaaaagacgaaaggtatttatgaatctgaaattagtaaagccattacacaatgggagaaagattttttaggaagaggttctttgtctgtaaaaacagatattcttcgtgatatggttattgttagtttacaaggtattttgacacctgctgaatatcgcgtgtgtaaaacgaatgaagggcttttaaatattaaacgtacacgttctgaacttgtagagtctggtgaagaggacttgagtcgcattattaaagatttgactggacttaatgtgaaaagttttcatagtgatttaagtactattaccggtgaacgcgtaatgatttttaagttggaagatcgttttgataaagcattacatgagtaa

SEQ ID NO: 4045 - DNA, 2568 bp, Staphylococcus epidermidis
atgcttcaatcagatatcaatgaattagtcaatcaggctaaacgtgtaattacacctttatcaccgatttcaacatttgctgcccgtaatccgtgggaggggctagaagatgcttcgtttgatcaagtggcacgttggttaaaaagtgtgagggatattgacatttatcctaatgcgtctactattcacagagcgattagtaataaagaaatagatttaaaagtatttgaagaacggttggatgaaaatcgtgcgcattataataataggtcactatctgacagtgatatcaacacatatattcaaagagcgaaaaatttaaaaacgattgaagaaggttactttaatacaaaagataacgagaaaatggaaaaatgggtacaaactaattttaaggattataagaaaaaagaagatgtgatagcgcaaagtgctagtgttttcacaaaggaaggtacacgacttattgatattttaaatgctcatatgattaagtggtctaaattatatgttgatgactttcaatcaagttggactatgccaaaaagagaaaaaggattctatcatgcctggcaacgtttagttaaacatgatccattattcacaaaaaaacaacgacttactttagcacatttgccaaatcaagcaaccgaagcaatagagtacgcctttcaagaattaggagtaaaagaagaacatcgacaatcatatattgagagtcatttattatctttaccaggttgggcaggaatcatgtatcatcggtcacagacacaaagtaatgatgcttacttattaacagactatgttgcgattcgtctatcaattgagatggtacttttaaatgaccaccatacaacattattaaaaaaatctatatattttcaaaaaaagttagagcaaatacgttatttgctatttaacatacaaatgaatgttgagcagtggttaaatctatcatctaaaaagcaacaagcatacattgaattggggacacgattcagcccgttttattttaaaaagttatggttagatgcatgggaagaaacgcatgaacgtcgattggttgatgaaatttatcgtgttccaaccgaaaatactgatcaagcaaaagcaaaagtacaacttgcgttttgtattgatgtacgatccgaaccgtttagaagacatttagaaagtgaagggccttttgaaacaatagggattgctgggttctttggtctgccaattcaaaaagaagtacttgatgaacaatttgcacatccatctttaccagtgatggtagaacctgcatatcgtattaaagaatatgctgatcaacatgaaatgaaaatttataatcaacaacaacatacacttacatctatgttttacaactttaaattaatgaaaaacaacgtgttgccaagtttgcttttaccagaattaagtggtccttttttaagtattgcgactatagctaacacaattttccctaaaaaagcaaaacgtattgttcatcgattctcacaaaaatggctacgtaaaccaacaggtaaattaactattcagcgtgagcaagatgcgtattcaaaactaccaatcggctttactttagaagaacagattcaattttccaaaaaagcattacaattaatggacttaacagatgattttgcaccacttattgttctatgcggacacggtagtgaatcacataataatccctatcatgcttcattagaatgtggggcttgcggcggtgcctcgagtgggttcaatgcgaaattattagcagtaatgtgtaatcaagaaaatgttagacgtggattattgatggaaggaatcgacattccaagacatacagtgtttatagctgctgaacatcaaacgtcagttgatgagttagagtatatttatgttccacctttaactacagaagctcaaaatgcctttgacgaacttaagcatgtgatgccaaaagtatgttataaagccaatttagaacgtttggcatcgttgccaaatataaaaaacactgaccataatcctaatgctgaagcgcatcgtcacgctagcgattggagtgaagttcgtccagaatggggtctagcacgaaatgctgaattcattattgggaaacgtcaaatcacccaaaatagtaatctagagggacgggcatttcttcataattatgattggacaaaggatgaagacggtgagattttaaatacaattatttctgggccagcactagtagcccaatggattaatttacaatactacgcctcaaccgtggcacctcactattatggaagcggtagtaaaacaacgcaaactgtaacaagtggtgtaggtgtcatgcaaggaaatgctagtgatttaatgtatggcttaccatggcagtcagtaatgatgaatgacaaagaggcgtatcacgcacctattaggcttttaattgttattcaagcgccagatgcatatattcaacgtttgttaaaacatcataatcactttagacaaaaggttgatcatcaatggataagacttgccagtattgatgaaaataatagttggaaagactggtag

SEQ ID NO: 4046 - DNA, 1497 bp, Staphylococcus epidermidis
atgttaagttcagagttaattttgtttatgttttttattacacttgccattgctatactgagtggattaatatttttgaatcatcgagttcccattcaatatattaaatttcatatatatttacttgttttacctatcattgcgggattaagtggattaatatttttcggtaaaagggcgaatgttggaccttttatagttgatcatcttacttggttaatgatgacatttattttgactttaggctttatcattcaaaagttttctatgcgttatttaattggcgacatgcattaccgtaaatattttccgttttttacattaattactgcatttgcttcattggcatggttaagtggagacttaaggttaatgaccatgttttggggtgcaacattatttgtgttaacacggctcattaaagttaacaaattatggaaggtgcctagggaagcagcaagaatttcagcttggtcatttatattggcatggttgtcgttattgattgctgtcattttattgtatatcgctacaggagattggtatattcattcgaatatgtcagatgataatgcaatcaattatggaatgcgtctctgtatcaatttacttattgttttagctgtgattattccggcggcacaatttccatttcaaggctggcttattgaatctgtagctgcgcctacgccagtttcagctattatgcacgctggtattgttaatgctggtggcgttattcttacacgcttttctccggtatttaatgacgaaatagccatttcactgttattaattattgcaagtatttcagtattgttgggttctggaatcagtcttgtgcatgttgattacaagagacaacttgtaggttctacgataagtcaaatgggttttatgttagtacaatgtgcgcttggggcatattctgcggcgatagtacatttaatattgcatggtgtgtttaaagcgacattatttctacaatcgggttctgttgttaaaagatttaacattcctacgcctccatctgttaaaaaatcatatggctggcttgtatttggtcgtctactagctattcttatagcgataatattttggttgaatagtgatagacatgcatatgatgtattaagcgctcttatattagcttggtcgttaatggtgtcatggaatcaattagttgcttttagtcatggactcatcggaagagtcatcggagtatgtatgattattgttgtagcaattgtttatattattacgcatcattatttcttcacgacattaagtaacgttgatattcatattgtttcaccaccactcataagtattattctatcgattgctattatagttttcggcagtatgttaagcatatgggtatcacggcgaagagaatcaaaggcatttgcgaagttatacttgtggcttattaaagtaggagaggctaaaacccaatctatagaaagtcatccatcatatttaaaacgattttaa

SEQ ID NO: 4047 - DNA, 264 bp, Staphylococcus epidermidis
atgaagaagtgttcaatttccagtttattatcaattattgtcacactcattagcatttttatatgttttacaaccatgtttacgaacatctataacaacactgactttaacttttggtatttcccaggagcaattatctttgttatctcaattattattaatatcatagcaatgtttaaaggtaataagacgttaaacatcatcctattttttattaacttttttgccttacttatctttaccacaccatttgcaatcgtttaa

SEQ ID NO: 4048 - DNA, 1203 bp, Staphylococcus epidermidis
atggcgaaaatacctgtaactgtattaagtggatatttagggtcgggcaaaacgacattgcttaatcatatattaaaaaatagagaagggcgacgcattgctgtcatagtcaatgatatgagtgaagttaatattgataaggatttagtagcacaaggtggcggcttatctagaacagatgagaaattagtagaactttctaatggatgcatatgttgtactttaagagacgatttgttacgagaagtcgagcgcttagttcacataggaggaatcgatcaaattgtaattgaatcaactgggatatctgagcctgtgccggtagctcaaacgttctcatatatagatgaagaattaggtattgatttaacctctatatgtcgattagatacaatggtgacggttgtagatgcgaatcgctttgttaatgatatacgtagtgaagatttattggcagaccgtgatgaaagtgttgatgatgaagatgagcgtactattgctgacttactcattgatcaagtagaattttgtgatgtgatgattataaataaaatcgatttgattagcgacgaagctctagaaaaattagaaaatgtattacgtgcattgcaacccgaagctaaaattattaaaacagtaaatgctaaagtggaattatcagatgtacttaatacgcaattatttgattttgagaaggcaagtgaatcagctggatggatcaaagaattaacagctggaggacatgcgacacatacgccggaaacagaagagtatgggattacatcatttgcttatactagacgattaccatttcatgcaaaaagatttcatcaatggctagaacaaatgccagaaaatattgtaagaacaaaagggattgtatggttagcgcagtataatgatgtagcgtgtttgttatcacaggctggttcatcttgtaatattcaccccgttacatactgggttgcaacaatgagtgaaagtcaacagcaagctattttggaggcacgtcaagatgtagtagaagattgggatatcgaatatggagatcgtcaaacgcaatttgtaattattggtacggatttagatcaagaaaaaatttcccgggaattagatgcatgcttaattcatagtagtgagattgatgaagattggcgattactagatagtccgtatcaatggacttatgatcgacgaatgtaa

SEQ ID NO: 4049 - DNA, 384 bp, Staphylococcus epidermidis
atgaaaaatgtaagcccatttatttacgttaaggacgtagataaatctttatgttattacaaagatgtatttaatgctcaaacagaaatacttatgggtaaagatggtcgaacttatcatgcccaacttattattggtgatgaaacgttcgtacatttctccgatacgtttcataagcatcccgtttctaaaaatcctcatcttattattgaatgtgattcattagaagagttggagcgtgtctataaaaggttaattgatgatggtggtcatgctaaagtgaaactcaataaaactttttttaatgcctatcatgcagaggtaaaagaccgtctcaatggtatcatttgggtatttaattactttttagatgaacatatataa

SEQ ID NO: 4050 - DNA, 1029 bp, Staphylococcus epidermidis
atggatttgcttataggtactttatttttaattttagttttagttatttttactctatttacatacaaagcacctagtgggatgagggcgatgggagctttagcgaatgcggcgattgcatcgtttttagttgaagctttcaataaatatgtgggtggtcaagtatttgggattaaattcttagaagaactgggagatgctgctggaggtttaggtggtgtggctgcggctggattaactgcattagcgattggggtatctccagtttatgcactagttattggggcagcttgtggaggtatggacttgttaccaggatttttcgctgggtatattgtaggctacatgatgaagtataccgagaaatatgtgccagacggtattgatttaattggttcaatcattcttctcgcacctatagctaggttaattgctactggattgacgccagtggttaataacacgttaattaaaattggggatattatacaaagtagtacagatgctaacccgttgattatgggaattgtattgggaggtattattacagtagtaggtactgctccattaagttcaatggctctcactgcattgcttggtttaacgggtgcgcctatggccataggtgccatggccgcatttagttccgcgtttatgaatagtgcattgttccatcgtttgaaattgggagaccgtaaatcaaccatttcagtcggaatcgaaccgctttctcaagctgatattgtttccgctaatcctattcctatttatgtcactaatttctttggtggggcaattgccggtattataattgcttggtcaggtatgattaataatgcaactggcactgctacacctattgcaggttttttagtgatgtttggttttaatagtttaacgaaagtgattatctatggtgtggttatggcgattataggaactattgctggtattgtagggtctattgttttcaaaaagtaccccattattactaaaaagcaaatgttagaacgggacacaacgacataa

SEQ ID NO: 4051 - DNA, 117 bp, Staphylococcus epidermidis
atggagacatttattagaattcctcaaattaatcctccacgacatattaatgaaatgattgaaacgatacacaatcgtgattttgatgaattcagttctctaaaaagaacaatttaa

SEQ ID NO: 4052 - DNA, 132 bp, Staphylococcus epidermidis
atgaatattactcattttagatttttaataggcgaaggtaataaaccattcgatgttttaaatgactcacaatttatggaagaactcgcaaatacaaatcttgctttgaaaaaaggtgatatttatgattga

SEQ ID NO: 4053 - DNA, 117 bp, Staphylococcus epidermidis
atgataacagaaattatcacttcaattttcaatagtatattaaagcaagaagaaatttatttaaataataatattgaacaattaagtgagttcagaaaagacattatcctaaaatga

SEQ ID NO: 4054 - DNA, 618 bp, Staphylococcus epidermidis
atggaagaaaaatttaataatagccaagaagaaagacagtttcaacaatttcaagaataccaaaaacgtcaagaagaagagaaaaagaaaaaacgcaaaaagggttggcttttcggttgtggtggttgtttagttttattaatattaattattgttggtgtaactgcgtgtactggaacttttgtgaatgaagttgataaagaaataaatgaagaaggtaaacttgacaaagacaaagatacaaaaatcaaatctataggtgagactactgaaatagatggagtgtcattcacattagataatgcttcttatactgaagaaagaaacgaatttgcagatgttcaagccgataaagtcataaaggtagatatgactgttaaaaacaattctaaagaagaaattccagtaggtggagatataaaagtatacgtagatggaaaacaagctaaatcttatcctattgataatcaattaatagattcattatcaccaaacagagaaattagtggatttgaaggttttgcaataaatggtaatccaaaaaaaatcgaattagaatttcaacctttaacatcattctctaacaaacgttatatttataatattaaaccagaataa

SEQ ID NO: 4055 - DNA, 555 bp, Staphylococcus epidermidis
atgaaaagattattaggtacattaattgctgctacactagtgttaagtgcttgtagccaaaacgacactaaggaagatgaaaataaaaagtcagaaaatactactgaaaagaaatctgacgataaaaaagacaaaaaaactaatgaggataaaaagtctggagaacaaaagaaatctcaagaaaaaaagaataacaagtcaatgcaagaatctgctacaaatgaacaggttcaatctcaacaacaaactaataacaatcagcaacaatatagtgatgaatatttagcaaacaattccgtttctaatgatgatcaattatcatctgaagaacagcagaaatacaatgaaaatactaacgaaaacaaacagaatagtcatgttgacttaaattcattacctgctacagattttcgaacagattggatgtctgaatctggtcaaaaacaagtgaatgatttagcaaaccaaaaagatagcggtcaaatttcacaatacgaatttaatgatcgcgtatctgatgtgatgaataatgaaatagataatcaacagccataa

SEQ ID NO: 4056 - DNA, 165 bp, Staphylococcus epidermidis
gtgttagcgtggtacttaataaagaatggtaaacagtcacaaaaagaggctcagaagcgcttaaatgagcttatagaggcaaaattaaacgataagacacctactacacttaagtcactaacattccatgatcatttgatgagtggtttgaaagatacaaattaa

SEQ ID NO: 4057 - DNA, 249 bp, Staphylococcus epidermidis
gtggttaaagatgatttgagtattataaaaaatatactacgctatactcaaaagaaatataacattactgataaatcttacatagatgatgtaatagtacctaaaaaagcgactacaatagaagaagttaaagcaaaacgtgagaactatttagaaatgaatgaagttcatcttatcgctgaagagttaaaacatatagcaaataataagcgtgctagttatatatttatttactgcttatatcattga

SEQ ID NO: 4058 - DNA, 585 bp, Staphylococcus epidermidis
gtgctagttatatatttatttactgcttatatcattgaaattcaagcattaaatggtatgcgtataggagaacttttagcaatacaaccagaaaacattgatttcaaaaacaaaaaacttatcattgatggcactatacattggcgtaaagagggtaacaacctcggttttaaagatactacaaaaacagctttatcttatcgaactatctctctgactactcgaagttgtgatattttacgtaaagttatgttagagaataagaaagcatttcagtggaaaaatatgtatgtagatagagattttatatttactaatcataaaggaaaccctatatcacttacatcaatcaacagaaacatacaaattgctgcaaagaatgtaggtattaaaaagcatataaccagccatactatgcgtcatagtcacatatcattattatcgcaattaggtatatcactgcgtgcaattatggatcgtgtaggccatacagatcataagactaccctacagatatacagtcatgttactgaacaaatggataaagatatgatgagtaagttagagaaagtaggtattaattaa

SEQ ID NO: 4059 - DNA, 906 bp, Staphylococcus epidermidis
atgagtagtactcgtaaaccaaaattagattatgaggaacaaattaaaaagttgaaatcattaggaattctattcaatgaaataacagaagaagaagctaaagaaatattaaaaaataacacttatttttttaaattgatatcttttcgtaaaaatataaaaaaggatagtagtggaaattataattttgagttttctgcactttctgattttgctactttagatatgcgattaagatatactttattacctatgtgtttggatatagaacattcactaaaaacagatattcttaaaaagattactgatgatgtaaacgaagacggatatacaattgttcaagattttataaacaatcataatggagatttagaaaaaatcttttctagcgtgattaaaagagatggtacagttataccgagttttcaaaaatattatgatgatcctccaatatgggtatgcttagaattaatgacttttggccaattttcagcatttgtagaattttattctgaaagaacaaatgactctgagttacgtaaggctggtaaatttattaaatttgctaaaaacattaggaataaatgtgctcatagccaaccaattttattaaatttaaatccacgcaaaaactttaccgttgaaagagaattaaaaaagataggtagaaaacaaagactgtctgataaaaaccttaaagtattagcaataattgatattcttgcattattagttttacattctaaatattgtagtaaaggtataaaagataatcgaaaaaatgatttattaacttttaaacaacgtaaaaatagatattttcatcattatcgaaatgttccttctctttcatttttctttctatcacttaacaaaatgattgactattatgttcaaaacaattaa

SEQ ID NO: 4060 - DNA, 1542 bp, Staphylococcus epidermidis
atggaaatggcgaaagagcaagagctgattcttgttttagactttggtagccaatataaccagttaattacgcgtcgtatccgtgagatgggcgtttatagtgaattacatgatcacgaaatttctattgaagaaattaaacgaatgaatcctaaaggtatcattctttcaggtggtccaaattcagtgtatgaagaggggtcatttaccatcgaccctgaaatttacaatttaggtattccagttttaggtatttgttatggtatgcaattaacgactaagcttttaggtggtaaagttgagcgtgccaatgagcgtgaatatggcaaagctacaattaacgctaaatcagatgaacttttctttggcttaccttttgaacaaacagtatggatgagtcattctgataaagtaattgaaattcctgaaggatttgaagtgattgcagatagtccaagtactaattatgcagctattgaagataaaaaacgtcgcatttacggtgtacaattccatccagaagtacgtcacactgaatatgggaacgacttactaagaaacttcgtccgccgtgtttgtaattgtacaggtgaatggacgatggagaatttcattgaaattgaaattgagaaaatccgtcaacaagtaggtaatcgtaaagtattatgtgcaatgagtggtggagtagattcatccgtagttgctgtacttttacataaggcaatcggcgaccaattaacatgtatttttgtggaccatggtctattacgtaaaggtgaaggtgacatggtcatggagcaattcggtgaaggttttgatatgaatattattcgtgttaatgctcaagaacgcttcatgagtaaactaaaaggtgtgtctgatccagaacgtaaacgtaaaatcattggtaatgagtttgtatatgtctttgatgacgaagctgcgaaattaacagatgtagatttcttagctcaaggtacgttatatacggatgtgattgaatcaggtactaagacagctcaaacaattaaatctcaccataatgtaggtggattacctgaagacatggaatttgaacttattgaaccgatcaatacattattcaaagatgaagtgcgcgcattaggaatagaattaggtatacctgaacacttagtttggagacagccgttcccaggacctggattaggtatccgtgtacttggagaaattactgaagataagcttgaaattgttcgtgaatcagatgcgattttacgtgaagtgattcgtgaggaaggtcttgaaagagatatctggcaatactttacagtacttccaggtattcaatcggtcggtgtcatgggagactaccgtacgtatgatcatactataggtattcgtgcggtaacatccatcgatggcatgactagtgactttgctagaattgattgggaagtcttacaaaaaatttcaagtcgaattgtcaatgaggtggaccacgttaatcgcgttgtctatgacattacctctaagccaccaagtacaatcgagtgggaataa

SEQ ID NO: 4061 - DNA, 1467 bp, Staphylococcus epidermidis
atgtgggaaaataaatttgctaaagaatctttaacattcgacgacgtgttactcattccagctgcatcagatgttttaccaagcgatgttgacttaagtgtcaaattatcagataagatcaagttaaacattcctgttatctcagcaggtatggatacagtaactgaatcaaaaatggcaattgctatggctcgacaaggcggtttaggtgttattcataagaatatgggcgtcgaagagcaagctgatgaggtacaaaaggttaaacgttcagaaaatggtgttatttctaacccgttcttcttaacaccggaagaaagtgtgtatgaggctgaagcattaatgggtaaataccgtatctctggtgtacccattgtcgataatcaagaggatcgcaagttgattgggattttaacaaatcgtgatttacgttttattgaagatttttcaattaaaatatcagatgtaatgacgaaagataatttaataacagctccagttggtacgactttagatgaagccgaggctattcttcaaaaacataagattgagaaacttccattagtagaaaatggtcgtttagaaggattaatcactattaaagatattgaaaaagtacttgaattcccatatgcagctaaagatgaacatggcagattgttagctgcggcagcaatcggtacgtctaaagatactgaaattcgtgcacaaaaactagttgaagctggcgtagatgcattaattattgatacagctcatggtcattctaaaggcgttattaatcaagttaaacacatcaaggaaacatatcctgaaattactgttgtcgctggtaacgtagcgactgcagaggcaacacgtgctttatttgaagcgggtgccgatgttgttaaagtaggtattggtccaggctcaatttgcacaacacgtgttgttgcaggtgtaggtgtgcctcaaattacagcagtttatgattgtgctacagaagcccgtaagcatggtaaggctattattgctgatggtggtattaagttctcaggtgatattatcaaagcattagctgctggtggtcatgcggttatgttaggtagtttgttagctggtacagaagaaagtcctggtgcaactgaagtattccaaggtagacaatataaagtttatcgcggtatgggatctttaggtgctatggaaaaaggttcaaatgatcgttacttccaagaagataagacgccaagaaaatttgttcctgaaggtattgaaggtcgtacagcttataaaggaccattacaagatacaatttatcaacttatgggtggcgttagagctggcatgggttatactggttcagaaaacctaaaaaaattacgtgaagaagcacaatttacacgtatgggaccagctggcttagctgaaagtcatcctcacaatgttcaaattacgaaagaatcaccaaactattctttctag

SEQ ID NO: 4062 - DNA, 1269 bp, Staphylococcus epidermidis
atgaaaaatttcatattaagtgtgcaacatttgttagcgatgtatgcaggggctattcttgttcctattattgtggggacaagcttaaaattttcagctgaagaaattgcttatctagttactattgatatatttatgtgcggggtagcgacatttcttcaagcaaataaagtcacagggactggattaccgattgtactaggatgtacgtttactgccgttgcacctatgatactcatcggtcaaacgaaaggacttgatgttttatatggttcgcttttaatatccggtatcttagttgttttaattgcaccttttttctcttatttagttaaattttttccacctgttgtaacaggaagtgttgtgacaattattggaatcaatttaatgccagttgcaatgaattacttggcaggtggtgaaggagcgaaaaactatggcgatactaagaatttaatattaggtggtgttacactactcattattcttattttgcaaagatttacaaagggcttcttgaaatcaattgcgatacttataggattagcaataggtactgctttagctggtatatttggaatggttgatatcaaacaagtgggtgatgcacattggtttggtttccctgtgccattcagattttctggcttcggatttgatgtcagctcaatacttgtatttttcattgttgcagttgtaagtttaattgaatctactggtgtctatcatgcactgagtgaaattactggtagaaaactagaaagaaaagattttcgaaaagggtacactgcggaaggtctagcaatcattttaggttcaatatttaatgcgttcccttacactgcatattcccaaaatgtaggtcttgtttctttatcaggagctaaaaagaacaatgtgatatatggaatggttattcttttactaatttgcggttgtatacctaaattaggtgctttagctaatattattccattgccggttttaggtggggcaatgatagcaatgtttggaatggttatggcatacggcgttagtattttgggtaacattaatttccaaaatcaaaataatttattaattattgcaatttcagtagggttaggtgctggtattagtgcagtacctcaagcatttaaaggattaggagaacaatttgcttggttaactcaaaatggtatagtgcttggcgcaatttctgcaatcatcttaaatttcttttttaatggtataaagtataaacaaactgaagaaaatgtgaaataa

SEQ ID NO: 4063 - DNA, 579 bp, Staphylococcus epidermidis
gtggagtcgttaggacgaaaagtcaaagaagatggcgttgtcatcgatgagaaaattttgaaggtagatggatttttaaatcatcaaattgatgcaaagttgatgaatgatgtaggtaaaacattttatgagtctttcaaagacgctggtattactaaaattttaactattgaagcttctggtattgcgcctgctattatggcttcttttcattttgatgttccttgtctatttgctaaaaaagctaaacctagtactttgaaagatggcttttatagcacggatattcattcatttacaaaaaataaaacgagtacagtcattgtatctgaagaatttttaggtgcagacgataaagtacttatcattgatgactttttagctaatggtgatgcttcgctaggtcttaatgacattgtaaaacaagcaaatgcgacgacagttggcgtgggtattgtggttgaaaaaagtttccaaaatgggcgccaacgtttagaagatgcaggcttatatgtatcttcactttgtaaggtagcttcattaaaaggcaataaggtaactcttttaggtgaagcgtaa

SEQ ID NO: 4064 - DNA, 408 bp, Staphylococcus epidermidis
atggcaaaaattactgtagtgaataaccaagatgaattatataaagtcatcaatcaaaaaaaatctgaaggttatttagagacagaattagctgttatcagtaaaagtaagttgcacttagatgatttacacaactctcaaatctcgttaatggctacaagtggctcatttagtgaccgtatgtctcgtttacttacaggtgaagatggagaagaaacagtattatctcgttatgatttaactgacaatgaactagaaggatataaacaagatattttaaacgataaaatgctcgttgttgctaacagtgaccgttcttctcatgatgaagttgaagataataatgctgcatataaagaagtggatattactcattatgccgcagagtctgaagggcctaaagcataa

SEQ ID NO: 4065 - DNA, 666 bp, Staphylococcus epidermidis
atggaatttaaagtgatagaatcagctaaagatccattatttaacgaggcactcaaattatatgatgataaattggatattggtttagatgaagatagtaaaatttttaaacgctcacttgaaaataataaaacagaaaatgattacgcctttatcgttggaattgaaaatcagactgtagttagcttagcaactgcacattacgaagcaacaaccaattctgcatttttaatttacttaatcgcaaaagaaagccccaatcatgatgaaagaatgtccttaactttagaggcaatagaaaaacaattaaaccttttatcacaagaagttcataatagagatattaatttcatcatgttagaagttccaaaagaaccctcgactgctaacatcgatgacaagctcagaaatgcactagaacatcgtcgtcaattcctctttgaaaatcaatttgaaaagcaggacgacattgactatattcatccaaaccaaaatcaaaaggaaacgccacaaaaagtagatttatttattaaagctaacattgaattaacaaaggacatatatggtacaagtgtcaaatctaattatattcttaaatatgtttttgcaaatggcatttcaagagaaattatttaccctctcctaaaagaaatgaatttaagatag

SEQ ID NO: 4066 - DNA, 903 bp, Staphylococcus epidermidis
atgttaactaaagaatttgctcaacgtgtagaactaagtgaaaagcaggtccgaaaaattgtacaacatttagaggaacgaggctatcaccttagtaaaacagaatatcgtggtcgtgaagccacagactttaaagaagatgacatcgaattatttacagatatcgctaacaaagttaaacaaacaaatagttatgatttagcatttgaagagcttgaaaaggaaaaagactttttacaagtcattgttaaagacgaggatagccaattaccaactgatcaaaatgtagcacaactcgttgaagatttacgttctgaaattcaaaaaatgcgagaagaacgtcaaatgttagggcaaatgattaaccaagttcatcagcaacaacaggaactcaaagaattacaaactgatatcacaacaaaattagattcgaatgctcaatctttaaaatcaatccaaaattctcaagaggctattcagtcagcacaagaacaacaatctaaagacatcgctaaagctaacgaattaaaagatagtgaattacgtagtcattttgattcaatgtcaaatagcgcttcaatatctcagagcaacgtcgcaagtcaaagcactacagcaagttcgagccaatctgaatcagcaaatgattcaatgagttcatctctgtccgagtctaactcaataacatccgaaagtaatacaaatagcaaatcggaaattgaatcaaaaagtacgtctacaagcgagttcttgtcagaatcaggaagtgtatctaactcagaaaaatctgagtcaatttctcattctcaatcaacatcagctacaccttcttctcaatcgacttaccaacaacaacctaaagaagagaagaaaggtttctttgcacgtctatttaacttataa

SEQ ID NO: 4067 - DNA, 1389 bp, Staphylococcus epidermidis
atggaaatactttttacagtaattaatgtcatcgtgttacttgctttcctaataatgttaaatattatggcaagaaaacacgtctcattccctaaacgtgtctttaccgctttagcaataggtatcgtatttggcattgtattacacctcatatatggtgcagagtctaaaactctcgaacaatcaacagactggtttagtattgttggagatggttatgttgcactattacaaatgattgtcatgccactaatattcatttcaattgttgccgcttttagcaaaatacaaattggtgaaaaattcgctaagatcggttcttatatttttatgtttttaattggtactgtagccattgcagctatcgttggaattttttacgctttgatctttggtttagatgcatcgtctattgatttaggtagtgcagaacattcacgtggtacagaaatttcaaaacaagccaaagatttaactgcaaacactttaccacaacaaattctcgaagtattcccaagcaatccatttttagatttcacaggacaacgtacaacttcgacaattgcagttgttatttttgcaacgtttgtgggctttgcttatcttagagttgcaagaaaacagccggaacatggaagcttacttaaacgtggtatagaagcaatctattctatcgttatggctatcgtaacttttgttttgcgattaacgccttatggcattttagctattatggcttctactcttgcgacaagtgatttttctgcaatttggacgttaggtaaattcttaattgcttcatacgcagctctaatcacaatgtatattatccatttaattatactgagtgtcttaggtatcaatcccgttaaatacgtgaaaaagacaatagaagtactaatctttgcatttacttcacgttcaagtgcaggtgcattaccattaaatgttcaaacgcaaacaaaacgtttaggtgtacctgagggaattgcaaacttctctgcaacttttggtttatccatagggcaaaatggctgtgcaggaatctatcctgctatgctagcagttatggtggcaccagtagcaaatgtagaaattgacttccaatttgttgttacacttattgctgttgttattataagttcatttggcgttgcaggtgtaggtggcggggcaacattcgcatcaatactcgtattatctacacttaatctaccagttgctctcgcaggggtactgatatctatcgaacctctcatcgatatgggtcgtacagcacttaacgttaatgactcaatgctagctggaacaggtaccgcacgcttaacgaatcattgggacaaaaaaacatttgactcaaatgattacggcgatttatctgcaaattaa

SEQ ID NO: 4068 - DNA, 756 bp, Staphylococcus epidermidis
gtgtcagattatgtttatgagttgatgaaacaacatcattcagttagaaaatttaagaatcaaccacttggttctgaaacggtagaaaaattagtagaggcgggacagagtgcttctacatccagttatcttcaaacttattctattattggtgttgaagatccaagcattaaagcgcgtttaaaagaagtgtcaggtcagccttatgttttagataatggttatttatttgtatttgttttagattattatcgtcatcatttagtagatgaagttgcggcgtcaaatatggagacatcatatggttctgcagaaggactattagtaggtacaatagatgttgcattagttgcgcaaaacatggcagttgctgccgaagatatggggtatggaattgtttatttagggtcattgcgtaatgatgttgcgcgagtgcgtgaaattttaaatttacctgattatacgtttccgttatttggtatggcagtaggtgaaccttctgatgaagaaaatgggtcacctaaaccgcgcttgccatttaaacatatttttcataaagaccagtatgatgcaaatcagcatcaacaacgtaaagaattggaagcatacgaccaagtagtgagtgaatattataaagaacgtactaacggtgtgcgtacagaaaattggtcacaacaaatagaaacatttctaggacgtaaaacacgtttagatatgttagatgaattgaaaaaagcaggatttattcaaagataa

SEQ ID NO: 4069 - DNA, 780 bp, Staphylococcus epidermidis
atgacactaacaaataaagaagttgctaaagttttatttaaagcttatagatataaaaaacccatcgatttcattagcgagaactatcaattaaacgaagaagaagcatatcatgtacaagaagaactaattgaccaattaactttcaaagaccgttcgactgttacagggtataaagttagtatgactagcaaggcaacgcaagcaattgctaacactaacgaacctgcatatggaacactcttatctaaccaaattgttaatgatggtgcctcagtctctctttcagaattattttcaccattactagaaccagaaattatctttatagtgcaggaagacttaccttatgatgctgatttagaaacaattagatatcatacccgtatcgcgccaggcattgaaattccagatgcaagatataaaaattggtttccaaattttactttatcagatttaatatcagataataccgcaacaggacttgtcgtagtaggtaaccctgtagacggacttgataacgatgcatttgctaatgtacatttaaatttatataaagatgataaatgcattgccacaggagaatcatccgaagtactcggaaatcccttaaacgctattcattggctaattaaaaaactacacacgcacggtaaacaacttaaaaaaggagatatcatttcatctggaacttttatatctccactaaaattagaatatggcacgtaccgtgctgaatatagtggtatcggtaaggtgtcattttcggttaataaataa

SEQ ID NO: 4070 - DNA, 570 bp, Staphylococcus epidermidis
atgtctttaattaacaaagaagttttacctttcacagcacaagcttacgatccaaaaaaagatgagtttaaagaagttactcaagaagatcttaaaggttcttggaacgttgtatgtttctatcctgctgacttctcattcgtatgccctactgaattagaagatttacaaaatcaatacgctaaattacaagaattaggcgttaacgtgtactcagtatcaacagatacacacttcgtacacaaagcttggcatgaccattctgatgcaatcagcaaactagaatacagcatgattggtgatccttctcaaacaatcactcgcaatttcgatgtgttggatgaagaatctggtctagcacaacgtggtactttcattatcgaccctgatggtgtggtacaagcagcagaaatcaatgctgacggaatcggacgtgacgcaagtacattagttaacaaaattaaagccgctcaatatgtacgtcaacatccaggtgaagtttgcccagctaaatgggaagaaggttcagaatcattacaacctggtttagacttagtaggtaaaatctaa

SEQ ID NO: 4071 - DNA, 1524 bp, Staphylococcus epidermidis
atgcttaatgctgatttaaagcaacaattacaacaattacttgagcttatggaaggcgacgttgaattcgttgccagcctaggctctgatgataaatcaaacgaactcaaagaattattaaatgagattgctgagatgtcagcacacataacaataactgaaaaatctttaaaacgtacaccaagtttttcagttaatcgccctggtgaagaaacaggtattacctttgctggcatacctttaggccatgaattcaactctttagtattagctatactacaagtgagtggtcgcgcacctaaagaaaagcaatccattatcgatcaaattaaagggctcgaaggtccatttcatttcgaaacctttgtaagtcttacttgtcaaaagtgtcctgacgtcgttcaagcattaaacctaatgagtgttattaatcctaacattactcatactatgattgatggcgctgttttccgtgaagaatctgaaaacattatggcagttcctgccgtcttcttagatggtcaagaatttggtaatggacgcatgacagttcaagatattttaactaaattaggaagcacgcaagatgcctctgaattcaacgataaagatccttatgacgtgttaatcgttggtggcggacctgcaagtggtagtgctgcaatttatacagcacgtaaagggctacgtacaggtattgtcgctgatcgaattggtggtcaagttaatgatactgctggtatcgagaacttcatcactgttaaagaaacgacaggttcagagttctcatcaaatcttgcagaacatattgcacaatatgatattgatacaatgactggtattcgtgctacaaatatcgaaaaaacagattcagctattcgcgtaactttagaaaatgatgctattttagaaagtaaaactgtcatcatttccacaggtgcaagttggcgtaaactaaacatcccaggcgaagaccgtctaatcaataaaggcgtggctttctgccctcactgtgacggacctttatttgaaaataaagatgttgctgtcatcggtggtggtaactctggtgtagaagcagctattgatttagccggcatcgttaaacacgtaacattatttgaatacgcttctgaattaaaagctgatagcgtattacaagaacgtttacgttcactacctaatgttgatattaaaacgagtgctaaaacaacagaagtaattggtgacgattacgttacaggtattagctatgaagatatgactaccggagagtcacaagtagttaatttagatggaatttttgtacagattggattagttcctaatacatcttggttgcaaaatgctgtcgaattaaatgaacgtggcgaggttatgattaatcgcgataacgcaacaaacgttcctggtatctttgccgctggtgacgttaccgatcaaaaaaataagcaaattattatttctatgggtgctggtgctaatgccgcacttaatgcattcgattatataattagaaattaa

SEQ ID NO: 4072 - DNA, 624 bp, Staphylococcus epidermidis
atgaaaaagagagtcattacatacttgatactagcgttgtctttaacacttgcagcatgctcaaatacgaacgataacaataatcaagagcatcacagcaacgctcatgcacctaaaaacgctaaaactttaaaggaaaaagatatcttttcttcaaacaaaaagggacaaaaaattagcgaaaaagagatgaagcaagctttagaaaaatatttacaagcgaatagcgatgtacttgataataagtatgtcatgcaacataaattagataaacaaagtgatagtaatcctaaaatcacagaatcacaagctgatcgtcttagcaagttatccaatttagcagttaagaacgatttacatttcaaaaaatttataaaaaacaatcacatccctgaagaatataaagatccaacagatcgcataattaattattttcacgctttaaatagtaccatttcaaatgtagatgaagacattgagaaattaaactaccaaccacaaaattcaattaacgttgttgatgtacccacaaaatattcaggtgatgtaaataaaaagcaacaagataaaattactactttccttaagaaaaaaggaatagacacagaagtatttaataaataa

SEQ ID NO: 4073 - DNA, 378 bp, Staphylococcus epidermidis
atgaagatacgtttaacatttattatcttagcaatactatccaccatcggcttagtacttgttttagcaaaatatccaacaggcccacacacaatcaactataacgaaccttatacagtactcatagccattacgacaatagttataatggctttaccagcactcatattaggtatatttaatcatcttgcatgtagaatcatatcggcgatattacaaataagtgcactgatgatgtgggggtttttagtaatcattagcttaattatgggacaaattgtcattatgcttatggcttccttaacgatacttgcattacttgttagttctattgtcacactttcagtgcacccatctacttcagataaaataaattaa

SEQ ID NO: 4074 - DNA, 591 bp, Staphylococcus epidermidis
atggaaatttatttagtgaggcatggtgagtcacagtccaattatgataataaacacgggtatctatatttttgtggacagttagacgtccctttgacggaaaggggtataaaaagcgctaaagaactatctgtttattttaaaaataaatacattgacaatgtatatgtatcagatttaaaaagaacaaggcaaacgtatgagaagctatttccttatgatattccaacaatatatacaaagacgttaagagagcgttcgttaggtgtttttgaaggtaaaaataaagaagaagtttgtaaagacaaacggttcgaaaaatatttccgtgatcctaattataaatactttagacatagcttttcgcaaaaagcaccacaaggagaaagttatcaagatgtctatgatagagtggttactttcattgaaaatgagcttaatcaacagcagagacgtgtagtgatagttgcgcaccaagttgtaattagatgttttttcgtctattttaaaatgataactaaggaagaagccttagcgacggaaattcataattgctatccatatttaattaaagaagaaatgaagttttga

SEQ ID NO: 4075 - DNA, 633 bp, Staphylococcus epidermidis
atggacggtttaattacatttatcattatcgcattattgattattatagtacctgggccagatttcattattgtaatgaaaaacactattaattcaagtaaaatgaatggttttatggccgcatttggtattactacggggcatattttatactcttcattagctatttttggaattatatacatacttacgagtttacactttgtttttttaacaataaaaatattgggtgcttgttatcttatttatctcggaatcaaaagtattttgagtgcgcacagttctgttgattttagtaaacaagctttagctgatgtcagaaatgtgagttatatcacttcttttagacaaggttttttaagtacaagtcttaaccctaaggctttattattttatgttagtatattcccgcagttcctttctaacggtaatatacatatgaaatctgaagttgcgttatttgctttttcagttgttgtagttatatgcttatggtttttattttgtgtattcatctttcaatatattaaattattattcagcagaccgagattcaaggctatatttgattatattgtagggtttgttttaattggcttatctattaatttattattaagtaaaagtagctaa

SEQ ID NO: 4076 - DNA, 135 bp, Staphylococcus epidermidis
atgtgtgtttatctatacgcacgtaactcaatgatagatgttgatgatgtctttaatcgtttgagttacattaattatagttatcaaagcatccaaaccaataaaaatggtgtgggtgcttttttcatgttataa

SEQ ID NO: 4077 - DNA, 255 bp, Staphylococcus epidermidis
atgtttggattaataggtatgattattgtcggcggtatcattggatggatcgcaggtttaattttaggtaaagacgtaccaggaggtattctaggaaatattattgctggtattgtaggatcatgggttggtactatgattttaggtgaatggggaccacaattaggtaaaattcacatctttccagcattattaggttcaattattttaatctttattatttcattaattttaaaagcactaagaaaaaaataa

SEQ ID NO: 4078 - DNA, 261 bp, Staphylococcus epidermidis
atgcaacataaaaataaatttcaacgtattaaccaaattatacaagttataggtttcctttcatttttagcaattctcactatcattacacttaacttttttataaaaggacacttacaaggtcattttgaaataggttttaatattcaaagtaatcaagtctatgtagtaacgacactaatcatagttacaatcatctgtactatattatcagctattctaaacatgctttctaataaaaaacaaaattacaaacattaa

SEQ ID NO: 4079 - DNA, 243 bp, Staphylococcus epidermidis
atggcaggtggaccaagaagaggcggacgtcgtcgtaaaaaagtatgctatttcacagcaaatggtattacacacatcgactataaagacactgaattattaaaacgttttatctcagaacgtggtaaaattttaccacgtcgtgtaacaggcacttcagcgaaatatcaacgtatgttgactacagctatcaaacgtgctcgtcatatggctttattaccatatgttaaagaagaacaataa

SEQ ID NO: 4080 - DNA, 510 bp, Staphylococcus epidermidis
atgttaaatcgagttgtattagtaggtcgtctaacgaaagatccagaatacagaaccacaccctcaggcgtaagtgtagcgacatttactctagcagttaatcgtactttcacgaatgctcaaggggaacgcgaagctgactttattaactgtgtagtcttccgtagacaagcagaaaatgtaaataactacttgtctaaaggtagtttagctggcgttgatggtcgcatacaatcacgtagttatgaaaatcaagaaggtcgtcgtatttttgttactgaagtcgtatgtgatagtgttcagttccttgaacctaaaaatgcacaacatggtggccaacgttcacagaacaataatttccaagactacggtcaaggatttggtggtcagcaatcaggacaaaatacatcttacaacaacaataattcatcaaactcaaatcagtcggataatccgtttgcaaatgctaatggaccgattgatatcagtgatgatgatttaccattctaa

SEQ ID NO: 4081 - DNA, 297 bp, Staphylococcus epidermidis
atgagaacatatgaaattatgtatatcgtacgtcctaacattgaagaggatgctaaaaaagcgttagttgaacgtttcaatggtatcttagcttcagaaggatcagaagttttagaagaaaaagactggggtaaacgtcgcctagcttatgaaatcaatgatttcaaagaaggtttctataacatcgtacgtattaaaactgataacaataaatcaactgacgaattccaacgtttagctaagattaatgatgatatcattcgttacatcgttattcgtgaagaccaagataagtaa

SEQ ID NO: 4082 - DNA, 810 bp, Staphylococcus epidermidis
atgttaaagaaattttcttactcaatcatttcactttcaattttcgctactagccttaattttatagatactcaagcacaagcgtcttcatcttctgtaagcgaaaaaggtacaatggggtatggctatcaacaatacttaaaagaccatcctaaaaagcaacctcataaaacacaaaatcgttctactttctctgctgaatctaatattactgaaacaaataatggtgaaagagtcttagatatttctgaatggcaaggacttttaactaatgaacaaataaaacaactaaagaaaaattatgattttattattttaagagcacagtacggttcagaatacgttgataagacttttgaaaaaaatgcagaattattagaacaaaataaaatgaaatacggcgtgtactcttatagcatgtacgaaagtccaaaagatgcacgttatgaagctaaaactttatctcaacgtgctcccaaagccgccttttacattaatgattatgaagaacaaaccgttaaatccggagatgatgaaacagcgacacaagcatgggcaaacgaaatgagaaaacttgccggaaacaagaagatccttttttattcatatgaaaatttcatgttaaatcatgcatcaaatgctgtcagttcatatgatggctactggttagcagcatatcaagctgaggaaccaaaacgagagaaagtgctatggcaatatacaaatagttactactctcctgaattaaatcaaaatgtcgatgcaaattatattgacgaaaatgtgaattcgtcttggttcacttcataa

SEQ ID NO: 4083 - DNA, 192 bp, Staphylococcus epidermidis
atgagattaaatttagattggaataaagatttccaagagtttcaagatatcttaaatagtggcattcacccagaatggctatactgcgctaaagcaaatttagttctcgaacccgcatacactggtgaaggcaaacaattttttagtacacaagacatcattaaagcaagcaaaatcattccatttttttaa

SEQ ID NO: 4084 - DNA, 1098 bp, Staphylococcus epidermidis
atggctttaacagcaggtatcgtaggtttgcctaacgtaggtaagtctaccctatttaatgcaattactaaagctggcgcattagcagcaaactatcccttcgcaacgattgatcccaatgttggtatcgttgaagtgccagattcacgtttaataaaattagaagaaatggttcaacctaaaaaaacaattcctacaacttttgagtttactgatattgcaggtattgttaaaggtgcatctaagggcgaaggtttaggaaataaattcctttcacatattcgtgaagtagatgctatatgtcaggtggttcgtgcgtttgacgatgagaatgtaacacatgtatcagggcgtgttaatccgcttgatgacatagaagtcattaatatggaacttgttttagcagatttagaatctgttgaaaaacgtttaccgaaaatagagaagatggctcgtcaaaaagataaaacagctgagatggaattacgtatattaacacaaattaaagaagcgttagaagacggtaaaccagtacgcagtattgatttcaatgaggataatcaaaagtgggttaatcaagctcagttattaacatctaagaaaatgttatacattgctaatgttggcgaagatgaaattggagataaagataatgataaagtgaaagcaattcgtgaatatgcagcaaacgaagattcagaagttatcgttattagtgcaaaaattgaggaagaaatcgctacattagatgatgaagataaagaaatgttcttagaagatttaggcattgaagaaccaggtttagacagactcattagaacaacatatgatttgttaggtttatctacttactttactgccggtgtgcaagaagtgcgcgcttggacatttaaacaaggaatgaccgcaccacaatgtgctggaattattcataccgattttgaacgtggttttattcgtgcagaggtaacaagctatgaagattatgtacaacatggtggagaaaatggtgctaaagaagcgggaagacaacgtttagaaggtaaagattacatcatgcaagatggggatattgttcatttccgttttaatgtttaa

SEQ ID NO: 4085 - DNA, 204 bp, Staphylococcus epidermidis
atgacgtcaaagtatggaataaatgatatagtagaaatgaaaaaaccacatgcatgtggaacaaatcgttttaagattattagaatgggtgctgatattcgtattaaatgtgaacattgtcagcgcagtgttatgattccacggcaagtgtttaataagaaaatgaaaaaagttcttgaatctcatcaagacaaagaaagttag

SEQ ID NO: 4086 - DNA, 876 bp, Staphylococcus epidermidis
atgaatcaacttaaatatattttatcttcattgttcgaacctttaacaaaggttgaaacatatgaaaatttaattactaaagtaataatgattttaatttatatccttgtagcgattgttgttatagcaattttgaataagattattgagcaagcatttaaaattcaaaataaaagcaaaaaaggaaataaaaaacgttcaaaaacactgatttctcttgtacaaaacatagtaaaatatatcgtatggtttgttgttatcacaacaattttaagtaagtttggtattagcgtcgaaggtatcatcgctagtgctggagttgtaggtattgcagttggtttcggtgcgcaaacaatagtaaaagatattattacaggtttctttattatctttgaaaatcaatttgatgtgggtgactatgttaaaatcaatagttcaggaactacggtagcagaaggtactgtgaaatctattggtttaagatcaacgcgaattaatacaatttcgggagaactgactattttacctaatggtagcatgggggaaattacgaacttttcaattacaaatgggactgctattgtagaactaccagtatcagttgatgaaaatatagatcaagttgaaaagaaactcaatcgtttatttgtttctttacgtagtaaatattacttatttgtcagcgatccagttgttgatggcattgatgcgatagaatctaataaggttactatacgaatttcagcggaaacaattcctggtgaaggattttcaggcgctcgtattattcgtaaggaagctcaaaaaatgtttagacaagaaggtattcgcatgccacaaccagtcatttcaaattatattgaagaaaaaagctaa

SEQ ID NO: 4087 - DNA, 843 bp, Staphylococcus epidermidis
atggcatatacagatgatcagaggttgaaaatgaataatgatgatagtgtgcaatttattgcactagaattaattagacctaatccttatcagccacgtaagacgtttgaagaagaacgactcaatgatttagcttcatcaattcaacaacatggtatattacagcctattgtattacgtcaaactgttcaaggttactatattgttgtgggtgagcgacgatttagagcatctaagttggcgggattaacagaagtgccagctattattaaagaactatctgatgaagatatgatggaattggcaattattgaaaatttacagagagaagatttaaatgccattgaagaagcagaaagttataaaaaaatgatgacagatttgaatattacacaacaagaggttgcgagacgattaggtaagtcacgtccttatattgccaatatgcttaggttattacagttacctaaaaatgttgctcaaatggttcaacacggggcgttatctagtgctcatgggcgtacgttattaactttgaaagacgccagtaaaataaaaaagacggcaaaacaagccgctcaggagtcttggagtgtaaggtatttagaggagtacgtcaatggtttagtcagtaaagacatctcaaggaaagttgacaaagagactaaggaaagtaaacctaaaatgattcaacagcaggaaagatttttaaaaaagcaatatggtgcgaaagtagatatttcgacatctaaaaatgtcgggaaaatcacgtttgaatttaaatctgaagcagaattcaaacgcttgattcgtcaacttaataaagattataaggaatattaa

SEQ ID NO: 4088 - DNA, 1104 bp, Staphylococcus epidermidis
atgaaggatacagatttagctcaaattgctttaacacaagatcacactggcgcaattgccaatccaatatatttatctactgcatatcagcatcctcacctaggtgaatcaacaggctatgattatacacgaacgaaaaatccaacaagaacagcctttgaagaagcttttgcacaacttgaaaaaggcattgcttcatttgctacttctagtggtatggcggcgattcagttaatatgtaatatattcaaaccaggtgatgaaattctcgttgcatttgacctatatggtggaacatttcggttattcgatttttacgaaaaacaatatggtttgaagtttaaatatgtagactttttaaattatgaagaagtggaaaaaaatatcacgccacaaactagagcattatttattgaaccaatctcaaatccgcaaatgattgaaattgatgtagaaccatattatatccttagcaaaaaacatcaactattaacaattatcgataacacttttttaacaccttatctttcgacaccactcgaagaaggtgcagatatcgttctgcattcagcaacaaaatatattggcggacataacgatgtgttagctggagttgtaactgttaaggatgctcaattagctgaacaattgaatcaattccataatatgattggagcaactctatcaccacttgatagttatcttttacaaagaggtctaaagacattacatcttcgcatagagcgttcccaagaaaatgctcaaaaacttgcacaacgatgtcgccagtcagattcaattgatgaagttttatatagtggacgaacaggcatgcttagtttaagactgaaccaagcatatagcgtatctaaatttttggaaaatttagatatttgcatatttgcagaaagcttaggtggtacagaaacatttatcaccttcccttatacacaaacacacgttgatatgccagatgaggaaaaagataagcgtggcattgatgaatatctcatcagattgtccgtaggtatagaagattataacgatatagaagctgacataattcaagcattagaaaattctaaagtaggagtgatttcatga

SEQ ID NO: 4089 - DNA, 1176 bp, Staphylococcus epidermidis
atgagtttatctaaagaaacagaagtaatattcgatgtgcgtagaggtaaagactacgactcagctaacccaccactttacgattcatctacgttccatcaaaaagtgttaggcggtgagactcaatatgattatgcacgaagtggtaaccctaaccgaactttacttgaagagaaacttgcacgtttagaaggtggtaaatatgcatttgcttatgcttcaggcattgctgcaatttcagccgttttactcacattaaacgctggggatcatgttattttacctgatgatgtttacggaggcacatttagattaactgaacaaatactcaatcgattcaatattaaatttactacagttaacgctacacatatagatcatatcactgaagctattcaatcaaacacaaaactcatctatgtagagacgccttcaaatccacttttcaaaattacagatattcatgctgtagcaacgctagcaaaggaacataagatactattagctgttgataatacgtttatgacacctttgggtcaatcacctttagcactaggcgctgacatagttattcatagtgcaactaaatttctaggtggacatagcgatttaattgcaggtgcagcaattactaataatagagaggttgcaaatgcattgtacttattacagaacggcacgggcacagccctttctgcatatgatagttgggcacttgcaaaacatcttaaaacattaccagttcgttttaaacaatctgttcataatgctgaacgtcttgttcaatttttgagtcaaagagaggagatttctgaagtgtattacccaggaaataatcctacacatctcaagcaagcttcaactggaggtgcagtgataggtttccgacttaaagatgaatctaaagcacaaaagttcgtcgattctcttactttaccacttgtatcagtgagtctcggtggtgtagaaactatcctatcacatcccgcaacaatgtctcatgcagcagtgccagaagatgtgagacgtgaacgcggcatcactttcgggttattccgtttaagtgtaggtattgagaatccagaagaactcatcgcagattttaactacgctttaaaggaggctttcaatgagtcatttactaaaccaattaaagagcaacgttttagtagctga

SEQ ID NO: 4090 - DNA, 1839 bp, Staphylococcus epidermidis
atgagtcatttactaaaccaattaaagagcaacgttttagtagctgatggcgctattggaacaatattatactcggaaggtcttgatacttgtccggaagcctacaatcttactcatccagataaggtcgagcggattcatcgttcttatatcgaagctggtgcagacgtcattcaaacgaatacgtatggtgctaactttgaaaaattaaagtcctttggtcttgaacataaagttaaagaaattcaccaagctgcagttcaaattgctaaacgtgcagcaaatgaggacacaattatacttggaacggtaggtggattcagaggcgtccggcaagaggatatcagtctttcaacaattcaatatcattcagaacttcaaatcgatacattaattgatgaaggtgtagatgcccttctatttgaaacttattacgatttagatgaattaactcgcatcgtcactgctacacgacaaaaatacgatattccaatcatcgctcaactcaccgcttcaaatacgaattacttagttgatggaactgaaattaatgcggcattgaaatacgtagttgaatgtggcgccaatgtagttggattaaattgtcaccatggcccacaccatatgcaacgatcattttcacatatagaacttcctaaacatgcgtatttatcgtgttatccaaacgctagtttattagatatcgagaatagtgaattcaaatatagtgataatgctcaatatttcggagatatagctcaagaattaattaatgagggagtcagattgataggtggttgttgtggcacaacacctgaacatattcgctatataaaatcagcagttaaacatttaaaacccgttaaagataaaaaggtaatccctattaataaagcttcatctcaaaagcaaacgcgagttcttaaacaaaaccttacttctaaagttaaaaatggcccaacagtcatcgtagaacttgatacacccaaacatttagatactgatacatttttcgataatgtaggcaaattagatgaagctggcatagatgctgttacattggcggataattcattagctaccgtaagagtgagtaacatcgcagcggcaagtttaatcaaacaacactacgatattgagcctcttgtacatgtgacatgtcgtgaccgtaatttaataggattacagtctcatctcctaggtttatcactcattggtgtcaatgaaatactagctattaccggagatccttctaaagtaggccatttacctggagctacaaatgtctatgacgtgaactcaaaaggccttacagaacttgcactaagatttaacaaaggtattaacactgacggcgatgcgctgaaaaaacatactaactttaacatcgctggtgcgtttgatcctaacgtacgaaaattagatggagccattaaacgacttgaaaagaaagtagcaagtggcatgagttatttcataactcaacccgtttatagtaaagaaaaaattattcaagtatatgaagaaacaaaacatttaaatacacctttcttcataggtatcatgccaatcgcaagttataacaacgcacttttcttacataatgaagtgcctggcatcaaaatgtcagacgatgtacttaaccaattcaaagctgttaaagatgataaagaaaagactaaagaattaagtttaagactttccaaagaactcattgatacagtacatgaatacttcaacggtctgtacattattacacctttccaaaaggtagattattcattggaactcgcagcatactctaaatcaatcactgccaacaaggaggcaatattatga

SEQ ID NO: 4091 - DNA, 2247 bp, Staphylococcus epidermidis
atgacaacaattaaaacttcaaacttaggattcccaagattaggtagaaaaagagaatggaaaaaagcaatcgaaaattattgggcacataaaattgacaaagcagaactagatcaaacactgactgatttacacaaagaaaatcttttacttcagaaaaattatcatcttgatagcattccagttggggatttctctttatatgatcatattttagatacgtctttattgttcaatattatccctgaacgtttccaaggacgcgaagtcaatgatgatttattatttgatattgctcgtggtaacaaagagcatgttgcaagtgcacttattaaatggtttaacaccaactatcactacattgtacctgaatgggacaacgtagaacctaaagttgaaaaaaatacgttattagaacgttttaaatatgcacaatcaattaatgtaaatgcgcatcctgtaattgttggtcctatcacatttgtaaaattatcaaaaggtggtcatcaatcgttcgaggaaaaagttgaaacattacttcctttatataaagaagttttgcagtcacttgtagatgcaggtgctgagtatattcaaattgacgagcctattctagtgactgatgacagcgaaagttatgaagacattactagaaaagcatacgactatttcgcaaatgaaggtttaggaaaatatctcgtcattcaaacttactttgaacgtgttcacttaaaattcttaagttcattaccagtgggcggtttaggattagatttggtacacgataacggctataacttaaaacaaattgaagatggtgatttcgatcaaagtaaagcactttatgcaggaatcattgatggcagaaatgtatgggcggctgatattgaagcaaaaaaacaattaatcgaaacattacaacaacacacacaacagttagtcattcaaccttcatcatcacttctacatgttccagtatcactagatgatgaaacacttgatgattctattgcagaaggattaagttttgctactgaaaagttagacgaattagatgcattgcgtcgcttattcaatgataatgacctgtcaaaatatgaacattacaaagcacgttatgaacgcttccaaagccaatcatttaaaaatcttgaatacgattttgaaagtgtaccgacacatcgtaaatcaccatttgctaaacgcaagcaattacaaaaccaacgtctaaatttaccagatttacctacgactacgattggttcattccctcaaactcgtgaagtccgtaaatttagagcagattggaaaaataatcgcattacagacgctgagtatcaagaatttttacaaaatgaaatcgctcgttggattaaaatccaagaagatattggtttagacgtacttgtacacggtgagtttgagcgtaacgacatggttgaattttttggggaaaaacttcaaggtttcctagtaacaaaattcggttgggtacagtcttacggttctcgtgcagttaaaccaccagttatatatggagatgtgaagtggactgccccacttactgtaaaagaaacagtatacgcgcaaagcttaactgacaaaccagtaaaaggtatgcttacaggtccagttactattttaaactggtcatttgaacgcgtagacgtacctagaaaggttgttcaagatcaaattgccttagccattgatgaagaagtgttagctttagaagaagcaggtatcaaagtcattcaagttgacgaaccagcgttgcgtgaaggcttacctctacgctctgaatatcacgaacaatatttagaagatgctgtacattcatttaaattagcgacatcatctgtgcatgatgaaacacaaattcatacacatatgtgctattctcaatttggacaaatcattcatgctatccatgatttagatgcagatgttatttctattgaaacttctcgtagtcacggagacttaattcaagatttcgaagatattaattatgatttaggaattggattaggtgtttacgatattcacagtccacgtattccaaccgaagaagagattactactgcaattaatcgttcattacaacaaattgatcgttctctattctgggttaacccagactgtggtctaaaaacacgtaaagaagatgaagtgaaagatgcattaacagtgttagtcaatgcagttaaaaagaaacgtcaagaatctgaatcaacaacagcataa

SEQ ID NO: 4092 - DNA, 744 bp, Staphylococcus epidermidis
atgtcacagtatccactttggaatcaattaaatactttaaaagaggctcagtgggtcgatttaacacatactttcgacccaaatatccctcgttttagcgaatttgaaaaaggtgaagtctcaacgctattcaatattaaagatcatgggttttatgtacaacgttggagtatcgtaactcaatatggaacacacattgatgctccaatccatttcgttgaaaatagaagatatttagaagaattagatttaaaagaacttgttttaccattaattgttttagattattctaaagaagctgcacaaaattcagattttatcgtatcacgtaaacatttagaagactgggaacaacaacacggtcgcattgaagcagatacttttgtcgcattacgtactgattggtcaaaacgttggccagatatagaaaaatttgaaaataaagatgtagatggccatcaacatcttccaggttggggccttgatgcattaaaatttctcattgaagaacgtggtgttaaatccataggtcacgaaacatttgatactgatgcctcaattgatacagctaaaaatggtgatattgttggcgaaagatatatcttaggtcaagacacattccaagtcgaattacttaccaatttagatcaattacctaccagaggtgcaattatctatgcaatcagcccaaaaccaaaagatgcaccaggctttccagttcgtgcattcgcaataaaaccttaa

SEQ ID NO: 4093 - DNA, 1185 bp, Staphylococcus epidermidis
atgtcacgcatagtattagctgaagcatatcgaacacctataggcgtgtttggtggtgtatttaaggatatacctgcctatgaactaggtgcaacagttattcgtcaaattttagaacatagtcaaatagatcctaatgaaatcaatgaagttattctaggaaacgtattacaggcaggtcaaggacaaaatcctgctcgtattgctgcgattcatggtggtgtgccagaagcggtaccttcttttactgtaaataaagtttgcggttctggattaaaagcgattcaacttgcctatcaatctattgtagcgggagataatgagattgttatcgctggaggcatggaaagtatgtctcaatctccaatgcttcttaaaaatagtcgtttcggttttaaaatgggaaatcaaactttagaagacagtatgatagctgatggtttaactgataagtttaatgattaccatatgggtatcacagccgaaaatctagttgaacagtatcagattagtcgtaaagaacaagatcaatttgcattcgattctcaacaaaaagcatcacgtgcacaacaagctggtgtatttgatgctgaaattgtacctgtagaggtaccacaacgtaaaggcgaccccctaattatttctcaagatgaaggcattagacctcaaacgacaattgataagttagcacaactccgtccagcatttaaaaaagatggatcagtaactgctggtaatgcatccggtatcaatgacggtgctgctgctatgctcgttatgacggaggacaaagcgaaagcattgggcttacaacctatagctgtattagatagttttggtgcgagtggtgtggcgccttcaattatgggtattggtccagttgaagcgatacataaagctttaaaacgttctaataaagtgataaatgatgttgatatttttgaattaaacgaagcttttgcagcgcaatcaattgctgtaaaccgtgagttgcaattaccgcaagataaagtcaatgttaatggtggtgcgattgcactaggacatccgataggggcttcgggtgcgcgtactttagtttcattattacatcaattaagtgatgctaagccaacaggtgtggcatctttatgtatcggtggcggtcaaggtatcgctacggttgtatctaaatatgaagtttaa

SEQ ID NO: 4094 - DNA, 156 bp, Staphylococcus epidermidis
gtgtttactgcaattaaagtatgtaatactcatttaaatacaatgaaggtaagagataaactcttaaataatagatttgaatatccaaatataatgacaataagaaaagaaggtttgcttcttccctcatttttagaaaagtataagttatattaa

SEQ ID NO: 4095 - DNA, 201 bp, Staphylococcus epidermidis
ttgagcttttatcgttttatgaagaattttgaaggtgaaaaaagtcattttggagatttgtttgaaggtatgaaagatattaattttcctgaaaacattacgactccaagggaaattatggaaaagttccaacattggttacaagaacctagtttacacgatacgatacaagatgcgattaagcagtatcaaaataaataa

SEQ ID NO: 4096 - DNA, 204 bp, Staphylococcus epidermidis
ttgcgcaatagacttaaagaattacgagcccgtgatggatataaccaaacagagcttgctaaaaaagctggaatatcacgacaaacggtgtctttaatagaacgcaacgattttacaccatctatattaaccgcaataaaaattgcaagaatctttggtgaacctgttgaagatatctttattatggaggaggaagacttttga

SEQ ID NO: 4097 - DNA, 672 bp, Staphylococcus epidermidis
ttgaaaataaaaaggtatgcacttctatgtttattaggaggattagttggaggcatcatcggatacatcataggagctattaactgggagaagttatttaattatgcacagttcgctaactttaaagttgtgctttatacaaccatcgtagcatcattaataaatattatacttactgtgtatttatttatagtccaaaacgcgtcacttcactataaagctaaaattgacgcaaatatttcagatgatttagcagatacatatgaaaataaatcatacatcaaatcattgaaagtaagatttatttacacaatgcaattaattgtcgcttttattgcaattttaatacccgtcataggaaatgcatctgagaatcacatcgctctaataatgattcctttcattattacaatcatttcatccataatgattgggatattttatagaaaatttgatgctcgataccctaaattaggagagaaacgttacactgaaaaagcatttaatattatggacgaaggagagcgatacatcacactcgtttccttgtataaagtgcaccagcagaatattgtattactttttataggcattatgaccctggggatattctcaataactacaggcatgaatcaatcactaggcattgttcatcattttatttatctataa

SEQ ID NO: 4098 - DNA, 843 bp, Staphylococcus epidermidis
atggaaaacttattagaagttcagcaactcaataaatcatataagaattcagaattccagcttactgacatcacattctctgttaaacctggcgaggtagtgggtttaattgggaaaaatggttcaggtaagtctaccctcattaatacacttgtaggaaatagacataaagataatggttcactgaaattcttcgataaagaggtgacagagaacgacttcaaatataaagaacatttaggtgtagtttttgatgatttacgtgttccagataaattaactctacaatctatcaataaagtttttactgaaatatatgatgcttggaacagcgatacattcttttctttaatcaaagcatttgaactaccaacaaataatcaaattaagacattctcaagaggaatgcgtatgaaagcagctttaacaattgctttaagccatgatgctaaattattaatcttagatgaagctacagcaggtatggacgtatcaggacgtgaacatgtgttagaaattctagaggattatttaggagacgatcgtgccatattaatttcatcacatatttctgaagatattgaacagctagctactcagctcgtttttatgcgtgatggtcgaattattttaaaagaaagtaaagaagttttattgagccaatacggcatcatcgatcaaccagttgagcatttcaatatttcaaatgagtatctaatcgcaacgcgcagacgtaatgatcgacaaatcagtttagtgaataactatcaaaaagtacctgatgcacaaccactaaagacaatcgatgatgcaactaaaattattatgcgaggtgaagtataa

SEQ ID NO: 4099 - DNA, 639 bp, Staphylococcus epidermidis
atgaaaggtcttactcttagtatattttatacagctaaaaaatcatttttcatctacttagtagtcggaattattgctgcagtcgttttctcatttttaaatccaacgatgaacagctttcttgctatcatttttttaatatctcctattacggataacttcaaacgtgaaaaggactcaagatggatgaattacatatccacacttcctgttagaagagctgattatgttaaaagttattatactatttttctcttgtgtgcattagttgggatacttgcaggtgtacctagtgtcggtctaatcacacaaagtttaagtatggtattcatttcactatgtgttgccattggtggcgcagggactttctccattatgtttcctctaacattcaaattcggttctgaaaattcaaatgtcattgtgatgactacaacatttgctgtcattattatctatttcttattctatatcgcatcaatgatattgagtaatcaaacaggaagtggctctatgattacaatgctgagcaacacacaaagctatgttgtatattccatttatggaatacttggattgatttcaattattatctcttatattttatcgattaaaatttttaacaaacaagaactataa

SEQ ID NO: 4100 - DNA, 231 bp, Staphylococcus epidermidis
atgacattattaactaaagttttagatactttaacaggcatatgtgttgctttattgtttaccaagtattttgtaaattatgcaaatgatatgtttgactggcacttaagatggtatttcctagaaaatgtacctcatttagcgctcattttgtttattctagtatttatctttgctgttccttctgaaatgattaaagataaaaataagaaaaagcataatgattcataa

SEQ ID NO: 4101 - DNA, 465 bp, Staphylococcus epidermidis
atgagtaatatcacagtttataatgtcattgaattgggcgtaaacaatcttttagccgattatgacaattggaatgttgaagaagtattagataaagaaactcaacatttcccaaacactttacattggcaatatggtcatgtattaacaatctttgaacaagcattatcattgggcaatcaacatgtcgtagatgttgaaaaatataataaattgtttggatatggttcaaatcctagagactggaagggacaagatgtacctgctatcaacgaaatcaaacaacacattcaaacattaccagaacgtgctaaaaaattaacacacgagcagttagctcaaaaattagaccaacctatcgcaggttgtaacacacttgatgaattattaatgttaaatgctatccatgtgccattacacaccggtaaaattgaagaaatgacacgtgtacttcgtgaaaaataa

SEQ ID NO: 4102 - DNA, 471 bp, Staphylococcus epidermidis
atgtttagttatcaaataaataaaaatattaaattaaaaatattagaagaacgagaagccgaacagttatttaaattagtagatagcaatcgtgactatttagctgaatttctgccttttgttgaacatacgaagaaagttgaagatagtaaacactttatccattcggcgttgcaacaatttatcgatggtaatggatttcattgtggaatatggagtaataaagaattgattggagtcataggattgcattacttagatttagttaataaaacaacttcaattggttattatttagctgaagactttcaaaagaaaggtattatgactaaatgtactaaagcgttaattcgctatgtatatgaagtgtatgatattaatcgtatagaaatacgaatgtctactaaaaataagaaaagcagagctataccaattagacttgggttcacgcaaaggtatattgagaagtaa

SEQ ID NO: 4103 - DNA, 1506 bp, Staphylococcus epidermidis
atgatatattctatcggtaagaatttaggtaataaattaacaggtatagaacaagctatgatcaatagattaaagctatttaaagataatttagtcccaaataaactcatattcacatcttggtcaccacgtttatatatgcatgcacattcgttaaacatcgattcaaaagatattttcagtctttacgattttctacaagatagtattaactttgagaaaaaacatattgattggataaattattggaaaaatatatgtaattataccttaaaattcgttgaaaatacgaatgatattaaaatatacgataacgacacatataaaatgtatgtgcattttgttgattcaaattatcaaactttagactatattaaccattttgatatacaacaacgtaaaattcgaagagatttttacgatacaagaggctttttaagttgtagtagaattttaacctctcaacaaaaagtcgtgatggaacaattttttacacctacacaaaaagttaaatttcaaaaatattacaaccctgagcacgaacatcctacggtacaatctatcatttataatacttcacgaggcgttcgttttttcaacgatgaaaatgaacttttagcgtttgcaattaatgcgctatatcatttaggagacgtatttttatgtgataaaaacatcgttacagggccaatcattgatcaaactgatactaaaataccagttctcgccgttttccacagtacccacgtaaaaaatatcaatgatatatatcattctgaaatcaaacaagcgtataaacctgttttagataacttatcccgatattcaggaatcatagtatctactgaacaacaaaaaacagatttatctgtaaaaattaataacgttattcccatttacgttatacctgcaggttatattgatacaaatgaatctcatcatagtagtgacaacaaaccattgcctaacaaaatgatttctatcggccgttattctcctgaaaagcaattagatcatcaaatagaactaatgtctaagctagttccagcatttccaaatttacagttacatttatttgggtttggtaaagaagaaacacattatcgtaaattaatagctcaatatcatttagaaaatcacgtgtttttacgtggcttcatttatgatttaaatcaagaaatagagaccgcctatttatctttattgacaagtaaaatggaaggattcaatttaggtgtacttgaaacgattgctaaaggcgtacctacagtaagttatgataccaaatacggaccttctgagttaattgttaatcataaaaatggctttttaattgaacaagataataaagaacaactctatcacagcgttaaaaagttattactcgattctaacttaagagaacaattttctaaggaaagtattaaacatgcccaaatatttaatgacaaaaatgtttttgatacatggctcactgttttcagaacgttaaaagttaatttataa

SEQ ID NO: 4104 - DNA, 1635 bp, Staphylococcus epidermidis
atgagtatggaaaatcatatagaaagattgattaatcatgttgaaaaaacaatagaaataaaagaatatgcttttttaagccttggaaaatctaatataaaagccaaagttaaattattaaaaaagcctaattaccttagaagggatattactaaagaaattcaaaagtttagacagaagacaggagcgtttcctttatgggtgaaaatagacattgtgactgaaaaagaagttactttatttaaagatgttaaagatgaactaacacaaactagaagaaattatattgattttggtatagctttagatcaatactggaatttatcatttttaccagaagaaataaacactaatgcatttattaaaccggtgaaaacagatgggaaaacaaagcttattctatctgaacaaaatatcaataactatttaagaaagtatacgaaccataagaaaaagtttgcttatgatttttatgaaaacaaagaagtcattaagttcaaaactaaaggttttatcttagacgaacaaaatatatatgaattacacgatgaaggttataaaaaaggattaagaaaggtcgattatttacataaagaaatagatcaattaattgaaagtggtacatatttcctaggaaatatgctatcagatactggaagatatcaatatggttattttccacattttgataaagaaatcaatttctataatatattaagacatgcttcttcaacttatgcattaatagagggtttagattatttaggagaagatttaactatagtcgaaaaggcaattaactacgttattgagaattatttctatgataatgaaggtgttggatatatctttgatgatacaaaagatattaacgaaataaaattaggacaaaatgctgcctttatatttgcggtttgtgaatatttaaagcataaccccaataagcaatacttatgcgtggcacaaaaagttgctcgaggaattttatcaatgattaatcaagatacatacgaaacaactcatattttaaattatccggatttaactgtgaaagaatcatttagaattatttattatgatggtgaagcagctttagcattattacgcttatatcaccaagatcataatgataaatggttggaagttgtgaagaagttaatggatcgatttattgaaaaagagtattggcaataccatgatcattggcttgggtattgcacgaacgagttagttcaattgtgtccgcaagataaatattttgaatttgggattaagaatgtgaacacctatttggaatatattgaacaacgtgaaacaacattcccaacatttttagaaatgttaatggcaacctataagcttattcaaaaagcaaaagctacacatcgtcaagagcttgtgactcagttgattgatgaagaaaaattaatcaatgtgattcatacaagagcagaatatcaacgagtaggatttttctatcctgaaattgcaatgtacttcaaaaatccaaagcgaattcttggtagtttcttcataaaacaccatgggtatcgagttcggattgatgatatcgaacattatatatcaggctatgttcaatatcaaaaggcacagattaaagatgaaatattatag

SEQ ID NO: 4105 - DNA, 4797 bp, Staphylococcus epidermidis
atgtttggtgccgcagacaatgaggctaaagcggctgaagacaatcaattagaatcagcttcaaaagaagaacagaaaggtagtcgtgataatgaaaactcaaaacttaatcaagtcgatttagacaacggatcacatagttctgagaaaacaacaaatgtaaacaatgcaactgaagtaaaaaaagttgaagcaccaacgacaagtgacgtatctaagcctaaagctaatgaagcagtagtgacgaacgagtcaactaaaccaaaaacaacagaagcaccaactgttaatgaggaatcaatagctgaaacacccaaaacctcaactacacaacaagattcgactgagaagaataatccatctttaaaagataatttaaattcatcctcaacgacatctaaagaaagtaaaacagacgaacattctactaagcaagctcaaatgtctactaataaatcaaatttagacacaaatgactctccaactcaaagtgagaaaacttcatcacaagcaaataacgacagtacagataatcagtcagcaccttctaaacaattagattcaaaaccatcagaacaaaaagtatataaaacaaaatttaatgatgaacctactcaagatgttgaacacacgacaactaaattaaaaacaccttctgtttcaacagatagttcagtcaatgataagcaagattacacacgaagtgctgtagctagtttaggtgttgattctaatgaaacagaagcaattacaaatgcagttagagataatttagatttaaaaacagcatctagagaacaaattaatgaagcaatcattgctgaagcactaaaaaaagatttttctaaccctgattatggtgtcgatacgccattagctctgaacacatctcaatcaaaaacttcaccacataagagtgcaagtccacgcatgaatttaatgagtttagctgctgagcctaatagtggtaaaaatgtgaatgataaagttaaaatcacaaaccctacgctttcacttaataagagtaataatcacgctaataacgtaatatggccaacaagtaacgaacaatttaatttaaaagcaaattatgaattagatgacagcataaaagagggagatacttttactattaagtatggtcagtatattagaccgggtggtttagaacttcctgcaataaaaactcaactacgtagtaaggatggctctattgtagctaatggtgtatatgataaaactacaaatacgacgacttatacatttactaactatgttgatcaatatcaaaatattacaggtagttttgatttaattgcgacgcctaagagggaaacagcaattaaggataatcagaattatcctatggaagtgacgattgctaacgaaatagtcaaaaaagacttcattgtggattatggtaataaaaaggacaatacaactacagcagcggtagcaaatgtggataatgtaaataataaacataacgaagttgtttatctaaaccaaaataaccaaaaccctaaatatgctaaatatttctcaacagtaaaaaatggtaaatttataccaggtgaagtgaaagtttacgaagtgacggataccaatgcgatggtagatagcttcaatcctgatttaaatagttctaatgtaaaagatgtgacaagtcaatttgcacctaaagtaagtgcagatggtactagagttgatatcaattttgctagaagtatggcaaatggtaaaaagtatattgtaactcaagcagtgagaccaacgggaactggaaatgtttataccgaatattggttaacaagagatggtactaccaatacaaatgatttttaccgtggaacgaagtctacaacggtgacttatctcaatggttcttcaacagcacagggggataatcctacatatagtctaggtgactatgtatggttagataaaaataaaaacggtgttcaagatgatgatgagaaaggtttagcaggtgtttatgttactcttaaagacagtaacaatagagaattgcaacgtgtaactactgatcaatctggacattatcagtttgataatttacaaaatggaacgtacacagtcgagtttgcgattcctgataattatacgccatctcccgcaaataattctacaaatgatgcaatagattcagatggtgaacgtgatggtacacgtaaagtagttgttgccaaaggaacaattaataatgctgataatatgactgtagatactggcttttatttaactcctaaatacaatgtcggagattatgtatgggaagatacaaataaagatggtatccaagatgacaatgaaaagggaatttctggtgttaaagtaacgttaaaaaataaaaatggagatactattggcacaacgacaacagattcaaatggtaaatatgaattcacaggtttagagaacggggattacacaatagaatttgagacgccggaaggctacacaccgactaaacaaaattcgggaagtgacgaaggtaaagattcaaacggtacgaaaacaacagtcacagtcaaagatgcagataataaaacaatagactcaggtttctacaagccaacatataacttaggtgactatgtatgggaagatacaaataaagatggtattcaagacgacagtgaaaaagggatttctggtgttaaagtgacgttaaaagataaaaatggaaatgccattgggacaacgacaacagacgcaagtggacattatcaatttaaaggattagaaaatggaagctacacagtcgagtttgagacaccatcaggttatacaccgacaaaagcgaattcaggtcaggatataactgtagactccaacggtataacaacaacaggtgtcattaacggagctgataatctcacaattgatagtggtttctacaaaacaccaaaatatagtgttggagattatgtatggaaagatacaaataaagatggtatccaagatgacaatgaaaaaggaatttctggtgttaaagtaacgttaaaggatgaaaaaggaaatataattagcactacaacaactgatgaaaatgggaagtatcaatttgataatttagatagtggtaattacattattcattttgagaaaccggaaggcatgactcaaactacagcaaattctggaaatgatgatgaaaaagatgctgatggggaagatgttcgtgtaacgattactgatcatgatgactttagtatagataatggttattttgacgatgattcagacagtgactcagacgcagatagtgattccgattcagacagcgactcggattcagatagtgattcggatgcagacagcgactcggattctgacagtgattctgacgcagacagtgactcagattcagacagtgactcggattcagacagcgattcggattccgattcagacagtgactcggattcagacagtgactcagactccgacagtgattccgattcagatagcgactccgacgcagatagtgattccgattcagatagcgactccgacgcagatagtgattcggacgcagacagtgactcggattcagatagtgattccgacgcagacagtgactcggactcagatagtgattcagatgcagacagcgattcagactcagatagcgactcggattcagacagcgactccgacgcagacagcgattcggattccgatagcgattcagactcagacagcgattcagattcagacagcgactcagattcagatagtgattccgacgcagacagcgactcggattcagatagtgattctgactcagacagtgactcagattccgatagtgattcggattcagatagtgattccgacgcagacagcgattcggattccgatagcgattcagactcagacagcgattcagattcagacagcgactcagattcagatagtgattccgacgcagacagcgatgcagacagtgattcagatgcagacagcgattcagactcagatagtgactcagacgcagatagtgattccgattccgatagcgattcggattcagacagcgactcggattcagatagtgattccgacgcagacagtgactcagactcagatagtgactcggattccgatagtgattccgacgcagacagcgattcggattccgatagcgattcagactccgacagcgattcagattcagacagcgactcagattcagatagtgattccgattcagacagtgactcggattccgatagtgactcagactcagacagtgactcagattcagatagcgactcagattcagacagtgattcggactcagatagtgactccgattcagacagtgattcggattccgatagcgattcggattccgatagtgactcggattcagacagtgattcggactcagacagcgactcagattcagatagtgattccgacgcagacagcgactccgattcagatagtgattcggacgcagacagcgattccgattccgatagtgactcggattcagacagtgattcggactcagacagcgattcagattcagacagtgactcggactcagatagcgactcggattcagacagtgactcggactcagatagtgactccgattcagacagcgactcggattctgataaaaatgcaaaagataaattacctgatacaggagcaaatgaagatcatgattctaaaggcacattacttggaactttatttgcaggtttaggagcattattattaggaagacgtcgtaaaaaagataataaagaaaaatag

SEQ ID NO: 4106 - DNA, 1365 bp, Staphylococcus epidermidis
atggatttcgttaaatcaaaaactgacttatttagactcatagacaatgaagcgcaaacatcgacatctaagatggttttattcttaatattaggaactatatttttagatgcatatgatattactattttaggtacaatgactgatcaactcactcaacagtttcacttatcaccatcaacgctatctatagtaatgacctctttacctattggtgcattatttggtgcattacttggtggtacattagcacatcagtttggacgcaagcgtattttatcaattgccttactaacactcactgtaacctctcttggtgcggcactcgcaccaaatgtaattattctaataatatgtcgttgtataatggggtttgctattggaatggatagtccagttgctttcacttttattgcggaaataagtaatttaaagcacaaaggaagaaatgttaactattggcaagtcgtttggtatgttgcaatagttacttctgctttagtggtcactgcgttctttatgctaggggctggtgcacatttgtggagatatgcagttggatttggtgcacttattgcttttgtcttgtacatcttgcgaattaaatatttacacgaaagtccgacatgggtgattaatcattattctttagaaaaagcaactgaatttataagaaaatattatcataaagacatccacctagagggaacgcttgaagatgatttaaattctgatgtgacttcgccacataattcttggacagacttatttaaaccgagatatataaaaagaattatcctggcgactgcgatttcaacattacaaggtatgcagtactatggtgtcggtttatacatacctattattgcaacttatcttattagtaaggataaaataggtgtattattaggtactgctatagtcaatatagcaggtattctaggcgcatatttaggtgctcaattgacttataaattaggtacacgcaagcttacaatgataggcttcacacttgtattactttcaatggtatgtgtaggactcttttatcatcatctaccaatgcttcttaacactttccttattggattatttttatttggccattcaggaggtcctggtactcaaggaaaaacaattggtgccttatcatttccgactcatttacgttcacaagctactggctttgtagaatctgtaagtcgtactggtagtatcataggtacttttgtctttccaatcattcttgctgcagtaggtctaacgaatactatgttaatcttgtccattgtccctttactcggaattatcataacagtatctataaaatgggaagctgtcggtaagcatattgaagtagaataa

SEQ ID NO: 4107 - DNA, 579 bp, Staphylococcus epidermidis
atgaagaaagaaataatagaatggattgtagccataatcgttgcaattgttatcgtcacacttgtgcaaaagtttttatttgcttcttatacagtcaaaggagcatctatgcatccaacatttgaaaatcgagaaaaagtgatagtaagtcgtatagcaaaaacgcttgatcatattgatacaggagatgtagtgatttttcatgctaacgcgaagcaagattatattaagcgacttattggtaaaccaggtgattcagtagaatataaaaaagatcaactatatttaaacggtaaaaaagtagatgagccttatttaagtgaaaataaaaaacataaagttggagaatatctaacggaaaactttaagtctagagatcttaagggtacgaatggcaatatgaaaattcctagtggtaaatacttggttttaggtgataatcgtcaaaacagtattgacagtcgcatggatgaagtaggtcttttagataaaaatcaagttgttggaaaagtagttttgagatactggccatttaatcggtggggcggtagttttaatcctggaacatttcctaactaa

SEQ ID NO: 4108 - DNA, 645 bp, Staphylococcus epidermidis
atgaaacagctattatttaaaacaagttgcgtaataatggtacttttcacgtcttctttaagtattgtcagtacatattctcatgcaacaacgtcaggaggaacgagtagttccagttcggcaagttctagttcaagtagcagtgcagcttctgcatctagaggttcaacttcttcaagtacaagtatgagtcgttctagtgcaataaatgcgtctcgcaatgcacaacaatctagtcagcgtgctgcccaacaagcaacaaaatcaagtcgtgtaacagcaaccaaaaataaaggacaacaaagtgtaacaagacaaaaagcacaatctcgttctttgatgccgtctcaaagaccttatgattcaagtgcaccatactcatctcaatatattgctacaacttattataataattggttattctattatatttttgcacattcgtttttaaatcaacatgaaaagaaaaacagtgtagatgctcagtttcatatgttgaaacaacaaatgaagcctcatgagaaactttatactgttactgtaaagaccaaacaaggaaagcgtgtcgttgtcgtacctaaaaaacaatatgacaaaattgaaaaaggaaaacacattaaagttaaaaatggtgttgttcagtaa

SEQ ID NO: 4109 - DNA, 381 bp, Staphylococcus epidermidis
atgaaaaaagtatttatgatcataagtatacttaccataactgttactttaagtgcatgtggaggttctggaaaacaaaaagagccatctaaggaaagtcaaaaatctgataaatatgattatgtttattatgaaatattaaatgatggagattctgaaacgccaaatgttgagattaaatataaagataaaaaaggtaaatcacatatagaaaaagctgatttagatcacgtgtatgaacatatactaggtgatggtaataaaaaaccatatattgtaaaggatgggaagaaaattcatgtatatcgaccaccatatatgatttatggtgatgatgatgttgaaggcaaagccgtttcgaaagatgaagttacgaagtaa

SEQ ID NO: 4110 - DNA, 759 bp, Staphylococcus epidermidis
atggctattttaacagcaaaccaattatcaaaagtatatggtcacaaacaaaaatatcgagctttaaataatataagtttttcagttgaaaaaggggaatttgtagctgtcatgggtccttctggatcaggtaaaacgactttactcaatgtgttaagttcaatagatactatttcaggaggaactgtagaagttgaaggtaaagaaattaataaactgagccacaaagaagtggcaaattttcgaaaacaacatctcggttttatttttcaagattatagcgttttacccacattaacagtaaaagaaaatattatgctaccactctcagtacaaaaattccataaatatgaaatggaacaaaattataaagaagtggctgaggcattaggtatttataacctgggaaataaatatccaagtgaaatttctggcggtcagcaacaacgtacggcggcagcccgggcattcgtccataaaccaacaattattttcgcagatgaacctactggcgcattagattctaaaagtgctcaagatttgttacaccgtctagaagatatgaataaacaatttaattcaaccattatgatggtgacacatgatccttcagccgctagttacgctgagagagtcattatgttgaaagacggtgatatacactcagaaatctaccagggtaacgattcaaaacaaacattttaccaagaaattatgaaacttcaaaccgcattaggtggtgtcagtcatgacatttaa

SEQ ID NO: 4111 - DNA, 1881 bp, Staphylococcus epidermidis
atgacatttaaccaacttatccttaaaaatttaagaaaaaatattaagcattatggaatgtttctattttcattattgattagcattatactttattttagtttctcaactttaaaatattcacatagtattaataactcagattcttcaactattattaaaaatggtgccacaattggtgccacaattctttttatcattattgttgttttcttaatgtatgcaaatcatttatttattaaaaggcgtacaaaagagtttgccttataccaactgataggtttaacacgtggaaatattctaagaatgctcaatatagaacaactagtattttttattgtaacaggaattttaggcactttaattggtatttttggttcaaaacttttacttgttatcgcttctaaattaatgaagttaaacacacatatctctattggctttgaaccccaagctatacttattactatcgtaatgttagctgtcgcttttttattgataatgatacaaaattacattttcttaaaaaaacacagcattttagctttgatgaaagacaattataccccggaagctacccaaaaacggataactacgtttgaagcaatcggcggcattttaggaattataatgatagtatttggatattatatgtctactgaaatgtttggtgtttttaaagccttaacaactgctttgattacaccttttagcatactttttttaactattgttggtgctttcttattctttagaagttctgtatcacttatttttaaaacactaaaacatattaaacatggtcgtgtaaatatcacagacgttgtctttacatcatctatcatgcacagaatgaagaaaaatgcgatgtctctcacagttattgctatcatttcagctttcacggttagtattctttgcttcgcggcaattacacaatctaatactaatacaactttagaaatgacctctccagatgattttaatataagccagaataaaatagctgcgcaatttaaacataaactagatcaaggaaatttaaaatatcatcagcggacttatgaagtaatcaatccaaaaacattaagcgaccacgtcatgaagagtaaaaatggttctgatatgtctactaatacaacatcactaatgatgaactcacatctcaaaggtcatgaagctaaaataacgaatatacaatcatcaacaggattaatagatattcatttaaatcataagattacagttaaaggaaaatctaaacaatctattatcgttaaagacaaagataactctaaaatatatccatcccaattatcatttggagctcctatagttgaggtgagtccggaggtatataacacattaaaaactgacaatattgttaataagatgtacggttttaatttcaacactcacaaagatgtgaaaaaagcagaaaaaattgcctcaaaagttaatcgtaatattgtatcgcacgatgaatataagaaatttataaaccaaagcaatggcatacttatctttgtaacatcattcttaggaatagcatttttaatggctgctggttgtattatttacattaaacaaatggatgaaactgaggatgaacttgataactttaagatattacgtcgtataggatttacctacactgatatgtctaaaggtttactattaaaaattgcatttaattttggattaccgcttcttattgctttattacatgcattatttgcagcacttgcatttatgaaacttctaggaaatgtctcaatgtcacctatattcatagtaatgattatatatacaattgtttatttcatttttgctatgatttcatttatacactcgagtcgtatgattaagcattctatttag

SEQ ID NO: 4112 - DNA, 192 bp, Staphylococcus epidermidis
atgaaattcaaagaattaatcaaacaatcatatgaggatttaaaaaacttaacaattaattggtttaacgtactcagtttaactgtaatcatatttattttaagtaacattgtcacaccgcttattggtatacctgtgggtttactcggtggtgcatatatcctaaagagacgtgaaaagaaaaataaataa

SEQ ID NO: 4113 - DNA, 2046 bp, Staphylococcus epidermidis
ttgacaaataataatagaataaaaagatttagcattagaaaatacgcagtgggagtagtatcaattgttacaggtgcaacaattttcatcggagggcaacaagctcaagcagctgaaacttcagtgcaacatgcggatgcacacccagaagactcgcaaacaacacaacaattaaaaaatgataagttagaagaaacgttaaaagcttcaaaacaaggtaatgctgatagtcaacaagtacaaacaattgatcaatctaaaacaaatcaaaacaaccaacattctgtagctgaaagtgcacaactgaaaagtgatgagacagctaatcagccaaaaaaagaagaaggtagctcagtaaaacaagacgtccaaccgtctaaaaatgtaaatcaacaagacgtagctactcaatcaaatgagagagaaaataatgacataaaagatgaaggtcaaacttcaaagacgagcaatcaacatatccagagttctaacagtcataatcaatcaacaggaacaaaagacagctactcagaagaaatcgaccaaccattagtgaaattacaaaagccgtctaatgattctacatatcaaacacaatcaaaaacaaaacaagatagttctaaacaactccctcaagaaaaaacaacaaaacgtcaaattcaaacaactgaaaatgaacagacaactaaagttgattctaaaaaagctaatgacactcaaaatgttgaaaaacatactcaagagcctaaaaatgatacatcaacatcacaaaaaaatcatcaacaagtagctacaaaagaacaatctaatagaagtacaacaagggagacgcaaaagcaatcagcaaatgctaatcaaaatcatcagtctacacatcaagcacagttcaaaaaccaatatccagtagtatttgtccatggtttcctaggctttgcaggtgataatcaatttagtttagctccaaaatattggggtggtacaaaatacaatattgacagaaatttaactaatgagggatacaatgtacatgaggcaaatattggtgcttttagtagtaactatgatcgcgcagtagaattgtattactatgtcaaaggaggacgtgttgattacggtgcagcgcatgcagctaaatatggtcatcatcgctatggtcgaacatacaagggcatcatgcgtgattgggaacctggcaaaaaaattcattttataggtcacagtatgggtggtcaaaccattcgtcaaatggaagaattcttaagaaatggtaaccaagaagaaatagaatatcaacgtcaacatgggggtactatatccgatttatttacaggtggtaaagataatatggttgcttcaattactacacttggcacaccacataatggtacacctgctgcagataaaattggcacacgtaaacttgtaaaagaaacgattaatcgtattggtagattaagtggtggtaaagatgtagatatagatttaggtttttctcaatggggattaaaacaacaaccaaatgaaagctacattgattacgcggaacgtgtatccaaaagtaagatttggaatactgaagatcaagctgttaatgatctgacaacgcaaggtgctgaaaaaattaatcaacaaacaagtctaaatcctaatattgtctacactacttatacagggtcagcgactcacacaggacctcttggtaatgaattacctaattctagtgaaattcttttgttgaacttaaccagccgtattattggtaaagatgcaaacaaagaaattagaccgaatgatggtgtagttccagttatatcatcacaacatccttctaatcaagcctttaaaaaagttgatgatcatacaccagctactgataaaggtgtttggcaagtgagacccgttcaacatgattgggaccatttagatttagtaggtatggatgcatttgatttaacacatacaggtagagaattaggtcaattctatctaggtattatggataatatcatgagaatcgaagaagcagacggtattacaaataaataa

SEQ ID NO: 4114 - DNA, 1197 bp, Staphylococcus epidermidis
gtgaataacttttcaaatgtcatatcagttgctattcgttccattttaaaaaacaaacgacgtaatatctttacgatgattggaataattattggtatcgcatcagtaattactatcatgtcgttggggaacggttttaagaagtcaacgactgagcaattcaatgatgctggtgctggtaaaaatcaagcttcaatttcttacatgacagaaaatatggaagcgcctaaaaataatccatttaagcaagaggatatgagtgttgttgaacaggttaatggtgttaagagtgctaaagtaaaagaggataaggatagcacatattcagtcaaaattacgaatacacatggcagtagtgatgctagtttaaaaaaggttgataaactgacagatgtagatgaaggaaaaggatttacgaatgatgataatgaagtgctagaaaaagtagccgttatagataaaaaaattgctaaaaaagtattcaataatcaggcaatgggtcaatctatttatataaatggagaagggtttaaagtcgtaggcgtctctgaaagctcagaagtcgatgaaagtgggatgcctattgagtcattaattcaaataccttcaaaaacatttaataaatatatgggcaatttgacacaaggtatgcctcaattattagttacagttgaaaaaggttcagataagaaagacgtaggtaaaaaggtcgaaaaagtgttgaataaaaaaggaactggcgtatctgaaggtcaatatagttatgaagataatgaagcggtgatgaaaacgataggttcagtcttagacacgattacttactttgtcgcagctgttgcgggaatatcactctttattgcaggtattggtgtgatgaatgtcatgtatatttcagtcactgaacgaacagaagagattgcaattcgtcgtgcatttggcgctaaaggtcgagatattgaaatacaattcttagtagaaagtgttgtgttatgtctcataggtggtatcatcggattaattctaggtattattattgctacattgattgatctcgtgacacctgaaatggttaagagttccgtcagtctaggttccgtcatcctagctgtaggtgtatcaacattgataggcatcattttcggttggatacctgcacgttcagcttctaaaaaagaattaattgatattattaaataa

SEQ ID NO: 4115 - DNA, 687 bp, Staphylococcus epidermidis
atgattgaattgagaaaaatcaatcgacactttaaaaatggaaatgaatcaaatcatattttgaaagacatagatattcatattgatgaaggtgaatttattgctatcatgggtccgtctggttcaggtaaaagtacgttaattaatatcttgggatttattgatcgtggatatgaaggagaatacttttttaacaatgagaattatcaaaaaagctcagataataagctcgcagaaattcgaaatcatactgtaggtttcgtctttcagaattttaaattgattcaaaataacactattttagaaaatgtaagtattccgctaatttataatggtttgagtaataaagcgagaaaaagcaaagttttagacggacttcatgacgtcggtctaaaaggtaaagagaatctcttaccaaataaattgtcaggagggcagcaacaacgtgtagctattgcccgggcaattattaatgaccctaagtttattattgccgatgaacctactggcgctcttgattcgaagacatctcaagatattatggagcttttcgtaaaactgaacaaagaacagaatacaactattattatggtaacgcatgatcgtgaagtggcggaaaaagctgatcgtattatccatattttggatgggcgtgtgcaagaggaagaggtgttgacacgtgaataa

SEQ ID NO: 4116 - DNA, 1119 bp, Staphylococcus epidermidis
atgaataagaaactattgtggagcatcattggtattgtaattattgtcgtattaatcattgctgcttttatattaaaacaagttaatggttcaggtagtaaagatagtaatgcttacgatacatatacagtaagaaaagaaacacctattagtttagaaggcaaagcgtctccagaatctgtgaaaacttataacaataatcaatctgtgggtaacttcttaagtgtttcagtacaagatggtcaaacagttaaacaaggtgaacgtatcatcaattatgatacaaatgggaataaacgccaacaactattgaacaaagtgaatcaagcacaatctcaagttaatgatgattatcaaaaagtaaatcaaagtcctaacaatcatcaattacaagttaaattgactcaagatcaaagtgctttaaatgaagctcagcagtcattgtcacaatatgacagacaactcaatgacagcatgaatgcatcatttgatggtaaaattaacattaaaaatgattcagatgtaggcgaagggcaacctattttgcaattaatttcttcaaatcctcaaattaacgcaactattacagagtttgatattaataaaattaaagaaggcgatgaagtaaatgtcactgtaaatagcacaggtaaaaaaggaaaaggaaaaattcttaaaatagatgaacttcctacaagctatgatacaagtgacgatagtacagcatcatcggcacaagcaggggcacaaggtgatagtgaagaaggaactgaaatgacgacatctaatcctacaattaatcagccaacaggtggtaaaagtggcgaaacatcaaaatataaagttatcattggtgatttagatatacccgtgagatcaggcttctctatggatgctaaaatccctcttaaaactaaaaagctaccaaataacgtgttaacaaaagataataacgtatttgtcgttgataaaaataataaagttcacaaacgtgaaattaaaattgaacgtaataatggtgaaatcattgtgaaaaaaggattgaaatctggcgataaagtccttaaaagtccaaaaggtaatttaaatgatggagaaaaagtagaggtgtcatcatga

SEQ ID NO: 4117 - DNA, 630 bp, Staphylococcus epidermidis
atgagtacacaggaattaaaagaaaatgatattcaaaactcaagtattccatttgttaatcattttaacaaactaagacatcagccaaaatggatacttaaatcaatcatagtgatagtattagctattattagcgctttcatcacatataatactagtaatgaactattagataaccaatcgatagctaatagccaaatggatgaaaatatgttacgtatgtctacaactataggcgctttcataggaacaatctttagtgttgttgtagtatttttaatctttctaattatttctaaaatatttaaatctgacgccaaagcgagcagtttattctcagcagcactctcttattcaatcattattttaggatttacaactattatttctttaattcaaatagtttttggactaaagataacagactataagcttgatagcttaaacattttttcaaaggataataaaacactcatggctttcagtttaactaatcttttaaaagcctttttaacaggtgttgtttattactcaactagtcgtttatctaaaaaagcatctgtgatattaggaatcgttgcactcatcatattaataggatcaggtatgataagtggaatgaatagctaa

SEQ ID NO: 4118 - DNA, 570 bp, Staphylococcus epidermidis
atgaatgttagcaatcaaatcaaaaaatttagagaaagagatgggtattcacaagaatttttggctgagaaaatgtttgtttcaagacaaactatttcaaattgggaaaatgataaaagttatccggatattcataatttacttattatgtgtcaactcttcaaggtatctctagacgaactagtggaggatgatttgaaaaacgtgcaaatcaaaaatattaaaaaagaattagacttttggacatggatgatgataattacaatggtattaggaagtgttctcataggtcctatgattcattactttcattggttaggaataggaataacatatttagtatttttaataggtatcattgcttctacaaaattagaaaaaattaaaataaaaaatgatattgaaacatacgacaggatattagcatttattaatggtaaagatcctaaagaggtgcaaaaaagtaagtttagagatatatggacatcctcaatttcttttattttctttgttggtgtgatcatcggtataagttacttaagtatcattttaactgattattttttataa

SEQ ID NO: 4119 - DNA, 540 bp, Staphylococcus epidermidis
atggctggaagaccaaaagatccaacaatcaataaaaaaatttatactgagattcaacgtttattggaaacgactcattttagagatattactatagatcaaatttctgagaatactggtatttctaaagcaactatttatagacgttggaaggataaatcttcaattatcatgtccgcgtttattgaacaatctcaatatattgtgattcataatcaagataatttatatgatgatttattccagtttttagtgaaaataaaagatatctataaaacaaaactaggtagtgctgtgattgaaatattaattagtcatcaacaaatggaagctagagaaacttttatgactaattactttaatcataatcgcaaagttttaaaagagattgttcgtaagcacatacaagaggaagaacaagatttgtttattgatttaatcttctcacccatctattttaatatattaattaaacctgaaactctggataaaaattacattaaaaagatgttgaatcaagttttacgtatatatcattga

SEQ ID NO: 4120 - DNA, 396 bp, Staphylococcus epidermidis
atgaagttagcaattattaaattttcagttggtggtttagctgttttaattagttatattgtttctgtcgtgcttccatggaaggaatttggaggtatatttgcaacctttcccgcagtgtttttagtttcaatgtgtattactggtatgcaatttggcaatgaggtagctatgcatgtgagcagaggcgcagtcttcggtatgataggagttttatgtagtatactagcaacctggggattactacaagctacacatatgtggctattgagtattattggtggttttgtagcttggtttgtaagtgcattgattatttttgaaattgtggaattcatagcacataaaagaagggataaacatggctggaagaccaaaagatccaacaatcaataa

SEQ ID NO: 4121 - DNA, 360 bp, Staphylococcus epidermidis
gtgtttggtatatcaatttctagtgctatactacatttcgttatcggaggatttgctgttgcacttgcatcaattatggctgataaagtaggaggaaaattaggtggcattattgccacaatgccggcagtctaccttgcagctattatagcgttagctatagaccataaaggacagcaacttattcaaatgtcaattcatttaagtacaggagcaattgttgggattgtctcatgtattgtaactgtgttctttacttcaatttttattggtaagaaaaattatagaagtggaacagtatttgcaattctttgttggtttgtgatttctgttgcgattttcttagtcagacatatttaa

SEQ ID NO: 4122 - DNA, 162 bp, Staphylococcus epidermidis
atgttttacgtgaaacaaaaattatcattatttagaaaattaggtgatttaaacaatatatttacaacaattgatttacgctataaactaaaagtaaacgatacgtttcgtttaataaatatggatgagaagggttattgtgtttggtatatcaatttctag

SEQ ID NO: 4123 - DNA, 840 bp, Staphylococcus epidermidis
atgaagaaacctttttcaaaattatttggtttaaaaaataaagatgacatcattggttatactgaagaagaacgtaataataatgtagaatccattcatattgaacgtatcgtacccaatcgttatcaacctagacaagtatttgagccaaataagattaaagaattagcagagtctattgaagagcatggattattacagcctatagttgtacgtccaattgaagaagatatgttcgaaattatagccggcgaacgacgatttcgagcattacagtcgttgcataaacctcaagtagatgtcattgttcgagatatggatgatgaagaaacagcggtagttgcattgattgaaaatattcaacgtgaaaacttatctgtcgtcgaagaagcggaagcttataaaaagttacttgaaatcgggggaacgactcaaaatgaattagcaaaaagtctaggcaagagccaaagcttcattgctaataaacttagattattgaagttagcacccaatgtgattaagagattacgtgaaggtaagattacagaaagacatgcacgagcggtattagtattacctgatgaaacacaagaagaattaatcgagcaagttattagtcagaagttgaatgtgaaacaaactgaggatagagtacgtcagaaaactggaccagagaaagtaaaagcgcagactttccaattttctcaagatgtaacacaagcaaaagaagaactaggtaagagtattgaaacgatagaaaaatcaggtatacgcgttgaacaaaaagataaagaacatgaagattattatgaaattaaaataaagatatataagaaataa

SEQ ID NO: 4124 - DNA, 720 bp, Staphylococcus epidermidis
atgagtattgaatggttatcagagaaattaagcgagcaaggcatagaactatctaatacgcaaaaagagcaatttcaaaaatattatcaattacttgttgaatggaacaaaaaaatgaatttgacaagtattactgatgaacatgatgtttatttaaaacatttctatgattcaatagcgcctagtttctattatgattttaacggtcaattaagtctttgtgatatcggtgctggtgcaggttttccaagtatacctttaaagatagtataccctgagttgaaagtaacgattgtagattctctaaataaaagaatacaatttctaaatcatttagctgcagaactaggtcttgaagatgttagttttgtgcatgatcgagcagaaacatatggcaagggtgtctacagggagtcttatgatattgttacagctcgtgcagtagcgagattgactgttttaagtgagttgtgcttacctttagtaaataaaggtggacagttccttgcacttaaatcatcaaaaggtgaagaagaattgcaagaagcgacgtttgctattaacattttaggtggtaatgtgaaagagactcatacttttgaattacctgaaaatgccggtgagcgacaaatgattattattgataaacgtagacagacatcaaaaaaatacccaagaaaaccaggtacgccaaacaaatctccactagttgaaagttaa

SEQ ID NO: 4125 - DNA, 1878 bp, Staphylococcus epidermidis
gtggttcaagaatatgatgtagtagtcattggtgctggtcacgccggtattgaagcaggtttagcttcagctcgtcggggtgctaaaacgctgatgttaacaattaatttagataatattgctttcatgccatgtaatccatctgtaggtggtcctgcgaaaggaatcgttgtacgtgaaatagacgctttaggtggacaaatggcaaaaactattgataaaactcacattcaaatgcgtatgcttaatacaggtaaaggtccagctgttagagctttacgtgctcaagcagataaagtattatatcaacaagaaatgaagcgtgtacttgagaatgaggataatttagacatcatgcaaggtatggttgatgaactcattatagaagataatgaagttaaaggtgttcgtactaatattggtacagaatatcgttctaaagctgtcattattacaacaggtacattcttacgtggagaaattatactaggaaacttaaaatattctagtggccctaaccatcaattaccatctgtaactctagcagataatttaagaaaattaggatttgatatcgttagatttaaaacgggtacaccaccacgtgtaaatgcgagaaccatcgattattctaaaactgaaatccaaccaggtgatgatataggtcgagcgtttagttttgaaacaaccgaatttattttagatcaattaccttgttggttaacttatacaaatggagatacacatcaagtcattgatgataacttacatttatctgctatgtattccggtatgattaaaggtacaggtcctagatattgtccatcaattgaggataaatttgtccgctttaacgataaaccaagacatcaacttttcttagaacctgaaggacgtaatacgaatgaggtatacgtgcaaggattatctactagtttacctgaacatgttcaacgtcaaatgttagaaaccattccaggtcttgaaaaagcagatatgatgcgtgcgggttatgctattgaatatgatgcaatcgtgcctactcaattatggccaacgttagaaacaaaagcgatcaaaaacttgtatactgcaggtcagattaatggaacatcaggatatgaagaagcagcgggacaaggaatcatggcaggtattaacgctgctggtaatgttttaggtacaggtgaaaaaatactcagccgttcagacgcatatattggtgtacttatagatgatttagtcactaagggtacaaatgaaccgtatcgattattaacttcacgtgcggaatatcgattattactacgtcatgataatgctgatttacgtcttactgatatggggtatgagttaggtttaatatcagaagaacgctatgcaagatttaatgaaaagcgtcaacaaatcaaagatgaaatacaacgacttaccgatgtacgtattaaaccaaatgaacatacgcaagcaattattgaagctaagggtggttcaagattaaaagatggcatattagcgattgatttattacgtcgtccggaaatgaactacgaaacaattttagaaatcttagaagaatcacatcaacttcctgaagcggttgaggaacaagttgaaattcaaacgaaatatgaaggttatatcaataaatctttacaacaagtagaaaaagttaaaagaatggaagcgaaaaaaattcctgaggatttagattatagcaaggtagatagtttagcatctgaagcacgcgaaaagttagctgaagttaaaccattaaatattgcacaggcttcacgaatttcaggtgtgaatccagcagatatctcaattctacttgtttatttagaacaaggtaaacttcaaagggtgaaacaataa

SEQ ID NO: 4126 - DNA, 1380 bp, Staphylococcus epidermidis
atggattttgatacgattaccagtatttcaacaccgatgggtgaaggtgctattggaattgtgagattatctgggccacaagctattgaaatcggagatatcttatataaaggaaagaaaaatttatctgaagttgagacgcatacaataaattacggtcatattattgatccagaaacaaatgaaacagttgaagaagtcatggtgtctgtattacgtacccctaaaactttcacacgagaagatattattgagataaattgccatggtggtattttaacaattaatcgtatattagagttaactatgacttatggtgcacgtatggcagaaccaggtgaatatacaaaacgtgcatttttaaatggtcgtatagatttatctcaagcagaagcggttatggattttatacgttccaaaactgatcgagcttctaaggttgcgatgaatcaaatagaaggacgtttaagtgacttaatcaagaaacaacgtcaatccatattagagatactcgcccaagttgaagttaacattgattatccagagtatgatgatgtagaagacgcaacgacggacttcttactagaacagtctaagcgtattaaagaggaaatcaatcagttacttgaaacaggagcacaaggtaaaataatgagagaagggttatctacagttattgtaggacgtcctaatgttgggaagtcttcgatgctaaataaccttattcaagataataaagcaattgtgactgaggtcgctggtacaacaagagacgtgttagaagaatatgtcaatgttagaggtgtcccgttacgacttgtagatactgcgggtattagggatactgaagatatcgtagagaagattggtgtagaacgttctaggaaagctctaagtgaagcagatttaattttatttgtgcttaataacaatgaacctctgacggaagatgatcaaactttattcgaagtcattaaaaatgaggatgttattgtaatcattaataaaacagatttagaacagcgattagatgttagcgaactaagagagatgattggtgatatgccacttatacaaacatcgatgcttaaacaagaaggtattgatgaattagaaatacaaattaaagatttattctttggtggcgaagtacaaaatcaagatatgacttatgtatctaattcacgtcacatttcattgttgaaacaagcgagacaatcaattcaagatgcgattgatgctgctgagtctggtatcccaatggatatggtacagattgatttaacacgtacttgggaaattctaggagaaattattggagaatcagcgagtgatgaattaatagatcaactatttagtcaattttgtttaggaaaataa

SEQ ID NO: 4127 - DNA, 348 bp, Staphylococcus epidermidis
atggaaaaagcatatcgtattaagagaaattcagactttcaagcgatatacaagaatgggaagtctgttgcaaatagacaatttgttgtctatacctataaaaatagagatttaaaacattttcgcttaggaataagtgtctcaaaaaaactgggcaacgctgttacaagaaatagaattaaaagagcgataagagagaattttaaagtgcataagcaaaatattatcgctaaagatattatagttattgcgaggcaaccagcaaaagatatgaatacactggagattcaaagtagtttagagcatgtgcttaaaattgcaaaagtgtttaataaaaagattaagtag

SEQ ID NO: 4128 - DNA, 138 bp, Staphylococcus epidermidis
atggtaaaacgtacttatcaaccaaataaacgtaaacatagtaaagttcatggtttcagaaaacgcatgagcactaaaaatggccgcaaagttttagcgcgtcgtcgtcgtaaaggccgtaaagttttatctgcataa

SEQ ID NO: 4129 - DNA, 1356 bp, Staphylococcus epidermidis
atgtcagagaaagaaatttgggataaagttttagaaattgcccaggaaagaatttcaaacactagttatcaaacgttcataaaagatacgcaactctactcacttaaaaatgacgaagccattatattagtaagtctgcctttcaatgcgagttggcttaatcagcgatattcagaaattatgcaggctattatttatgatgtcatcggttatgaagtgaaaccacattttatttctgaagatgaacttgcatcctacaacaatgtaaatacaaaagaagttcaagaaccccaagtacaacattcttctatagatgataagacttggggaaaagaacaatttaatatgcacaatacattcgatacatttgtcattggacctggtaaccgtttcccacatgctgcaagtttagctgttgcagaagcaccggcagaagcttataatccattatttatatatggaggcgtaggtctaggtaaaacacatttaatgcatgcaattgggcatcatgttcttagcaacaaacctaatgctaaagtcatttacacttctagtgagaaattcacaaacgaatttattaaatcaatacgtgataatgaaactgaagcatttcgtgaaaagtatcgtaaaattgatgttttattaattgatgatattcaattcattcaaaataaagaacaaacgcaagaagagttcttccatacttttaatgaattacatcaaaataataagcaaatcgttatttcaagtgatcgtccaccaaaagaaattgctaagctggaagaccgtcttcgctctcgttttgagtggggactaatagttgatatcacgccacctgattacgaaacaagaatggcaatattacaaaagaaaattgaagaagaaaatcttgatattccgccagaagctttgaattacatcgccaaccaaattcaatcaaatattcgtgaacttgaaggcgcattaactcgacttttagcgtactccaaattacaaggaaaacctattacaaccgaactcactgcagaagcgttaaaagatatcattcagtcacctaagtctaaaaagattacaattcaagatatccaaaaggtagttggtcagtattatagtgtaagaattgaagattttagtgccaaaaaacgtacaaagtcaattgcttacccacgacaaatagctatgtatctatctagagaattaactgatttttcattacctaagataggtgaagaatttggaggtcgcgatcatacaacagttatccatgcccatgaaaagattgcaaatgatatcaagtctgattctacatttaagcaagaagtagaaaacttagaaaaagaaattagaaatcagtaa

SEQ ID NO: 4130 - DNA, 1134 bp, Staphylococcus epidermidis
atgatggaattcacaattaaaagagattattttattaatcaacttaacgacacattaaaggctatctcacctagaacaactttgccgattttaacaggtatcaaaattgatgctaaagaaaatgaagtcattttaactgggtcagattcagaaatatcaatagaaatcactattccaaaacaagttgatggtgaagaaattgttgaaattacagaaacaggatcagttgtacttcctggtcgtttcttcgttgatattattaaaaaacttcctggaaaagaagttaaattatcaactaatgaacaattccaaacgttaataacatcaggtcattcagaatttaacttaagtggtttagatcctgatcaatatccattattacctgaggtatcacgagatgacgctattcaattgtcagttaaggtactaaaaaatatcattgcacaaactaattttgcagtgtccacctcagaaacacgaccagtacttactggtgtaaactggcttatacaagataatgaattaatatgcacagcaacagattcacaccgcttagctgtaagaaaattacagttagaagatgaatcagaaaataaaaatgtcatcattcctggtaaagctttatctgaattaaacaaaattatgagtgacagcgacgaagatattgatattttctttgcttctaaccaagtgttattcagagtggggaatattaatttcatctcacgtttacttgaaggtcattatccagatacgacacgtttattcccagaaaattatgagattaaattaggaattaacaatggagacttctatcatgcaattgatcgtgcatctttattagcacgtgaaggtggaaataatgttattaaattaagtacaggtaatgaattagttgaactttcatctacttctcctgaaattggtactgttaaagaagaagttaacgctaatgatgtagaaggtggaaacttgaaaatttctttcaactcaaaatacatgatggatgctttaaaagccattgataatgatgaagtagaagtagaattctttggtacaatgaaaccatttatcttaaaaccaaaagatgatgattctgtaacgcaattaattctgcctattagaacatattaa

SEQ ID NO: 4131 - DNA, 237 bp, Staphylococcus epidermidis
ttggttcaagaagttgttgtagaaggaaatatcactttaggtcaatttcttaaaactgaaggaatcatagaatcaggtggacaagctaaatggtttctacaggattttgaggttttaattaatggacaacgtgaaacaagacgtggcaaaaaattagaacacaacgaccgcattgatattacagatatccctgaagatacgggttcctttttaatcatccatcaaggtgaacaatga

SEQ ID NO: 4132 - DNA, 1116 bp, Staphylococcus epidermidis
atgaaacttaatacactccaattagagaattatcgtaactatgaacaggtgacattagattgtcatcccgaagtgaatatccttattggtgagaacgcacaaggaaagacaaatttacttgaatcaatttataccttagcgcttgctaaaagtcatcgtacgtcaaatgataaggaactcatacgtttcaagtctgattatgctaaaatagagggtgagctaagttatagacatggtacgatgccgcttacgatgtttataactaaaaaaggtaagcaagttaaagtaaatcatcttgagcaaagcagactaactcaatatattggacatttaaatgtcgtcttatttgcacctgaagatttaaatatcgttaaaggttcaccacaaatacgtcgacgattcatagatatggagttaggacaaatatctgctgtctatttgaatgatttagctcaatatcagcgtattctaaagcaaaagaacaattaccttaaacagttacaaattgggcagaagacagatacaacaatgttagaagtcttaaaccaacaatttgctgaatatgcactgaaggttacgttacgtcgagagcactttataaaggaattagaaacacttgcacaacccattcatgcaggtatcacaaatgatcgagagacactgacactcgattatgttccaagtttgaagttaagtaattatgaagccaatcaatctgagttaattgaagaagtattagcattgttaaatgacaatttacaaagagaaaaagaacgaggcgtatgtctctatggcccacatcgtgatgacttaagtttcaatgtaaatggcatggatgctcaaacgtatggttcacaaggtcagcaacgtaccactgcgctgtcaattaagttggcagaaattgaattaatgaatattgaagtaggagaatatccaatcttacttttagatgatgtcttgagtgagcttgatgattcacgtcaaacacatttgttaagtacgattcaacataaagtacaaacatttgtgacaactacgtcagttgaaggaatagatcatgaaataatgaataacgctaagttataccgtattagtcaaggtgaaatactaaagtaa

SEQ ID NO: 4133 - DNA, 1932 bp, Staphylococcus epidermidis
atggtgaatacattgtcagatgtaaacaacacagataattatggtgctggacagatacaagttttagaaggtctcgaagcggttcgtaaaagaccgggtatgtatattggttcaacttcagaaagagggttgcaccatttagtatgggaaattgttgataatagtattgacgaggcattagcaggttatgctagtcatattgaagttgtaattgagaaagacaattggattaaagttactgacaatggccgtggtattcctgttgatattcaagaaaagatgggacgccctgctgtcgaagttatcttaactgtacttcacgctggaggtaaattcggaggtggcggatacaaagtatctggcggtcttcacggtgttggatcttcagttgttaatgcactctcacaagatcttgaagtttatgtacatcgtaatggcacgatttatcatcaagcctataaacaaggtgtgccacaatttgatcttaaagaaattggcgatacagataaaacaggtacagctattcgattcaaagccgataaagaaatctttacagagacaacagtttataactatgaaacacttcaaaagcgtatacgtgagcttgctttcttaaataaaggtattcaaattactttaaaagatgaaagagaagaggaagttagagaagactcatatcattatgaaggcgggattaaatcctatgtagatttattaaatgagaataaagaacctcttcacgatgaacctatatatatccatcagtctaaagacgatattgaagtagaaattgcacttcaatataacagtggatatgcaaccaacttattaacgtatgcgaataatattcatacatacgagggtggtacgcatgaagatggctttaaacgtgctttaacacgcgttttaaatagctatggaacgcaaagtaagattattaaagaggataaagatagactttcaggtgaagatacacgggaaggtttaacagcagtcgtatcaattaaacatggcgatcctcagtttgaaggacaaactaaaacaaaattaggaaactctgaagtacgtcaagttgttgatagattattttctgaacactttgaacgtttcttatatgagaatccatctgtaggacgtattattgttgaaaagggtattatggcttcacgcgcacgtgtggctgccaaaaaagcacgtgaagttacgcgtcgtaaatcagcgttagacgtttcaagcttaccaggtaaattggcagattgttctagtaagaaccctgaagaaagtgaaattttcttggtagaaggtgactctgccggggggtctactaaatctggtcgtgattcaagaacacaagccattttacctttaagaggtaaaattttgaatgtggaaaaagcacgtttagatcgtatcttaaacaataacgaaattcgtcaaatgattactgcatttggtacgggtattggaggagaattcgatatatcaaaagcacgttatcataaaatcgtaatcatgactgatgccgatgttgatggtgcacatatacgtacgttattacttacattcttctatcgtttcatgagacctttaattgaagcgggctacgtttatattgctcagccgcctttatataaactaacacaaggaaaacaaaaatattatgtatttaacgatagagaactagacaagttgaaacaagaattaaacccgtcaccaaaatggtcaattgcacgttacaaaggtcttggtgaaatgaacgcagaccaattatgggaaacgactatgaatcctgaacatcgctctatgttgcaagtgagacttgaagatgcaattgatgcagaccaaacatttgaaatgttaatgggcgatgtagtagaaaatcgcagacaatttatcgaagacaatgcagtttatgccaacctagatttctag

SEQ ID NO: 4134 - DNA, 2682 bp, Staphylococcus epidermidis
atggctgaattacctcaatcaagaattaatgaacgaaatataaccagtgaaatgcgtgaatcattcttagactatgctatgagtgttatcgtttctcgtgcattacctgatgttagagacggattaaagccagtacatcgtcgtattctttatggtttaaatgaacaaggtatgacgcccgataaaccttataagaaatctgcacgtatagtcggggatgtcatgggtaaatatcaccctcatggtgattcttcaatttatgaagcaatggtaagaatggcccaagactttagttatcgttatccacttgtagatggtcaaggtaactttggctctatggatggtgacggtgcagccgcaatgcgttataccgaagcacgtatgactaaaataacattagaacttttacgtgatattaacaaagacacaattgattttattgacaactatgatggtaatgaaagagagccgtcagtcttacctgcacgtttccctaacttactagtaaatggtgcggcaggaattgccgtaggtatggctacaaatattcctccccacaatttaactgaagttattgatggtgtgctcagtttaagtaagaatccagacatcacaattaatgagctgatggaagacatacaaggtcctgattttcctacagctggtttagtactagggaaaagtggtattcgtcgagcttatgaaacaggtcgtgggtcaattcaaatgcgttctcgtgctgaaatagaagaacgtggtggtggccgtcaacgtattgtcgtaacggaaatacctttccaagtcaataaagcgcgtatgattgaaaaaatcgcagagttagttagagataagaaaatcgacggtattacagatttacgtgatgaaacaagtttgcgtacaggtgtaagagtagttattgatgtacgtaaagatgcaaatgcgagtgttattttaaataatttatataaacaaacgccattacaaacatcatttggtgtgaatatgattgctttagtgaatggtagacctaaactaatcaatttaaaagaagcacttattcattacttagaacaccaaaaaacagtggttagacgacgtactgaatataatcttaaaaaagcaagagaccgtgcccatattctagaaggtttacgaatagcactagatcatattgatgaaattatcacaacaattcgtgaatcggacactgataaaattgcgatggcaagtttacaagagcgttttaaactaactgaacgtcaagctcaagcaattttagatatgcgtttaagacgtttaactggattagaaagagataaaatagaatctgagtataatgaacttctagaatatattaaagagttagaagagattttagctgatgaagaagtactattacaattagttcgtgatgaattgactgaaattaaagagcgtttcggcgatgaacgtcgcactgaaattcaattaggtggtctagaagatcttgaagatgaagacttaatccctgaagaacaaattgttattacattaagtcataataactatattaaacgtttaccagtatctacatatcgttctcaaaatcgtggtggtcgtggcatacaaggtatgaacacgttggatgaggacttcgttagtcaattggtaacaatgagtacacatgatcatgttctgttctttacgaataaaggtcgtgtatataaactcaaaggttatgaagttcctgagttgtcacgtcaatccaaaggcatacctattattaatgcgattgaactcgaaaatgacgaaacaataagtacgatgattgcagttaaagaccttgaaagtgaagaagattatctcgtatttgcgacaaaacaaggtatcgttaaacgttcatcattaagtaacttctcccgtattaacaaaaacggtaaaattgcaattaactttaaagaagatgatgaattaattgcagtacgtctaacaacaggtaatgaagatattcttattggaactgcacatgcatcattaattagattctctgaatctacattacgcccattaggccgtacagcagcaggtgtgaaaggtatttctctacgtgaaggggatactgtcgtaggtcttgatgttgcagattcagaaagtgaagatgaagtattagtagttactgaaaatggttacggtaaacgtacacctgttagcgaatatcgtttatcaaatcgtggtggtaaaggaatcaaaactgcgacaattaccgagcgtaatggtaacatcgtttgtatcacaactgtaaccggtgaagaggatttaatggttgtaactaacgctggtgttattattcgtcttgacgttcatgatatttctcaaaatggacgtgcagcacaaggtgtacgccttatgaaactcggagatggtcaatttgtttctactgttgctaaagtaaacgaagaagacgataatgaggaaaatgcagatgaagcgcaacaatctactactactgaaacagcagatgtagaagaggtagtcgatgatcagacaccaggcaatgcgattcatacagaaggtgatgcagaaatggaatctgtagagtctcctgaaaatgatgatcgtattgatattagacaagattttatggatagagtgaatgaagatatcgagagtgcttcagataatgaagaagatagtgatgaataa

SEQ ID NO: 4135 - DNA, 816 bp, Staphylococcus epidermidis
atgaaaacgttagattctgttaatattcctataagaaaagacgaaacacataaaggtgactatggtaaaattttattaatcggtggatcagccaatatgggtggcgcaatcatgcttgctgcacgcgcttgcgtttatagtggaagtgggctcattactgtagcaacacacccaaataatcatgctgcgctacattctcgttgtcctgaggcgatggttatagatattaatgatactaaaatgctcacaaaaatgattgaagcaactgatagtatccttattggcccaggtcttggagtagatttcaaaggtaataatgccatcacgtttttacttcaaaatatacaaccacatcaaaatttaattgttgacggagatgctataacaatattcagtaagttgaaacctcaaattcctacatgtcgtgttatattcaccccacatcaaaaggaatgggagcgtttgagcggtatacctattgaagaacagacatatgaacgtaaccttgaagcggtagaacgtattggcgcgacggtagtattaaaacaacatggtacggaaatctatttctgcaatgatgatgtctataaattacctattggcacacctgctatggctacaggtggtatgggtgatacacttgcgggcatgattacaagcttcgtaggccaatttgataattttaaagaagctgttacaagtgcaacttacatgcatagttttatcggtgaaaaattatctgacacaatgtatgttgttccaccttcacgtctgattagtgaaataccgtatgtgatgaaacaacttgaaggttaa

SEQ ID NO: 4136 - DNA, 1287 bp, Staphylococcus epidermidis
atgttagacattcgtttatttagaaatgaacctgagaaagtgaagagcaaaattgaattaagaggcgacgatcctaaagttgtcgaccaagttttagaattagatgaacaacgccgtgaattaatcagtaaaactgaagagatgaaggcgaaaagaaataaagtgagcgaagaaatagctcaaaagaaacgtaataaagaagacgctgatgacgtcattgctgagatgcgtcatttaggtgatgaaattaaagatatcgataatcaacttaatgaagtagataataaaattagagatatcttaattcgtattcctaacttaattaatgaagatgtacctcaaggtgcttctgatgaagaaaacgttgaagttaaaaaatggggtacgccacgtgattttgaatttgaacctaaagcgcattgggatttagttgaagaattaaaaatggctgactttgaacgtgctgctaaagtatctggtgctcgtttcgtatacttaactaaagatggcgcattacttgaacgtgctttaatgaactacatgttgacaaaacatacaacgcaacatggttatactgaaatgatgacacctcaattagtgaatgctgatacgatgtttggaacaggtcaattacctaaatttgaagaagatttatttaaagttgaaaaagaaggcttatatacgattccaactgcagaagtacctttaacaaacttctatagagatgaaattattcaaccaggtgtactacctgaattatttacagctcaaactgcatgtttccgtagtgaagcaggatcagctggtagagatactagagggttaattcgtttacatcaatttgataaagttgaaatggttcgtattgtacaacctgaagattcttgggatgctttagaagaaatgacacaaaatgctgaagctattcttgaagaattaggtttaccataccgtcgtgttatcttatgtactggcgatattggtttcagtgctagtaaaacatatgatttagaagtttggttaccaagttacaatgattataaagaaatcagttcttgctctaactgtactgatttccaagcacgtcgcgcaaatatcagattcaaacgtgatgctgcttctaaaccagaattagtacacacattaaatggtagtggtttagctgtaggtcgtacatttgcagccatcgttgaaaactatcaaaacgaagatggtacattaacaattcctgaagcattagtaccatttatgggtggcaaaactaaaattgaaaaaccaatcaaataa

SEQ ID NO: 4137 - DNA, 984 bp, Staphylococcus epidermidis
ttgaattggcaacgtaaatgtatactaactactttgttggttttaagtagtttatttttagtattttcgactatcacatatgcgagtgaacgtgattttaaagacagtcttaaaatcactacacacaacgtgtatttcttacctactgctatctaccctaattggggacaatctcagcgcgctgatttaatttcaaaagcagattacattcaaaatcaagatgtcgtgattctaaatgaattatttgataaaaaagcttctaaaagattgttaacacgtctacattcacagtacccctatcaaacacctatcgttggtaagggtacagaaggttggcaaaatacttctggtacttatagaaaaattaaaaaagtaagtggtggcgttggtattgtgagtaaatggcctatcgtacaacaagaacaacatatttataaaaaaggttgtggggctgatatggcaggtaataaaggctttgcctacattaaaattaataagaatggcaaataccaccatattatcggaacacatctacaagctgaagatccaacatgctttaaaggaaaagataaggacattagacagagtcaaatgagtgaaattaaacagtttatcaaagacaagaatatccctaaaaatgaacccgtctatatcggtggtgacttaaatgtcattaaagattcagatgaatatcaacaaatggcaaataacttaaatgtttcattacctactcaattcgatggtaatgcatatagttgggatactagcagtaatagtattgcgaaatataattatcctaaattagaacctcaacacttagattatattttattagatcgtgaccatgcacaaccaagctcatggcataatgatacacatagagtgaagtcaccagaatggtccgtgaaatcttggggtaaaacatacaaatacaatgattactcagatcattacccactctctggctatgcatcaaatgaatag

SEQ ID NO: 4138 - DNA, 693 bp, Staphylococcus epidermidis
atgactcaccttacgtttaaacaaggtgtgaaagagtgtattcccacgttacttggttatgcaggtgtaggactttcgtttggaattgtggcagcctcccaaaatttcagtgttttagaaattattttattgtgtctgattatttatgctggtgcagcccaatttattatttgtacattagtgattgcaggcacccctatttctgcaattgtgcttacaacacttatcgttaactctcgaatgttcttattaagtatgactttagcacctaattataagcaatatggattttggaatagggtagggcttggaacgttattaacagatgaaacttttggcgttgctataacgccatatgtcaaaggtgaaaaaattaacgatcgatggctacacggactaaatattaccgcttacttattttggactgtttcctgtgtaatcggtgccattttcggagagtatatttcaaatcctgatgcgcttggtctagactttgccattatcgcaatgtttatttttttatgtatatctcaatttgaagggattaagaagtcacgattgagaatatatattgtactcattgtatgtgtgattgtgatgatgcttcttctaagttcaattctaccttcatacgtagcaattttaatagccgcaattgttgctgcattgttaggggtggtgatgcacaaatga

SEQ ID NO: 4139 - DNA, 330 bp, Staphylococcus epidermidis
atgacgacagatttacatacattagtacttattattttatgtggcgtggtcacattactcattcgagttattccatttgttatgatatcgcgtgtcaacttaccagcaattgtaattaaatggctttcttttattcctatcactttatttacagctcttattatagatggtgtaattcaacaacatgatcatgcatttggttatacgcttaatttaccttatattattgcaatcgtgccaactgtgatgctcgctattttcacacgtagtctaacagtgacaattctcggaggtatatttgtcattgcttgcttacgtttaatcttttaa

SEQ ID NO: 4140 - DNA, 969 bp, Staphylococcus epidermidis
atgacgaattacacggttaatacattagaactaggtgaatttataactgaatctggtgaaacgattgatcatttacgtctacgttatgaacatgtaggacttcctggtcaaccccttgtcgttgtttgtcatgcacttactggcaatcatttaacatacggtacggatgcgcaacctggctggtggcgagaaatcattgatggtggctacattccagttcatgattatcaatttcttacattcaatgtcattggaagtccatttggttcgagttctaaattaaatgatgacaacttcccagaacatttaacattgagagatatcgttagagctattgagttaggtatacaagcattagaatttaagaagattaatattctcattggaggtagtttaggtggcatgcaagcgatggaattgctttataatcgtcaattcgaggtggaaaaagcaatcatattagctgctactgataaaacgtcctcctatagtcgtgcttttaacgagattgcaagacaagctatacatataggtggtaaagaaggtttaagtatcgcacgtcaactcggcttcctcacgtatcgatcgtctaaaagttatgatcaacgttttacacctgatgaagtagtgagctatcaacaacatcaaggtgataagttcaaagaatatttcgatttaaattgttatttaacactgctagacgtcttagatagtcatcatttagatagagggagagatgatgttgatgaagtctttcaatcgttggaaacgaaagtactaacaatgggctttattgatgatttactttatcctgatgatcaagtaagagctttaggagaacgttttaaatatcatcgtcatttcttcgtaccagataatgttggacatgatggttttcttctaaattttaatgattgggcgcctaatttatatcatttcttaaatctgaaacaattccgacgtaaatag

SEQ ID NO: 4141 - DNA, 912 bp, Staphylococcus epidermidis
gtgttttcaaaaatacaacctaaagcaactattttagcaattatttcattattagtagtcgctttagtaacgcatgtattacctgttctcggcttgattttatgtttatttgcaacgattcccggtattgttttatggaatcgttccatacaatcattcggaattagcgcattagtaacagttgtacttacaacattattaggtaatacatttgtcttaagtatgatggtcttaatcttattattaagtgcgattatcggacaattacttaaggaaagaacatctaaagaacgaattctttatatttcaacagcttcattaagtttagttacacttattggatggatgttattacaaacattcgataaaattccgacggcagctgtattaattaagccttttaaaaatgcaatgcatgaggctttcttaacaagtggaatcgattcaaactatagacagattcttgaggaaagtttccgacaaatgacggtccaactccctagttttctaattatagttattttcatatttgtcttaattaatctgattattacatttccaattttacgcaaatttaaagtagcaacacctatttttaaacctttattcgcatggcaaatgagccgtaatttactatggttttatcttatagtacttatttgtgtcatgattgcaagtgaaccaagtacgttccaaagcatcgtgttaaactttgatgttgtgttatcattagtgatgtacatccaaggattaagtgtcattcacttctttggtaaagctaaaagatggccgaacttcgcaacaattcttgttatggtagtagggacacttcttacaccggcaacgcatattgttggattacttggggtaattgatttatgtattaatttaaagaaaataataaaaaaatga

SEQ ID NO: 4142 - DNA, 1968 bp, Staphylococcus epidermidis
atgaaccgtcaatccactaaaaaagctttgctcataccgtttattttaatggtactcactgccatagcacttgtcgtcgtgtggtttatttttaaccaattagtggcaggtattgctacagctatactcattgtgatgattattattagtggcgtgttattgagaaaagcatttctaaaaatggataattatgtggatgatttaagtggtcacatctcggcaagtagtaataaggcgattaagcacttgcctatagggatgattgtgttagatgaagataatcacattgagtggatgaaccaatttatgacagatcacattgaaacgaatgtgatttctgaaaatgtcaatgaagtcttccctaacatattaaaacaactggaaaaagttcaagaagtagaaatagaaaacaacaattattactatcatgtacgatattcagaaaacgagcattgtttatacttctttgatatgactgaaactgaacgtacaaatgaactatatgaagattccaagccgattattgcaacaatatttttagataattacgatgaaatcactcaaaatatgaacgatacacaacgttctgaaattaactctatggtgacacgtgtgattagtcgttgggcacaagattacaatatttacttcaaacgttacaattcagatcaatttgtagcttactttaaccaaaaaatattggctgaactagaagattctaattttgaaatcttaagccaattaagagagaagagtgtgggttaccgcgcacaactaacattaagtattggtgtaggtgaaggcacggagaaccttattgatttaggtgaattatcacaatctggtttagacctcgcgttaggtcgtggtggtgaccaagttgcaattaagaatatgaacggcaatgtaagattctatggtggtaagactgaccctatggaaaaacgtacgcgtgtacgtgcgcgtgtgatttcacatgccctcaaagatattcttactgaaggcgataaagttatcgtcatgggacataagcgaccagatttagatgctataggtgcagctatcggagtttcgcgctttgcatcaatgaataatttagaggcatttatcgttcttaatgattctgatattgatccgacattacgtcgtgttatggatgagattgataagaaaccggaactaaaagaacgctttgtaacatcggatgaggcttgggatatgatgacttctaagacgactgtcgttgttgtagatacacataaacctgaaatggtcttagatgaaaatgtcttaaataaagcaaaccgcaaagtggtcattgatcatcatagacgtggcgaaagctttatttcaaatccattacttgtgtatatggaaccttacgctagctcaactgctgagctcgtaacggaattactagaatatcaaccaactgaacagagattgactcgtttagaatcaactgttatgtatgcaggtattatagtagatacaagaaactttacgttaagaacaggttccagaacatttgatgctgcaagttatttacgtgcacatggcgctgatacaatcttaacgcaacatttcttaaaagatgatgtcgatacgtatatcaatcgttcagaattgataagaacagttaagatacaagatcaaggtgtagccattgcacatggttcagatgataaaatttatcatcctgtaacggttgcacaagctgccgatgagttgttaagtttagaaggcattgaagcatcttatgtagtagctaaacgtgaagacaacctgattggtatctcagcacgttctttaggttccataaatgttcaattaacaatggaagcgttaggtggcggtggccatctgacaaatgctgcgacacaaataaaaggtgcgacaatagatgaagcaatagaacaattacaacaagcaattacagaacaaatgagtaggagtgaagacgcatga

SEQ ID NO: 4143 - DNA, 447 bp, Staphylococcus epidermidis
atgaaagtaattttcacacaagatgttaaaggtaaaggtaaaaaaggcgaagttaaagatgtaccagtaggttacgcaaataacttcttacttaaaaataaatatgctgtagaagcaactcctggtaacttaaaacaattagaacaacaaaataaacgtgctgaagcagatagacaacaagaaatcgatgatgcaaaagcacttaaagaacagttaaaagatatcgaagttgaagtatcagctaaaacaggtgaaggcggcaaactatttggttcaatcagtacgaaacaaattgccgaagcgctaaaaaaacaacatgatattaaaatcgacaaacgtaaaatggacttaccgcatggtattcatgcactaggatatactaatgttccagtgaaattagacaaagaagtcgaaggtacaatccgtgtgcacactgtagaacaataa

SEQ ID NO: 4144 - DNA, 1401 bp, Staphylococcus epidermidis
atggatggaatgtatgagcaaaatcaaatgccacatagcaatgaagctgaacaatctgtcttaggtgccattattatagatccagaactcattaatactactcaggaagtcttgcttcctgagtcgttttatagaggcgcccatcaacatatttttcgagcaatgatgcacctaaatgaggataataaggaaattgatgttgtcacattgatggatcaattatcaagtgaaggtagcttaaacgaagcgggtggccctcaatatcttgccgaactatcgacgagtgtaccgacaacgcgaaacgttcagtactatacggatatcgtttttaaacatgcgttgaaacggaaacttattcaaaccgctgatagtatagcgaatgatggctataatgatgaattagaattagatacgattttaagtgacgccgaacgacgtattttagaactatcttctacaagagaaagtgatggttttaaagatattagagatgtcttaggacaggtatatgaaaccgcagaagaactcgaccaaaatagtggtcaaacaccaggtattccaactggttatcgtgacttagatcaaatgactgctggttttaaccgtaatgatttaatcattctagcggcacgtccttcagtaggtaagactgcctttgccttaaatattgcgcaaaaggttgccacacatgaagatatgtatactgtcggtatcttctcacttgagatgggtgccgaccaattggcaacacgtatgatctgtagttctggtaacgttgattccaatcgtttaagaactgggacgatgactgaagaagattggagtcgctttacgattgcggtaggtaagctatcacgaactaaaatcttcatagacgatacgccaggtatccgtatcaatgatttacgttctaaatgtcgtcgactcaaacaagagcacggtcttgatatgattgtgattgattatctacaattgattcaaggaagcggatcacgtttctcagataaccgtcaacaagaagtttcagagatttcacgtacacttaaggcgattgcacgtgaattagaatgtccagttattgcactgagtcagttatcacgtggcgttgaacagcgacaagacaaacgtcctatgatgagtgatattcgtgaatctgggtctatagaacaagatgccgacatcgtcgctttcttatatcgtgatgattattataatcgtggtgaaggtgatgaagatgatgacgatgctggttttgaaccacagacaaatgatgataacggtgaaattgaaatcatcatcgccaagcaacgtaacggtccaacaggtactgtgaaacttcactttatgaaacaatataataaatttacagacattgattatgctcatgcagatatgtcataa

SEQ ID NO: 4145 - DNA, 1284 bp, Staphylococcus epidermidis
atgtcatcaatcgtagtagttgggacacaatggggagacgaaggtaaaggtaaaataacagactttttagcagagcaagcagacgtaattgctagattttctggtggtaacaatgcgggacatacgattcaattcggtggagaaacttacaaattacacttagtgccatcaggtatcttttataaagataaattagctgtaatcggtaacggtgtagttgtagatccagtcgcattattgaaagaattagatgggttaaatgaacgtggcatttcaactgacaacctacgcatctcaaatcgcgcacaagtcattttaccttatcacctagctcaagacgaatatgaagaacgtcgtcgtggcgataataaaattggtacaacaaaaaaaggtatcggcccagcatacgtagataaagcacaacgtatcggtattcgcatggcagacttattagaaaaggaaacattcgaacgccgacttaaagaaaatattgaatataaaaacgcatactttaaaggcatgtttaacgaaacttgtccaacattcgatgaaatctttgacgaatattatgctgcaggtcaacgtttaaaagactatgtgacagacacagctaaaattttagacgatgcaaatgtggctgatgaaaaggtattattcgaaggtgcacaaggtgtcatgttagatatcgaccatggtacatatccattcgttacatctagtaatccagttgcaggtaacgtgacagtaggtacaggtgttggcccaacatcagtgtctaaagtgattggtgtatgtaaatcatatacatctcgtgtgggtgacggtccattcccaactgaactctttgatgaagatggccaccatattagagaggtgggtcgtgaatatggtacaactactggacgtccacgtcgtgtaggttggttcgactcagttgtattacgtcattcacgtcgtgtaagtggtatcacagatctttcaattaactcaatcgacgttttaacaggattagacacagttaaaatttgtactgcttacgaattagatggtgaaaaaattactgaatacccagcaaacttagatcaattaagacgttgtaaacctatcttcgaagagcttccaggttggactgaagacattacaggttgccgtagtttagatgaactccctgagaatgcacgtaattacttagagcgtatttcagaattatgcggtgtccatatttcaatcttctcagtaggtccagaccgtgaacaaacgaatttattagagcaactttggtag

SEQ ID NO: 4146 - DNA, 702 bp, Staphylococcus epidermidis
atggctagaaaagttgttgtagttgacgatgaaaaaccaattgctgatattttagaatttaatttaaaaaaagaaggttacgacgtatattgcgcttatgatggtaatgacgcagtagatttaatctatgaagaagaaccagatatcgtcttacttgatatcatgttacctggtagagatggtatggaagtatgtcgtgaagtgcgtaaaaagtatgaaatgccaattatcatgttgacagcgaaagattctgaaattgataaagtattaggccttgaattaggtgcagatgattacgtaactaaaccatttagtactcgtgaactcatcgcacgtgtgaaagcgaacttacgccgtcattattcacaaccagctcaagaagtaagtggtgcgacaaatgaaattacaattaaagatattgtgatttatccagatgcatattcaattaaaaaacgtggagaagacattgaattaacgcatcgtgaattcgagctattccattatctttctaaacatatgggtcaagtcatgacacgtgaacacttactacaaacagtgtggggttacgattatttcggtgatgttcgtactgtggacgtaacaattcgccgtttaagagaaaaaattgaagatgatccatctcatccagaatacattgtgacacgtagaggcgttggatacttcctccaacaacatgattag

SEQ ID NO: 4147 - DNA, 1833 bp, Staphylococcus epidermidis
atgaagtggcttaaacaactacaatcccttcacacgaaactcgttattgtttatgtactactcattattattggtatgcaaatcatcggtttgtattttacgaatagtttagaaaaggaattactcgataacttcaagaagaacataacacaatatgcgaagcaattagacgtcaatattgaaaaggtttataaagataaagataaaggttcagtcaacgctcaaaaggatatccaagaccttttgaatgaatatgcgaatcgtcaagaaataggagaaatacgctttattgataaagaccaaatcatcatggcaacaaccaagcagtctaaccgtggtcttatcaatcaaaaggttaacgacggttctgttcaaaaggcgctctccttagggcaaacgaatgatcatatggttcttaaggattacggaagtggtaaagagcgtgtttgggtatataatataccggttaaagtcgataaacagacaatcggtgatatatacatagaatcgaaaattaatgatgtatacaatcagctgaacaacattaatcagatattcatcgtagggacagcgatatcactattcattacagtgatactaggattcttcattgcacgaacgattactaagccgataaccgatatgcgtaaccaaaccgtcgagatgtctaaaggtaactacacgcaacgagtgaagatatacggtaacgatgaaatcggtgaactcgcacttgccttcaataacttatcgaaacgtgtccaagaagcacaagcgaatacagaaagtgagaaacgtcgtctagattccgttatcacacatatgagcgatggtattcttgcgacagatcgccgtggacgtgtacgtattgcaaacgacatggcgctgaaaatgctcggtctcgcgaaagaagatgtcatcggctactacatgcttggtgtccttaacttagaaaatgaattctcattagaggaaattcaagaaaatagtgattccttcttgttagatattaacgaagaagaaggcattattgcacgcgtaaactttagtacgattgtacaagaaacaggtttcgtgacaggttacattgccgtattacatgatgtcactgaacaacaacaagtcgaacgtgaacgtcgcgaattcgttgcgaatgtttcacacgaattacgtacaccactgacatcgatgaatagctatatcgaagcacttgaagaaggtgcttggcaagataaagaattggcaccatcattcctatctgtcacacgcgaagagactgaacgtatgattcgtttagtgaatgatttacttcaattatctaaaatggataatgaatcagatcaaattacgaaagaaattatcgacttcaatatgtttatcaacaaaattattaaccgtcatgaaatggcagcgaaagatacaacattcgtacgcgaaattccgcaacaaaccatctttgctgaaatcgatccagacaagatgacacaagtatttgataatgtcattaccaatgcaatgaaatattcgcgtggcgagaaacgtgttgagtttcatgtgaaacaaaatgcactttacaatagaatgacgattcgtattaaagataatggtattggaataccgattaacaaagtagataaaatatttgatagattctatcgtgtagataaagcacgtacacgtaagatgggtggtacaggacttggtctagctatttccaaagagattgtcgaagcacataacggtcgaatttgggctaacagtgtagaaggacaaggtacgtcaatctttattacacttccttgcgaaatcattgaagacggtgattgggatgaataa

SEQ ID NO: 4148 - DNA, 1338 bp, Staphylococcus epidermidis
atgaataacaaagaacatactaaatcaattattttagtcctactcgtcttgatgagtatcgttttgacatatatggtctggaacttttctccagacctttcaaatattgataacacggataatagtaaaagtgataaacctaaaccacttactaaaccaatgactgcagaaatggaaggaacaatcacaccatttcaaatcgtgcattctagagatgataaatctcaaggaacagtggcatcaggtgcagtcttagataagatgattcaacctttaaagaatcaagaagttaaatctgtatcacatctgaaaagggaacataaccttgttatacctgaactaagcaacgactttatcgtcctagatttcacttatgatttgccactttcaacatatttaagtcaagtactcgatatcgatgcgaaagtgccgaataactttaattttgatcgcctcctcatcgatcaagatcataataaccacgtcgtattatatgcgattagcaaagaccgtcatgaagtagttaaacttaagacaacgatgaaagggaataatgttgataaagcttttaaaagtatcgaacctgacatgcagccctatacggaaatcatcacgaataaagatacaatcgacaaagcaacacacgtgtttgccccaagcaaaccgaaggacttaaagacgtatcgcatggtcttcaatacgattagtgttgaacgcatgaactcaatactatttgatgattcaacgattgttcgtagctctcaaagtggtacgacaacatacaacaacaatactggcgtcgccaactacaacgataaagatgaaatgtatcattataagaatttatctgaagatgcgaaaagttcaagcaacatgcaagaaaccatcccaggcacatacgagtttataaatagtcatggtggcttcttaaatgaagattatcgactatttaagactgataatagaacggggaaactcacttatcaacgattcctcaacggtcacccaacgtttaataaacagaacttcaatgaaatccaagtcacatggggggataaaggcgtttacgattatcaacgttcgctacttaagacggacgtcacactgaacagtgaagaatctaaatccgtccctaccgttgagtccgtgcgttctgcattagccaaccatcctgatattgattttgaaaaggtaacgaacattgcgattggttatgatatggacgacaaggcaaataacgaagatattgaagttcaacgtaactgtgaattaataccacgttggtttgtagaatacgatggcaattggtatgcctataaagatgggaggcttgaataa

SEQ ID NO: 4149 - DNA, 792 bp, Staphylococcus epidermidis
atgaactggaaacttacgaagacacttttcattttcgtttttattcttgtgaacatctttttagtcatcgtttatattgataaagtgaataaatcacaagttaatgactcggaaaaggtaaacgaagtcaactttcaacaagaagaaattgacgtgcccaaggatgtcttgaatcaaagcgtgaaagatactgaacttgaacaaattactgcccgttcaaagaatttctcaagttatgcgaaagatcattcaaacctgcaaacgtctgattccgataaaacacttgaaggagatattgataaaggcgttcaagtgagtgataagaacttacaagatatcaaagaatacattgcaaagaaaatctttaacggtaaagagtatcaattaagtgatttaactaaagataaagtcacttacgaacaaacatataaagattatccaattatgaataatagtaaagcacgcctaacatttaatttgagcgatggcaaggcgacaagctataagcagacagcgatggatgatatacaagtagctaaaggttcaaatagtacgaagaaacaagtcattacgccacgtaaagctattgaagccctttattacaacagatatctaaaacaaaatgatcaagtgctagacgcacgcttaggctattattcagtggtaaaggaaacaaacgttcaattactccaacctaactgggaaattaaagtaaaacataaaggcaaggatcaagttcaaacctattatgtagaagctgcaaatcataatccgaaagtgattgattattag

SEQ ID NO: 4150 - DNA, 801 bp, Staphylococcus epidermidis
atgagtcgcttgatacgtatgagtgtattagcaagtggtagtacaggtaacgccacttacgtagaaagtgagaaaggtagcctactcgtcgatgtaggtttaactggcaagaagatggaagaacttttcagccaaatcgacagaaatattaaggatttaaacggaatattagtgacacatgaacacatcgaccatattaaaggtcttggtgtcttagcacgtaaatataaacttccgatttacgcgaatgagaatacatggaaagcgatagagaagaaagacagtcgcattccaatggatcagaaatttatctttaatccatatgaaacgaaatctcttgcaggatttgatatagaatcatttaacgtgtcacatgacgcgattgatccacagttctacatcttccacaataattataagaaattcacgatgattactgacacaggttacgtttcagatcgtatgaaaggtatgattcaaggtagtgatgtatttatgtttgaaagtaatcacgacgtcgatatgttacgcatgtgtcgttatccatggaagacgaaacaacgtattttgagtgatatgggtcacgtatccaatgaagacgcgggccttgcgatgagtgatgtcattacaggtaatacgaaacgtatatacctctctcatttatcacaagacaataatatgaaagacctcgcacgcatgagtgttggacaagtgctcaacgaacacgatatcgatacagagaaagaagtgttgctttgcgataccgataaagcacaagccacaccgatttatacactataa

SEQ ID NO: 4151 - DNA, 480 bp, Staphylococcus epidermidis
atgaagattactatcgtatcagttggaaaactaaaagaaaaatattggaagcaagctattgcagaatatgaaaaaagattaggaccttacacgaaaatcgaattaatagaagtaccagatgaaaaagcacctgaaaatatgagcgacaaagaaattgaacaagtcaaagaaaaagaaggccaacgtctactcaataagattaaaccccaatctacagtaattacgttggaaatcaaagggaaaatgttgtcttcagaaggactcgctaaagaactacaaacacgcatgacacaaggtcaaagcgactttacatttgtcataggtggctccaatggtttacaccaagacgtcttacaacgcagcaactacgcactatcattcagcaacatgacctttccacaccaaatgatgcgtgtcatattgattgaacaaatttatcgcgcatttaagatcatgagaggcgaaagttatcataagtga

SEQ ID NO: 4152 - DNA, 630 bp, Staphylococcus epidermidis
atgaatttaagaggtcatgaaaatagacttaaatttcttgcgaaatatgatgtgacacctatatcacatttaaaattattagaaggtcaaaagaaagacggtgaaggcggcatactgacagatagctattactgtttttcatacagcttaaaaggtaattctaaaaaagttttaggtacgtttaattgtggttatcatattgctgaagatttactaaaattatcaaatcaagataaattacctttatttaacccgtttaaagtaattaatgaaggtaatcaattgcagggcgtaacgaataaaggtaatttaaatattaataggcaaagaaaacagtataatgaagtggctttacagctttcaaatgctattaatttaatcataatttgttatgagggtaatattaaagaaccactttcaacgataaaatacgaaaccgataaatattattatagtgaaccatatgatagtaaaataaaagcagtaaatactattataggtaatttgtttgataagaaattagttgagaagatatctgaaattaatgtaaatcagaaaattagaaaatttgatttttcattactcactaataaaattaaaaaatataatatacaaaataattttgaataa

SEQ ID NO: 4153 - DNA, 117 bp, Staphylococcus epidermidis
ttggacaaagtaagtaatcagttaaacaatgaaaatattgaagttatgaaaaagataattgaaaaagtagcagaagcaaatagagttatcgctaaatcttctttaagaaaaaattga

SEQ ID NO: 4154 - DNA, 363 bp, Staphylococcus epidermidis
atgaaaagagtttcttattcagtagaaacaaagtataaagcagttgaaatgaaagtagcaggattttcaacaaaagaaattatgaaagaattaaatattagaaatagaacacaagtgaaaacttggtggcgatggtatcgaaatagggaaagttatagattttcacaacaagttggtaaacaatatacctacggtaaaggattagaagagctgtcagaagtagaacaattaaaattagaaaataagagaaaagatatagaattggatattttaaaaagtacaaggcattggaaaggaagtggtaccaacagtagtcatagatttagtgaatcaattaaaagtaaaatattcaacaaaaactag

SEQ ID NO: 4155 - DNA, 234 bp, Staphylococcus epidermidis
atggaacatatcaacaaagataaaaatgatgaaaaaagtaaagagctagataaaagattaggaattaatggttattacaaaactgatttagatttagagattgaaaaagaactactagaatcgccaaatgaatccagtagttcagtagctaaacgtatacgtataataagtatgattcctttaattattttattaattttagcatttattcggataatcagaactttcatatag

SEQ ID NO: 4156 - DNA, 3012 bp, Staphylococcus epidermidis
ttgttgaaaaagaaattagactttatacctaacaaattgaataagttttcaattagaagattcacagtcggtacggcatctatattagtagggtctactctattatttgggattggaaatgaggcgcatgcagcagaaaagaatcaagaattaaatactacagcaaatgtagctgatagtgatgtaggtgaagcaccatcaaaagaagaagcaccaagtaatgaagcaacaaatgaagcgctatcaaaagaagaagcaccaagtaatgaagcaacaaatgaagcgccgtcaaaagaagaagcaccaagtaatgaagcaacaaatgaagcaccatcaaaagaagaagcaccaagtaatgaagcaacaaatgaagcgccatcaaaagaagaaacaccaagtaatgaagcaacaaatgaagcgccatcaaaagaagaaacaccaagtaatgaagcaacaaatgaagcgccgtcaaaagaagaagcaccaagtaatgaagcaacaaatgaagcgctatcaaaagaagaagcaccaagtaatgaagcaacaaatgaagcgccatcaaaagaagaaacaccaagtaatgaagcaacaaatgaagcgccatcaaaagaaaagagcacagacaattcgacttcaaatccagaggttgattccgaagtattagataattctaagcaaggtacagataatgataattcatctaatcatagcgaggataatattgtgacttatgcagaaccaactgcattaacaaatacccgttcagttgattcaccttctagagtttcatctgataactcacaagctcaaaagcaaggtaaaaatgttaatgattcaattaaggtcaattctgttgatactgataaagagtatgttgaaccgaacaatggacaaggtttttcaacaaatgtatcattcgaagttgacggtaaagttaacaaaggtgattacttcacagtagatatgccggaatatgctgattttaatggtattgcagactataaagcagcaaataataaaatttatccaactatcaatgatggggagcaagttgtagcaaacggtgtttacgatacagaaactaagaaattagtgtacacttttactgactatgtaaataagaaagataatattaaaggtcaatttgaaattcctcaatttattgatagaaaaaatgctaaaacaagtggagattatgacttaaactataatattgcagacaaaactgtttctaaaccaatgaaaattgtatacaacaactacgatgagggacatgtagttgcaaatacaagttcattaatcactaaagctgatttattcaatgtaggatcacatgattatactcaatatatctatgtaaatccaaaatctgaagatagttataatacacgtttaacaatccaaggttatcaagaagatttaaataatagtagtactttactgaatccaaaagactctaatattgaaatattagatgctaaatcttctgacaatattactccaagtttctatgttaatgatagtgactttgagaatgttactaatcaatataagattgatcaaataggtgataagaaagcacaaattgactttgggcatattgaccatccgtatatcgttaaagttacatctaaaattgatccaaactctagcaaagatttacgtacacgtgtaataatggaaaatgagaacgctgaaggtaccaaagacttttatgtccatgataatactgttgaacgattaggagcaaacggagttgctactggcaatgaaaaactttataacctaggtgactatgtttgggaagatacaaataaaaatggtatccaagacgaagatgaacatggtatcgagggtgtagaagtatcgcttacacgtccaaatggtacagtagaaactacaacgactaattctgaaggtaagtatgaatttaatgatttacaaaatggtgattatgttattaatttcaaaacacctgaaggatacacagcaactaaagcttatgaaggtaataatgcagaagtcgattctaatggcttaagtacggttggtacaattaaagatgctgacaactggactttagatagtggattctacaaaacgccttctaaatacagcttaggtgattatgtatggtacgattctaataaagatggttaccaagacaatgatgaaaaaggtattaaaggtgttaaagttactttaaaagatagtgaaggtaacacattaaaaacaactgaaactgatgaaaatggtaagtatcgctttgatgacttagatagtggtgactacacagttcattttgataaaccagaaggtcttacacaaacatcagttaattctggtaatgatgacgccaaagatgctgatggtgaagatgtacatgtaacaattacagatcatgatgatttcactattgataatggctacttcgaagatagtgaatcagattcttcttcagaaagcgaatcagactcagagagtcactcggattcagaaagccactcagacagtgagtcaacgagtgaatcagattcagaaagtcactcagacagtgagtcaacaagtgaatcagactcagagagccattcagattcagaaagtgattcagatagcgaatcaacaagcgagtcagactcagagagccattcagattcagaaagtgattcagatagcgaatcaacaagcgagtcagactcagagagtcactcagattcagaaagtcactcagacagtgagtcaacaagtgaatcagactcagagagccattcagattcagaaagtgattcagatagcgaatcaacaagcgagtcagactcagagagccattcagattcagaaagtgattcagatagcgaatcaacaagcgaatcaggttcagagagccattcaaactctgaattaccagatactggtgaagaagacaatcaccaaggattaatcggaggggtgcttgcagcattcggaggattaacattattaggtagacgtcgtaaaaaagaagaaaaataa

SEQ ID NO: 4157 - DNA, 1509 bp, Staphylococcus epidermidis
atgacaatttataatctgaatttcggtattggttgggcgagtagtggtgttgagtatgcacaactttatcgaagaaacatattgcatgacttgaatgaagattttaagtttatatttttggattttataaataaagaaaatatacaaacacttactagtaatttaggtatagaaaatgatgaggtaatatggatatatcaatattttacagacattaagattaaacctacttcgtatacaattgagaatattattgaaaaacttgaatcaaacgatgtaaaagttaaaagtataaagcctaaagtaaaaagaatttattttaataataaaagctgttatgtcaattgttatttgaagtataaaaatgaagatattgttgatcgtgctgaatttgtttccagtggtaaactgattcgaaaagaattttatacctatactaaagtttttacagagtattatgcgccatataataaaaaagctaaagtttatttgagaaaattttttaatgaaaatgggagcgtagcttatgaggaaatagtaaaagacgacgataatatgtatatctttccgaataagattttatattcaaagaaagaatttatagggtattttattagtcaacttaatttaaaagacaaagatattttattggtagaccgttctaaaaatattgggcaagttattttggagaataaaaaagagggtcacgtaggagtagtaattcacgctgaacactacaatcattcaaatacgaatgaccaatatgttttatggaataataattatgaatatgtgtttaataatgctcagcatattgacttttttattgttgctacagaagatcaaaaggctgttttgcaactacaatttgaaaaatataagaatcttaaacctaagatatatactattccagtgggaaatattaaatatttaaaatttgaacaacaaagaaagccattttctgtgattacagcttctcgtttagcaaatgagaaacatgttgattggcttattaaggctgtcattaaagcacacaaaataaatgatgatattaggtttgatatatacggtgagggttcggaaagacaaaaactgcaacaaattatagataactatcaagctaataattatatccacctcaaaggacacatggatcttacttatatatataaatcttatgaactatatctttcaggttctacaagtgaaggattcggattaacactaatggaagccgttggttctggtcttggaataataggtttggatgtatattatggtaataccacttttatcaaaaataatgttaatggttatagagtacctatagatataactaatttggatgaagatactttaataactgaactcacaagtaagctattgctattctttactcaagataatgaaaaaactagagcggagtcatataaaattgcaaataactatttgataggaaatattaaagaaaagtggaaaaacttaattgatgaggtgctaaatgattaa

SEQ ID NO: 4158 - DNA, 1320 bp, Staphylococcus epidermidis
atgattaatttatacgataacttaaatagtcaaacgcttcaattatataaaacatttataaatgcgaatattaagtctacaactgtcgttgttaatgataatggattcttacccagtgatgtattgtcgccttataaatttttttctggaaactcaatcgaaaatgaaagacctctttacttcaacgatgttccagtcccgaaatattgggaaattgaaggttccaatcaatcagctgtgattaaggataaggataaaataagaggcaaaattttatatcaaaagggatatcgtaatagagtggtggcttcagtagaatggtttaataaaaaggaacatgttcaattcatagattattataaccaacatggttttcgatatgcccaattagtcatggatgataatcaaaatcaaataatgaaacgttactttgaccaaaataataatgaatttttagtggagaatcttgttactaaggatttaatattaagatggaataataaagatatattctttgataatcgtatctcgtttttatcgttcttttttgaaaaagcaaatttatctataaaagatatagtgcttaattcatttgcaacatcatttctgtttttgtatagacaacgggattttaacatgaagtgtagaatattttggcaagaaaaaattaaagatgatttacctgaaaacatgaaaattgctctaaaaaatatagataacttgaaaattttaattcctgataaaaaagaatattatcgtgtaatggattctgtagaaacttcatatcgacataaaattgaaaatagtggttatgtgtacgaattcttgaaagtaaacaaatataataatgaagcacttataataactaattctgataatattccatatgtagaatatattgctagagagaatcaaaatgtcacatttcacattgcatctaaaactgaaatgtcttcaagattattacaattagatggaatacaaaatataaatttatacccaaaaagtactgaggaaactatcttaaatttatgttgtaaatgcgatatttatttagatataaataaagggaaagaaatatttgaaagtatgtatttagcatttgcacatgaaatgattataattgcttttgaagaaactattcacaatagacaatttgtccatagtagtaatatatacaaattagataattactatgatttaagcaatgcaataaatcagataagtaatgataaaactttattttctgatagattaaatatgcagttgagatctgccaattcagtttcaattgaatcatttctaaataaaatgaagtaa

SEQ ID NO: 4159 - DNA, 3120 bp, Staphylococcus epidermidis
atgaattttcaatttaatgaagatgatttagaacaagttgcactagaatggctacaatcactaggctacgactataaaaaaggtagtgagattagtgtaacaggtctagcaccagaacgtaaaagtgataaagatgttgtccttcatgaacgtttagagaaagcattaagaaaaatcaactcagatatccatcctcgttttatcgaaaaagcgatacacgagttaacattagagaagtcgcccaaccttttagaaaataaccttacctttcatgaaaatttgatcaatggtattgaagttgaagactatgataacgaaggtcaatcgattgtagaaattgttaaaatcgttgattttgaacatccacaaaacaatgattttttagcagtcaatcaattaactatcgttaatggagactatacaaaacgtcccgatattgtactctttatcaatggcttgcctatcgttgtgattgaacttaaaaattcaacgtatgaaaccgtgggtgtcgaagacggttatcatcaattagaaacgtataagatgtgtattccacaattatttacgtttaacgaagtgcttgttacaagtgatggtattaatacaaaggccggctctctaaccgcaaattatgatcgttttatgacttggcgcagtaaagatggtcaaactgaatcatcaccaggtttagctagcttagatgtactcattcatggcatgttaaatccagaaacattacttgatttaattcgatattttgtcttatttcaagatgatggcaaagaacatatcagtaaaattctagcagcgtaccatcaatattatgccgttaataaagctgttgatagagctttattagcttcatctgggcagggtgatggtaaaggtggcgttatttggcatactcaagggtctggtaaaagtttaaccatggtctttttctctggaaaattaattcaaatgctgaataaccctactttagtcgtcgtgacggatcgtaatgatttagataaccaactgtacagtacgtttgttaaatcaaaaggacgttctggtaaaggattattaagacaaacgccaaaacaagctgaaacacgtaaagaattaaaatcgttattatctgttgagtcgggcggtattgtatttacaacgatgcaaaaatttgaacctgaacaaaatgaaacgaccatggctgcccttacagaacgtaaaaatgtgattgttatggcagatgaagcgcatcgtacacaatatggttttaatgcaaaatacgatgataaaggggaaggcattaaatatggttatgcgaagtatttaagagatgctttaccgaatgcaacattcgttggatttacgggtacacccgtagcttcaacggataaaaatacacaaatggttttcggaaactatatcgatgtttatgatatgacacaagccgtagctgatggaagtacggttaaaatttactatgaaagtcgtgtaattccattaaacctacctcaaaatttagatttagatgaagcgtataatgacattacagaagatcaagaagaggatgtaaaacagcgtttaaaatcaaaatggtcacgaattgaagcacttgcaggcgcaaaacctcgtgtagaagccttagcgaaagatatcatccaacattttgaaacacgtcagcaagcgatgaagggtaaaggaatgatcgtaacgatgagtcgtcgaattgctgttgatttatacgatgaaatcgttcgtctaaaaccagagtggcattcagatgatgatgataaaggggtcatcaaagtagtgatgacaggttcatctagtgacccaacttctttccaaagacatattggtcctaaaaaacgtcgtaatttattagaaaaacgtatgaaagatgtgaatgatgaattacaacttgtgattgttcgagatatgtggctcacaggatttgatgtaccttccatgcataccatgtatatcgataaaccgatgaaaggtcataatttaatgcaagcgattgctcgtgtcaatcgagtatttaaagataagccgggtggattaattgtcgattatgtgggtatcgccgaaagtttaaaagaagcactcaaagaatatacagaatctgatcaagctcaaacggcaatagatacagataaagcggttgaattgatgttattgaagtatgatgtgattcaagatatgttatataatcttgattattctaaatttaattcagataaaaaatcggaacgttattatacaatatcgaatacgatggattatgtgattggtttaggtgaagatgaacgtcaacgttttattaaaacggtcacagagttaggcaaagcctttgctctttgtgcgactgaatctacagcccaagagctcaacgatgaaattgccttctttaaagcggttaaagcaggacttgttaaattgttacaaccgccaaaagaaggaaaaacacgtaaaacacctgcagaagttgaagcagatattaatcaacttgtgtcacaatctgttgtgactgaagatgttattgacgtttatcaaacgctaggtcttgaacaacccgatttatcaatcctatcagatgatttcttaaaagaagtcgaaggattgaaacaaaaaaatgtagctgtagaattattaaatcgattactcaaagggcaagttaaatcattaatgaaaacgaatgcgacagtatctaagcgcttctctgagatgttaggaaattcgattaataaatataatagtcgttccattgaaacatcaaaagtgattgaagaactcattcaacttgccaaagatattaaacaagaacaacaacgaggaaatgaattagggttaaattcagatgaaattgcattttatgatgctttagcttcacatgaaacagcaaaagaagccatgggagataaagaacttcgtgcaattgctcatgaattaactaaaacagtgaaagaaaacatgggggttgattggtctaaacgtgatagcgcaaaagctaaaatgcgcgtagctgttagacgattgcttaagaaatatggttatccaccagacttacaaaaaatggctgtagagcaagtcgtagagcaagcagagcttatggctagtaataagtaa

SEQ ID NO: 4160 - DNA, 1257 bp, Staphylococcus epidermidis
atggagtttaataaatataaattaaaagacttaactgtaaatggtaaaggtgaatatggaattggagcgcctgcagttaaatatagtcccaatttatataaatatttacgtataactgatattgatgataatgggttcattaatactaaccagatgaagagtataaatgacaaaaatgaagaaaagtatcttcttaaggcgaatgatattgtatttgctaggacaggaaatagtacaggaaaaagttatttttataatagtgacgatggaccgttagtttatgcaggatttttgataaaattttccttagatcctactaaattaaatcctaaatatttacgctattataccttaaccaatgaatataaaggatggattaatcaattttcaattggaagcactagaaaaaacattaatgctaaaatttttggggatatggtaataagtttaccacctagatattatcaagattttgtagtagacatcttagatagtttagaaagaaaagtgaaaataaataaacagatggtagcaaaccttgaagaactttcacaaacactatttaagcattggtttgtagattttgaatttccagatgaagatggtaatccctataaatctagtggtggagaaatgattgatagtgaattaggtgaaataccgccagattggaaagttggcgtactttctgacatgactgaaataattatggggcaatctcctaaaagtgatacatataacaataataaagtaggtttaccattattaaatggggcgagtgattttaaaaacagaaatattaaaccaactaaatacacttcggctcccaaaaaaataggccataatttagattatgtctttggtgtaagagctactattggtttagtaacagaattagatggtgagtatgctattggtcgaggggctggattatctaaaaacaatgaagaaaatcgagagtttatttatgaaatattaaaccaagcttttacatattttgaaagaataggaagtggaagtgtttatattaatatttcatctaaagacttaaaacaatataaattgataatccctagtaaacaagtgttaatgaaatatcattatcaattagaacctattttttcagaattgcataatcgaaaagagcaaattacatctttaacgaacttacgagatactcttcttcctaaactcatgtctggagaactagaaatacctgatgatattgaggtgaatatagatgaattttcaatttaa

SEQ ID NO: 4161 - DNA, 1497 bp, Staphylococcus epidermidis
atggcaactataggttttgaagaaaaattatggcaagctgccgataaattgagaggaagcatggatgctgctgagtataaaaatgtagcattaggcctaatatttttaaaatatgtatcagattcttttgaagaaaagtatgaagaattgaagcaagatccttatgctgatgaagaggatcaagatgaatacttagcggaaaacattttctgggtaccaaaagaagcaagatggcattatatcaacgataatgctaaaaaaccagaaattggacaattgattgataaggctatgattgcaattgaaaatgaaaatgaatcactcaaaggtgtgttacctaaagaatatgcgcgtcctgcattagataaagaaaaattaggcgatattattgatttatttacatttaaggttggcgatacagagagtcgtaaacaagatgtattaggtcgagtgtatgagtactttattgctaaatttgcaagtgcagaaggtaaaaatgcgggagagttctatacaccatcatcaattgtaaagttattagttgagatgattgaaccttataaaggacgcatttacgatccatgttgtggttcagggggcatgtttgtacaaagtgaacgcttcgttgagaaacatcaaggtcgattagacgatattgcgatttacggacaagaatctaaccctacgacttggaaattagcaaaaatgaacttagcgattcgtggtattgataataatttgggtgaacgaaacgctgatacattccataatgatttacataaaggattaaaggcagattacatattagctaatcctccatttaacgcaagtgattggggccaagaacgattacttgacgactaccgttggcaatttggtgttccaccaaaaggtaatgccaactatgcatggattgaacatatgatttcaaagttagcacctaatgggacagcagggtttgtattagctaatggatcaatgtctacaagtggaaaagacgaattagaaattcgtaaaaatttgattgaacaagatttagtggaatgtattgttaccttaccaggtcaactcttttattcaacacaaatacctgtctgtctttggttcattagtaataataaagaacgtaaaaatgaaattttatttattgatgctcgtgaaatcggtcatatggtatctagaacattaaaagaattttcagatgaagatattcagaaagtagcacaaacgtatcattcttggaaaggtacaaacgataaatcatatgaagatatagctggtttttgtaaaatagctaatttagaagaagttaagaataatgaatatattttgacacctggacgttatgttggtttagctgatgttgaagaagacgaagaaccatttgaacaaaaaatggaacgtatcacttctgaattaagtgaacaatttgcgaaatctaaagaacttgaagaccaaatccgtaaatcactggagggattaggttatggagtttaa

SEQ ID NO: 4162 - DNA, 720 bp, Staphylococcus epidermidis
atgaaggaatttttaatgatattttttaataaatatgaattaaaagctattatagctccaggaatgataagtatcatgtctttctttactaccttgataatatattttcctgatagtttaaatttaggttctagtctaattgtaataattctattgattttttatatctatttattttcaatcatagcaagagaaaatggtaaaatggttgaaaaaaagttgttttctcaatcatcaaatgtttatcccactacacaaattttaagatattcagacgacactttaaatataaaaaccaaagaaagatatcactcttttttacaagaaaacattccttgtatagaacttcctagctacgaagatgctagagacaaaaaagagaattattttgatgatgagtacgactcagcaattgattggttattaaaaaatacaagagaagattatatgactgctcaacataatatggaatatggcttctatcgtaatttattaggaattaaatatattggtattataattgttttaatatctatagtattcagcattgttgtttttatactatctcaagaaaatgttacgattcaactagtactttctagtattattaacgtgttttttttgtatttttggatttttaaagttactaaaacacagactagaaaatctgcaaaacgttatgctcaatctttattagctaattgtgattttaaaagttaa

SEQ ID NO: 4163 - DNA, 897 bp, Staphylococcus epidermidis
ttgagtataattaaatcgtattcagtaggaaatggtgatatgttttacattaaacacggtacagataatttctctattatagattgctgtttatataatgataaaaaagatattataataaaagaaatattagagatagcttctacaaaagaaattgttagatttatatctactcatccagatgaagatcacattcatggacttgagttattaaataaaaatttaaatatcactaatttttattgcgtaaaaaataatgctaaaaaaaatgattttagtcaaagttttgaagaatataaaaaattgagagattctaacaaaagtttttacatacataaagatagtcaaagaaaatggatgaatattagcgatgaatcacgaggtagttccggtattaatatattatggcctgatacagacaatgagtattttaaaaatgaattacaaaaagcagcagaaaaaatcagttttaatgatatatctcctatcattcagtataaattagataaaggagtgactgctttgtggatgggagacttgactactgattttatggaaaaaatcgaaaatgaagttaactgggaaaaagtggatatattatttgcacctcaccattctagaaaaagtggaagagtaccgagtaatatcttaaataaattaaaccctaagcttattgttgtaggagaagctaactcaaaagatttatactattatagtaattatactacaattactcaaagaaaagcaggcgatatagtatttgactgtcaaactggtactatcaatatacatgtgagtaatttaaactatgaggctaaaaaccttgaaaaagactctaaaattcccacaatttatgataatttaaaatatattggaagtgtaactacatacaattaa

SEQ ID NO: 4164 - DNA, 156 bp, Staphylococcus epidermidis
gtgacagctagcaatgctccagatataggcattagtattatgaaagagcaagattatcatttagaaaatgtaacttttaaaaaaattgaagataaagtaaaccattctgtgagtttttatgttaataagggttctgttgcaaagttgaatttatag

SEQ ID NO: 4165 - DNA, 714 bp, Staphylococcus epidermidis
atgacaactacacttttagtcattgaagatgatgacgcaatttcacatcttatagatgtggctttaacaatgaactactataaagttattaaagcgaaagtggggaaagaagcgaactttcgtattagaactgaacacccagatatcattttattagatcttggtttacctgacatcgatggtttaaagttgattcaacaaattagggaatatgtcgatacgcctattattgtcattagtgcacgtacggaagaagaaacaattgttaaggcattagattatggggcaaatgattatatgacgaagccttttaatatcgatgaattaaaggcacgtataagagtagcattacgagttactaagaagttagataccgtacaggataactttgagaatggcccattgaaaatcgactttaatgcgaaaatggtttatataaataatcaatctatacacttaacaccttatgagtttcaactcttggatattttaagtcagcatgttggtaaagtacttacttatcaaatattgttaaaggctttatttggatatgtaaacaagtgtgaaatggcctctttacgtgtacatatggcctctttacgtaaaaaattaaattacagtgataaacatgaagatgggtcattatgtagtaaggataaaaagttaattattacccaccccagaattggatatcagatgcagcacatagggtga

SEQ ID NO: 4166 - DNA, 2655 bp, Staphylococcus epidermidis
atggaaagttcacataaatatagaggtaaactcaccatttatttaggctatagccctggcgttggcaaaacatatgaaatgttatcaaacgctattaacctttataaagaaggtgtagatatcaagattggctatattgagcctcatcaacgtcccgaaacaaatgctcttgcaaaacatcttccagaaattgtgacatcaagccgaaaatttgggagtcacctctttcattttattgatgtgaatcaaattattgaggcacatccagatattgtacttatcgatgaattggcacacacgaatatttcaaaaacaagacatattaaacgttatatggatattgaagaaattttatctcatggaattgatgtttggacgacgctcaatattcaacatattgaaagtttgagtggtcaaattgctttaatgactggtattcaggtaaaagaacgtgtccccgatcaatttattatgtctgcagacgcttatgaagtcgtggatatttcaccgaagatgctcattcaaagattaaaggctggcaaagtgtataaaaaggaacgtttggacactgctttttcaaactttttcacttatgagaatttaacagaattacgtgaattaacattaagaactgtagcggatatcatgagtcagaaagaacagcagtataagaagaaacatatagatgtgacacctcatattgctgtggctgtaagtggcagtatttataatgaacgcgtgattcgcgaagcaagacgtgctgcatatagagaacatgcaaagtttacggcgatttatatcgatacctttgaaacacgttctgaaagtcgtaagcaagaccattatattcataaaaatcttacgctagcgaagtcgttgggtgctgaaattaaagtattgtatgcacaagatattgcgaagacgttaatcaattggtgcgataaatccctcgtgaccaaattggtgctaggccagtcagaacaacctcgttggaaagagtactttaagaagtcactcattgaacaaattaatcatacgccgcatcactttaaattagagattgtaccaatacatcacatttattcgaataaacagaaccgtgaacgtagtaacagaaagaaagataaacaaccatatcaactagcattgtcggtcgatattgtgaaaatgttaatcattcaaattgtatgtgtgctaataggtatgtggatttacaatatggataagaacgaatcaagtgcgattatcttactcttattctttattggtattatcgtgctttctatatgtactcagtcgtatttgattggtttcttcgcatcgatattgaatgtctttgtctttaactatttctttactgtaccaagattcacgttagaaatgtatcgctttgaatatcccatcacatttgtgacaagcatatttgccagtattttcacgagtggcatattgaaaaatttaaaatatcaacattccctgaccgaacgtcagttatatcgtacggatgttatgttgcagttcaaccagtcaattaaagagtcctattcaatcatgaaattgttaacgattgctggagaacaaattcatcaattattaaagcaagatgttactatattccaaattaagtctaaaaaagttaaacagtctgcttcgtttggtagcagtacaggtatgcatagccatgaaaccgaagatgcggaaacgttaagttgggttatcgagaatgaaagccgtgcgggaaggcttaccgatacgtttccaggtagtaaatttttatgtgttcctattggtacccgaccagttaaagggattgttttaattcagttcacagatgaagactacatcgacacatacgacagttttatattggattcgatgctgaacgatttaacccttgctgtggaaaatgtcgccctactaagacaaacaagacaatcgatggtcatagccgaaagagaagcaacgcgatctaatttcttacattcaatttcacatgatattagaacgcctttaacatcgattatcggtaatttagatatggtaaaacatcatggagatggattagattgtaaagagcgcgcccatttattaagtgcgtcatatgaggaagcacagtatctatacacattagttacaaatatcctgtctttaactaagttagagagttcagatattcaaattaagcgcacaccttacctagtagatgaattattagaagagtttgaggcaggacttgtgcgtcgacatcaacaacaaaaagtaaatattgaagatgatgatacgttagcgttagtacaaatcgacagtaaattaatcttgcaagtgttgtttaatctcgttgataacgcactaaaacatgcagaatcccgttcaaaaattatattgcgcgtaaatgaacaacgctcacaaatattatttgaaatgattgatgatggaagaggtattcccgatgaagaacgagatttaatttttaatccttattattctggagattactttaaagataacaaaaagtatagtttaggattgggattatacttagtacaattaatcttgaaacaacatggaagtcaattgaaatatcgacctaatcatccacagggcagtatattttatttttatttagatattacacagatagaaatggaagggtga

SEQ ID NO: 4167 - DNA, 1686 bp, Staphylococcus epidermidis
atgatgagtattattttatttttaataacttttatcgcggtttcatatgttatgagccgatatttatatacggtagctttactcgtaccgtctaagatggacgtcgtattttcacctattgagagaggactctacaaactgataggtacgcaattagagcatatgtcaggtaaaacatatttaaaacactttttatgttttaacggtttaactggtgcgttagcatttctcttattattagcgcaacaatggctatggttaaaccctaatcataacttgaatcaatctatagcattagcatttaatactatggcatcgtttgtaacgaacactaatctacaacactatactggagaaacaggattaacgtatttcacgcaaatgggagtgattacatgcctcatgttcacttcagctgcttcaggctacgctgtatgtattgcaatgttgcgtaggttaacaggaatgacagatgttatcgggaacttttaccaagacgttgtacgttttattatccgtgttttattacctttgtcattcatcatcagtatatttcttataagtcagggaacacctcaaaccttaaatggaaatttagttgtagaaacactatctggtgtaaaacagacgattgcttatggaccaatggcttctttagaagcaattaaacatctcgggacaaatggaggtggttttctaggtggtaattcatctacaccatttgagaatccaacatactggtctaacttcgtggaagctctatgcatgatgttgatacccgggtcgctcgtcttattatttggcagaatgttaaaaacgaaaaatcatattcattcccatgcgttaatgatatttatagcgatgtttactatatttatcgtttttttattaatctgcttacactttgaatcaattggtaatccagttcttcatcacttaggaatcgatggaggcaatatggaaggtaaagaaacacgctttggcatcggtcagtctgctttatttacgacaattacaactgcctttacaacggggagtgtgaatagtatgcacgacagtctcaccccactcggtggtatagttccaatggttcttatgatgctaaatgctgttttcggtggggaaggtgtcggtcttatgaatatgttgatctacgtcatgcttaccgtctttatttgcagtttaatgattggtaaaacgccaacttatttaggaatgaaaattgaatcccaagagatgaaatggatagcacttacatttttagttcatccattactaattttaatattctcagcattagcatttatagtacctggagcaaaggatgcactaacgaatccacaatttcatggtgtatcacaggtattgtatgaattttcatcatcgtctgcgaacaatggttcaggctttgaagggttaaaagataacactgtattttggaatgtttcgacagcaattgtgatgttgcttgcacgttatattccgattgtattgcaactgatgattgtttctagtctagtcaacaagaaaacatatcaacacacacaacatatacaagatgtacctataagtaatgtgttttttagtatgatactcattatctttattatcttgctcagtggcttaactttcttgccagacttaatgcttgggccaataggagaacatttattgttaaatccttaa

SEQ ID NO: 4168 - DNA, 2019 bp, Staphylococcus epidermidis
atggaaacatcaaaaatatttgaatcgagtttagttaaacaagcgctcaaagaaagcattgtgaaattaaatccaacatatatgataaaaaatcctatcatgttcgtcgtagaaataggcatgttactctcattcgttttaacttttattcctaatttatttattcaagaacatgtatcacgtatatatgtattaagtatctttattattttattgctgacacttatctttgctaacttttcagaggcgttagcagaaggacgtgggaaagcacaagcgaatgccttgcgccaaacacaaacagaaatgactgctcgtttgattaaagaagatggtagttatgaaacgatagacgctagtgacttgaaaaaaggtgacatcgttcgtgttgaaacgggagaacagatacctaatgatggtcaagtgattaaaggcatagcgactgtagatgaatctgcaatcactggtgaatcagcgccggttattaaagaaagtggtggagatttcaataatgtcattggaggtaccactgtcgcatccgattggctagaaatcgaaattatgtctgaaccagggcaatccttcttaaataagatgattcacttagtagaaggagccacaagaaagaaaacaccaaatgaaattgcactattcacattactcatgacattaaccattatctttttagtagttattatggcgatgtatcctttagcgcaatttctacattttaatttatcgatagttatgttgattgccttaaccgtatgtttaatacctacaacaattggtggactattatcagcaattggtatcgcggggatggatcgtgtaacacaatttaatatcttagctaaaagcggtcgttcagttgaatcatgtggtgatgtgaatgtattaattctagataaaactggaactatcacatatggtaataggatggcagatgcatttatacctgttgccacaacaagctatgaaaggttagtgcgtgcttcgtatgaaagttcaatagaggatgatacgccagaaggaagtagcattgttaagcttgcgagagcacagggtattaatttacctcaacgaacaggagaatattatccatttacagctgaaacacgcatgagtggtgcgaaatttgatgattatgaagtatataaaggtgcacctaatagtatgattaaacgcgtgaaagaggcaggtggtgtgattcctgaagatttggacgaatgtgtcactgaagtgtccagaaagggtggtacgccattagttgttattgaagataataacatcttaggtgttatctatttaaaagatgtcatcaaagaagggttagttgaacgattccaagaattgcgcgttatgggaattgaaaccgttatgtgtacaggagataacgcactgactgcagcaacgattgcaaaagaagcaggtgtagatcgctttatcgcagaatgcaaacccgaagataaaatcaatgtcattagagaagaacaagcaaaagggcatattgtcgcgatgactggcgatgggaccaatgatgcaccagctctagcagaagcaaatgtaggtttggctatgaattctggtacaacaagcgcgaaagaagcagcgaatttaatcgatttggattccaatcctactaagttaatggaagtggttttaataggtaagcaattattgatgacacgtggttctttaacaacgttcagtattgcgaatgacattgctaaatattttgccattttaccagccatgtttatgtcggcaatgccagcgatgaatcaattgaatattatgcatttacattcacctgaatcagcagtgctatcggcacttattttcaatgcgttaatcatcgtgttacttattccaattgcgatggcaggtgttcagtttaaaggagcttctacacaaacgatattaatgaaaaatatgttgatttatggcataggaggtatgattgtaccgtttgtcggtataaaacttattgatttagcaattcaattctttatttaa

SEQ ID NO: 4169 - DNA, 561 bp, Staphylococcus epidermidis
atggcaacgattcgaaaaagtgttggactcttaatcatcgtgtttgttttatgtggctttatatttccattaactgtgacagcgattggccaagtgatattccctcatcaggctaatggcagtttaatcaaacaagatggtaaagtgattggttcagaactaatcggtcaacaatggacggctactaaatactttcatggccgtatcagtgctgtgaactataacatgaatggacaacaactgaaagctaacaagggaccagcctcaggtggttcaaaccttgcgaattctaatcctttattaaaacagcgcgttgaagatattattagcaaagaagataaacgccctacggtcaatgcggtcactgcatcaggctcaggattagatccagatatctctatttctaatgcacatgctcaagttaaaagaatagcagaagcgcgtaacattaaagcatcaacagttgaacaaatcattcaacagtataaacaatcctcgcctatgaccgaagactacgttaacgtattaaagatgaatcttgcacttgataaagtgaaataa

SEQ ID NO: 4170 - DNA, 342 bp, Staphylococcus epidermidis
atgaaaaatatattaaaattaatttttctatttttaatatcgttaattcctattgaatttattggtttaatgactgactatcaaacaggtttactattaggttacttgccgttcattattgtaacaatcatcttaggatacttaacaagaagtttcatattatatttcttagtgtttgttagtagaatacttggcacatttatttttgtaatatgtgctaatttatgtttgaatttttatgaagtagatttctattttaagccatttgatgttctaggatttgtagtctttttaagtatactgagtcagctaatgatactgattaccatcggtctagtttaa

SEQ ID NO: 4171 - DNA, 372 bp, Staphylococcus epidermidis
atgactattcttgttcactcaaaacatcaccctaaagaatatgcaactattgcgaatcagttaatggcaacaactcatgtgtgttgtgaacaagttggttttatcgaatctacgaatcatatgaatgaagacgaatatcatttagtaatgagtgggaatgaattttgtggcaatacgacgatgtcttacatgcattatctgcaagaacatcaattattagaacgtcagcattttcaattgaaaatatcgggatgttctcaattcgtaccttgtatcgttcataatcagcaatgttatgaggttgggatgcctcaggttcaaagtattacacctagacaattaatggttctgttgcaaagtaaaaaaatatag

SEQ ID NO: 4172 - DNA, 132 bp, Staphylococcus epidermidis
atgaaaagagtttcttattcagtagaaacaaagtataaagcagttgaaatgaaagcagcaggattttcaacaaaagaaattatgaaagaattaaatattagaaatagaacacaagtgaaaacttggtggtga

SEQ ID NO: 4173 - DNA, 252 bp, Staphylococcus epidermidis
atgactaaagtaattaaaggttttaaacttaaacctgactgtcattgtacatcgaaatatctgaataacctcattgagcaagatcaccgtcatattaaagtaagaaagacaaggtatcaaagtatcaatacagcaaagaatactttaaaaggtattgaatgtatttacgctctatataaaaagaaccgcaggtctcttcagatctacggattttcgccatgccacgaaattagcatcatgctagcaagttaa

SEQ ID NO: 4174 - DNA, 432 bp, Staphylococcus epidermidis
atgttcaaaaatatattattaccctatgatttcgaaaatgattttagtgctatccctgactatttagaaaaagtcaccgatgaagattcagttgttgtaatttatcacgttgtaacagaaaatgatcttgcaattagtgtcaaatattataataagcataaagaagatattattagagaaaaagaaaaaaaactcactccatttttacgtgaattagaaaaaagagatattcaatataaaatagatgtagattttgggcatattaaagatacaatcttagaaaaaattacttctggagatataaataatggtgaatttgatttagtaattatgagtaatcatagagtcgatttgaatattaaacatgttttaggagatgttacacataagattgctaaaagaagttctgtcccagtactaattgttaaataa

SEQ ID NO: 4175 - DNA, 1848 bp, Staphylococcus epidermidis
atgactaatttaagagaagatgttcgtaatatagcgattattgcgcatgtcgaccatggtaaaacaacattagtagaccagttgcttaaacaatcaggtatatttcgtgaaaacgaacatgtcgacgagcgtgcaatggactctaatgatttagaaagagaacgtggtattacgattcttgctaagaatacagcgatagattataaaggaacgcgtatcaatatattagacacacctggccacgccgattttggtggtgaagttgaacgtatcatgaaaatggttgacggtgtcgtactagtggttgacgcatatgaaggtacaatgcctcaaactcgttttgttcttaaaaaagctttagaacaaaacttaaaaccggttgtagttgtgaataaaattgataaaccagctgctagacctgagggagttgtagatgaagtattagacttattcattgaattggaagcgaatgatgagcaattagacttcccagttgtttatgcttcagctgtgaatggaacagcaagtttagactctgaaaagcaagacgaaaatatgcaatccctatatgagacgattattgactatgtaccggcaccagtagataattcagatgaaccattacaattccaaattgctttactagattataatgattatgtaggtcgtataggcgttggacgtgtgttcagaggtaaaatgcgtgtaggtgataatgtatcactaattaaattagatggtacagttaagaactttcgtgtgacgaagatatttggttactttggtcttaaacgtgaagaaattgaagaagcacaagcaggagacttaatagctgtttcaggtatggaagatattaacgttggtgaaacagttacaccacatgatcatcgtgatccattaccggtgttacgtattgatgaaccaactctagaaatgacttttaaagtaaataactctccgtttgctggacgtgaaggtgattatgtaacagctcgacaaattcaagaaagattagatcaacaacttgaaacagatgtttctttaaaagttacaccgactgatcaaccagattcatgggttgttgctggtcgtggtgaactacacttgtctattcttattgaaaacatgagacgtgaaggctttgaattacaggtttctaaacctcaagttattttaagagaaatcgatggtgtgttaagtgaaccatttgagcgtgtacaatgtgaagtgccttctgaaaatgccggggcagtgattgagtcattaggtgcacgaaaaggtgaaatgttagatatgatgacgaccgacaatggtttgacgcgtttaatctttatggtacctgcacgcggtatgattggttatactactgaatttatgtctatgacacgaggttatggaattattaaccatacatttgaagaatttagacctcgcgttaaagctcaaatcggtggtagacgtaacggtgcattgatttctatggaccaaggtcaagcaacatcttatgcgattattaacttagaagatcgtggtgttaactttatggaaccaggtactgaagtatatgaaggtatgattgttggtgaacataaccgtgagaacgatttaacagtaaatattactaaagcaaagcatcaaacaaacgtacgttcagctactaaagatcaaacacaaacgatgaatcgtcctagaattttaacattagaagaagcgttacaatttatcaatgatgatgaattggtggaagtaactcctgaaagtattcgcttaagaaagaaaatacttaataaatctgcccgtgaaaaagaagcaaaaagagttaaacaattaatgcaagacgaacaataa

SEQ ID NO: 4176 - DNA, 192 bp, Staphylococcus epidermidis
atgcaacaaaaaaaatctaaaggtattttctggatcttctcaatattggctgtcatttttttaactttatttagtttcgcattaggtgctactaatgttccaatgatgattttaacatttatacttctcattgcaacatttggtgttgggttcagtgtgaaaaggaaatatcgtaaaaacaattggctttaa

SEQ ID NO: 4177 - DNA, 822 bp, Staphylococcus epidermidis
atggctttatatgattttgcaaaagggttgatactagaagcaggaaataaagtaaggttgatgatgcaagaagagttagacattaaaactaaatcgaacccaaatgatttagttacaaatgtggataaggcgacagagaattatctatatgaaacgattcttcataattatccagatcatcaggttattggcgaagagggacatggtcataatctcgagtatttaaagggggttatttgggttattgatccaattgatggaacacttaattttgttcaccaaaaagaaaattttgccatctctattggtatttatcatgatgggaagccttatgcaggttttgtttatgatgtcatgaaagatgttttatatcatgcaaaggttggacagggtgcatttgaaaatacacataaacttgaaatgattcaaaatactgaacttaaaagaagtattataggtattaatcccaattggctgacgaaaccaatactcagtgatatttttagttcaatagtgaatgaggcaagaagtgcacgagcatatggtagtgcagcattagaaattataagtgtagcgaagggtcaattggcggcttacctaacacctagactacaaccgtgggattttgcaggtggattgttgattttgaacgaagtaggtgggataggaaccaacttattaggcgataaattagacttcaatcaaccgaattcaatattaatagcaaatcctagccttcatcgtgaaatattaaatcatcatttaaatcagcaaagagatacgcttattacacttcatgaaaaaaggtttggaaagagatag

SEQ ID NO: 4178 - DNA, 612 bp, Staphylococcus epidermidis
atgacccaatatactttttcacctaaagattttaaagcttttgaagtcgaaggtttagaccaaagaatggaagcacttaatgactatgtcagacctcaacttcatcaattaggatcttattttgaagaatatttcactacacaaacaggtgaaactttttatgctcacgtagctaaacacgcacgtagaagtgtcaatccacctatcgatacgtgggtagcttttgctcctaataaacgtggttataaaatgttaccacactttcaaatcggattgtttagaaatcagcttttcattatgttcggtatcatgcacgaaggtagaaataaagaagaaaaagtgaaaatatttgataaacattttgataaactgacatctttaccaagtgattatagtgtttctctagatcatatgaaaactgaaaagcactatatcaaggatatgagtaatgaagagttgcatgctgctatcgatagagttaaaaatgttaaaaaaggtgaattttttgttgccagaacattatcaccaaccgataaaagattaaaatctgataagtcttttctaaaatttgttgaggaaacttttgatgaatttttaaaattttatcaataa

SEQ ID NO: 4179 - DNA, 1347 bp, Staphylococcus epidermidis
ttgaattccaataataacaatcatgaacaacaacgaagtttagatgaaatcaataacaccataaacttcaatcataatgatagtgcaagtcaaaaatttctggcttttttaggaccgggattgcttgttgcagttggttacatggatcctggaaattggattacatccatgcaaggaggagcacaatatggctataccttgttattcataatcttaatctctagcttatctgctatgctgttacaaagtatgactgtgagattaggaatagcaactggtatggatttagcacaaatgacacgtcattttttaaataagcctgtagcaattatgttctggattattgcagaattagcaattatcgctactgatattgcagaagttataggtagcgctatcgcattagatttaatcttcggcataccattaattgtaggcgcattaatcactgtatttgatgtatttttattattattcatcatgaaatttggctttagaaagattgaagctatcgtgggaacgttaatctttaccgtattggccatttttgtatttgaagtttatatttcttctccacaaataacagatatgcttaatggttttgtgcctcataaagaaattattacaaaccaagggatactttatattgcactaggtatcataggtgctactattatgccacataacttatatttacattcttctattgtacaatctcgaaaatatgatagacacagtattcatgaaaaagcacaagcgattaagtatgctactatcgactctaatatacagctatccatcgcttttgtagtcaattgcttattacttacacttggtgcagcgctattttttggaactaaaactgaagatttgggtggtttttatgatctttatttggctctaaaaacagaacctgctttaggtgcaacgcttggcggtattatgagtactttatttgctgttgcccttttagcttctggtcaaaattcaactataacgggaacgttagcaggccaaattgtgatggaaggatttcttaaattatccattccaaattggttacgtcgtcttatcactcggtctttagcagtgatacctgttatcatttgtcttatagtatttaaaggaaatactgaaaaaattgaacaattacttgtcttttctcaagtgttcttgagtattgctttgccattttcgttaataccgcttcaattagctacaagtaatcaaaatcttatgggtccttttaagaataaaacatggattaacatcatttcttggttactcataattgtcttaagtggacttaacgtatatcttatcattcaaacattccaagaattatga

SEQ ID NO: 4180 - DNA, 537 bp, Staphylococcus epidermidis
ttgaatagaaaagtagaaaaaagattagcgtggattgcaaatatcttgagcctattatttttaatttttggtattctatcgatatttgttattaataacacatcaaatcaacaacaatataatgaattaatgaagcagttttcaggtaataatcaagatatgtcatctgaaatgtttttagtttctcttattgcgtcattagtcattttaggtttttcaacgctattaggttttgttggtacaatggtaattgaaggtagaaaaaaccttgctgctagtttactcatagcagcggctatcgtaggtttatttacgactaatttaatcgcaatggttttatggatgattgctgcgattagactttttgcaaaaaaagataaaacagatgtaaatgaaaatgctacggctcaacttcgtcaaaaccattcaaagagccaaagtgattggaatcatcaacaaaaccaacaacagaaagatgcttgggatcctgaacaagaaatcaacaaacaaaaaaaggacgatccatatatatattaa

SEQ ID NO: 4181 - DNA, 1152 bp, Staphylococcus epidermidis
atgttaggagagcaatatacacaaattaagcgtccagcaaatcggctaactgaaaaaatattaggttggtttagttgggtattcttactcatattaactattgtttcaatgtttattgcgctcgtatcttttagtaatgatacgtcaattgccaatttagaaaacacacttaataataatgaactcgtacaacaaattttagccaataatgatttaagtacaactcaatttgtgatttggttacaaaatggagtttgggcaattattgtttattttattgtttgtttgctcatctcgtttttagcgttaatttctatgaatataagaattttgtctggtttactttttttaatagctgctatagtcacaattccgcttgtattgttgattgtaactctaatcattcctatcttattctttatcattgcaatgatgatgtttgctagaagagatagaatagaaacagtgccatcttattataatgaatatgatcaaccatactatgatgagagaggtttttatgaaccagagtcaagaaatgaacatggatataatgatgatgtgtatgaacctatgcatactaaaaaggaagatagaaatacaagacgtcaattcaatagaaatgctcagcaacaagattcctataatggtataactgataatcaacccgatgaagatacatcttccgatcaactttattcagacgaatatgtagataatgaagataaatattctcaatttccaaaaagagcagttgaaagtgaatatgcatctcaacaaactgaagatgaaccaacagtcatgtcaagacaagctaagtacaataaaaaatctaaaaatacggattttgaagatgcgcaacaggaacatatggaaggtaatcaatttgatgacgtaggagttgttgaaccacaaattgatcctaaagaactaaaagcgcaaagaaaaagagaaaaagcagaaatacgtgctaagaaaaaagaaaagagaaaagcatataataaacgtatgaaagaacgaagaaaaaaccagccaagtgctgttaaccaacgacgtatgaattatgaagaacgtcgacaaatgattaataatgaacaagaagatacagataataacttaaatcaacaggaagattcaaaaaaagaaaattaa

SEQ ID NO: 4182 - DNA, 1074 bp, Staphylococcus epidermidis
atgaagcgattttttcaacttatcatttctgctatagttattggtattttatgtttaatgattagtcattggtttaaatcaaaagataatacccactcaaatgagaagttatatgtttacaattggggagaatatattgatcctagcttaattaagaagtttaaaaaagaaacaggtatacaagtcgtatatgaaacctttgattcaaatgaagcaatggaagcgaaaattcgaaatggaggcacacactatgatgtagcttttccaagtgaatatactgttcaaaaattaaaaaaagctaaactgcttgagactttaaatcatgacaaaattccaaatatcagaaatttagacaatgattatatgaacttgtcatatgacccaaacaatcgatattcaattccatatttctttggtaccgtaggaattttatatgataaagagaaatatcctaatgaaacgttcgatagttgggacgatttgtatcattctcaattcaaaaatgatattttattagtagacggtgcacgcgagataattggaatgggattaaataaattagggtatagtcttaatgacaaaaatccgacccatattcatcaagcagaaaaagatttgcataatttagcacctcaagttagagggatagtaggcgacgaaattactatgatgcttcaacaaaacgaaggacatgttgcagtagtttggagtggcgttgctgcaccacttgtacaggaaaatactcgttataattacgtgatacctaaagaaggctctaacctatggtttgataatatggtgatacctaaaactgcacaaaataaagaaggtgcgtataagtttatgaatttcttactagacgcgcaaaatagtgcccagaatacggaatgggtaggatatgcaacacctaataaagcagctcgaagtaagttgcctaaaaaggtaagaaatgattatagattttatccatcaaatcaagaacagcaacggttagaagtctataaagatttaggtcaaacgtctctcagtgaatataatgaaagctttttaaattttaaaatgtctttaaaatag

SEQ ID NO: 4183 - DNA, 813 bp, Staphylococcus epidermidis
gtgaaatggtacggaaaattatatatagctctattaataagtgtgctttatattcccattttctttttaatgatttattcttttaattctgcgggtaatatgagtcacttcgaacattttactttagaacattaccactccctttttcataatgatcggttgatgtcggtgatttttaatacagttgcagtggcacttttatctgcatcgattgctacagttataggtacatttggtgcgatcgctttatattacttacgcaacaaacggtttaaggttacgctattaacgatgaataatgtattaatggtatcttcagacgtagtcattggtgcttcttttttaattatgttcactgcaataggacatttcacaggtttaggtttaggattttcaacagtgctagcatctcatatagcgttctgtattccaattgttgttatcatcgtcttaccccaattatatgaaatgaatgataacatgttaaatgcagcaagagatttaggtgctaatgaatcacaattattaactagcattattatacctaatattatgccctcgattataggaggattctttatggcattaacatattctctagatgattttacggtaagcttctttgttactggaaacggatttagtgtattgtctgtagaagtttatgctatggctcgaaaaggtataagtatggagattaatgccatttctacaataatatttattgctattatgtttggagtatttggatattactttattcaacatatcgttaatcgtcagaaaaagatgaagcgaggtgttaatgaatga

SEQ ID NO: 4184 - DNA, 804 bp, Staphylococcus epidermidis
atgcataatatcaataaatggttactggttccttacttattatggatggttatatttattatcattccagccattttacttgtttacttttcttttatagatattcatggtcactttagtttcacaaattatgagcaggtattttcaacaagatatttaaaaatgtttattgattcaatatggtatgccgctttaattactatgattaccttaataataagttacccagctgcgtactttatttcttattcaagatttcaaaatatactgcttatgttgttaattatccctacttggattaatttacttcttaagacctatgcatttattggtttgttggggcatgatggagttattaaccaagctctacatatatttcaaatacctaaattaaatttgttgtttacaagtggtgcatttttattggtggcgagttatatttatatcccatttatgattttgcctatatttaacagcatgaaagcaattcctaacaatattttgcaagcctctaatgatttgggcgcgagtacatttactacgtttcgtaaagtaatcgttcctttaacaagagaaggtattaaaacaggtgtgcaagtaacatttataccagctctttcactgtttatgattactaggttgattgccgggaacaaagtaatcaatgtaggtacagcaattgaagaacagttcttaactatacaaaattatggattaggttccactatagcactttttctcattatttttatggcctttttactcattattacaaaatcaaaatcatctaatgggaaggggtga

SEQ ID NO: 4185 - DNA, 1095 bp, Staphylococcus epidermidis
atgaatccattgctttcttttaaagatgtcagtaagggctttgaagatgtacaaatactaaatgaaattaatattgatattgaaccaggctatttttatacactattaggtccctcaggttgtggaaaaacaacaattttaaaactcatagcaggatttgaatatcccgatagtggagatattatatataaagataaacctattggtaaaatgccaccgaataagcgtaaggtaaatactgtattccaagactatgcattgtttccacatttaaatgtattcgacaatattgcatatggtttaaaattaaaaaaattaagtaagtcagaaattaagcgtaaggttactgaagcacttcagttggtgaaattaagtggttatgaacataggcaaatacaaggtatgagtggtggacaaaaacaacgtgtagccatagcacgggcaattgttaatgagcctgaaatattattattagatgagtctttatccgcattagatttaaaattacgaactgaaatgcaatatttattgagagaacttcaatcccgtttaggtataacctttatatttgtaactcatgatcaagaagaggccttagcattaagtgattatatttttgttatgaaagatggcaaaattcaacaatttggcacaccaatagatatatacgatgaaccagttaaccgatttgttgctgattttataggagagtccaacatagttcacggtacaatggttgaagattttgtcgttaatatttatggtcaaaattttgattgtgtagatatgggaataaaagaaaataaaaaagttgaagttgtaattagacccgaagacatttcacttgtttcacaaaatgatgggctatttaaagccaaagttgattctatgctatttagaggtgtacattatgaaatttgttgtaaagatagaaaagggtatgaatgggtaatacaatcaacaaaaaaagctaatgtaggtagtgaagtaggtctgtattttgaaccagaagcaatacacatcatggtaccaggtgaaactgaagaagaatttgataagcgaattgaaagttatgaggactatcatcatgcataa

SEQ ID NO: 4186 - DNA, 540 bp, Staphylococcus epidermidis
atggatattggatacaaattacgtaatttaagaagaataaaaaatttgacacaagaggaattagcagagcgaactgatttatcaaaaggatatatatcacaaattgaaagtaatcatgcttcacctagtatggaaacatttttaaatttaatagaagtacttggtacttctgcaagtgacttttttaaagaaccgtcagatgagaaggtactttataagaagaaggaacagaccatttatgatgagtatgataaaggttatatcttgaactggcttgtagcgaattctaatgaatttgacatggaaccattaatcctaactttacgaccaaatgcctcatataaaaactttaaaccatctgaatcagatacttttatctattgtttaaatggtgaagtatcacttcaattaggaaatcaagtatataaagcttgtaaagaagatgtactttattttaaagcgaaagataaacatcgcttatataacgaaacagataaagaagtgaaggttttaatcgttgccacagcttcatatttatag

SEQ ID NO: 4187 - DNA, 279 bp, Staphylococcus epidermidis
atggaatatcaatatccattagatttagattggactaatgatgaaatgatgaaagtaattcatttctttaataaaatcgaaaattattatgaggcatctgtaaaaggtgacgaagttttaaatgcttataaaaattttaaacatattgtgcctggaaaagctgatgaaaaacagatttttaaagaatttgaaaataaaagtggttataatagttacaaagtagttcaagaaattaaaaaaaatccaaatcaaactttatttagtaaagatttcgactaa

SEQ ID NO: 4188 - DNA, 1407 bp, Staphylococcus epidermidis
atggtagttggagatttcccaattgaaacagatactattgtaataggagcaggtccaggtggatatgtcgcagccattcgcgcggctcaattaggacaaaaggtaacaatcgttgagaaaggtaatttaggtggtgtatgcttaaacgttggttgtataccttcaaaagcattactacatgcttctcatcgctttgttgaagcgcaaaattcagaaaacttaggggtaattgctgaaagcgtttcgttaaactatcaaaaagttcaagaattcaagacttctgtagttaataaattaactggcggtgttgaaggacttttaaaaggtaacaaagtagagattgttagaggtgaagcttatttcgttgataacaatagtttacgtgtcatggacgaaaagagtgctcaaacttacaatttcaaacatgcgattatagctacaggttcaagaccaattgaaattccaaattttgaatttggtaaacgtgttatcgattcaacaggagctttaaatctacaagaagtacctaacaaactagttgtagttggtggcggatatatcggttctgaattaggtactgcttttgcaaactttggctctgaagttactatccttgaaggtgcaaaagatattttaggcggatttgaaaagcaaatgacacaacctgttaaaaaaggtatgaaagaaaaaggtatcgaaatcgttactgaagcaatggcaaaatctgcagaagaaactgaaaatggtgtcaaagtaacttatgaggcaaaaggtgaggaacaaactatcgaagctgattatgtattagttacagttggccgtcgccctaatactgatgaattaggattagaagaacttggtctgaaatttgctgatcgtggattactagaagtggacaaacaaagtcgtacttctattgaaaatatctttgcgattggagatattgtacctggattaccattagctcacaaagctagttatgaaggtaaagttgctgctgaagcgatagatggtcaagccgcagaggtagactatattggtatgccagcagtttgctttacagaaccagaattagcacaagttggttatactgaagctcaagcaaaagaagaaggtttatcaattaaagcttctaaattcccttatgcagctaatggacgagctttatcattagatgatacaaatggttttgttaagttaattacacttaaagaagatgatacgcttattggagcacaagttgtaggtactggcgcatctgatattatctctgaattaggtttagctattgagtcaggtatgaatgctgaagatatcgcattaactgtacatgcacacccaactttaggtgaaatgacaatggaagctgctgaaaaagcaattggttatccaattcatactatgtaa

SEQ ID NO: 4189 - DNA, 1302 bp, Staphylococcus epidermidis
gtggcatttgaatttagattacccgatatcggggaaggtatccacgaaggtgaaattgttaaatggtttattaaagccggcgatacaattgaagaagatgatgtattagcagaagttcaaaatgataaatctgtagtagaaattccttctccagtaagtggtactgttgaagaagtgttagtagatgaaggaacagtggcagtagtaggagatgtcatcgttaaaattgatgcacctgatgcagaagaaatgcaatttaaaggtcatggcgatgatgaggattctaagaaagaagaaaaagaacaagaatcaccagtgcaagaagaagcttcatcaactcaatcacaagaaaagacagaagtagatgaaagtaaaactgttaaagcgatgccgtcagtgcgtaagtatgcacgtgaaaatggtgtcaatattaaagctgtaaatggttctggtaaaaatggacgaatcacaaaagaagacatcgatgcatacttaaatggtggtagttccgaagaaggttcaaacactagcgcagcatctgaatcaacttctagtgatgtcgttaatgcttctgcaacacaagcattaccagaaggcgacttccctgaaactacagaaaaaatacctgcaatgcgcaaagcaattgctaaagcaatggttaattctaaacacactgcacctcatgttacattaatggatgaaattgatgtgcaagaattatgggatcaccgtaagaaatttaaagaaattgctgctgaacaaggtacaaaacttactttcttaccatatgttgttaaagcattagtttctgcacttaaaaaatatccagcacttaatacttctttcaatgaagaagctggagaggttgtacacaaacattactggaatattggtattgctgcagatacggataaaggattattagtaccagtagttaaacatgccgatcgtaaatcaatattcgaaatttctgatgaaattaatgaactagctgtaaaagcacgtgatggtaaattaacttcagaagaaatgaaaggtgcaacatgcacaattagtaatatcggttccgctggtggacaatggttcactccagttatcaatcacccagaagtagctatcttaggaattggccgtatcgctcaaaaacctatcgttaaagatggagaaattgtagctgcaccagtgttagctttatcattaagctttgaccatagacaaatcgatggtgctactggacaaaatgctatgaatcacattaaacgcttattaaataatccagaattattattaatggaggggtaa

SEQ ID NO: 4190 - DNA, 978 bp, Staphylococcus epidermidis
atggcacaaatgacaatggttcaagcgattaacgatgcgcttaaaagtgaactcaaaagagacgaagacgttttagttttcggtgaagacgttggtgttaacggtggtgtattccgtgttactgaaggtttacaaaaagaatttggcgaagatcgagtatttgatacaccattagcagagtctggaattggtgggcttgcactaggcttagcagtgactggcttccgtcctgttatggaaattcaattcttaggattcgtttatgaagtatttgacgaagtagctggtcaaattgctcgtactcgtttccgttcaggtggaactaaaccagcgcctgttacaattcgtacaccttttggtggtggcgtccacactccagagttgcatgctgataatttagaaggtatcttagctcaatcacctggtttgaaagtagttattccatcaggtccttatgatgctaaaggattattaatttcttctattcaaagtaatgatccagttgtatatctagaacatatgaaattatatcgttctttccgtgaagaggttcctgaagaagaatacaaaattgacattggaaaagccaatgttaaaaaagaaggtaatgatattactctaatatcttacggggcaatggtacaagaatcactaaaagctgctgaagagttagaaaaagatggttattcagttgaagttattgacttacgtactgtacaaccaattgatatagatactttagtagcatcagttgagaaaactggacgtgctgtagttgtacaagaagcacaacgtcaagctggtgtgggtgcacaagtggcagcagaattagcagagcgagcaattctttcattagaagctccaatagctcgagtagccgcatcagatacaatttatccatttactcaagctgaaaacgtttggttaccaaataaaaaagatattatagagcaagctaaggcaactttagaattctaa

SEQ ID NO: 4191 - DNA, 1113 bp, Staphylococcus epidermidis
atggctcctaagttacaagcccaattcgatgcagttaaagttttaaatgagactcaatcgaaatttgaaatggttcaaattttggatgaagacggaaatgtcgttaatgaagacttagtacctgatttaacagacgaacaattagtggaattaatggaaagaatggtatggactagaattcttgatcaacgttctatttcgttaaatagacaaggacgtttaggtttctatgcaccaacagcaggacaagaagcttcacaattagcatctcagtatgctttagaaagtgaagacttcattttacctggttatcgtgatgtgcctcagattatttggcatggcttacctcttacagacgcattcttattctcaagaggacacttcaaaggtaaccaattccctgagggagttaatgcacttagccctcaaattattatcggtgcacaatatattcaaactgccggtgtagcgtttggacttaaaaaacgtggcaaaaatgcagtcgcaattacttatacaggtgatggtggttcatcacaaggtgacttctatgaaggaattaactttgcatctgcatacaaagcacctgcaatttttgtaattcaaaacaataactatgccatctctacaccacgtagtaaacaaacagctgcagaaacattagcacaaaaggctatttcagttggtatccctggaattcaagttgatggtatggatgctttagctgtttatcaagcaacattagaagcacgtgaacgtgcagtagcaggagaaggtcctactgttatcgaaactttaacttatcgttatggaccacatactatggctggtgatgatcctactcgttatagaacttcagatgaagatgctgaatgggagaaaaaagacccattagtacgtttcagaaaatatttagaagctaaaggtctttggaatgaagacaaagaaaatgaagtggttgaacgtgcaaaatctgaaataaaagcagctattaaagaggctgacaatacagaaaaacaaactgttacttctctaatggatatcatgtatgaagaaatgcctcaaaatttagcagaacaatatgaaatttacaaagagaaggagtcgaagtaa

SEQ ID NO: 4192 - DNA, 627 bp, Staphylococcus epidermidis
atgaattttaaaaagactgtagcaattgtcctaacgtcagcagtgttattagctggatgtactatagataaaaaagaaattaaaaaatatgatgatcaagtacaaaaagctatggaccaagagaaaaccgttaatcaagtaagtaaaaaaataaacgaattagaagagaaaaagcaaaaattatttaaaaaggtaaatgataaagatcaaagcacacgtaaaaaagcagctgaagatatagttgaaaatgtaaaacaaagacaaaaagaatttgaaaaagaagagaaggctctagataattctgaaaaagcatttaaacaagccaagcaatatcttgaacatgtagaaaacaaagcaaagaaaaaagaagttgaacaacttgatagtgctattaaagaaaaatataaatcacatgatgcttatgcaaaggcttacaaaaaagcacttaataaggaaaaagaactgttttcttatttgaatgaagataatgcaacacaatcggaagtagacggaaaatcgaaagatctttctaaagcatataaagaaatgaataataaatttaatgcttactcaaaagccattgagaaagtaaaaagagaaaaacaagatgtagaccaattaaaataa

SEQ ID NO: 4193 - DNA, 552 bp, Staphylococcus epidermidis
atgataacaatgaaagatattataagagatggtcatccaacacttcgtgaaaaagcgaaagaattaagcttcccactttctaacaatgataaagaaacattgcgcgcaatgcgtgaatttctaatcaatagtcaggatgaagaaaccgcaaaacgttatggtttacgttctggcgtaggtttagctgctccacaaattaatgaaccaaaacgtatgattgctgtctacttacctgatgatggaaacggtaaatcgtatgattatatgctcgtaaatcctaaaataatgagttacagtgtacaagaagcttatttaccaactggcgaaggttgtctaagtgttgatgaaaacatcccaggtttagtgcatcgtcatcatagagtcactattaaagctcaagatattgatggaaatgatgttaaattacgtctcaaaggctatcctgcaattgtatttcaacacgaaattgatcatctaaatggcattatgttttatgattatattgatgccaatgaacctctaaaaccacatgaagaggccgtagaagtctaa

SEQ ID NO: 4194 - DNA, 219 bp, Staphylococcus epidermidis
atggcagtatttaaagtattttatcaacataataaagatgaagtcatcgttcgtgaaaatactcaaacaatttatgttgagggacaaactgaggaacaagtgagacgttatttgaaagaccgaaattttaatattgaatttattactaaattagagggcgcacacttagaatatgaaaaagaacattcaacacactttaatgtggagaacgccgaataa

SEQ ID NO: 4195 - DNA, 1683 bp, Staphylococcus epidermidis
atgaaacaactacattcaaatgaagtaggtgtatatgcacttggtggtttaggtgaagttggaaaaaatacctatgctgttgagtacaaagatgaaattgtaatcattgatgctggaatcaaattccctgacgataatctgttaggaattgattatgtaattcctgattacacttacttagaacagaaccaagataaaattgtcggtctgtttattactcatggacacgaagaccatataggtggtgtgcccttcctattaaaacaaattaatgtacctatttacggtggtccattagcattaggtctcattcgcaataaactagaagaacatcatttgcttagaacgactgaattacatgaaatagatgaaagtagcgtaattaagtctaaacattttgaaatttctttctatctaaccacacatagtattccagaagcatatggcgttatagtcgatacacctgaaggtaaaattgttcatacgggagacttcaaatttgactttactcctgtaggtgagcctgctaacatagctaaaatggctcaattaggtcatgaaggtgtgttgtgcttactatcagactcaacaaacgcactagttccagattttactttaagtgaacgtgaagttggacagaatgtcgataaaattttcagaaattgtaaggggcgtattatctttgcaacttttgcttctaatatttatcgtgttcagcaagcagttgaagcagcaattaaatataatcgtaaaatcgttacatttggacgttcaatggaaaacaatatcaaaattggtatggaactaggatatatcaaagcgccaccagaaacgtttatagaacctaataaaataaatagtgtacctaaacacgagttactcattctttgtactggttctcaaggtgaacctatggctgcattatcaagaattgcaaatggtacacataagcaaataaaaattataccggaagacactgtagtatttagttcttcgcctattccaggtaacactaagagtatcaatcgtacaattaatgcgttgtacaaagctggtgcagatgtgattcatagtaaaatttcaaacattcacacttctggacacggttctcaaggtgatcaacaattaatgttacgtctgattcaacctaaatacttcctgccaattcacggtgaatatcgtatgcttaaagctcatggtgagactggtgttcaatgcggtgttgatgaagataatgtatttattttcgatatcggtgatgtacttgctttaacacatgattctgcacgaaaagcaggaagaattccttccggcaatgtacttgttgatggcagtggtataggtgatattggcaatgttgtcatcagagatcgtaaattactttcagaagaagggttagttattgttgttgtgagcattgactttaatactaacaaattactatctggccctgatattatttcacgcggttttgtttatatgcgggaatctggtcaattaatttatgatgctcaacgtaaaattaaaggcgatgtcatttctaaacttaacagcaataaagatattcaatggcatcaaattaaatcttcaattatcgaaacattacatccttatctttatgaaaaaacagctcgaaaacctatgattttacctgtgataatgaaagtaaatgaagataaataa

SEQ ID NO: 4196 - DNA, 660 bp, Staphylococcus epidermidis
atggataaagagtatgtcgtaattggactagggcgttttggtggtagtattgttagagaacttaacgcattagacatggatgttatggctattgatagagacgaaaatcgtgttaacgaatatagtgatatagcaacacatgcagttgttgctgatacaactgatgaggcagtaatgaagagtttaggaatacgtaatttcgatcatgttattgtcgctattggtgagaatatacaatctagtacactaacgacgttaattcttaaagaattaggtgttaaaaaggttactgctaaagcccaaaatgattatcatgctaagattttaaataaaataggtgccgatactgttgtgcaccctgaaagagatatgggaagacgtattgctcataatgttgctagtgctagtgtccttgactacttggaacttgctgatgagcattcaatcgttgaattaaaatctacagaaaaaatggcaggacaaacaattattgaattagatattcgagctcaatatggtattaacattatagcaattaaaagagctaaagaatttatagtctctccagaccctaacatcaatattgaaataggagacattttaattatgattggtcatgataatgacttaggtcgctttgaaaaaaatataagcaagtaa

SEQ ID NO: 4197 - DNA, 1017 bp, Staphylococcus epidermidis
atgatttacgcttatatcggtataacagtattatgggtatttttattttgttatattattatcgcctccattgattttggtgcaggatttttcgcattgcattctaaaatgacaggtattgagaaaaaggttaatcatttaatccatagatacctcaatccagtttgggaagttacaaatgtctttttcgttttcttttttgtaggatttataggtttttttcctgattctgctaaatacttaggaacagttttattagtacccggatcaatagctttaattcttatttctatacgaagtagtttttatgcttttgaaaattatggtcaagatactaaactgccctggattgtattatatggtttaacagggctgttaattccagcttctctagcaactgctctaacaatttcagaaggtggttatatctatgagcatggcacacatattgatttagactggatacaattattattaagtccatttgcatggtctgtagtattcttagccattgtttcagttctttatatttcatcaggttttttaacatattatgctcataaagcaaatgatcaacctgcttatgatatgacacgacaatggcatattttttgggggccacctatgattgtgatttcattatttgttttcttatctcttagaattcaaaattctgatcactttagaactgctatttttaattattggaggatgtttgcaatcagctttatattttttataatagctggattactgactatatttaaaaagaaacacggtctagcttttatcatggttatattgcaaatgttatttgcattctttggctacggaatgagtaaacttccatatttactttatccgtttattaaaattacagactcccatgtcaatccggaaatgggattatcattagttattgtttttgttttaggtttacttttattaattccatcgttaatattattattaagattatttgttttcgacaaagcatatgtggaaggaaagaaataa

SEQ ID NO: 4198 - DNA, 1356 bp, Staphylococcus epidermidis
atggattcagtagaaatagctcgattgttgacgggtatgacacttgcagtgcatatcatatttgcaacaattggtgttggtatgccacttatgtttgcaatagcagagtttattggcataaagaaaaatgatgcgaattatatcacattggctaaaagatggtcgaaaggctacacgataaccgttgctgttggagtcgttacaggtactattattggtttacaactttcacttgtctggccaacatttatgaaaatgggcggtcatgttatcgcattaccactattcatggaaacttttgcattcttttttgaagcaatctttttaagtatttatttatacacttgggaaagatttaaaaataaatggacacattttttcatatctatacccgttattataggaggttcattctcagcattctttattacatcagtcaattcatttatgaataccccagctggttttgaaattaaaaatggtcgtatggtaaatgttcagccattagaagcaatgtttaattcatcgtttatggttcgtgctttacatgtagttgcaactgcaggtatgacgatggcgtttatattagcagccatcgcagcgtttaaattattacgtcataatcatacagaagatagaacataccatacaaaagctcttaatttaagcatgattgttggattcatcaataccgttctttcgatgattgcaggagatttatctgctaaatttttacacaaagttcaaccagataagcttgcagcatatgaatggcattatgatacgcaatctcatgcgaatttagttcttttcggtgtattaaatgaaaaaacacatgaagtttcaggagcactagagattcccggattacttagttttttagcagataatagctttaatacaaaagttaaaggtttaaatgaatttcctaaaaatgaattacctcctatgatagtgcattactttttcgatttgatggtatcaatgggaatattctgttttatcatttcaggactatatatgttatttttaattgttaaaaagttacgtaaatatgtaactagtaatatgatgttatacgctatcttgttaactggtcctgcatcaatgttagcgatagaatttggttggttcttaactgaaatgggtcgtcaaccgtggattatacgaggatatatgcgcgtatcagaagctgctacccaggcggggggaatcacattagtaacgacgctattcggtttactatatcttttattactagttacttcggcttatgtactaattagaatgtttaaaaatcaacctgcttataaagatgtagaaaaagtgattaaagagagaggtgaaacaaaatga

SEQ ID NO: 4199 - DNA, 237 bp, Staphylococcus epidermidis
atgactgatacagtgattatttatacacaagatgactgtccaccttgtgcttttattaaaaattatttagtaaataaaaatataaaatttacagaaaaaaatatcaaaaaccaaaaatataaaaatgaaatgatggattacgatgcttttgctacaccttttattttgcttaaagggatgccaatgtatcaagtagatatggaaaaattgaatgatgaattgaatattacaccttaa

SEQ ID NO: 4200 - DNA, 1719 bp, Staphylococcus epidermidis
atgtctaaattaattaaagggattgctgcatcagatggtgtggcaatcgcaaaagcttacttaattgtagagccagacttatcctatgacagtaacgaaaaagttactgacatagaaagtgaagttgaaaagtttaatgacgctatcgaagcttcaaaaatcgaattaactaaaataagaaataatgccgaagctcaattaggtgctgataaagcagcgatttttgatgcacatttacttgttttagatgatccagaattaatacaacccattcaagacaaaattagaaatgacaaagtcaatgctgcaactggtttggatgaagtaacgacacaatttatttctatttttgagtcaatggataatgaatacatgaaagaacgtgcagctgatatcagagatgtttctaaacgtgtattggctcatattctaggtgtagatttacctaatcctagtttaatcaatgaaagtgctgtcattgtaggtaatgacctcacaccttcagatacagcacagttaaataaagaatttgttcaaggttttgtaactaatatcggtggtagaacaagccactctgcaattatgagtcgttcattagagattgcagctgttgtcggtactaaatctatcactgaagaagttaaacaaggtgatatgattattgtagatggtatgtccggagatgttatcatagatcctacagaagatgagttaattgcttatcaaaataaacgtgagcgtttctttgaagataagaaagaacttcaaaaattgcgcgatgctgatacagtaacagttgacggtgttcatgctgaactagctgctaatattggtactccagatgacttatcaggagttattgataacggtgcacaagggataggtttataccgtacagaattcttgtacatgggtagagatcaaatgcctactgaggaagaacaattcgaggcttataaaaaggtacttgaaactatggacggtaaacgtgtagttgtacgtactttagatattggcggagataaggagcttccatacttagatttgcctaaagaaatgaatccattcttaggttatcgtgcgatacgtttatgtttagcacagccggaaatctttagaccacaattacgtgcattactacgtgcttcagtctatgggaaattgaatattatgttcccaatggtagcaacaattaaagaattccgtgacgctaaatcaatgcttcttgaagagaaagaaaatcttcttcgcgaaggttacgaagtttcagatgatattgaattaggtattatggttgaaattccagctaccgcggcacttgctgatgtatttgctaaagaagtagatttctttagtataggaacgaatgacttaattcaatacacattagctgctgaccgtatgtctgaacgagtttcatacttatatcaaccatataatccttcaattttacgattagttaaacaagttattgaagcttctcataaagaaggtaaatggactggtatgtgtggtgaaatggctggagatcaaacagctgtgcctttattattaggtttaggtttagatgagttctcaatgagtgcgacttctatcctaaaagctagaagacaaatcaatggtttaagtaaaaatgaaatggctgaactcgctaatagagctgttgaatgctcaacgcaagaggaagtcgttgatttagttaaccaattagctaaataa

SEQ ID NO: 4201 - DNA, 267 bp, Staphylococcus epidermidis
atggaacaaaaatcatatgtaatcacagacgaaacagggattcatgctcgccctgctacaatgctagtacaaactgcatcaaaatttgattcagatattcaattagaatataacgggaagaaagttaatttaaaatcaatcatgggtgtaatgagcttaggtgtaggtaaagatgctgaaataactatttatgctgacggtagcgatgaaactgacgcaattcaatctatcactgatgtcttatcaaaagaaggtttagctgaataa

SEQ ID NO: 4202 - DNA, 540 bp, Staphylococcus epidermidis
atgggaattagaagtaaactaactaataatattacaaataaagtagggaactcattattgaacatagaggaaattaaagagaaaggtgatttgccaactacacaggaagaacttagacaacgcagagaaagagctgaaactctagttaaaaagaaatcgctactttcctccggtgctagtattgtccctattccaggacttgattttggagtagatcttaaattaatgagagatattatagaggatgtaaataaaatttatggtttagatcacgatcaagttaattcattgagtgatcaagtgaaagaaagaattatgtctgcagcggcaattcaaggaagtcaatttattggacgtaaggtatctgaggcgttgcttaaagttgtgattaaagatgtagctaaacgagcagctgccaaacaaacaaaatggttcccgtttgttgggcaagctgtatctgcatccattagctattattttatgagcaaattaggtaaagatcatattaataaatgtgaaaaagttatcaataacttatag

SEQ ID NO: 4203 - DNA, 1173 bp, Staphylococcus epidermidis
atgaaacttgctacgctaaataaaggcaaagaaacaaagtatttaaaccactatccattaatagatgaagaagatttatttgaacatgatcatcttaaagaaggtgatttgataacactggtgacagagcaacaacaatatatagctactggatatattggaagacaacataaaggattaggatgggtattgagttataatcaaaatgaagagattaacactttgttttttaaacgtttatttgaagctgcattagaagagcgacaatactatttcaacatagaaggtacaaatgcatttagattatttaatgctgaaggtgacggtgtaggtggcctgacaattgataattataacggacatcttttaattcaatggtattcgaaaggaatatataaatttagatttcctatcttagaagcaatcaaagaggtatatgaatacacttcaatttttgagaaaatgcgttttaaaggtacttcctacactggtggctttgtagaaggtaatgctcctgaatttcctatcgttgtagaagaaaattttaccttttataatgtagacctaaacgatggtcttatgactggtatatttttagatcaaaaagaagttagaaaaaaattaagagatcagttttcagaaagacgacacgtacttaacttattcagttacactggagcgttttcagtaatagcagctgaaaatgcaaactcaacaacaagtgtagacttagcaaatcgctctagagggctaactgaagaaaattttggtttaaatggtattaatcctaaatctcaatatatttatgttatggatacgtttgatttttataattatgcaggacgacatggacatcaatacgatacaattgttattgatccacctagctttgcgagaaataagaaaaaaacattctctgttcaaaaagattataatttattaattgaaggagcccttaacattttatcgccaggaggtacattactattatgtacgaattcaagtgcattttctcttaaggcatttaaaaacgtaataaagaaaacattagcccaaaataatattgtatatgaaataaatgaagtaatggggttacctaaagattttaaaactcatcctcactacaaaccttcaaaatatttaaaagcagtatttgtaacaataaaacattaa

SEQ ID NO: 4204 - DNA, 1293 bp, Staphylococcus epidermidis
atgtcttttcttaggaaacacaccgaaattatatttagttatatcatcggtatcgtttcactttttacaggtctcattatttttattaacttacctttaatcaaacaatttaaaggtgacaaaaaggttgatacgcatgtgcataacgtatgggaattcctaaatgccttttttgccgagattataaaagtgatgagtaaatttattggtggctttccaattacaagtgccatagtaatcatcgtatttggtattctagtgatgctgttaggtcacactttatttagaactattaaatacgattatgacatttcaattttctttttagttattggcattatgtactttatcattacattattgctaatgacacaagtgtatggcttttttgctatcgtctttattattccttttacagttcatattggttacatagtttataaagatgagttgaaccaagacaatcgaaagaaccattatatgtggattattgtaacttatggaatgagttatcttattacccaaatttcgctatatggacgtattgacgcaaatgaaattgaatcaattgatattttaagtgtaaatacattcttcattattatgtggttattaggtcagatggctatatggaatttcttattcctaagacgttcattaccactcactaaagaagaattaggcgaagaggaacctgaactttcaagaactaataaaggcaatgtatctaatcaaactaaagttcacttaaaacaactacaaaataagacaaccgagtatgcacgtaagactagaagaagtgttgatttagataaaattagagccaaaagggacaaatttaagcaaaaaattaacagcatagtagatatacaagaggacgatattccaaattggatgaaaaaacctaaatgggttaaacctatgtatgttcaattgttttgtggtgtaattattctgttttttgcttttctagaatttaataatagaaacgcattattcttaactggtgaatgggagttatcacaaacgcaatatgtagttgagtgggtaacattattattgctacttttcattattattatttatattgcaactacattaacttattatttaagggataaatattattatttacaactctttatgggcagtattttattctttaaatttcttacagaatttatcaatattatggtacatggattattattatcaattttcattacgccaatcttattattaatgcttattgcaatgattgttgcttattctttacagttgagagaaaaataa

SEQ ID NO: 4205 - DNA, 135 bp, Staphylococcus epidermidis
atgacaaataaagaattcgaaaaaaaatcagcagaaaaagccaaagaagtagaagaaaaacttaaagaacaaaacgaagaaaaaacagatgatatcgaacaaacaaagaaagatattcaagatacactagattaa

SEQ ID NO: 4206 - DNA, 1776 bp, Staphylococcus epidermidis
atgtattatacaaatagtaattatgaagcgtttgctcggcctaaaaaacctgaaaatgttgataataaatcagcctatttgataggggctggattagcttctttagctgcagcatgttttttaattagagatggacaaatgaaaggcgagaatatccatattttagaagagttagatatctcaggaggaagtttagatggcatcaatatggagcatcatggctatgtagtacgtggtggcagagaaatggaaaatcattttgaatgcttatgggatttattcagaagtataccatcacttgagcaaactaatgcttctgtgttagacgagttttattggttaaataaagaagaccctaattattctaaatgtagagcgattgaaagtggaggtaagcgtattgatactgatggtgattttacattaacaaaaaaagcaattaaagaaattttaaatttatgtttgatgaaagaagaagatttagacgatgttaaaatcactgatgtcttttcaagagactttttaaattctaatttttggctttattggaaaacaatgtttgcattcgagccatggcattcagcgatggagatgcgtagatatcttatgcgttttgtgcatcatattggtggtttagcagattttagtgcattaaaatttactaagtataatcaatatgaatctttagtattaccgatgatagaatatctaaaatcacatagcgtgaactttgaatttggagtacaagtgaataatattttagttgatgcaacaccatctactaaaattgctagagaaatcattttaactagagatgataaagaagaatctatcccgttgacagttaatgacttggtatttgttactaatggaagtattaccgaaagttcaacctatggtgataatgaccaccctgctcctataacacattctttaggtggtagttggacattatggaaaaacttagctaatcaaagtcctgaattcggaagacctgagaaattctgtgatcacattccagctaaaagttggttcgtatcagcaacggcaacaacagataataaaaaaataatctcatatatcgaacaattatgtaaaagagatgttttatcaggtcggacagtcacaggcggtatcatttctgtcgctaattcgagttggcaacttagttttacagtgaaccgtcagcaacaatttaagaaacaacctaaaaatcaagttagtgtatggatttacgcattatactctgacgaaaaaggagacttcattaaaaaaccaatcacggaatgtactggtagtgaaatctgtcaagaatggttatatcatatgggtgttccacaagaggaaattgttgaattagctcaatcagaatgtaacacgattcctgtttatatgccatatgtaactgcatatttcatgcctagagcatacaaagatcgaccgttagtagtaccgaatggctctaaaaatttagcatttattggaaactttgcagaaacagcacgggatactgtattcactacagaatattcagttagaacagctatggaagctgtttatcaattattggatgttgatagaggtgtacctgaagtttatgcctctgaatttgatgcacgcgtactgatggatgcattttatgaattaaatgatcgtaaatctttacatgaacttgttaataaaaactttattaaaagatcagtattaaatacagtgctgaagaaaatacgtggtactttcattgaagaattgttacgtaaacataaattactatag

SEQ ID NO: 4207 - DNA, 576 bp, Staphylococcus epidermidis
atgtcaaaaggtttgaaactatctgaaattcttgtgacagttttaatttcagtagtatttgccatcatttataacttatggtggtttgtttacaatattgtacaagttgcgggtattcacttagaacaacttacatatggtgtatggtttatggcagcagtcgtttgttacttaatcattcctaagccaggtatagcattattagcagaaatcgcagctggagctggtgaaacgattgttatgggaaaatttgatatacctactatcatatatgcgatattacagggattggcttgtgaaattatatttgctatttttaaatacaaatcacgttctgctgctgtagcaatgcttgctgggttagcaactgctttaatctctttcccagtggattacttctatggttacttaaacgaagttgctggatggaacttactactatttatagttttccgttcaattagcggaattgtattagctggtttagtttcatactggattgtcaaagcattagataaaaccggtgtaactaaattctttagaccagcatcacaacaagattacgataacctataa

SEQ ID NO: 4208 - DNA, 1404 bp, Staphylococcus epidermidis
ttgttacgtgttaaaaatttacgtttaaagtatccgaatggtgataggaaaatattcgataacttaaatcttgagattaaaaataaagaaaaagtgcttttactcggtccttccggatcaggtaaaagcacattacttaatgtattaagtggaatagtacctaatttaattgaacttccgatgaaatatgatgaattgaatattgatcatgatagtggcgttatatttcaagatccagataatcaattttgtatgccaaaagtatatgaagaacttgcatttgttttagaaaatagaaatattcctagaagtgagatggatcaagaaatcgaaaacgcactaaagtctgtagaccttaatgttactcataaaacatatgtcaacaatctaagtggcggcatgaaacagaagttagctattgttgaaacaatactacaaaaatcaaagacactttttttagatgagcctactgcaatgctcgacgtgaaagcaactgaagatttatggaagaaattaatcaatctttggaaagatcaaacagttttaattgttgagcataaggttgaacatatttggcaacatgttgaccgcgtgttgttattaaattatgatggtgaaattgttgctgacgacaccccagaacaaatcttagatcattatgaagcgttattaactgaatatggagtttggcaccctagagcatggcacagtgcaccacgccccatcccattacctaatcaaacaaagaacctcttatttcattttgacgacgggcaaattattagaggtaaaaagacacttttttcatccaaggagcttaaactgtattcaggtgaatggttaacaatcactggtaaaaatggtgctggtaaaacctctttactagaagctatgttacaactgattaaatatgaaggtgacatgttttatcgcgatcaattattatctaaaattaaacaagcggcaaagcatatgtatttggtatatcagaaccctgaattacaatttattactaattctgtttatgatgaagtgtatattcattataatcacttagatcctaagcatgcgaatgatgaaaccatggatctgttaaaattattacatttagatcaagttaaggatcatcatccttttgaaatatcaacaggtcaaaagcgtcgtttaagtgttgcaacagcattaagttcaaaggcagagattattttactagatgaaccaacattcggtctagatagtcataatacatttcaacttattaagttatttcaagaacgcgttaatcaaggtcaaacaattatcatggtgacacatgatccagaaattattaaacgatatccaacaagacgattacgcgtggaagatgggtgtcttaaagaaatggaaggtgaacacattgtttga

SEQ ID NO: 4209 - DNA, 807 bp, Staphylococcus epidermidis
ttgtttgaaagatggaaaaaacgccacaccttcgttgatgatgtaaatattattactaagttacttttaggtatcgcattattctttttcattatatttatccataacttcgactttatgatttatatcgtcatattaatgtttatgttcttacttttatttaacggtacagaatttaaaataacggcaatatttatattagttacaaccctctttgccttgatgtcatcattatttatgattttatatggtgatggagaacatatgcttgtaaaatttggtattttgcaaataagtacagaaagtattgtacgaggtcttcatctatctatgagaacaattaccgtttcaatgtttggtatactaatcgcattgacttcacaaattgtaatgattttttatagtttaatgcaacatttaaaggtaaagccaaagtttgcttatgcttttatggcagcgattagaatggttccacttataataagttctcttattcaattaagacgttccctaaaaatgcgttatcaaatgatagatgcatctaactataaaggaatcaagcgtcttaatcatttagtcatacctttattaagtcaaaatattcgacgtgcacatcaactttcagttgcaatggagtctaaaggttttaaagatggtccgagaacatactactatcgggtaacattttcatataaagatatcgtatttattgcttgtatattaattatcattactttgtcatttgtcttatcatcataccttccaattactggtattcatgatgtccgttttggacaattagactaa

SEQ ID NO: 4210 - DNA, 1242 bp, Staphylococcus epidermidis
ttgaaagttttaatagttggagctggtggacgtgaacatgcattagcttctaaaatcaatcaatctccaattgtagataaggtttacgcgattccaggaaatgatgcaatggtcaatattgctgaagtgcacagtgaaattgctgaatcagatcatcaagctattttacattttgctcagcataacgcaattgattgggtaatcattgggcctgaacaacctttaatagatgggttagctgatttattaagaaatgcaaatattaaagtgtttggtccaggacaagatgccgctcaaattgaaggttcaaaattatttgccaagcaattaatggacaaatatcgtattcctacagcagaatataaagaagtaagttcacgtaacgaggcgttgcaatatgttgaaacttgtgatttaccaatcgtaataaagaaagacggtttagcagcaggtaaaggggttattattgcttttacgagagaagacgcattagatggggtcaaaaaaatttatcaagaagaaaaagggaaagtcgttttcgaaagttatttagaaggagaagagttttctttaatgacttttgtaaatggagattatgcggttcctttcgactgtattgctcaagatcataagcgagcatttgataatgatcaaggaccaaatactggtgggatgggcgcatattgccctgtaccccacattgatgcatctgttcttgaacaaaccaataaggagattgctcaacctattgctaaagctatggcacaagaaggtcatgacttcttcggattactatatattggtgcaattttaacaaaagatggacctaaagttattgaatttaatgcacgttttggtgatcctgaagcacaagtattattaacacgtttagaaagtgacttaatgcaactcattatcgatttggaaaattgccaacccattcattttaactggaaagatgaagctgttgtaggagtaatgctagcatctaaaggataccctggttcatatgaaaaagggcatgaaataagtggttttaatctagattctcattattatgtgagtggattaaagaaagaaggtcaatgttttgtgaattctggtggaagagttatcctagctataggggaaggtccaacagttgaaaaagcacaagcaaatgcatatgaacatgcacgacaaataaaaagtgataatcttttttatcgtaatgatattgggaataaagccatcactaagtaa

SEQ ID NO: 4211 - DNA, 1479 bp, Staphylococcus epidermidis
atgaaaaaagcaatattaagcgtttctaataaaagtggaattgtagagtttgcaaaagcattaactaatttagactatgaactgtattctacgggtggtacaaaacgtgtattagaagatgcgaatatcaatattaagtccgtgtcagaattaacacaatttccagagattatggatggtcgtgttaaaacactacatccagcagtccatggtggtattttagctgatcgagataaagaacatcatttagagcaattacgagaacaacatattgatttaattgatatggtagtagtcaacctatatcctttccaacagactgttgctcaacctgatgtaacagaaactgatgcagtagaaaatattgatattggtggacctacaatgttaagagcagctgctaaaaactttaaacatgttacaactatcgtacatccttccgattacaacgaggtaattgagagaattaaaaatcatcaattggacgaagcatatagaaaatcgctaatggttaaagttttccaacatacaaatgaatatgatcatgctattgttaactatttcaaagacaataaagaaacactaagatatggcgaaaatcctcaacaatctgcatattttgttagaacatctgatagcaaacatacgattgctggtgcaaaacaattacatggtaaacaattgagttttaataatattaaagacgcagatgcagcgctcagtttagtaaaaaaattcaacgagccaactgctgtagcagtaaaacatatgaacccgtgtggagtaggaattggacagtcgattgatgaagcatttcaacatgcatatgaagcggataatcaatcaatatttggcggaattatagcattgaatagaacggtagatgttaaattagctgaagcattacattctatctttttagaagtagttatcgcacctcaatttactgaggaagctttaaaaatattgacacaaaagaaaaatattcgtttattacaaatagatatgacaattgataacgctgaacaagaatttgtttccgtttcaggtggttacttagtacaggataaagataataaagatgtgactcgaaacgacatgactgttgctaccgacactcaacctacagaagcacagtgggaagctatgcttctaggttggaaagttgtaagtgccgttaagagtaatgcagtgattttgagtaataacaaacaaacagttggtataggtgcaggacaaatgaatcgtgtaggttccgctaaaattgcaatcgaaagagcaatagaaattaacgataatgttgcgcttgtttcagatggtttcttcccaatgggagatacagttgaatatgctgccgaacatggtattaaggcaattattcaaccaggtggttcaattaaagatcaagattccattgatatggctaataaatatggcattacaatggttatgacaggtatgcgtcattttaaacattaa

SEQ ID NO: 4212 - DNA, 567 bp, Staphylococcus epidermidis
gtgaccaatatagcgatttttgcctcaggatcaggtagtaactttgaaaatattgtaaaacatatccaaacagggcaattatctggtatcaatgtaacggcactgtatacagataatgaaggggtaccctgtattgatagagctaaaaatttaaatattccaattcatattaacaagccaaaagacttttcatccaaatctttatatgaacagcatctacttaaattattatccagtgaggaagttcagtggattgtattagctggttatatgagactagttggccaagacttattacaagcttatgaaggaaggatattaaatatacatccctcattattgcctaaattcaaaggtttagatgccataggacaagcgttagaaagtggagatactgtaactggatcaactgtccattatgtagatagtgggatggatacgggagaaattattgaacaacagcaatgtgatataaaaccggacgatactaaagaacaattagaagatagagtaaaacatttagaatatgaactttatccaagagttatagctaaaatcattaaatag

SEQ ID NO: 4213 - DNA, 1032 bp, Staphylococcus epidermidis
atgtctaaagcatatgaggaatctggtgtaaatattcaagcaggatatgaagcagtcgaaagaataacaagtcatgttgaacgtacattgcgcaaagaagtattaggtggtttaggtggatttggtgcaacatttgatttgtctcaattaaaaatgaaagcgccagttctggtatcaggtactgacggtgtgggtacaaagttaaaattagcaattgactatggaaagcatgacacaattggtattgatgctgtcgcaatgtgtgtaaatgatattttaacaacaggtgctgaacctttatactttttagactatattgccacgaataaagtagtgccaagtactatagagcaaatcgttaaaggtataagtgacggttgcgaacaaaccaatacggcacttataggcggtgaaactgctgaaatgggagaaatgtatcatgaaggtgaatatgatattgctggttttgcagtaggagcggtagagaaagaggactatattgatggttcaaatgttgaagaaggacaagcaattattggtttagcttcaagtggtattcattcaaatggctatagtctagttagaaaaatgataaaagaatcaggagttcaattacatgatcaatttaatggtcaaacctttttagaaaccttccttgcaccaacaaaattgtatgtaaagcctattcttgaattaaagaaacatattgatatcaaagcgatgagccatattactggtggaggtttctatgaaaatattccgcgtgcccttcctaaaggtttatcagcaaaaatagatacacaatcattcccaacgttggaagtctttaattggcttcaaaaacagggcaacatttcaacgaatgaaatgtataacatatttaatatgggtattggatatacaattattgttgacaaaaaagatgttcaaacaacattaacaacgttacgtgcaatggatacaactgcatatgaaattggtgagattataaaagatgatgatacacctattcatttattggaggtagaatag

SEQ ID NO: 4214 - DNA, 1485 bp, Staphylococcus epidermidis
atgtctaactactcaggattaaatgaagaatgtggcgttttcggtatttggaatcatcctgaagcagcacagttaacatatatgggtctacatagtttacaacacagaggtcaagaaggtgcaggtattgtagtttcaaatcacgaaacgctaaaaggtgaacgaggattaggcctattaactgaagcaattaaagacgaacatatgtcaaatataaaaggttatccacatgcgataggacatgttcgttacgcaacctctggtaataaaggcattgaaaatattcaaccatttttatatcacttttatgatatgagcgtaggtatatgtcataacggtaatttaattaacgctaaatcattacgtcaaaatttagaagaacaaggtgcgattttccattcttcttcggatactgaagtcattatgcacttaattcgtcgtagtaaggcgccgacatttgaagaggcattgaaagagagtttacgactcattaagggtggatttacttttgccatcctaacaaaagatgcgttgtatggtgtagtagatcctaatgctattcgaccattagtagttggaaaaatggagaacggtgcttatattttagcaagtgaaacatgtgcgattgatgttttaggtgctgaatttatacaagatattcatgcaggtgagtatgttgttattacggatgaaggtatagaagttaagacttacacacgacaaacaacaactgcaatttcagctatggaatatatttattttgcgagacctgattcaacgattgcaggaaaaaatgttcatgcggtacgaaaggcatcaggtaaacggttagcacaggaaaacccagcaaaagcagatatggtaataggcgtacctaattcatcattatctgcagcaagtggttatgctgaagaaataggcctaccatatgaaatgggactagttaaaaatcaatatgttgctcgaacttttatacaacctactcaggaattaagagagcaaggtgtacgtgtgaaactgtcggctgttaaggatattgttgatggtaaagatatcgtacttgtagatgattcgattgttcgaggtacaacgattaaacgcatagttaaaatgcttaaggattcaggagctaaccgcattcacgtaagaattgcttctcccgaatttatgttccctagtttttatggtattgacgtatctacaacagctgaactcatctcagcaagtaagtctcctgaggaaattaaaaatcatattggtgcagattctcttgcttatttaagcgttgatggcttaatcgagtctataggacttgattatgatgcgccatatcatggcttgtgtgtagaaagttttacaggtgattatccagcaggactttacgattatgagaaaaattataaaaagcatttaagtgaacgtcaaaaatcatatatagctaataataaacattattttgatagtgagggaaatttacatgtctaa

SEQ ID NO: 4215 - DNA, 2190 bp, Staphylococcus epidermidis
atgtctaaatttatcgaaccaagtaatgaagagattaaacttgaaaaactttatcaagatatgggattaagtgataaagaatatgacaaagtggttgaaattcttggtagagaacccaacttcacagaagtaggaattttctcagtgatgtggagcgaacattgctcatataaacattctaaaccatttttaaaacaatttcctacgacaggagagcacgtattaatgggaccaggagaaggtgcaggtgttgtagatataggcgataatcaagccgtagtatttaaagttgagtctcacaatcatccatctgcaattgaaccatatcaaggtgcggcaactggagtcggaggtattattagagatattgtttcaattggtgcccgtccaattaatttactaaatagtcttcgttttggtgagttaactgtaaaacaaaatcaacgattacttaaaggtgttgtaagtggtattggtggatatggcaactgtattggtattcctactacggctggtgagattgaatttgatgaacgctatgatggcaatccattagtcaatgctatgtgtgtaggaatcattgatcatgatatggtccaaaaaggaacagctaagggtgttggtaattccgttatatatgtaggtttaaaaactgggcgtgacggtattcatggtgcaacatttgcatctgaagaacttactgaggaaagtgaaagtaaaagaccttcagtacaaattggagatccatttgtaggcaaaaagctaatggaagcaacattagaagcaattacttttgatgaactagtaggtatacaagatatgggagcagctggtttaacttcatcttcatctgaaatggcagctaaaggtggtagtggtttacatttaagacttgatcaagttccaacaagagaacctggaatttccccatatgaaatgatgctttcagaaacgcaagaaagaatgctgttagttgtagaaaaaggtacagaacaaaagtttttagatttattcaataaacacgaactagatagtgcagtaatcggtgaagtaacagacactgatagattcgtgcttacatacgatgatgaagtgtatgcagacattcctgtgcaacctcttgctgatgaggcaccagtgtatattttagaaggagaagaaaaggaatataatacatcaaaaaacgattacagcaatatagatgtacatgatacatttatcaagttattacaacacccaacaatagcatctaaacatcatttatatgaacaatacgatcaacaagtaggagcaaatacaattattaagccaggtttacaagcttcagttgtgcgcgtagaaggaacacaaaaagctattgcttcaactatagatggtgaagcacgttatgttttcaaccaaccttatgaaggtggaaaaatggttgttgctgaagcctatcgaaatttaattgcagtaggggcgacaccattggctatgactgattgtctaaactatggttctccagagaagaaagaaatctatcaacaattaatagattcaacaaaaggtatgtcagaagcttgtaaagtgcttcaaactcctgtagtttcaggaaatgtttcattatataacgagacacgtggaacctctatcttccctacacctgtcgtaggtatggttggtcttattgaagacgtgagctatctaaaagagtttaaacctaaagcaggagataagatttatttagttggtgaaacgcgtgatgactttggtggtagtcaattggaaaaattgttgtatggatcagttaatcatgagtttgaatctattgatttaagtgatgaagtttcaaaaggaaaattaatcaaacaggctattcgtaatggcattgcatctcatgtacaaacagttggtaagggcggcttattagttactttagctaaaattagtgcccattatgatttaggtatgcaagctcaattggatgttaccaatgcacaattatttagtgaaactcaaggacgatatattgttgttgttaaagaagggcaaactttggatatagatcaagctcaagaaattgggcatttaactcatcagcagttatttgatatatctaattcagacgtaaaaatgaaagaaaacgtttcagatatcaaacaaaaatgggaaggggctatagttcaatgtctaactactcaggattaa

SEQ ID NO: 4216 - DNA, 672 bp, Staphylococcus epidermidis
atgaaatttgcagttcttgtgttccctggttcaaactgcgatagagacatgtataacgcagctattaaatcaggtgttgatgcagcgtatgtcgattatcgtgaaacgactttagatggttttgatggtgttttaatacctggtggtttttcatttggcgattatttgagatcgggagctatggcaagtgttgctccgattattaaagaagttaagcgatttgcgaaagaaggtaagcctgttttaggagtatgtaatgggtttcaaattttaactgagattggattgttaccaggcgcattacttcataatgattcacatttatttataagtagaaacgaaactttaaaaattactaataatcaaacaccttttacgcatttatatgtgaaaaatgagaatgttgtttatcctgtagcacacggtgaaggtcattattattgtactgatgaaatatatcgtgaactcaacgataacaatcaaattatccttaaatatacgaataaccctaatggctcttatgaggatattgcaggaatagttaataaagagggaaacgtttgtgggatgatgccacaccctgaacgcgcacttgaaacattattaggaacaaatagtggtgtgaaattgtttgaatcaatggtgaaaagttggagggaacaaaatgtctaa

SEQ ID NO: 4217 - DNA, 261 bp, Staphylococcus epidermidis
atgaaaacgattgaactacatatcactttacaaccacaagttttagatacacaaggacaagctttaaaccgagcagttcacgatctcggttatgaacaagtgaatgacattcgagtaggtaaagttttatatatgacagttaatgaaccaactgacgaggctgttgataatattattacgacactaagtgaaaagttatttgctaatacagtcattgaagaatatagctataaagttatcgatgaaaaggagaaagcataa

SEQ ID NO: 4218 - DNA, 705 bp, Staphylococcus epidermidis
gtgtcattgttatatgaaggtaaagctaaaagagtattcacgacaaatattgatggacaattacgagttgaatataaagatgaggtaacagcaggaaacggtgcaaaaaaagatactatgattggcaagggtaagttaaataatcaaattacttctattatatttgattatttaactcataatcatattgacaatcactttattaaacaactttcacaaacagaacaactcgtccaacaagttgatattatacctttagaagttgttgttagaaacattgccactggttcgatcacaaaacgtcttggttttaaaaaggggcatacatttgaagaacctctagtagaattcttctacaaaaaagatgaacttaatgatccgcttattactgatgaccatgtaaaattactcggcatagcgaacgatgaagaaataaaacaacttaaacaaatggcaaaagatattaatcaagtactgattcaattgatgaatgaaatgagtttgagacttgtagattttaaggttgaatttggtaaaaccaatggtggaaaaattttacttgcagatgaaatctctcctgacacttgtagaatatgggataaaaatacggatactaactttgataaagatgtatatagaaacaacactggctcgttgattgaaacttatcaaacatttttaaataaattggaggatcttaaataa

SEQ ID NO: 4219 - DNA, 1128 bp, Staphylococcus epidermidis
atgaacttcagtaaacttaaatttggcgcgacaataggaatcattggcggagggcagttaggaaaaatgatggctcagtctgcacaaaaaatgggttataaggtgattgtcctagatcctaatgaagactgtccttgtcgttatgtcgcacatcagtttattcatgcaaattatgatgatgagcaagctttaaatcagttaggtgaaaattctgatgttgttacttatgagtttgaaaatatttcgtctgaacaattaaaaaaactcactaagttatatcatattccccaagggtaccaagctattgaactattacaagataggctaaccgagaagcaaacattactagaagcaaatactcaaattgttccttttgtacaaattcaaacaaatcaagacttattaaaagccatagaaaaattaggctttccgttcatagtgaaaacacgttttggtggatatgatggtaaaggacaaattttggtaagaaatgattcggaattagacgaagcataccagctagttgagaagcaagaatgtgttgctgaacaatatcttgatattcaaaaggaagtatctcttacagtaacaattggaaatgaacaacaaacaacatactttcctcttcaagaaaatgaacatcaaaatcaaatattatttaaaacagtcgttccagcaagatttgataaagaaaatgaagcacgtaaggaagttgagaaaatcactcgcgcaattcattttgtgggaacctttacagtagaattctttattgataaagaaaataacttatatgtaaatgaaattgcaccaagaccacataattctggacactattctatagaagcttgtgattattcacagtttgatacacatattttagccataactggtcaaaaacttccgcaagctattgaattattaaagccaacagtaatgatgaatttattaggtcgcgatttggatttacttgaaaatgaatttagcagacatccagattggcatattcacatttacggtaagaaagaaagaaaacctgatagaaaaatgggacacatgactttactgacggatgatgtcaatcaaacagaacaatatatgttaatgaaatttgaagggagagacaagtaa

SEQ ID NO: 4220 - DNA, 483 bp, Staphylococcus epidermidis
gtgaaagtagcagtcattatgggcagttcctcagattggaaaattatgaaagaaagttgttcgatgcttgaagaatttgaaataccgtacgaaaagaaagtcgtttcagctcatcgtacgcctcaaatgatgttcaatttcgctagtcaagcacgccaaaatggttttgatattatcattgccggtgcagggggagcagcacacttacctggaatggtagcttccatgacaacattacctgtgattggtgtgccaattgaatctaaaagtctaaaaggattagattcattactatctatcgtccaaatgcctggtggtatcccagttgcaaccacagcaattggaaaatcaggtgctaaaaatgctgggatattagcggcaagaatgttaggaataacaaatgaatcagttcaaaataatttggaaaattatgaaaaatatttagtcgcaaaagtggaggaaatgcaaaatgaacttcagtaa

SEQ ID NO: 4221 - DNA, 861 bp, Staphylococcus epidermidis
gtggttgctaaaattttagatggtaaacaaatagcaaaagaatatagacaaagacttaaaaatcaagtcaatgacttaaaagaatatggttttactccaaaattatcagtcatattagttggtaatgatggtgcaagccaaagttatgtaaaatcaaagaaaaaagcagcagaaaaaattggaatgatatcagaaattattcacttagacgaatccacatcagaagaagtagttttaagcgaacttaatcgattaaacaatgacgatactgttagtggtattttagttcaagtaccattacctaaacaggtaagcgaacaaaaagtacttgaagctatcaatccggaaaaagatgtagatggtttccatccaattaatattggaaaattgtatattgatgagcaaacctttgtaccatgtacacccctgggtattatggaaattttaaaacacgcagatattaatttagaaggaaaaaatgcagttgttattggtcgtagtcatattgttggccaacctgtttcaaagttattgttgcaagctaacgcaactgttacgattttacattcacgtacaaaaaatatgaatgcacacttaaaacaagcagatgtgattgttagcgcagtaggacaacctggtttagttactaaagaaaatgtcaaaaaaggcgcagtaattatagatgttggtaatacacctgatgaaaatggaaaattaaaaggagatgtagcatatgatgaaataaaagaaatagctagtgcaattactccagtaccaggtggtgttggtcctttaactattacaatggtacttaataatacacttcttgcagagaaattaagacgtggcttaacaaaataa

SEQ ID NO: 4222 - DNA, 318 bp, Staphylococcus epidermidis
atgaacaaattactacagtcattatcagcacttggagtttcagctacattagtgacacccaatttaaatgcagaagccactactaatactgaacctcaattaaaaggtgttaacgatatcgttattgaaaaaggacaagaatataatttacttaaaggcataagtgcttacgataaagaagacggcgatcttactcataaaatcaaaattgatggtcaagttgatacatccaaagcaggtaagtataaagtaaaatatcaagttaccgattctgatggtgctgaaaaaacttctataagaaatattgaagtaaaatga

SEQ ID NO: 4223 - DNA, 1125 bp, Staphylococcus epidermidis
gtgtcaaaatttaagtctttgcttctattatttggcacactaattttacttagtggttgttcaaatatagaagtttttaatgcaaaagggccagtagcaagcagtcagaagttcttgattatctattcaataattttcatgcttgttattgttgctgtagtgctttccatgttcgctatttttatttttaaatatagctacaaaaagaatagcgaatctggtaagatgcaccacaattctctaattgaaacaatttggtttgtggtacctattttaatcgtaattgctttagctattcctacagttaaaactttatacgattatgaaaaaccaccagaaaaagacaaagatccacttgtcgtttacgcagtaagtgctggctataaatggttctttgcctaccctgatcaacatattgaaactgttaacacattaacaattcctaaagatcgaccagttgtattcaagcttcaatctatggatacaatgacaagtttctggattccacaattaggtggtcagaaatatgccatgactggtatgactatgaattggactttaacagctgatcaattaggtactttcagaggtcgtaactcaaacttcaatggtgagggattctctcgtcaaacatttaaagttcactctgtaagtcaaaatgattttgataagtgggtaaaagaggctaaaggtaagaaaactttaagtcaagatacttttgacaagcaactcttaccaagcacatctaacaaagaattaacatttagtggaactcatatggcgtttgttgaccctgcggctgatccagagtatatcttctacgcttacaaacgttacaactttgaacaaaaagatcctaacttcacagctgaagaggatttatacaaagatgtaaaagataaaccaatcaaacctgctcgtaaggttcatataacaaaccctaactatgaacgtcacggtatgaaacctatgattctcggcaacaatgaaaaatacgataatgagttcaaaaaagaagaggatcataactctaaagaaatggaaaaaatttctaagggagcaaaagacgaaaatgcgtctaaacttcacaaaaaagaacacgatgatcatggaggtggacattaa

SEQ ID NO: 4224 - DNA, 1989 bp, Staphylococcus epidermidis
atgaattttccatgggatcaactactagttaaaggaaattggatgattatctcagcacaaattgctgcgccattcttagtcatcggccttatagcagttatatcttatttcaaattatggaaatatctatataaagaatggttcacatccgtagaccataaaaaaatcggtatcatgtatttaatttctgccgtattaatgttcgttcgtggtggtatcgatgcgttaatgttacgtactcaattaacaattccagataacaaattcttggaagcaaaccactataatgaagtatttactacgcacggcgtaattatgattatatttatggctatgccatttatctttggtttatggaatgttgttattccattacaacttggtgcacgcgatgttgccttccctgtaatgaataacgttagtttctggctattcttcgctggtatgattttattcaacctatcatttattgtaggtggatcaccagctgctggttggactaactacgcaccacttgctggtgaattcagtccaggtccaggtgttaactattatttaattgcaattcaaatatctggtatcggatcgttaatgactggtatcaacttctttgttacgattctaagatgtaaaactccaacaatgaagtttatgcaaatgccaatgttcagtgtaacaacattcattacaacattaatcgttatattagcattcccagtgttcactgtagcacttgctttaatgactgctgatagaatttttggaactcagttcttcactgtagcaaatggcggtatgccaatgctttgggcaaacttcttctgggtatgggggcaccctgaagtttatatcgttattttgccagcattcggtatgtactcagaaatcatccctacttttgcccgtaaacgtttattcggtcatcaaagtatgatttgggcaactgcaggtatcgcattcttaagtttcttagtttgggttcaccatttcttcactatgggtaatggtgcgttaattaactcattcttctctatctcaacaatgttaatcggtgttccaaccggagttaaactatttaactggttgctcacattatacaaaggtagaattacatttgagtcacctatgctattctcattagcattcatccctaacttcttattaggaggggttactggtgtaatgcttgcaatggcatcagctgactatcaatatcacaacacttatttcttagtagctcacttccactatacattggttactggtgtagtatttgcctgcttagctggtttaatcttctggtatccaaaaatgatgggctacaagttaaatgaaacattaaacaaatggtgcttctggttcttcatgatcggatttaacgtttgtttcttaccacaattcattctaggtttagatggtatgccacgtcgtctatacacttacatgccttctgatggttggtggttactaaacttcatctcaactatcggtgcagtattgatggcaattggattcttattcctagttgcaagtatcgtttatagtcatatcaaagctccacgtgaagctactggagataactgggatggacttggtcgtactttagaatggtctacagcatcagctattccacctaaatacaactttgctatcactcctgattggaatgactacgatacattcgttgatatgaaagaacatggtcgtcattatttagacaaccataactacaaagatattcatatgccaaacaatactccagtaggattctggatgggtatatttatgactattggtggtttcttcttaatcttcgaatctattgttccagcacttatctgtttagcaggtatcttcattactatgatttggagaagtttccaaattgatcatggttaccacatccctgcttcagaagttgcagaaactgaagctcgtttaagagaagctcgaattaaagaaagggaggctgtaagtcatgagtcatga

SEQ ID NO: 4225 - DNA, 606 bp, Staphylococcus epidermidis
atgagtcatgatgcaaatactattgattctcgtacacacgaaggcgaattaaataaacttggcttttggattttccttacagctgaatttgcgttattcggtaccctatttgcaacgttattaacgttacaacatggtggcggatatggcggtaaattaactaccgacttattcgaattacatttgattttaataatgacttttgcattattaattagttcttatacttgtggtattgcaatttattacatgcgacaagaaaaacaaaacttaatgatgttttggatgattatcacagttatcctaggtcttgtattcgtaggtttcgaaatttacgaattcgcacactatgcttctgaaggtgttaacccaactattggctccttctggtctagtttctttatactactaggtacgcacggtgcacacgtatcattaggtattgtttgggttatttgtttgttaattcaaatcggcactcgtggtttggattcatacaatgctcctaaattatttatagtaagtttatactggcacttcttagatgttgtttgggtcttcatctttactgccgtatatatgatagggatggtgtatagcggatga

SEQ ID NO: 4226 - DNA, 291 bp, Staphylococcus epidermidis
atgaatacaatcgtaaaacatacagtaggttttattgcttctatcgtactaacgcttttagcagtttttgtaactctatacactaatatgacattccatgctaaggtaactatcatctttggttttgctttcattcaagctgcccttcaattattaatgttcatgcatttaactgaaggtaaagatggacgtttacaatcgttcaaagttatctttgcaattatcattactttagtaactgttatcggaacatactgggtaatgcaaggtggacactcttctcacttataa

SEQ ID NO: 4227 - DNA, 909 bp, Staphylococcus epidermidis
atgtctattcccattataattgatactgatcctggtatagatgatgctacagcaattagtatcgcactttcacaccctcaatttgacgttaaaatgatatcaactgtgaatggtaatgtaggtattgagaaaacgacagcaaatgcattaaagctaaaaaggttttttaatagttctgttcctgtacatagaggggcatcccaaccattgattaatgacatctttgaagctacatcaattcatggtgagtctggtatggatggttacgagtttccacaaataaatcaagatgatttaacatcaattcatgcagttgaagcaatgagaaatctattagtaaatactcaagaacctttaaccttgattgccataggtccactaacaaatatcgctattcttttaactagttatcccgaagttcaaccatttattaaggaaattgttttaatgggtggtagtaccggtagaggtaatgtaacgcctttagctgaatttaatatatattgtgatccagaagctgctcaaattgtatttaactctggattacctttgactatgattggtcttgatttggctcgtgaagcattgtttactcaccattttgtaaaagacttcaaagatacaaatgcaacttcaaacatgttatataatttatttcagcactataagagtgaagattttgaaataggatttaaattatacgatgtattcactatattatatttgttggatccagaagcctttaatgtcaaggaggcgtatactcaaatagaattaaatggcaactttacaaggggagccacagtggtagactttaatatggagcatcccaattgtacagttgttttaagtcctgttgaaagacagtatgaggatttattcttaaacgccctttcttattgtaaataa

SEQ ID NO: 4228 - DNA, 1203 bp, Staphylococcus epidermidis
atgaaattaaataaatttaaaatcgtattttttattatcgtattattaactttagtcgtgtcaataggtatattaggtgttgaatggacaagacacctagaattaaaaaaacaaacgttaagtcaagaaagtggaaatacgaattatatagaaaagagagataagactgttgagaaacctaaaaaaataaagactaaatatgataaaaaagatcctacttccaaatcgataaacaaatatttagaaaaaactcaatttaatggaactgtagctgtatttgataatggaaaagttaaaatgaataaaggatatggttatcaagatatagagaaaggcaaaaagaacactgcaaatacaatgtatttaataggatcagcgcaaaaatttacaacaggtttaatgctgaagcaacttgaagtcgaaaataaagtgaatttgcaagattcagtcactaaatatattccttggtttaaaacaaataaagaaattacaattaaagatttaatgttacataaaagtggactatataaatatgaagcttcaactaatatcaaaaatttagaacaggctgttagagcaattcaagctcgaggtattgatgatacagtttatcataagcatcaatataatgatgctaattatttagttttagctaaagttattgaaaatgttactggaaaaccatatgttaaaaattattatgaacgattaggtaataaatataatctcaaacatactgctttttatgacgagaaacctcttcaaagtgagatggcaaaaggctataagtttaaaaataatactttttcattccttaaacctaatatattagatcaatattatggagctggtaatttatatatgacgccacatgatatgggcaaattaatttatacgttacaacaaaataaaatctttaatgcacgtcaaactcgacctattttacatgaatttggaactcaagaatatccagaagaatatagatatggtttttacataactccgtatttaaatagagtcaacggggtattctttggtcaaatttttactgtttactttaatgatcggtatattgtcattttagggacgaatgtaagtaatacacctggattagtgagtaatgaagacaaaatgagacacattttctataatattcttgaccagaaaaagccttataatacagcaggtgttaaagttgagtaa

SEQ ID NO: 4229 - DNA, 1239 bp, Staphylococcus epidermidis
atgaacaaatttataaaatattttttaatattattatcttttggtctcctcgttgttccaattatttttgctactcaattatatcaaagttcagaatcggcatttgagtcatctcaaaacactaaagattctcaacgaaagtctactttaagagattcaaaagttgatcctgaaaaacaacctatatcaattttattcttaggtatagacgataatgaaggtagagaaaaaaacgggcaaagtgtagaacattctaggtcagatgctatgatattatctacttttaatcagaaaaagcatcaaataagaatgcttagcatacctagagatactatcagttatatacctaaagttggctattacgataaaataacacatgcgcatgcatatggtggacctcttgctgctatggactcagttgaagcaacaatgaatgtaccggtagattattatgtgcgtattaatatgaaagcctttgttgaagcagttgatgaattaggtggtatatattatgacgtaccatataacttaaatgaacctaacagtgatgatactggtagaattaaaataaaaaaaggataccaaaagctaaacggcgaccaagcattagctgtagctcgaactagacaccatgattcagaccttaaacgtggtcaaagacaaatggaacttattaaaatattgttccaaaaagctcaaaatttaaaatctatagataaacttgacaatgttattagtattgtagggaaaaatgctaaacataatttaactcaaaaagaaattaagtctctagccaaaatgtatcttggtggtagtactgaaattaaaacatcacaacttaaaggtaaggatgactacttaaatgatatatactattaccacccaagcgtaaaaagtattatggaatattcaaatcttttacgtaatgatttagatttatctaaaataacaaacaaaaacgatttcttagatcaaagagtcattaaacgatatggttcactcgtacccttaacagaattagatgaagacttattgcgtaagaaccaaaaggaatcgactgatagtcagaaagagtctgattcttcatcacaaaataatgatgaagaagatcaaactaacgaacaaacagaccaaaatagcttaaacggaaacgaacagtacccaaatcaacaagacaacaatcaaaccaatggtgaaaatggtatgataaataatgacaattatccttacgcacaataa

SEQ ID NO: 4230 - DNA, 471 bp, Staphylococcus epidermidis
atgagtcgtaaaacatatgaaaaaattgctaatattaatggtatgttcaacgtacttgaacaacaaatcattcatagtaaagatatggcattatttaggaatgaatttttctatgtaaaccatgaacacagagaaaattatgaagcgcttttgatctactacaaggatagtttagataatcccgttgtagatggcgcatgttacattcttgcattacctgaaatatttaataaggttgatgtgtttgagtctgatttaccttttacctgggtttatgatgaaaatggactttctgatacaatgaaaagtatcagtgtgccccttcaatatcttattgcagccgctttggaagtgactgatgtaaatatatttaagccttcaggttttactatgggcatgaacaattggaatattgcccaattacgtattttttggcaatactgcgctatcgtcagaaaagaggctttataa

SEQ ID NO: 4231 - DNA, 132 bp, Staphylococcus epidermidis
atgtataaagattataataagactcaacttactttaccaatagaaacttcagttcttatccccacaaatgatattcacgacatgtacctgactcattctttttttggtgatgaactaattatgaatttataa

SEQ ID NO: 4232 - DNA, 423 bp, Staphylococcus epidermidis
gtgtttcaaatagcaaaaaaccaaacgatgctagatgattgctttgaaataagaaagtgtgttttcgtcgaagaacaaggcgtaccactcgaaaatgaatttgatcaatatgaagattactcattccatatagtgggatatataaatggtgttcctatggcaactgctagaattagacctttaaatactcatatttgtaaaattgaacgtgtagcaatcatcaagtggtatcgtggtcttgggtacggtaaaaatttaatacatgctattgaaacaattgcaaaaaaacaccaatacaatgaactcactatgaatgctcaattacaagctcgagacttttacttaaaactaggttactcaccttttggtaaagtattcttagaagaaaatataaatcatattagtatgaataagtttttataa

SEQ ID NO: 4233 - DNA, 4008 bp, Staphylococcus epidermidis
atggcgaaaaaattcaattacaaattaccgtctatggttgctttaacgttatttggcacagcttttactgcacatcaagcaaatgctgctgaacaaccacagaatcagtctaatcataaaaatgtattagatgatcaaactgccctcaaacaagcagaaaaagctaaaagcgaagttacacaatcaactacaaatgtatctggtacacaaacatatcaagaccctacccaagttcaacctaaacaagacacacaaagtactacatatgatgcatcattagatgaaatgagtacttataatgaaatttcatcaaatcaaaagcaacaatctttatcaacagatgatgcgaatcaaaatcaaacgaattctgttacaaaaaatcaacaagaagaaacaaatgatttgacacaagaagataaaacatccactgatacaaatcaattacaggagacacaatctgtagcaaaagaaaatgagaaagatttaggagctaacgcaaataatgaacaacaagacaagaagatgactgcaagtcaaccttccgaaaatcaagcaattgaaactcaaactgcttctaatgataatgaaagccaacaaaaaagtcagcaagtaacttctgaacaaaatgaaactgctacacctaaagtatcaaatacaaacgcatctggttataattttgattacgatgatgaagacgatgatagctcaacagaccatttagagcctatctcattaaacaatgtgaatgctacatctaaacaaactacttcatataaatataaagaaccagctcaacgtgtaacaactaatactgtaaaaaaagaaacggcatctaatcaagcgactatagatacaaagcaattccccccatttagtgcaactgctcaaccgagaacagtttattctgtatctagtcaaaaaacatcatcattaccgaaatatacaccaaaggttaattcttcaataaataactatattcgtaaaaagaatatgaaagcaccaagaattgaagaagattatacgtcatatttccctaaatatggctatagaaacggtgtgggacgtcctgaaggtatcgttgttcatgatactgcaaatgataactcaacaatcgatggcgagattgctttcatgaaacgtaattacacaaatgcattcgtacacgcatttgttgatggcaatagaattatagaaacagctccgacagattacttatcttggggtgcaggtccatatggaaatcaacgttttatcaatgttgaaatcgtccatacacatgattatgattcatttgcacgttcaatgaacaactacgctgattatgctgcaacgcaattgcaatattataatttaaaacctgatagcgctgaaaacgatggaagaggaacagtttggacacatgctgctatctctaacttcttaggaggtactgatcacgctgaccctcaccaatatttaagaagtcacaattatagctatgcagaattatatgacttaatttatgaaaaatatttaattaaaacgaagcaagtagcaccttggggcacaacatctacaaaaccgtcacaaccttctaaaccatcaggaggaactaataataagttaactgtgtctgctaatcgtggtgttgctcaaattaaaccaacaaataatggcttatatacaactgtttatgacagtaaaggtcataagactgatcaagtacaaaaaactctatccgttactaaaactgcaacattaggaaataacaaattctatttagttgaagactacaatagcggtaaaaaatacggttgggttaaacaaggtgatgttgtttataacactgctaaggcaccagtaaaagtgaatcaaacatataatgttaaagcagggtcaacactttacacagttccttggggtacaccaaaacaagttgctagcaaagtatctggtactggaaatcaaacatttaaagcaactaaacagcaacaaattgataaagcaacgtatctttatggtacagtgaatggtaaatctggttggattagtaaatattacttaactacagcatctaaacctagcaatccaactaaaccttcaacaaacaaccaattaacagtgactaacaatagtggtgttgctcaaatcaatgcaaaaaatagtggcttatatactacagtttatgacactaaaggaaagacaacaaatcaaatccaacgtacattgtcagtgacgaaagctgccacacttggtgataaaaaattctatcttgttggtgattataatactggtacaaattatggttgggtaaaacaagatgaggtcatttacaacacagctaaatcacctgtaaaaatcaatcaaacatacaacgtcaaacctggtgttaaattacacacagtaccttggggcacatataatcaagtggctggaacagtttcaggtaaaggcgatcaaacttttaaagcaactaaacaacaacaaattgataaagcaacatatctttatggtacagtgaacggtaaatctggttggattagtaaatactatttaactgcaccatcaaaagttcaagctttgtctactcaatcaacaccagcacctaaacaagtaaaaccatctacacaaactgtaaatcaaattgctcaagtgaaagctaataattctggaataagagcatctgtatatgataaaacagccaaaagtggtacgaaatacgctaaccgtacattccttatcaataaacaacgtactcaaggtaataacacgtatgtactacttcaagatggaacaagtaatactccattaggatgggtaaacattaatgatgtgacaactcaaaatatcggaaaacaaactcagtctataggtaaatattcagtaaaacctacaaataatggtctatattctattgcttggggtactaaaaaccaacaattactagcacctaatacgctagctaatcaagcatttaatgcttccaaagctgtttacgttggtaaagatttatatctatacggtacagtcaataacagaacaggatggattgctgctaaggatttaatccaaaacagtactgacgctcaatcaacaccatataactatacttttgttatcaataatagtaaaagttatttctatatggatccaacaaaagcaaaccgatattctttaaaaccatattatgaacaaactttcacagtcattaagcaaaaaaatattaatggcgttaaatggtactatggtcaacttttagacggtaaatatgtttggataaaatcaactgacttagttaaggaaaaaattaaatatgcatatactggaatgactttaaataacgcgataaatatccaatctcgtcttaaatataaaccacaagtacaaaatgagcctttgaaatggtcaaatgctaattatagtcaaattaaaaatgctatggatacaaagcgtttagctaatgattcatccttaaaatatcaattcttacgtttagatcaaccacaatacttgtcagcacaagctctcaataaattattaaaaggcaaaggtgtacttgaaaaccaaggcgctgcatttagccaagctgcacgtaagtatggtctaaatgaaatttatcttatctcacatgctttagtagaaacaggtaatggaacttcacaacttgctaaaggtggagatgtttcaaaaggtaaattcacaactaaaacaggtcacaaataccataatgtctttggaattggtgcatttgacaataatgcacttgtagatggtatcaaatacgctaaaaatgctggatggacttctgtctctaaagcaattattggtggcgctaaattcattggaaattcatacgtgaaagcaggacaaaatacgctatataaaatgcgttggaatcctgcaaaccctggtacgcatcaatatgcaactgatattaattgggcaaatgtcaacgcacaagtattaaaacaattttatgataaaattggtgaagtcggtaagtacttcgaaattccaacatacaaataa

SEQ ID NO: 4234 - DNA, 420 bp, Staphylococcus epidermidis
atgtataaacaacttgaaaaacttatcacactgacaaataatgatttgaatttagttaatagacgctttggtcaacgaactgacattacttctgaacaattagagttactacgtattttatataattatgatcgtttatctcaatacgatttaactatgaagattagtagggaacaatcaattgtatcaagatggattaaaaagttagtccaaaaaggttatatcatgagtcaacaatctcatgaagatttacgatgtaaagaactgatattaactgaagaagcaagggctttaattcagcaaatcaacacggcgagatgcgagttaattgaagcgagatgtcaatgtctatcttcagacgaaattgcaagtttaaatcaattattaaacaaacttaatagtagacacattttcatctga

SEQ ID NO: 4235 - DNA, 1008 bp, Staphylococcus epidermidis
atgacagccatcaaagatagggattattttttcgataatgctcgagcaatattgatatttctagtcgtattaggacatttattacagccttatacatctgaagataaatttttacaagctttatatttattaatatatagctttcatatgcctacctttctgtttatctcaggctattttgctaagaatttagataaacctaactatttagaaaaaattgcaaaaaaattacttcttccttatgtaatattttttgcgtttttctcactttattactatttcactggtaaagaagatgcaattcaattagacccatttaatccggtttttgcattgtggtttttactcaccctttttttctttcacgttgttttagttatagtgagaaggtataatccgtatattgtattattcatatccatacttgtttctgtattagctggtttctctggcaatatcgatagttatatgagtatatcaagaaccattgtgttcttccctatcttctttataggacatttggttacacaatcacatacggaaaaacttagaaataaaaaatggatccccatttcaataatcattctgattaccttctttataggatacacaatccatcctattaatggagattggttattaggaagtacaccttatacttctttagaaagtaacggggaggatgtttatagtcctctaaaacgcttattactctatatcattatacttttaactatgtgtgcatttctaaatctaatgccacaaactaagcgtatttatacatatataggacagcgcacaatgtttgtttatttattacacggtatcgttataggagtcattcgcgggtttgatttatatccatttaaggatcagatttctatctttacctatctttatttatttatcagtgcgagtgtgattgtattaatattatcttcaaaatgggtttgcaaatggacgaatccgttcattaatttaaaaaggccctctcaatttaaaaattaa

SEQ ID NO: 4236 - DNA, 1185 bp, Staphylococcus epidermidis
atgaaattatcattaaattcaagttcaaaatttttaagagcccctagtattcgtcaattttctaatagaattaaagcgattgacgattgtgttaatttaacaattggacaacccgattttcctatgccagatgtggtcaaaaatgcttatatcaaagcaatcaaaaacgataaaacaagttattctcataacaaaggtttatttgaaacacgcgaagctattagccaatattttaaacgaaaatataatttcctttatagtgaggaagaaatcatcgttactaatggtgcgagtgaagcattagatacatcgttaagaagcattattgagcctggcgatgatatacttattccaggaccgatatacgctggttatatcccattagttgaaactctaggtggaaatccagtatatatagataccacacaatcagattttaaagtaacacctgaactgattgagtcgcatctaacgcataaaactaaagctatacttctaaattaccctaccaacccaacaggtgtaatactcgaacgctctgaagtcaaaaatatagtagacacacttgtaaacaaacacatttttataatcagtgatgagatttatgctgaaaatacgtttaaaggacaacatacatcttttgctgaatttccagaaattcgagatcaattattacttataggtggtttgagtaagtcccattctgcaacaggtattcgaatcggctttttacttggtcctgaatatttaattgaaaaattaacctttatgcacgcttacaattgtatttgtgcaaatgtaccagctcaaattgcttgtactaccgctttaaatgaagggataaatgcccctctatacatgaatcgtgattatatcgaacgtcgtaattacctgaaagaaaaattagaatcattaggcttcgaattaactgctcaacctgaaggcgcattttacatcttccctagtattaaaagatttacggaaaacgattttgaattttgtgttgatgtgttggagaaagcacacttagctatggttcctggttcttccttcaccgatattggcaaagggtatattcgaatttcatatgcttatgatatggaaacattaaaaaaaggaatgcatcgattagaaaattatttacagcaacattatccagagcaaatgaccactccaactaaataa

SEQ ID NO: 4237 - DNA, 819 bp, Staphylococcus epidermidis
atgactagacagtgggaaacacttagagaatatgatgaaattaaatatgaatttttcgaagggattgccaaagtaacgattaatcgtccagaagtaagaaatgcatttactcctaaaacagttgctgaaatgattgatgcattttcacgtgcgcgtgatgatcaaaatgtatcagtaattgtattaactggtgaaggggacaaagcgttttgttcaggtggagatcaaaaaaaacgtggacacggtggttatgtaggtgaagatgatattcctcgtttaaatgtattagatttacaacgtttaattcgtgtgattcctaaaccagtaatagcaatggttagaggctatgcaattggtggaggaaatgtacttaatgttgtttgtgatttaactatcgctgcagacaatgctatttttggacaaactggaccaaaagtaggctcatttgatgctgggtacggttctggctacctagctcgtatagttggccataaaaaagcaagagaaatctggtacttatgccgtcaatataatgcacaggaagctttggatatgggcttagtgaatactgtagttccattagaacaagttgaagacgaaacagttaaatggtgtaaagacatcatgcaacactcaccaactgctttacgtttcttaaaagcagcaatgaatgctgatactgatggtttagctggtttacaacaaatggctggagatgcgactttactttactatactactgatgaagcgaaagaaggacgtgacgcgtttaaagaaaaacgtaatcctgattttgaccaattccctaaattcccataa

SEQ ID NO: 4238 - DNA, 804 bp, Staphylococcus epidermidis
atgttacattataatttttatgaatctaagaaccaaagtaagcaattattggtgatgttgcatggttttataagtgatgctactacttatcattcacatatagaacgcctcgtagaacatacaaacgtgctcacaattgacttgcctggccatggcttagatacttcatctatggacgaagtgtgggatttcccgtttattacacgtcaacttgatgaagttttaatacaatatcaaacatatgatgtgtttcttctaggttactctatgggtggccgggtagcactttattatgctatacatggtaatgaaacgctatcagggttgctcttagtgagtacttcagcaggtattcaaaatgagacggataaagtagaacgtgcccaagtggatgctgcacgtgcaaaagtacttgaaattgctggtttagatatttttgtgaatgattgggaaaagttaccactttttcgttcgcagtataatctagcacctgagatacgccaaagtattcgcaataatcgcttgaatcaagatgctaataaattggccaaagcacttcgtgattatggtactggtcatatgcctaatttatggccacatctatcattgatacgcattcctactttaattttagtaggggaaaaagataaaaagtttgttcagataggacaacaattagagaatcacttacaagatagtcataaagttcaaatttctaatgtcggacatacaattcatgtggaagatagtacggaatttgatacaataatattaggttttttaaaggaggagcaaaatgactag

SEQ ID NO: 4239 - DNA, 1671 bp, Staphylococcus epidermidis
atgaatcatagtgaagctttaactgaacaagtattttcatttgcttcagagctttatgcttatggtgtaagagaagtagtaattagtccaggttcacgttcaacaccattagcacttgttttcgaagcacatccaaatattaaaacatggattcaccctgatgagcgaagtgctgcattttttgctttaggtcttattaaaggtagcgaaaaacctgtagcaattctttgtacatctggaacagccgctgcgaactacacacccgctatagctgaaagtcaaattagtcgtttgcctctcgttgttttaacgagcgacagaccgcatgaactgcgcagtgtgggtgcacctcaagcaatcaatcaggtaaatatgtttagtaattatgtgaactttcaatttgatttgccgattgctgatggaagtgaacatacaattgatacaattaattatcaaatgcaaattgcaagtcaatatttatatggaccacaccgaggaccgattcattttaatttaccatttagagaaccactaacaccagatttagatcgtgtcgatttattaacatctgtaactaaaacgttacctcattatcagaaatcgatttcggtagatgatataaaagacatattacaagaaaaaaatggtctcatcattgtcggagatatgcaacaccaagctgttgatcaaatattaacgtattcaactatatatgatctgccaatcttagcagatccccttagtcagcttcgtaaagagaaacatcctaatgttataaccacttatgatttattgtatcgagcaggattaaatttagaagtagactatgtcatacgtgtaggtaagccagttatttctaaaaaattaaatcaatggttgaagaaaaccgatgcgtatcaaattattgtgcagaataatgatcaaattgatgtatttccgacaccacctcatatatcttatgagatttcagcaaatgattttttccgttcattaatggaagaaccacttgttgaacgaaaaaaatggttacagcaatggcaatcacttgaacaacaagcacgcattgaaataagtgattacttaaagcatgcgacagatgaagcggcatatgtagggagtttaattcaaaaacttacaaaagaagatacattatttgttggaaatagtatgccaattagagatgtcgataatttactgtttgatagtgaggcatctgtatacgctaatcggggtgccaatggaatagacggagtagtttcaactgcgctaggtatggcggcacataagaatgtgacattgcttattggtgatttatctttttatcatgacatgaacggtttattaatggccaaattaaatgaacttcatattaacattgtattagttaataacaacggaggaggtatcttttcatatttacctcaaaaacgatcggctacaaaatattttgagcgattatttggaacaccaacaggcttaaactttgaatatactgcactgttatatgattttacatttaagcgctttgataatttgactgactttaaatatgctgaattatctaaaatgggttctcacatgtatgaagttataaccaatagagacgaaaatttgcatcaacaccaaaatttatatcagaaattgagtgagattgttaatgttacattataa

SEQ ID NO: 4240 - DNA, 1371 bp, Staphylococcus epidermidis
gtgaaaaaaatggatgtgaatgtagacgaacaggcaatcgtcgataagttatatgaaagtacaaaagattgggtttcagttgaagttgaattaaataaaactatgaaacctagtgtgttgtttcatttaactgaaaaagatgctggggaccgtttttacatgcgcttaaatgataattattcttcgtattttggatatcatgctattcataggtttaaaaacgactttgagaataagcaatccatttttaaggactgggaaaaattaaaaaataatattgaacttattcatccacataataaatatcatcatcttagattgtgtggcggttttcaattttcgagtcacaaatcagatgatgaatggagagaatatggtttaaaccattttgttttacctaaagtattaatttctaatgaaggtacgcgtacttatctaacttatacaacaaagcgacaagattttgatttacaagcatttaaaactttagtggcacattttgaacaaacaaccatggataaccctgaggaagcacttggagatgtgacgcgtatggaagatatttataaggatgattggcgtgatctcgtaaaagaagcgattgatacgattgacgacaataaaaaaatcgttctcgcacgtcgtcgtttagtcaaatttgataaaaaaatcaatattccatatgttttaaaccgggctcttgaaaatgaaaaaaatagttatatatttttattagaagctaatcagtcaatattcttttctcaaacgcctgagcaattaatcaaagttgaagatggtgttttatctacaaaagctgtagcaggtaccattaaacgtacacataatgagcaaatagataataagaatatagaggcatttcttaaagataagaaaaatttaggagaacatcgttttgttgttgagagcatcttaaatgatattgagccttttgtacaggatgtagagtacaatgaaacgcctaatattttaaaaaatgatcatatgtatcatttatatacggaaatcaaagctaatttaaatgacaaatcatacattggtttaatcgatcgtttacatcctacacctgcgttaggtggctaccctaaagaagaagcgcttgattttattgagaataaagagtttggtactcgaggtttatatggcgcgccggtaggctatattgatgtttatgatgattgtgaattcattgttgctatacgttctatgctaattaaagagcaacaagcgactttatacgctggatgcggcattgttaaaaattcggatcctgatagtgaagttgctgaaactgcagttaaattctcaccaatgatgaacgccttaggagtagataataatgatgaatcatag

SEQ ID NO: 4241 - DNA, 939 bp, Staphylococcus epidermidis
atgtcagatcaatatcaacaatattccactgttaagaagtactggcaattgatgagacctcatactttaacagccgctgttgtccctgtactcgttggtactgcagcagctaaaatatatttactcggtagcgaagaccatctgaaattcagtcttttcttagctatgttgcttgcatgtttgttaattcaagctgcaacaaacatgtttaatgaatactatgactttaaaaaaggtcttgatgatcatacctctgtgggtattggtggcgctattgtacgtaatggtatgagtcctaaacaagtaatgaatttagcaattgctttttacatcattgcagcacttttaggtatctttttagcaatacaaagctcattctggattattccagtaggcatagtttgtatggcaattggctatctatataccggtggccctattccaatttcatggacaccttttggtgaactattttcaggattatttatgggtatgattatcatactactttcatttttcatacaaaccggtaatgttcaaggatatgccgtatggttaagtattccaatagtcatcacaattggtttaatcaatatgggtaacaatattcgtgaccgtgttaaagacaaggctagcggtagaaaaactttgcctatacttttaggtaaacgtgcttcagttatttttatggcaataatgtatgccatcgcatacatcattgtcatcattacagccttttttaaacctgcgggatcactattttacttgttagttttattatcattcccaatgcctattaaagcagtgagacgttttaataaaaatgatacacctgaaacaatgatgcctgcgatggctgcgacaggtaaaacgaatacattctttggtttattgtatgcattaggaatctatattagtgcacttttaggtgcaatctaa

SEQ ID NO: 4242 - DNA, 558 bp, Staphylococcus epidermidis
gtgattagaaaagcgaaaacgagtgataatcgacagattgcagagttatgttaccttatttggagagatatggaattagatattaccaaggaaataactaaagatcgtattattgaagcgatagaattaagtattgtgaatgtgagatatcggtcgttttatgagcatatttgggtatatgagaaagacggggttgttgctggatgtgtaattgcgtatcctgggaaagaggaaatggattttgaacaacaatggcttaagttaccacttgaagaagatatccttcagttaggtacaccattacctgaaaaagaatcatacgatgatgaaatatatatagaagcagtagtaacgactccaaaatatcgaggacaaggtattgcaacacaacttttaaagtatgtaatttccactcatgcacatgaaaaatggggattgaattgtgattatgataataataaagcacgccacctatatcacaaattagggtttaaagaggatgcgacaattcgtttatatggccatcaatattttcatatgacattgaataataagtaa

SEQ ID NO: 4243 - DNA, 216 bp, Staphylococcus epidermidis
atgaaagttaacaaaacaatttatattatagttgcattgattttaggtggtctgggcgtgcataaattttatgccgaccaagttggacaaggtattctacatctcgtctttttctggactggcattccaagtgttgtcgcaatcattcatgctatcattgttatttttactaaaaaagcagatgaatacggctacataacttttgataaaaaataa

SEQ ID NO: 4244 - DNA, 159 bp, Staphylococcus epidermidis
gtggagaaaccttcagtattatcgttaatacttttacgtggtgataataataaacatacacatttgtttgtagaatttgaggagttcgacagagcaaatgaagaaaaacacgcaaaagttgaatatcatagttctaaaaataaaacagatacattataa

SEQ ID NO: 4245 - DNA, 369 bp, Staphylococcus epidermidis
atgtatatggcatggtctttatggacggaaaagccttcaaatatcgaagaaatagaacctatgtcagctaaaaagcagattttatttgctttatctgtttctttattaaatcttcatgcaataatggatactgttggtgttatcggaacgagtgcttcagtttatgatggttatgacaaagttgttttttcattggctacaatttctgtatcttggatttggtttgtctttttagctattttaggaagaattacaggaaaaattgataaaagtggtaagtatatcgttattttaaataaagtttctagcgttattgttattattgtaggattaattatattaaaaaatattgttggaattttaagttag

SEQ ID NO: 4246 - DNA, 126 bp, Staphylococcus epidermidis
atgttgcaacctttgatacatggactattattagctttaggtttaattttacctttaggggctcaaaatgtgtttgtatttaatcaaggagctaaccaaaaaaaattagtaaagcattacctgtaa

SEQ ID NO: 4247 - DNA, 231 bp, Staphylococcus epidermidis
atgagagcatttgataatttaatgcatgaagcttgtcatcgatctttatttacaaataagttttggaataaatggataacttgtttatttgttgcatttccagtatttactagttatacagcatatcgaaatgctcatcattgtactggattttttaaaactacattgcctggcttttatagtgtagttaaagatatttttacaccgaactatgaaaggaaagagagttag

SEQ ID NO: 4248 - DNA, 237 bp, Staphylococcus epidermidis
atggaggattacgaatgtataaaatctgttagcgccttagaagataaagagaaggaaatacgagagaaagatgatttattaaataaagcagttgggcgtattgaaaatacatacgataatttcaatcgactttacgaaatggcaaagccatttaaagagaatgtagaaatagctttaaagcttttaaaaattttactaaaagagctaatgaagaaacacatttgcggaaagagttaa

SEQ ID NO: 4249 - DNA, 252 bp, Staphylococcus epidermidis
gtgcactttgaaattgtaccaattacagaagatggacgattaagtgctaaagatgttgtaggtaataaaaaagcattagcaagctttcaagataaatttaatgagtatgtaaatgaacgtggttatgaattagaacaaggaacttcaagagaattaacaaatagacaacacgatcaagttaatagttataaacaaaaaacagaatatcataagaaagaatatgaacgtaggtataaaattcagcccatataa

SEQ ID NO: 4250 - DNA, 174 bp, Staphylococcus epidermidis
ttgataaatgacggaaaacaaaattttaatgatttgattgatgaaaaaattgagcggaactatacaggcaaaagaaaaattagaaaagacgcagtaaaacatatagacggaatgattacatcagataatgaattttttagtaatcagacaccagtaaatacaaaatttttttga

SEQ ID NO: 4251 - DNA, 603 bp, Staphylococcus epidermidis
atgaaaacatatcgtcatttctgtttgtttttattaatgctgcttattatgtttatggctacaatgatatatttgtttttgactatttacggtatagaaaattggataaagccaaattttgaagattcgggtattaacgcatttatagtattaatagtatttatagttatcgaaattttactgaattgtataatccctattgtgtatttaaagttaatctataaattctttgataaagatatatatgatgttattcctttatataaattaataataggatttactggactattttttactttacttaaaatcctcattagttattataaaaaacttcaaggaaacgatgaattcttaaaattcatctctaagaacgttagtacacatataaatgattacgatattgtatatgcaatgattttggcagtttcattattagcagttgattacgcaaaatcaagaaaagaattaatagagaaaaaagaaattgaaaatgcgtcttactatatctataagactaataaaactaaagacaagaaaatattatcatatacaatacgcagtgaaataaatactaaaactaaactaaaacgaaaaaaatga

SEQ ID NO: 4252 - DNA, 921 bp, Staphylococcus epidermidis
atggcaaaagaatatttaggagaatggaacggtgtacccgtatatacagactttttaccttatggaacaagacgcacagggcaaccattagacacgggtagtcctatttttgcagtgtatcatgatacaggtaatccagatagtacagctcaacaaaatgttgactactataaaaatacttacatgcaagactgggcttctactgcttcagcacacttttttgttgatgatgaagaatgtattatctgtattcctttagatgaaaaagcatggcacgtgatttatgatacgcctacagataactattattttggagatgacgcaaatgatgctgcatttggtggagaattatgttatttccctgatgatagagaacaatcattaaaagcattagataatttcgcacgtgtctttgcagtactatttgattcatggaatattgaccactttaataaagcaccaggtcatcaagatattcaagatgataaacgcgatccaggtaatgcacttgaagcgtgtggttatggtcgtgatgaaattgatgtgattgataatttagtacaacgctatattgatggagaagatgttgatacagatacagttgtgaatcaacctgaagagcatgacgaaattattgaaaagaaaccagtaggatgtacacgtgtcaaagtttggtctgaagaaccttattatagaggtacaatcaaatatgatgcgtcattacgtgaacgtgcaggtagtagctttgataattatagctttgcgagagaaaaagatgtacttgaagcgggtgcaacagtatacatttatgaagaaattcaagatccacaagggaatatttggtgtagaacttattcaccaagtaataacggttgggtgcataagcatactattgaagtagaagaaacttataaagattaa

SEQ ID NO: 4253 - DNA, 387 bp, Staphylococcus epidermidis
ttggaacaagtaaataacattcaaattgataatttctcaagtttcttttttacaggttcatggacaattatagatatacttatcattctaattggattagatgtaattagtggtgttattaaagcaactcgtgaacatacaattaaaagttctgtagctaacataggacttgctaaaaaagtaggtatcttaatggtagttatagttgcaaatcttgcagatattgtgtttaaagctgatggaatggttgttaatggtacagttgctttctatattatcggtgaagcagtgagtattttagaaaattgttcagtaattggtgtaccactacccgaattacttacaaaacgtttaggtattacagacgataaaaatattaaaaactaa

SEQ ID NO: 4254 - DNA, 282 bp, Staphylococcus epidermidis
atgtcaaacaaaacaagattttacttagttagaatgtcaaaaggtacaagtgaatatagtggagaacaaaaattaaagtataatccttataactacggttatgcagtggctttagaagatgaacaaccaacattttatgatactgaagaaagtgcaacttcaattgcaactacattgaattcactatataaattaactggagtccaagcatatgttgatgtttataaagaagaagtgaaagtgattaaagtaacaaataatagtccttcggaggtatcataa

SEQ ID NO: 4255 - DNA, 411 bp, Staphylococcus epidermidis
atgttagaaattaagaattcagacttagtacaaactaagtcttttttatatgagttaaaacttaaaccaaaattatcaagacatcgtactaaattagttaaattaattgatgaaaaaattaaagacttatccgatgcatctaatgaaattattcaacaatatgcaaaaaaagatgaaaacggtaatccaatcataaatgataatatggttgaatttgacagtgtagaaaatcgtatagagtttgaaaaagaggatagcattttaattaatgaagtttcaaagattaatttagatgaatatcccaatatttataattctattcaactagcgttatcagaattagatgttgaattagataaagaaaaagcagaaacgtacgaattattatgtgagttattcaaagtagagtaa

SEQ ID NO: 4256 - DNA, 3456 bp, Staphylococcus epidermidis
ttgatttatttacaagaaacaaatttttactataatggtttacctttatcacaagcctatgatgatgttatcgaacgtgatttaaacggtatttataaattaatatttaaattaccagtaaatgaaagtgaccaacacaagttagtagaaaaagatagcatgttaaaagcgactgaacattttagagagattggttataacatatttagagttagatatatagataaagaagaggattatgtacaatttacggcgtatcaaataatttttgatttagctaagaagtacgttaatcctttttttgttaatgatttattaccagtagacgctttaaagatgtggtcacaaaaattcaatgaaccacctaatttatctattgagtattggagtgatacaactgacaaacgtgtgacttactactctaacaaacaagatgacttaaaacctagatatgcattaaatgtgttagttgaaatggccaatcaatctgatttagatttagacttttacttgaatggtatttcattagggcgtataggtagagatacacagtttctgtatacgactaataaaaacataacctcatttggtcaagaagataattacgatgaagttattacacgtattatagcaacctcaaaattcaaacctgaatatgataaagagaaattaaagaaaaaacaaaaagaagaagttgaagctttaaaaacaaaacaagctgaatttaataaacgattagcagatgaaaagcgtcaaaaccgaattgagaaagaaattaaagaagctataagacttgaaggattaaaaaagatacgttataaagaacagaaaaaaagaagttataaaacaatgcaggttagagtatttaagtcatctgatgaaatagaaaatgaaattagagaaaagtataaagcacaacaacaaaaaacagatatacaaagacaactagcaaaagaacatgctgaaaaacaaaaagcagaaattgctaaattgaaagagaaacataaagaagaaacagaattactaaatgaagaaataaccttatctgtaactgtagatagtccattaattaatgaatatcccgaagtatatgaaatgtctattgagaataacgatattaagacagttgaagaattaacaacatttgcagaaaactattttagtgtacaaaacatagataaacctaatgtgtctacaaagattggtttagaggttttgcagaatgaggaagtgcatttaggagatacggtaatcgttagacatattgaacaagatatagacgtgcgtaatcgcgtcatagcgacgaagtatagtccaatggataaaaagtatctagaagttactttcggctctaaaacaagcaattatgcaacgcaaaatagtaatttatcaaattctaacaccgaaatggttattagggattatcaaagccaactagaacagtatcttgattttagattaaatactgaaagagaaaactttaacaatcattttgaacaagaaactggattaattagagataagataaatgaatctaatcagacatcacaagcaagcattaatgtacttgataataaattcactgaagaatttaataacgttcaaaatgaatttagaacatcacttcaaaatgctcaaaatcaaattaatataaatcaagcatcatatactagtgataaagaagttgttcaatcaaagctaactgaattatatagtaagcaaaatgaatcaaagttatatatagatacaaaggctaatgatgttacgaatgaatttaatcagagtatagaaaaggctaaaagtgaagttctacaagcaactaactttagtaatagtgctacacttgaacaaatcaatcagattaataggaaagtagataatatgaagattggtgcagtaaatttattaaaaggtacttcaaactacactacaccatttaatcataataagatagtggaatttggaaaagttattaatgatcagttatatgcattagaacatgaagatagtaaaggttatttcttttgggaaacaaaccaattcgtgaaattagagcctaataccgactatgtattgagttatgacgttatccctaaatttgaagtaggtggagcatatacaccaattgaaatcgttaatgaaaatggttattcattaaaacctagacagtttctttttaaaaatgaaacgataaaagaagttagagataagcaaagattaacttttaaattcaatactggaaaccaaactaacttacgtatttattttacatctacgtggcctaataaactcgtttatattgctaaaccacaactagaaaaaggtactgtagcaagtgattggtcacctaatgtagatgatttagaaaaacaaattaatgttgtcgcagacagtatttcatcaagagcaattgaggcagttagaggggatattaactatttaagaagtaacattttaactgcagatagtgttaatgcaaacatggttaatgtcgatcgtgcattaatcgataaattaatgacgaataatttactggttaataacttaacatcaaactatacattaactgaaaaaatgaaatctaaagccttagaatcagtttatggtaatatttccaatttacgtactagattaataactgctaatagtattacttcaaacgctattaatgttgattatggtttagtgaataagttaatcagtaatgaaacttttgttaatacactcactgctaaaagtgcattcattaatgcaattaaagcgattgatattgatgcatcaagaattactagtggtgtattacgttcaacaagtggtagtatgcgttggaatttaaacgctaatagtttagattattttgacggtgcagaaacaaattattatggacattcaagaatcattttccatacgactaataattctatttatcaaagtaataatgggacatgtgcttttctacattttaataggactaagggtacacaatatcctgcaattgcagtaggtacgagtggtaacttagatgataattccaatacaggtagtttctcaggcattaagtgtcatactgctaaagcaacagatgatggactttcacaagtaggcatcattaccgataaagtatatttcaatagtcacggtggagatgtaaacacaggtggttggacaatagaaaattatcgtaaaggtggaaatacattaagagcattttatggtaataatacaagagaatacaaatatgaattaggtcaagatggttatagatttaatactgtatggacgagtggattaaacgatagaattaaaatcgttaattatactgatggctatgcaggaatattaagtaataatgagaaatatggaattcaatttagtaattatgatgtaagagtaaaatacggtaaatattggtactcttttggtgatatattacgtggtgattcatggagagtttaa

SEQ ID NO: 4257 - DNA, 771 bp, Staphylococcus epidermidis
ttgatacaatttaatgcattagaatataacggtgtaaaaacaagtgatttttcatttaaagtatatgtagaagtgaatgacggaattaatatcccacaacgtaaaactaaaatcataacaactgaccaaatgcacggagctttaattaaatctagtgacaattattcaacgattgaaaagaaatataaattttatgtacagggagctactttacaagagatggcacctttattcaaatggttaaatagtagtattaacgataatggtttctcactatctaaacatcatacgaattatttaaaaccttatgacaatccaggtcgatattacaacgttttaaaagtaattgttggaaatgcatatgttgatgaatttgacggttatgaatttgatgttacatttacgtgccaaccatttagctattcagacggaagtttagacgatacacaattaacggttgtatttcctgaaatgagaacaattacaaatacaagtggcatacacatgtaccctcaattagaaattgaaacactcaatcacaatgacagtttagttactataggtgaacaaacaattcatattgtagcaccagataactatttagctatagaatgctttccaggtcaacaaaatgtcagtgataaaaatggattaagaaatgagtgtatgattggtgaattttttaaaattccaccaggtgaacacggtattagcgcaactgataatataagcaaaataacaattaattgtaggtggggtgacttagcttga

SEQ ID NO: 4258 - DNA, 4182 bp, Staphylococcus epidermidis
ttggcagaattaaaaagagcaggaattaaacttactgcagagggttcagcacaatataaagccgatttgaaaagtgcaactgcagcacttcaacaaatggctgcagaatctaaacgtaatattgcagcattaggtcaaaatgcaagtgcttcaaaaagatatggtttagctattaaagatttaggtaatactgctaagcttgcacaagcgaagttagatgttttaaatactaagcaaaaacaattggcaaattcatcaagagtttatgctagtgaaattaataagttagaaaatcaattaaaaggtgcgaaaggtaatacttctcaattatcaagtgctttagcagagttacgttcaaaagaatcgcttaataatgcagaattatcacgacttaatgcaactatagcgaaaactgaaacacagatgttaaaagctaaaagtgcagcgaatcagatggcgaatgagtatcgtaatgcaggtggacgttttgcagatgtttcagaaaagatgaaatcaataggtaataacattgataatactggcaccaaagcagtaaattttggtagaacaatgacaactagagttactacaccaattgttgcaggtttaggatatgctgctagagcctatgtaaaatttgacgatcagatgaatcaaatgaaagtacaacttgatgacggtagtgtatcagcaggaaaattaaaagaacaagtgagcgaattaggtaaaacgtctcaagatatggctaaacagtatggtgtggctggcgaatctattagaaatggtatgaatgagttaatcaaaaaaggttttacttttaatcaagttactggagcaatgcctagcatattaaaagctactgttgcatcaggagacgactttaattcagttatgagtgtttcatctagtgtacttgaacagtttggtttaaaagttgatgatactaatcaaatgataaaaaatacagaccgagtgacatctgtattaacttatactgctaataaaacatcggcaggctttgcagatttaggagaagctatgcaaaatgttggaccgatggcagcaaataacaaccaatcattagaggatatggcttcaacattaggtatcttatcaaatagaggtattgaaggtggagaagcaggtacgtatttaatgaacgctttacagaacctagctacaccaacaaaagaacaagctagaggactgcgagatttaggtgttgcagcatttgatgcaaacggtaagatgcgttcattcccagacattttagaagatatagaaaaagctactagtggaatgagtgacgaacagaaaaacgctgcattaaatacgatatttaacactcaagctatgaaaggtattaacccacttattcaagctggttcaaagtcaattaaagacttatctaaaagtacaaaagacgcttctaaataccaagatgatttatctaaaaaaatgagtgaatcagcatctagaaatgtagctaaaatgaaagaatcatttaaagttttagcagaaacattaggacaacaagtcgtacctgctattatacctttaattgataaggctacagatttagcaaataagtttggccaattagataaagatacacaaggagctataataaaaattgcagcatttacaggagcgataggtccactgtctctaggattaggaagtattgttagaagtataggtggaactgttaaaggtataggaacattagcacggggtttcggaaaaattacaagtggagcaggtaaagttgtaggtggtgctgaaaaagcagcaggtggagtaagtaaatttggttctatggctcaaaaagttggaggtttcgcaccgttattaagtaatccttatgtattagggtttggtgctatagttgcagcttcagcgggcgtgggatatttggtctaccaaaatatgcataaagatgacaacaatcataaagctgccgtagaccaaactaaaggaaaatatcaagaatggtttgacactgttacgaacggagcatcagacgctgcaggttcacaaactaaaattcaagatgctactaaaaaaacgggtgaaacttataaaaagatgactgaacgtcttaaaaagcaaaacacagatgttcaagaaacattaaaaactggttgggatggttatgaaaaacgtattgaaaagacgaaatacttgtcttttggtattactatagaaacaactaaacatattgaaggtttaaaagaaaaattaaaaggtctaggtttaagtcaaaaagaaatttctgaagcagaaaatagatataaaaattacggtacaataatcggttcaacatttaaaaatattggcgatgtgattggcaaacataagaaaattaatagtgatatggcattagctacaattaaagcagtacaatcagttactgaacaagtagttgaaagtattaacaaagaaaaagaagcacaattaaatgagcttaaagagaaacaagaattaggagttattactaaagaacagtaccaaaaagaaacacaatccataactgaagaatatgataaacgtgtgaattcgattaaaagtaatcaaaataaaattaaagatattctttcagctgctgcacgagaaaacagagaattaaatactaaagaaattgctgacattacacaagcatatatggaattatctgaaaaaactgggcaatctataagtaagaataccgaagcacaaaaatttttcagtcaaaacttaagagaaatggtgactgaaagtggtttagctgctttaaaacaatcaggaattatagacgattctactgcaaaagatattgcaaaagctaagacaactgaagatgctattaagaaattaaaaaaagcattggaagattatgacaataaaaagctaaaagagaaagacataaaagctaaagacaaaactactaaagaagtgaaaaaggctgataaggcaattgatgatcataatgctaaaaaaccaaaagagaaagagataaaagctaaagataaaactacaaaggaagtaaagaaagccgataaatcattagacgatcacaataaaaagaaagctgatgaaaaagaattaaaagctaaagatgagatatctgatttaactaaaaaagtaaaatcatcattaaaggaaattgatgatttaaaagtagaaattaaaaagttaaaagcaaaagatgaagtttctaaagctactaaaaaagccgaaaatgctatgaagaaatacaaagaagttaaagcagatattaaaaaattaaaagcgaaagatgaagcttctgaaaaggcgtttaaggccaaaattaaagttttggaatataacaatgctaaagctgaaaagaaaattttaaaagggaaagatgaaattactgctttaactaaaaaagtaaaatcagcgcttaatcaaataaatgatttgaaaatggaagttaaagaattaaaagcacgtggaaatgcatcgactaaggctgatgaagcaaaaggaaagttagacaattttaacaatacgaaaataccaactaaaaaccttttagcaacaggaaacgcaagtccgttcactgatactgctcagggtaaattaaacttattcaatggtacaggtattccaactaaaaacttatcggcaaatggtaatgcaagttcatttacagatagtgcaagaaacgctgttcaaagatataactatacaggtataccaacaaaacgaattaatgtaagttcaaacgcagaaagacaagcctatagtgcaattgacgctttaaattcaattcctcgatttgtacagtctacaattaacgttgtacgtaatttttttagtaatgagcatgctgaaggtggacacattgacgcttacgcagaaggtggaaatattcaatctcattcagtgcctggtacttatactggtattgtaggggaagcagggccagagatttttagtgtaaatagaggtaatgttactatcacacctttaaatagtagagagaaaatgagaggaatagaaggtgtgttacaagattatacaaatggaaacaatgcaggtaatggtgtagtagttaatattaatcttaatgatactgtgattaaggaagaagcagacgaagatagattaattaggaaaatggatcaacacttaagacgttcgctttccgaacaacagatgattggaggtgcataa

SEQ ID NO: 4259 - DNA, 201 bp, Staphylococcus epidermidis
atgtttttatatgattatgacttatctacaatttatatgttgattgaccaatacaacgaacaatcttttaaaaataaattgttaggtagagaattcttatctgataaatctattgaagaatttgcacaagatattgataaaattaaagacaatcgaactgaatcagattatcaagaagtgagggctgtagaatttttatag

SEQ ID NO: 4260 - DNA, 345 bp, Staphylococcus epidermidis
atgagtattttcaaaactaaattaaaatcttttgtttcagacatcacgggtgaaactcgtacttataaagtaaacactgcgctatggttacatttagaagaagattacgggattaaacagggtaatctaactgatttatatcaaagtgaaaatgcgttaacaaatgcaaaaatagctacaagtattttgaaggcaaacagattagaggttactttacaagaacttactgaacatgttgatgaggtgagcattgataaatttgttgctaaatttacagaaacactattagaagatgtaagcgatagtgagagtaataaaagcgaaaaggacaaagagggaaagtag

SEQ ID NO: 4261 - DNA, 705 bp, Staphylococcus epidermidis
atggcaacaacttttgaaaagaaagcattgttaacaggtattggtaatggatttttccaagtaatgaaaactgaagagacaccaacaactgcacctgtttatgatgagaaagtatttgaagtaccgtcattggataaattaaaaacgaaacttgagtataaatcaaaagacatatacttatctagtacattacatagtgtgttaggtaaggcatcaaaagcaactattacattagacgctggttatcttccagatggttttgaggaagaagtttcgggtgctacgaaattagctgatggcgtatatggtatgggtggaaaaggaactaaaaaatattttagatttgcattccctatcattgatgaaaatggtgaaaagattattattaacttccctaaatgtcaaatacaaccaacagacttaaacgttgaatcacagggcgaagataaaaaagaacaaatgcaacaattcgatattatcgctatgcctttagcaactggtaaagaagaagaatcaaacatttattacaaagcagacttgcgcaaaaataaaacattagatgagcgtaaactgttagaaacaggtttctacaataaaactgttttgactacattaaataaatcaggtcaaacagtggaaactgtaacaagtgaatcgaattcagaaacatcaagaacaaccgataactctcgtttatctagctaa

SEQ ID NO: 4262 - DNA, 438 bp, Staphylococcus epidermidis
atgagtgacgtatttggttttgatgaagctatacaagatttagaacgatattcatcacgagctaataatataaatgaaaaggtgtatcaagaaggcatcaaaatgcgtgactatgcacgtaatatcgcacgtggattaggcttatataaaactggtaaaggtgtcagtggtattgatattgaaagagtttctaatggtgttgagattggttggtcaaatcgacctaattttcatttgttttttcatgagtttggctttcatgctactgggcgtaaaaaaggtaaaagacatacttcacgatcaagtaatggtaaacgaaagcgtaggtataagacaggtacagtatacgtaccacctaaaccacatttaagacctgctttcgatagaggtaaagacaaatttcaaaataatattaaaaagtatatagaaggagattga

SEQ ID NO: 4263 - DNA, 339 bp, Staphylococcus epidermidis
atgagcgttaaaagtaaaatttttgaagcattgcaacctttaaatatagatatggcgcacggattttcttatcaaatggaattaccaaaaatcattactaatgtagttagtcatagagcgatacgtttatcggataaaaagcatttaaaacacgttcggtatcaaataagttattttgacaagatacctagagacgttgaagatgacttaatacttaattcaatttcagacgcattagaaaaagccaatttaaatacaactgaatggatagaaatcattgaaaccgacgatgaagtagatgatacaatttttcattacatcattgaggtatctatttga

SEQ ID NO: 4264 - DNA, 330 bp, Staphylococcus epidermidis
atgaaaaaaatgaatcaaacgtacaatgacggaatattagagtttagagaaaaaagagcaaagtatgataaatatcatacagtcattggtactttttcatacatggtttttaagtcatggtatagaaagttaggtattacttctgaagaacaatatagatcaatgcaagtcgatactatggtagtaatgagagttgcgatacctagaatgaaatatttggagcctagtatgaaagttgaaattgatggtagggaatatggtatttcacgcatttatgaaaattacagtaaaaatgaaattgaactaagtttatatgaggtgcatatataa

SEQ ID NO: 4265 - DNA, 309 bp, Staphylococcus epidermidis
atgtatattccaattgatgttttagaaaaattaaaaagtcgtttgcatattgttaattctgaaagtgatagaaatttagaagaaatgattgaagcatctattgttaaattacaaaatacatgtggtgactttaatattcaagaaaatgcacaagctagagaattagtgtttgagcgtgtacgttatgcatataatgacgtattagaacattttgaaaagaatttctcacgtgaaatcacagacttgcagatgcaattgttttttgaaagaagtgaacaagatgaaaaaaatgaatcaaacgtacaatga

SEQ ID NO: 4266 - DNA, 1158 bp, Staphylococcus epidermidis
atgacaattaagtttaataaatcggaaaaatttgtaaatgcaaaaaaagcatttgtagcatcattaacgaatagtgaattaagtgaggaaaagagagaggaaattgtttcagactatgtacaagcattatctgatgatgtagtaactacaattcaaaacgatgttaatactcaaattgcagacaatgctgtactcgtatcacgtggacagtcaacgttaacatctgaagaagtgcgttattttaaccaagtagcacaagacggattgtttaaagaagaaaaagtattaccagtgacgtttatcgataaagtatttgaaaacttagttaaagaacacccattattaaatgctattggtgtaacaaatatgggagcagtaactgaaattattactgttgatccaagtggtgctgcagtatggggtgatttgtttggagatattaaaggacaagtcaatgctgcatttagtaaaaaacgtttcgacattcttaaattaactgcatttggtgctattccaaaagatatgcttgatttagggccaaagtatattgccgactacatggaaaaattattaggtgaagttatggctacagggttagaaacaggcttcttaaatggtggagggtctacacaacatcaaccaatcggattaacaaaagatgtagctgaaaatggtggagtatcagacaaaacttcatctggaacattaacttttgaacctggtgcaacagtagtcaatgaaattaaagaagttaaaaaagcattatctaaaaatgctaaaggtgtatcacgcaaagtagatggaaaagttacgcttgtacttaatccatcagatgcagcttcagtaagtgcaacatcaacagtacttactgcgaatggaacgtatgtgacagtaattcctggaaacattgaaattgttgaatcggaagtaatgacagaaggtaaggcgttattctttgtaaaaggtcaatatgttgctggagcaggaggcaaagcaagtttacaagcttatgatgaggcgttagcaatggaagatgcacgtttatatatcattaagcaatatgcgaatggtttaccattagacaacaaagcagcgttagtttatgacttaaacattgcaactccaaaaacaactggtagaaaaaacacatcatcataa

SEQ ID NO: 4267 - DNA, 747 bp, Staphylococcus epidermidis
atgaagctaaacaaaattgaacatactttttcaagtatgaagtcagaaacatcagatgaacatgtattgattatttctggagcaattggtgaaggtggctatttttacgaaggtacgagtgcaactgacgtgagaaaagcgttagaaaatgttgaagctaagacgataagaattaaattaaactcaccaggtggaaatgcattcgatggtttagaaatttataactatctaaaagatttagacgcacatgtaattgtcgaagtaactgcattagctgcaagtgcagcatctattattgcaatgggtgcagatgaagttatcatgagaacgggctctacaatgatgattcataacgcttcaactataacatatggtaataaagacgaaatgttaaaagtgcatgagtatttagctaagattgatacttctatcattgatgtatacaaagaaaaaaccggtttgagtactgatgaaattaaggagatgttgaacaatgaaacatggtttactgcatctgaagcggttgaaaaaggttttgcagactcttatgaaacgcaaaccaaagaagaaaaagaaattacaagttatttaaatagcaattattctatttctcaaaagatagatgttgaaaatgagattaaagaaataaaaactcaaatttcagaattacaaaatcaaagtgataaaaatcaagaagtgaaagacaaatcagttaatgataatcgtcttaaatcacttcttttttaa

SEQ ID NO: 4268 - DNA, 1137 bp, Staphylococcus epidermidis
atgggattgttatatgacttatttaaatcaaatcgtaaaactgctgaagaattaggtttttcaattgcatctgtcagtaataaagcacatatgaaaaggttagccattaatagttgtatagagcttatatcaaagacaattagtcaagtcgaattcaaagttaaggataagaataaatacactaaaaactcaatgtattacaaattgaatgtaaaacctaacgtgaatgaatcggccactcaattttggcaaaaggcagtctataaacttatatatgataatgaattacttattattcaaaatgacattgaagatttgctaatagctgatgattttaatgtgaatgagtatgctcatgtttcaaatatttatgagcatgtgagaattggtaactttgaatatgcaagaacatttaaatctgatgaagtcattcatattaaatataataatgaaaatgcagaaatgattttaaatgatttatacggtgattatggagatttgtttgctcgactgatagagtttcaaatgcgtaaatctcaagtacgttcaattgtaaaaattgatagtaagtgggctagtgataaaaagaaaatggaaaaggtaaataaattcattgaaagtatatatgacaactttaaaaataagtcttttgcgattgtacctgaacaagaagggttgcaatataaagaacaaactttatcacaagctgcgaatagtgttgatgatgtagaaaaagtaggtaaacaattcctaaatcattgcgctactaaatttggtattcctattcagttacttacgggagatattgctgaagtagaacaaaatacaaagcgatttattagaatgacaattaagccattattaaatctcatagtaactgaactaaatgcaaaattgtttgataaagaagagtatttaaatgattcaaaaattatagctaatactttacctattaactttgataatatatttgaaattgctaatcaaatagacaagcttattgctagtggtgtatttgttggaaatgaaatcagaagagaattaggttttgaagaaagtaaagatccgttaatgaatgaacatttagttactaaaaactatcaaactttaaaacagttgaaagagggtgttaactaa

SEQ ID NO: 4269 - DNA, 1635 bp, Staphylococcus epidermidis
ttgctagtagtaaataagtacgttactgattatattaatcaatacaagcaagggaagatactttttaatgaggagcgtaaacaacttgtagactatttggaagactttatttttccaagaaatgatttatattttaatgatgaacaaattgaaaatcttattaattttgctaaagaattttactttgaattagatgattttcagaaattcttaagtgctttcttatttctttattataaagaagataacgatattttttatgaccaattttttattatgggtggtcgtggggtaggtaaaaatggacttgtatctgtttggtctcattttttcttaagtgattataacccagttgatgaatatgatatttctattgtagctaatactgaaaaacaagctaaaacatcatttatggagatatataactgcatagaacgtaataatttagatgactatttcagaagaaacttaaaagaaattacaggaaaagcgaccaatagtaagttgcaatatcatacttcagcacctagtagcaaagatggtttgaaagacggtatggttatttatgatgaaattcatagaatggaaagttatgacattattaatgtttttggttcaggattaggtaagaaagacaatccacgagaaatttttattggttcaaacggacatgttcgtggtggtgtgattgatgacatgttagatagagcaaataagattttaaaaggcgaagtgttagacgatcatatgttttgtttcttatgtaagatagatgatgttaaagaagcagacgatccttattcatgggaaaaagcaaaccctcaattttctaaaccgatgacaccatacgctaaaaatttatataaacgtgtaattaaagaacatcaaaagctagacaataatctaaaataccgtgctgaattcatggccaaaagaatgaatttacctgaaacagacttaactgaatcagtagcaactgcagatgaagtatataaaacaaataaagaaattcctgacctcctacataaaacgtgtgtaggaggtttagatttcggttctgttcgtgactttactgctgttggtttactttttcgggagggcgatgattactattggaaaacacattcatttgctagaaaagattatttagaaaaagcaaagttaaaacccccaattcacgagtgggcagataaagggctattaacaattgttgatgaacctactattgacccaagacatgtagtgaactggtttgtcgagatgagagaaatatacaacattgaaattatagttgctgatatgtacaagttagacattattaggccactgttagaagcagaaggttttaatgtacattcaatcagaaaaccttcagcaattcatggattactagcaccacgagttgaatcgctattcgctaataataatttgtattggggtaaaaatcctttaatgaattggtacacgtttaatgtttataaaaatgtaacgaaagacggtaatgttcaatatctaaaaaaagatgaacatagacgtaaaacagacggttttcaagctatgatacatgctttgtataaagcttctgaagtattaacagatgatgttgatttctttttagacgaacttcatttttag

SEQ ID NO: 4270 - DNA, 339 bp, Staphylococcus epidermidis
atgccggtttctactaaaaaaattcgtgagagtatgttagctagagttgatgataccgattttttggtaattgagaagattgagagatacattgcacttgttaagaaatacaggcaactgattactgcaattaataaagaaggtttaacaattaatgtaaataattcatctcagcattacataaaaacacaccccagtatgtctgatattattaagataaataaagaactgttaatgttggaagatgcaattttcaaacgctcaaaatttaaaaaagaatctagtaacgacaaacctaaaacgttatctttgagggatagagttgctagtagtaaataa

SEQ ID NO: 4271 - DNA, 291 bp, Staphylococcus epidermidis
atgttggagttagatactaaggataaacgtaataagttctatcatagcactgattggaatcaattaagaatgaaagcttatttacgtgacaatcgtgaatgtcaacattgtaagcaagaaggtaaagtagttaaagggcagaacgtacatcatatacaacctattgaccttagacctgatttagctttgagcattgataacttaattactttatgtattgattgtcataataaggttcatggtcgtgtgtatggtggaagtcgtaagcaatggaatgatgaacaatggtaa

SEQ ID NO: 4272 - DNA, 612 bp, Staphylococcus epidermidis
atgttgactttaagcaaagtaatagaaccaggtgattggttaactttttttggaacattagtaggtgcattaataggttcattaatagctggaggaatcgctatatacgtagctcatcgtcagaataaacaacaaaacgactacattgaaaagcagaatgagttagatgaaagagttaaagaatacgaattactttacaaacatattgtaaaattaaatgatgatataaatcaaaaacaagataaattaatatatactttaaacaatttagcattagaaacagatagtttaaaacggtatcaatacttattgaatatttcttatgatatcggttatctaaataatactactaaagttaaagttgaatctataaaagatataatgaataaaatgaatgctagtactagtttattagatgcaaatacttatatgagtaaattgcaaagtgctagagagtacacaaataatgaaacagaaactgacataaatattactgatgaaagtgttgaaattttaagtgagaagattaatgaaataggtaacgctaaaaatatattcgtagagaatttatataagtctttatctcaacaattaaaacaaacctataaataa

SEQ ID NO: 4273 - DNA, 492 bp, Staphylococcus epidermidis
atgttagatttgttaatgtcgtatctattaagtaaaaataaagttttaaaacggataaaaagtttaatgcagtgtgatgttgtagacattaacgaacttgcattaaatagacagatattaagtgatattaattatgtgattgaatggttgagagagggacacgagcctaataattataatgcgatagataaacgtcaatgctatttagttaatcctgaaacaattgaaaagatgattgatcagtcaatgtaccaaaaacagagtgaagatgaatacagtgattttattcacgatgttaatcatcaatcttactacgctttaatgaaattaactaagcaagagctagatgttttcttaatgcacaagtgtgaacagttaagtttaaatgatgtagcaggattattaagcattagtaaaagtgctgcacaaagttatttaaagagagcagttaataaaattaatagtgagatgcagtgtaatttgtttttataa

SEQ ID NO: 4274 - DNA, 1875 bp, Staphylococcus epidermidis
atgtataaaggttatttaaagtcgagtggcaagcgtactattacaacttttaaagataataaagatgtgttattagactataaacaagctagagcattaaaaagttttgttggtgtgttagatgaagattacattatggttgatgttgatgatatgaatgaagcacagttattacttaatatcattgaagatgaacaaattaaatgtaatattctagaaactgacaatggtatgcatttttatttcaaaggttataacatgaccaataataaaactaagaatttttcagctattggtattatgtgcgattataagttaggaattaaaaacagttgcgaccctttaaaaattaatggagagtttagaaaatggcttaaacgtgttgatgaaactgaaattgatgagttgccaaaatggttagaagcgtcatttaaaacagatccaggtttcactgaacttgcagagggtgacggacgaaaccaaacattatttaattacattcttaaattacaacaaatagcgatgagtaaggaggaaatacgaaatacaataaggttaattaataaacatgtgctatttgaacctatatctgataaagaattggatattgttttacgtgatgacgcttttttaaaagaatctttttttattaatggtaaattccaacatgatttattcgctaaataccttattaatgagtatcacattattagaatagcagatattttgcacatttatattgacggttattattctgataaacaagacgatatagaaagattaatgattaaacatattcctggtttaaaaaagatacaacgacaagaaacgctatcttatttacagctacagactgaacaaaaagaattatcaccagtgaattatttaacacttgcaaatggaatatatgatttaaatactaattcgatgcaaccattcacacctgaaataattgtgaaaaataaaatacccgttccatatattgaaaatagctatcatgaaatcactgataaaacatttaataagttagcagtaaatgaccatgaattaagaaatttatttgaagagattttaggttacacattatttagacgtaatgaatatggtaagtttttcatattaacgggtggtggaagtaatggtaaatcatcattcttgaagattttacgtgcattagtcggcgataccaatacatcaagcgtcgcacttaaagatttaaacggccgttttaaaacagcagaattattcggtaagttagtcaatctaggcgatgatattggaaaaggttttattaaagatagtgcagaactgaaaaatctagctacaggtgaaacattagttgttgagcgtaagggaaaagacccttttgatttacgtaactattcaaagcttatttttagtgcgaatgaagtaccaagaattgatgataaaacagacggtttaaatcgacgtttaatgattgtaccttttaaagctaaattcacgaataaagacgatgattacgacccattcattattgataagttactaagtcctgattcattacagtattgtttagtcatggctataagaggattaaaacgattgttaaaaaataatcgcttcaccaaacctaaatctgtaactgcagaaatagaagcatacaaagaaagaaacaatcctgttttagcatttcttaataatgaagaacctaaactagagaatgaatcgactaaagatatctatacacaatatagtgaatactgtgttgaatatggatacaagtctgtgagtagagcagtttttactaaagaggtatgtcgtttaaaaaaagtagaatcaaaacaaattagagtgaatggtataagagaacatatatatgtcttatgtacataa

SEQ ID NO: 4275 - DNA, 195 bp, Staphylococcus epidermidis
atgagtaaagacgaaacttatcaaactaattatgactacacagaacaatttaaagaacttcataatactttagatcatcaattaactattgatgaaactaatgaattattaatgttttatcaaaaagtattggatagagttgaaaaagagactgacatagtacttgataagattttagaccccaaaacaacttag

SEQ ID NO: 4276 - DNA, 246 bp, Staphylococcus epidermidis
atgacagaattaatattaattgtatcgacattaatttgtgtaataagtttttatcaatttttgaatacaatgaacaacatcatagcatatatttatgtgattattttaatagtttctttagcaattacagtttcatttgcaattggttataactatttagaattattacttacattcctatttgcactcgtttttatcacaattggatatattaataagcgagtgaaaaccataaataaaaagtga

SEQ ID NO: 4277 - DNA, 216 bp, Staphylococcus epidermidis
atgagtactactattagagatattgtaagaaaaaattttgaaaatgataaaagtaccttattagttacagaagatggaaaaatttatccaggtattgatatcgtctcagaaagcagtgaattcatagttatttacccaattagaaacttaactacaaagcaaactttaatttatactaaagacattaaaaagctcgaagctatcgatatagattga

SEQ ID NO: 4278 - DNA, 303 bp, Staphylococcus epidermidis
atgaaccaattaattaaaaatgtagaacaatggagtattgacaaaggtttaaataatggcaattcagatagacaggctttgaaattttatgaggaagcgggtgaagttgctgcagcattatcacgtaatgataaagaagccttaaaagacggtataggcgatactgtagtgacattaattattctagcccaacaacataatatgagtttagaagaatgtttacagtgcgcctatgaagaaattaaaggtcgtactggtaagatgataaacggaacttttgttaaagatgaagatttgaagtaa

SEQ ID NO: 4279 - DNA, 696 bp, Staphylococcus epidermidis
ttgtctaaatatacattatcattaccaatcactgttaataatcaggttacaactgaaggaattaaaattgatattaaattgccaaaatcatgtccttattgcgaacaagttcaaacaccttttgttaaatcatcttcaggtttagaaaaaaataatgatttattttcagttatatttatttgtaatgaatgtaaacaacattttttaatgcaatacaaaaaacaagatagaaatcctttcaacttaatttataattcagaaccagttgatatctcatataagagttcagatgaaaggtattctcaaaatttaaaagaacattcaccagaatttattaaaatcatttcacaattaaatattgcagaaaaacataatctaaattatttattaaaattaggttatagaaaagctattgaacaactagtttgggattatttaattgaatttgaaaataaaactgaaaattctttacagaagaaaacttttccagaaagaattaaattgcttaatttcccccaagcacagtggctttctgatttaattgcgtggattggtaatgatggtgctcacccttatcaaagacatgaaaatcttactatagaagatatgaaacgtttatctgacattgttataaaaaatatcgaatcattaattacccaacataagtacgagtcatatcattcacaacacaaataa

SEQ ID NO: 4280 - DNA, 390 bp, Staphylococcus epidermidis
atggaatttaaattattagataaatatggaaaagaagtagtcatagtaaaacgaataaatctacattcatattcattaaaagggattaaagatacaccatttagcaatttaatcatgttcattaatccatgtgaaatacctgaatataaaaaacggtttaatttatttactcaatttgaatatgatagaaaagtttgttcaaaaacaaaatttgattatacagtattagatttgttaattagtgcaaactttaaccttaataaatttaatacaggtaatttagatgaagatgataaaagtgattcaattggtaaacatcaattatctatggcaatagaatttatttctaaaggcttagatttgaattcaccaattgaatttcataagtag

SEQ ID NO: 4281 - DNA, 1719 bp, Staphylococcus epidermidis
gtgattacaatactattttatgattttgaagtatttaaatacgattggttagttgtgattattgattcagaaactaaagaaacacatgtgattattaacgataaagaagaattagaacagttttataaaattcataaaggcgatttttggattggttacaatagcagggattatgatcaatggatattaaaaggtatattatccggttttaatcctaaagaaataaacgattttataattgtacaaaagaaaaaaggttgggaattctcacgactgttacacaaaattaaattgctaaattatgatgttcaaactagttttcattcccttaaacaattagaggggtttatgggcaatgatattagagaaacaacagttaactttaatattagaaagaaacttacgcatgaacagttaaatgaagttgttaaatattgtaaacacgatgtacagcaaactattcaagtttttatgaaacgttttgaagaattccaatcacatgttgctttaatacaaacttttgatttaccgatgaaaaatattagtaaaacaaaagctcaattaagtgcaataatactagatgctaaacaaccaaaagtgaatcgtgatgatgaaatggaattctcaattcctaataacttgaaaataaataagtatagagaagtcgttacattttatgaaactacaagagattatgataaatcactaaaaacaactattgctggagtgactcatgaatttgcatggggaggattacatggcgcaagaaagaattactttgcaaatggttattttttaaatgtagatgtagcttcatattatcctgctctaatgattgaatacgactacttgagtagaaatgtacctaataagaaaaagtaccgtcaaatacgagataaacgcctagaattgaaagctaaaaaagataaaagacaagcaccttttaaaatcgtacttaatagcacttatggtgcgatgaaagataaatataacgggttgtatgatccaagacaagcgaataatgtttgtatcgcaggaatgctattgctattagatttaatagaaaaattagaggcacactgtgaaattattcaaagtaatacagacggtattttaattaaaatgagtagtttaaatgactttgatttaattgatgatatttgttttgagtgggaagaacgcacacacatggaacttgaatttgaccatttcacacatgttattcagaaagatgtaaataactatattttggttaacgatagaaaaaatatttataaatcaaaaggaacttatgttaagaaactaaatgacctagacaatgatttaccaatagttaataaagcagttgtgaattactttattaaaaacatacccgttgagaaaactattcgtgaatgtgatgaacttattcaatttcaaaagatagttaaagtgagtgggaaatacaaacacgctttgtatggtcataaagtgatgaatgaaagagtatttagagtgtttgcttctaaagatagcagcgataaagcattgatgaaagttaaaaatgataaacctgagaagattggttatacacctaataaatgttttattgataacaaaaatattgctcagaaaaaaacaccccctcatttagataaagaatggtatattgcaattgctaagaagcgtattaatgacttcaaaggtgaacagtttggccaactacaattaagtatttag

SEQ ID NO: 4282 - DNA, 483 bp, Staphylococcus epidermidis
atgactgaaacaattaactgggataaatttgataaacaagtagatagtgaagaaattaaaagtgcagtggaagatgctaaaaagaatgattttcctgatattcctgatggcgaatatgaagtagctctagaagatatggtacttaaaacaagtaaaaatggcgatccaatgttaacaattacatttgtaattttagaaggggaattcgcagataataagatttggtataacggtgtaatgcaaccaaagaatgaaaaggcaatcggtttccaagtacataaaaacaatgtgttattacgtagtttacttgatttagctgaagacgatgagagtagagtattttttaaaggtttcaaacaatacaatgatttagtactagatttagctgaagaacttgtcgaagcagaatttgcactagaaattactacagataaaaaaggatatcaacaatataaaataactgaagtttttgacgtagagtaa

SEQ ID NO: 4283 - DNA, 207 bp, Staphylococcus epidermidis
atgaaaaaggaattaaacacaactgaacaacattttgcaacaactagaagtgaagcagaacgaattattgaacaagctagagatgaagaaaaaagtaacttaacatcacaaaaaattgatagtaaaaccaacaaatacggtgaatattttgtagttacactcaaatttacttacaacacacccaaagacattatggcttacgaataa

SEQ ID NO: 4284 - DNA, 1812 bp, Staphylococcus epidermidis
atgcaattcagttattcaagagttgatttgtttaaacgttgtccatatcacttcaaattacgatatatagataggcttacagaattaccaaactatgaagctaatagtccacttattgttggtcatgcacttcacaccggaattgaaaaaggtaaaaaagccatgctgaaagagttttataacgcttttccactagtgactaatgatgtgattaatgaagccattaagttagaacataatttagaaaaagctgaagaatggttaagtgattttaataacagctttagcttcactggtggttatgaatttatacatgagtatgaaataaataaacctgaatttattggttttgtcgatttaatcgtaaaaagaaaaggtacgaatgatattgcaatcattgactttaaatacagtaatgcgattgaaaaatataaagaatcacctcaattacaaatatataagtactatcttgaacaagagggatataacgttatagcaatgggttatttattcttacctaaaacaagcattagacaaaagaaagatgaagacttaatacaatttagaaaaagattaaatgtaactatgagaaagcttaaaactacatgtttaaaaatagaacctcaagaaatggaaattatctacttcttaaatcaatgtagagaaattaaagaagctattcaagaaaaaacttttaactggattaaaaaccctaacgatgaatgttttgcatgtaatcctagatttgcaccagagtatttagaacaactaagagatgataaaggagaattaataatgacattacctaaaaatataagacgagaaaagaaaattgatgaacgacctgacttttggatatacggagattcatatgtaggaaaatcaacatttgtagatcaatttgacgatttgctatttttaaacactgacggaaacacagataatactacatcgccagttattaatattaaagatgaagtagtaaaagagggacgcattactaaacgtacatttgcatgggaacaatttttaaatgtagtaagtgaactagaaacagataaagatagtggttttaaagcaatagctattgatttatttgaagatttaagagaacactgtcgtatttatgtattcgataagaacgggtgggaacacgagtctgacggtggatatggtaaaggttgggcaatggttaaaacagaatttaacaatgctatcaaacgacttaaaaatttaggttaccaaattatttatatcagtaaagaagttaaatcagaaacaactctaaaaggtggggcagtacgtacaaactttatacctaatattgatgataaaactgccaactttacaacaggcacagtagacttaacaatacgtgcatttatgaatagtgacggtgtaagactacttcaactatctaaacaacgcaatgtgttcggtggtggtcgatttaacttcttaaatgatacatgtgaattaagtaaagatgaatttattcaagaattaataaatgctcaaaaagcatcacatgcaaaaatcactgctaaaactaaaccaataaaagaagaaattaaagaagataaatcagtaaaacaaactattaaagaagatactaaaattactgaagaagtaccaccaggcgaaacaattaccgataaagaagaagtgattgaagagcctaaaagaaaagcaagaaaaagaaaatcatcaactaaagaagcagtagaagaagctaaagctgaagaaaaagaagaaacattagatgaaaaaccaaaacgtactcgtagaagtagacgtaaaaaaactgaataa

SEQ ID NO: 4285 - DNA, 297 bp, Staphylococcus epidermidis
ttgactaaaacatataagaatgaagcagcgtttcaaaatgatgtcatgcaatttttaaagcataatcctaatgcgtttgcagttaaatattgggcaggtaataagtttacagtaaatggtattcctgatgtactggcttgtattaatggtgtatttcatggcatagaacttaaaacaaatactggtgttgtgagaggtattcaaaaagagagaatgaaacaaatcaagttagcaggtggagaagcttatgttttacgtccgaaagattttgaagaatggaaaaggacgtggttttaa

SEQ ID NO: 4286 - DNA, 318 bp, Staphylococcus epidermidis
atgattgaaaatcttaatttaagatataccgaagatatttttaataatacaaattggattaataaagacggtgaaattttagatcctatctcaatggaggaaggacacatacaaaatacattgcgtcttttatatagaaaccgtgatcaactttggttaggttgtagagattttacattaatagatgtatatctaaatggtgaagacttctttcaaaaagttatacgcaaatctactttatggaaatcattaattaaagcattaaataaaccttctacatcatttaactttgattatgaaggtggttccattgactaa

SEQ ID NO: 4287 - DNA, 1242 bp, Staphylococcus epidermidis
atggaaattaaattatttgaacaccaagaaaaagcactagaacaaactgagcaatttaatagagtagcgtattacttagatatgggattaggtaaaacctttgttggctcagaaaagttgtgggaattaaataccccctataatttagtgatttgccaaaaatctaaactagaggattggtatcaacattttaaaaagtattattcagatgattataaagtgattttatttgatagagaaaagctcgagtatatagaagaaaattcaattttaattattaactatgaaaaagcaatcgtgagacctgaactcaaaaagatacgtaatttcacattacttttagatgagtctcaatatattaaaaatcctaaatcacaacgcactaaattaattatgaatgaactaaaaccaaataacgttattcttttaagtggtactccgattgatggtaaatatgaagaattacttactcaaattaatttattaggttggaagataaaagagaagatgtttctatctcactatacatatagagagtgggacgaaaaagaactgaaatataaaattatcggctacaaaaatatagatagattaaagcgaaaattaagaaattacggttgtgtttttatgaaaacagaagaggtttttgatttaccaaaacaaactaatattttcttaaaaccaaaaaagactaaagcatatgatgaatttattcgtgaaggcattgttgaattagaagatagaacgcttatcgcagaaacagtgtcagtaggaactatgaacgctagattgttatgtactgcatttaaccaaaataagttatcaatgttgaaagatttattagaaagcactgaagataggttgattattttctatcaatataatttagaaaaagaagctattggtaacttagctaaagagttaaacaaaccaatatcttatattaatggtgatttagttgataaaaacgcctatgagaataaaaagaacagcataacgttagtccaatatcaaagtggtagttttggacataatttacaaaaagccaacaaaataatcttttttggattaccaaacagagtttctttctttgaacaaagtcgaaaaaggacacatagaattggacaagagagaccgtgtttttattattatatgctaacgctaggcacgtacgaatggaagaattatcaaactttagtagacggtaaagattacaacgatgaactatttaaggaggaatga

SEQ ID NO: 4288 - DNA, 195 bp, Staphylococcus epidermidis
atgagcaaatcatttatttcattcgtcattgctaatttggtttttgtaaccatgtcaattttattagcactgattggattatatttcacaactgctattggtactgctgcactactatctatcataacttttcttttatatgataattatttctttcaagaaataaaaaagaccgttaagcacggcaatgcttaa

SEQ ID NO: 4289 - DNA, 309 bp, Staphylococcus epidermidis
atgctgcaaactttaaatattactgttccagtaccagacacacatgtgattattactaagcttgaatatgaaaagttaaaagataatcaaccaatgaacatgacattaaaagaagtagcagaatattgtcaacaaacaaaaggttggatagtcaaaaatatcattcaagataattatttcagaagaaaaatagagccgttttcacagtttgttaatgaagatggaaaaggaaaatatttatttcatagagagaaaatgaagaagtttttaaatgattatgatgaagaaataaaagcgagaactcgttaa

SEQ ID NO: 4290 - DNA, 192 bp, Staphylococcus epidermidis
atgccagagcaactatcaattaaaaaatggagagttatgaatgatatgcttcaacaagatgttgctgataaattaggcgtatcaagaaaaactgttggggagtgggagaaagaaggtgctaatataagtaatgttactatatacgctttagctaaattatttaacgtagagatagaccagatcaaaatatag

SEQ ID NO: 4291 - DNA, 336 bp, Staphylococcus epidermidis
atgggtactaaaagtgctagaaaaattttttctgaaaatcttcaacgattaatgagaaataaaaatgtggaccaaaaagagttagcagaagctattggagttactcaaccaacaatttccaattggattaaagaagtaaagtatcctagaattaaaagaatacaaacattagcagattattttaacgttccaaaatcagaattaacagaagaaaattttgtagtatccaaaaatcaaattgctgcacatattacacctgatgttactgaagatgaaatgagagaaatcataaatttcattgaatacataaaaagcaaaagaaatagcgataaataa

SEQ ID NO: 4292 - DNA, 675 bp, Staphylococcus epidermidis
atgcaacaagaatcatcatcatggtacaaacaagagtggtttattgttttaactttaatatttattttccaactaggtttatttgtaatgtggcgatttagtaaatggccatccattgcaaagactatcgtaacagtggcaatagtggttatagcgttatctagtacaacttatattggcaacctcaaaacaaataatcatgaaacacaacctatcgtaaagacatataatgaaacagaaaatacaaacagtacttctgtaaatgataaagacgaagagaatcataaagcctctgttaaagaaacaaatggaaaatatcaagaatggtttgatgacgtaactaaaggcgcaaaagaagaagaatctgctacacgattacagaaagctgctttagaaactgccaaatcttactctgatgatttaaatatgtctaaagaaaaaatatatgacatattaacatcagaagtcgttgaaaagtttactaaagaagatgcaaaatttgctataaatcatctgaacgctgattataacaagaatgcactagaaacagctaaatcttatgctaaagatatgcatatgtctaatgatgcaatatacgatatattaaaatctccagacggtgaaaaatttactgaatctgaagcgaaatatgctattgatcatttagataattaa

SEQ ID NO: 4293 - DNA, 1065 bp, Staphylococcus epidermidis
atgagtgtaaaaaaagcgaacggtaaatggtcgtatgatttccaatatgataataaaagatatagaaaacgtggttttaaaaccaaaaaagcagctatagaggctgaaagtgaattatatttagatttaactaaaggtggtaatatttcctcagacatatcttttttagattactttaaaaactggattaaagttaataaagaaaatcaagttactcaatcaactttaaatcgctattataatgccttaaatgtttttgatgaaaaattcggtaaaatatcaataaaagacgtatcacaattacaatacagagaaatgttaaaagaatatgctgaaggtaaatttattggtggtagaaaagaaggaaggacaaaagcaagtgtaagaaaacttaataattgtttttctcaagcttttaaagacgcattaaatgaaaaattgatatataaagatcctacttggaatactccaatttatgagaaaaagaaaactaaacttgaagaagataaatttatgagtttgagagaatacaaattattaaaacaacaatctaaaactaaaaatgaattatcgtatctattcatttacatgttgattgctactggagcacgcttcagtgagataagaaatttgaaaagaagtcacttacataaagataataataccgttgacatacctggtactaaaaccaaatctgctaaacgtacaataaaaataacatcgacagatatgaatcacattcttaaagttatcaactctagaactattgattttgaaaatggatatatatttcatactggagttacattaataaccaataaagcagtaacaactacaatgaaaaatattttatctataaacaaattattaagtcattatacactacattcattaagacacacacatgcgtctatgttacttgctaaaggttttagtattcagtatgtaagtaaaagattaggacactcgaatatagaaattacatggcgtgtatatagtcatttattagaagaattaaaagataaagaagatgaaagtttagactttaaactaacgtcgttctaa

SEQ ID NO: 4294 - DNA, 576 bp, Staphylococcus epidermidis
atgacacatttacccgaaacgatttatgttatacgaaaaggtgatatggtaatacgacctaaatatgatgaatatcagcaaacaaatggtactgaaattatcagatttgatcaaactcgcaaagaaagtccatttaaagtacagagaattatcgaaagatcatgtaaattttatggtaataattatattagtaaaaaagcagaaacgaatcgtattactggaatctctagtaaaccacctattttacttacgcctctttttcctacttacttttttccaactcactcagaccgtcaagaagaaaatatatggattaatatgcattatattgaaaatgttaaagaacttaaaaatcgtaagagtaaaataatttttgcgaatggtgattcgttaacgctcaatgtatcatttcatagcttgtggcatcaatatacgaatgcaatcatctattattacatggtagataagcaatcacgaatgaaatctaacaaccctgaacaacccattgactataatcagtcttctctaaatattttcgaggcgctctcacgctactccctttttgaagaaaattag

SEQ ID NO: 4295 - DNA, 219 bp, Staphylococcus epidermidis
atgaatcacaatactgaggtcaagtacactacattagaagattttgtaatgacagtgaacgatttaggcgttgaactcgtcattgaagaagcactcagaaatgcaagaaaagctaaacttaaactcttaattgacgaagcgctcatcaataaaaacgagaacgattttattcaatatactaacgaatttaaacaattggaggcatttttaagtgaataa

SEQ ID NO: 4296 - DNA, 987 bp, Staphylococcus epidermidis
atgaaatttattagcaacaataatattaatgatccttccctcaatttagcaatggaagagtatgttcttaaaaatttaccttctgaagaaagttattttttattttatattaacagaccttcaattattgttggaaagaatcagaatacaattgaagaagttaatcaagcgtatattgataaacatcaaatagatgtagtgagacgtatttctggtggtggggctgtttatcatgatactggaaacttaaattttagctttatcacagatgatgatggccatagctttcataattttaaaaagtttacgatgcccattgtacaggccttacaatcaatgggagttaatgctgaaatgactggaaggaatgatatacaagtagggcaagctaaaatatctggaaatgctatggttaaagtaaaaaatagaatgtttagtcatggtacattaatgctgaattgtgatttaaatgaagttcaaaaggcattaaaagtgaatccagctaaaattaaatctaaaggcgttaaatctgttagaaaaagagttgccaatattgaggaatttctagaacagccaatagatatagaagaattcaaaaaaattattcttaaaactatttttggtgaaaatgaagttgaagaatatatattaacagaagaagattggaaaaatattaagcaattaagtgatgaaaagtatcgtacgtgggaatggaactatggcagcaatccaaaatataatattgagcgtgaagagaaatttgaaaaaggttttattcaaataaaattagatgtaaaaaaaggaagaattgaacgggcaaaactatttggagatttcttcggcgaaggagatgtaaccgaacttgaacatgcgttagtaggttgcttacatgattttgaacatatagaagaggcacttcaaaattatgatttctatcactactttggggatatagataagtatgaaattataagattgatgtcctaa

SEQ ID NO: 4297 - DNA, 186 bp, Staphylococcus epidermidis
atgactgttgcagaagtaggtaatatagtagaattttatgacggtttaagaggccgtgtcgagaagattaatgataactctgttattgtagatttaactattatggataattttaatgaattagatttaccggaaaagacagttatcaatcataagcgatacaaaatcgttgatcaagaaggttaa

SEQ ID NO: 4298 - DNA, 603 bp, Staphylococcus epidermidis
atgaaaaatgtttctaaagctttgatttggtttgttataagcttcatcatctttcacgcaatattatttgtgatgtggggagaacatcaagaatactggtatttatatactggcattatgttaatagctggaataagttatgttttttaccaaagagacattgcatctaaacgattattaacttccataggcatgggtataataacgagtgtcgcacttattattatacaattaattttttcacttatttcatcagaattatcatacgcatctttaatcaaagaattatcacgaacgggtgtctactttaaatggcaaatgctcgttactttattatttgtgataccttgtcatgaattatatatgagaactgttttacaaaaggaattaataaaatataacttaccgaaatgggctagcattttaattgttgcaatatgttcaagttcattatttatatacttagataattggtggattgtattctttatttttgtagctcaattcattctatctcttagctatgaatatacgagacgtattgctacgactacaattggtcaaattgtggctatcattttattattgatattccacggataa

SEQ ID NO: 4299 - DNA, 1506 bp, Staphylococcus epidermidis
atggaaaaaaatgaaaataaaatagttgatgtgattgcaacttctgatatgcatagtcacttcttaaatggtgattatggctcaaacatttatcgggctggtacttatgttaatgaagctcgaaaaaataatgaaaatgtcatattactagatagtgggggaagtttggcgggatcacttgcagcattttattacgccgttgtagcaccatataaacgtcatcctatgattaagttgatgaatgcaatgcagtatgatgctagtggaattagccctaatgaatttaaatttggattatcttttttgacacgttcagttgcactctcaaggtttccttggctatcagcaaatatagagtatactgttactagagagccatatttttctacgccttatacaatcaaaatgtattcagatttgaaaattgctatcgtaggtttaacatcagatggattaatgaagaacgagtacgcagaaatggaagaagatgtctgtattgagaagactttggtttcagctaaacgttggattagatacatacatgaagttgaagaaccagacttccttattgttatttatcatggtgggttaaataaaattagtagtgccaataaaagaaatgaaaaaaatgcaaacgaagctgaaaaaattatggaagaacttggtgttattgatgtaattattaccgctcatcaacatcaaacagtagttggaaaagatcatggaactatatatgttcaagcaggtcaaaatgctgaggaattagtacatctttcaattaaatttaagaaacgtacaacttcttatgagattgagcacatcgactcaaaagttattgacttaaatgattaccatgaagatgagcaattattaaaagaaacatattatgatcgtaaggcagtcaaacactgggcaaattcagtagtttcaaacaaaaacaatggcttaacagttcaatgtattgaagatattatttgtaagccgcatccttttactcaattattacatgatgcaattagattagcctataattatgatatttcttgtgtgcatatacctaagaatggtgaggaagggttaaaaggaactataagaaatagagatatatacgatgcataccctcatccagataaacctatagatatcactgtcaaaggtaaaaatatcaaagatatacttgaatacagttatgcgcatattgattttaataagcgacaattaagtatgacaatgatagatgaaacgttatttacagtttggcaagggtttgattattgtatagacatgtcacaatcaccgtttaatagagttaaattaaatggtctaaatgaagaagattcgtatagaataacaatgacagattattgttatagaaactacaaaatgtatttacaagaagctatcgttcacgacacatattcggaaacgatgggtggattgattagaaaaaatttaaaatgtgacatgtattctgtgaaattaaatcataattttaaagtttattaa

SEQ ID NO: 4300 - DNA, 1359 bp, Staphylococcus epidermidis
atgtcagttttaagtcagctgcttaaaaaatctagccctcaacaagggattatactctattatctatttgccatcgtcgttgcatttttattattaaatttgccatatgttcataaacaaggggttgaggttaatccaattgatacactttttgtagctgtatcaggtattagtgttacaggattatcaccaattactatagtcgacacatactcaacctttggtcaaattatcatacttattattttgaacatcggtggtataggtgttatggctattggaaccatgctttgggttgttttaggcaaacatattggaattagagaacgacaactcattatgttagataataatagagatactatgagtggaacggttaaactgattttagaaattgtaagaacaatttttattattgagtttataggtgcactcttactcgcgttctatttttatcgggataatcctgatttaaaaaacgcattaatgcaaggcatttttgtgtcagtatctgctacgactaacggtggtcttgatattactggtgaatctttagttccctatgcaaaagactattttgtacaaacaatagtaatgttcttaattgtgttaggatctataggctttccagttttgttggagttaaaagcatatataaagaatcgagtaactaattttaggttctcattattcacaaaaataacgacaacaacgtatttattcttatttttattcggcgttattgttgtattaatattagaacatagcaatgcatttaaaggattgagttggcatcaatcattattttatgcattgttccaatcatcaacgaccagaagtgcaggtttgcaaacgatagatgtgtcacatttcagcgacgcaacaaatattgtaatgggattattgatgtttataggatcatctcccagttctgtaggaggtggaatcagaacaacaacatttgctattttaattttgtttgttattaattttaataatactggtgacaaaacaggtattaaaattttcaacagagaagtacatattatggatgtacaaagatcatttgccgtatttactatggcgtcattaattacatttattagcatgattattatatctgccactgaacaaggcaagttgtcctttttacaaattttctttgaagtaatgtctgcgtttggtacatgtggtttaagcttaggtgtgacaagcgatgtcaacgacattaccaaggctgtattaatgatattaatgtttataggtcgtgtaggacttatttcattcattattatgttagctggacgtaaagaacccgaaaaatatagctatcctaaagaacgtatacaaattggatag

SEQ ID NO: 4301 - DNA, 1758 bp, Staphylococcus epidermidis
gtggataacaataaaaaacaagtcataccacgcagtcaatatcgacgtaaaagacgtgaatactttcataacgtagagcgagaagagcgcataagacgtgagaaaatagagaaggaaaatcaagctaaaagagaacaacatcaaactaaagtcaatgaggaacgtgttaaagataatttgagaaaagcaagaatagagaagctgacacaagaagaaatacatcaacaacgtgatgataaaagttataaacaaaaaactttaaatcaaaataatcaaatgaataaatctaaagacgacgataataaaattggagaagaaagtctacatgatgtgcgagtttcaagtgatacctccactttaccgcatcaaaataagtcaataaaagactatgatgattctggaaacgaaagtaaacaacatactaaattgacttcaaaggaatctatgctaggcgtaaattctaatcatactgagcaagattcaagaagtacacaaccatattcttcaaaacatagctattcacaaccaaaagataaagacaacgataatactcaacaagcgcaatttcttaaaaaagaagacaaacaacgtaacagagccgaaaatataaaaaaagttaatgaatttaaacaattggtggtagctttctttaaagaacactggcctaaaatgttaattattatcggtattatagtattacttttaatattaaatgccatattcactacagttaataaaaatgatcatacaaatgatagtgcatttaacggtacagctaaagatgaaacaacagcgatgaaaattgctgaaaactctgttaagtcagttgtaactgtcgagaatgatttgtctaatgacacgactgtgtctgataacaaaaatgaatctgataatgagataggatcaggtgtcgtctacaaaaaagtgggcgactctatttatatttttactaatgcacacgttgtcggtgatcaagaaaaacaaaaagtaacatatggtaatgataaatctgtgacaggtaaggtaattggtaaagataaatggtctgatttagcagttgtaaaagctaaagttgctgacgaaaatattaaaccaatgactatgggggattctaataatattaaattggctgaacctattttagttataggcaatcctctaggcacagactttaaaggaagtgtttctcaaggtattgtgtctggactcaatcgtcatgtacctgtggacattgataaaaatgataattatgatgctttgatgaaagcttttcaaattgatgcgcctgtgaacccaggaaattcaggtggtgctgtggtcgatagagacggtagactcataggtatagtttctttaaaaattgatatgcataatgtagaaggaatggcttttgcgatacctattaatgatgtacgtaagattgcgaaagaattagagcataaaggtaaagtgaactaccccaatactgaaatcaaaatcaaaaatgttggtgaccttgacgattctgaacgtaatgcaatcaacttaccagctaaagtgaatcatggtgtattaatcggtgaagtgaaagaaaatggtttaggagacaaagcaggtttaaaaaaaggtgatgtaatagtagaattagatggtaagaagattgaagataacttacgatatagacaagtcatatatagtcattatgatgatcaaaaaacaattactgctaaaatttatcgaaatggtgcggagaaaaatattaaaatcaaattgaaataa

SEQ ID NO: 4302 - DNA, 807 bp, Staphylococcus epidermidis
atggatccgagtttgattttaccttatttatgggtacttttagtacttgtatttttagaaggattattagcagctgataatgcaattgtaatggcggtaatggttaaacatctaccacctaaacaacgtaaaaaagcacttttttatggcctattaggtgcattcatttttagatttattgctttatttttaataagtattattgcaaacttctggtggattcaagcagcaggtgctgtttacttaatctatatgtctattaaaaatttatggcaatttttccatcagtcaaatgaaaaacaccataaagaaacaggagacgaacatcatttcgatgaaacaggcaacgaaaaagaagtaggccctaaatctttttggggaacagtatttaaagttgaattcgctgatatcgcgtttgcaattgattcgatgcttgccgcattagccatagccgttacattaccaaaagttggcatacattttggtggtatggacttaggccaatttattgttatgttccttggtggaatgataggtgtcatcttgatgagatttgcagcaacttggtttgtagaattgttgaataaatatccaggacttgaaggtgctgcgtttgcaattgtaggttgggtaggtattaaacttgttataatggtacttgcacatcctgatattggcgttttaccagaagcatttccacatagtgctttatggcaaacaatcttctgggtagtattagttggcttagttttaataggatggttaacttcagcaattggcaacaagaaaaaaggtaatcaaaaataa

SEQ ID NO: 4303 - DNA, 1563 bp, Staphylococcus epidermidis
atgaatttaaaagaagaaatagagtcaagaaagacatttgccatcatttcacaccctgatgctggtaaaacaactttaactgaaaaattgttgtatttcagtggagcgattcgtgaagctgggacagttaaagggaaaaagacgggtaaatttgcaacaagtgattggatgaaggtagaacaagaacgtggtatctcagttacaagctctgtaatgcaatttgattatgatgattataagataaatattttagatacgcccgggcatgaagatttttcagaggatacgtatcgtacattaatggcagtagatagtgcagttatggttattgactgtgcaaaaggtatagaaccacaaacattaaaattatttaaagtttgtaaaatgcgaggtatccctatttttacattcatcaataaattggatagagtaggtaaagagccatttgaattacttgatgaaatagaagaaacacttaatattgacacttatccaatgaattggcctgttggtatgggacaaaatttctttggtattattgatagacactctaaaacgattgaaccatttagagatgaagaaaatttattacatttaaacgaagattacgaacttaaagaagaacacgcgataaaaaatgatagtgcatttgaacaagcaattgaagaaatgatgcttgtcgatgaagcgggtgaagcatttgataatgaagcgttactgaacggtgaattaacacctgttttctttggatcggcattagcaaacttcggcgtacaaaatttcttaaatgcatacgttgatcatgcgccaatgcctaatgcgagacaaactaaagaagaggttgatgttagtccattcgacacagatttttctgggtttatctttaaaattcaagccaatatggatccaaagcatcgtgacagaattgcatttatgcgcgtggtaagtggtgcgtttgaaagaggaatggatgtaaccttacaaagaactaataaaaaacaaaaaataactcgttccacatcatttatggccgatgataaagaaactgttaatcatgctgtagcaggcgatattattggtttgtatgatacaggtaactatcaaataggcgatactttagttggtggtaagcagaaatatagtttccaagagttaccacaatttactccagaaatatttatgaaggtttctgccaaaaatgtaatgaaacaaaagcattttcataaagggattgaacagcttgttcaagaaggtgcaattcaatattataaaacgttgcacacaaatcaaattatcttaggtgctgtgggtcaattacaatttgaggtgtttgaacaccgcatgaataatgaatataatgtagatgtggttatggaaccagttggacgtaaaattgcgcgttggattgaaaatgaagaagatattaaagataatatgaatacttctagatcaattttagtaaaagatagatacgacaattatgtattcctatttgaaaatgaatttgcaacgcgttggtttgaagaaaaattctctgatattaaactgtatagtttattataa

SEQ ID NO: 4304 - DNA, 216 bp, Staphylococcus epidermidis
atgatgatgaacgtatatcattatcattctaatgatttaatcatgttagctattccagaacttttttggtccattgagttatccaaagagttagatgcaaatcagctatatgaggaattagtgatgcaattattcaatttgttgactgaagttgaagcagatgcattggcacgtaatataactgatttgattagaaatgaatccaaaggagaatga

SEQ ID NO: 4305 - DNA, 1485 bp, Staphylococcus epidermidis
ttgaatgcaagtgcgttgttcaaaaaaattagagtaaaaaatgtaattggtacattagatatacaggtggacgatattaccactgactcacgtacagctaaagagggaagtctatttgtagcatctaaaggatatacggtagatagtcataagttttgtcaaaatgtagtagatcaaggttgtggtattgttgttgtcaatagagaactcgaacttaaaggtaatgtgacgcaagtcgttgttcctgatactttacgtgttgcaagtctattggcacatgaattatacgagtttcctagtcatcaactgacgacatatggtgttacggggacgaacggtaagacatcgattgcaactatgattcatttaatttatagaaaattgaataaaaatagtgcatatctaggtacgaatggatttcaagttaatgaaacaaaaacaaaaggtgcgaatacaacaccagaaacagtagcattaacaaaaaagatcaaagaagcagttgatgccaatgcagaagcaatgacgatggaagtttctagtcatggattagccttaggtcgacttagaggcgtagagtttgacgttgctatcttttcaaacttgactcaagatcatttagactttcatggaactatggaagcatatggacatgctaaatcgttattatttagccagttaggtgaagatttgtctaaagaaaaatatgttgtattaaataatgatgatgacttctccgattatttagcaagtgtgacaccctatgaagtatttacatatggtattactcacgaagcacaatttatggctaaaaacattaaagaatcattgcaaggtgtagaatttgaattttgtactccatttggaagttttccagttaaatctccttatgtaggtaggtttaacatttcaaatattatggctgctatgattgcggtttggagtaagggaacaaatttaaatgaaattattaatgctgttactgagcttgaacctgtagaggggcgcttagaagtacttgatccatcacttcctatagatttgattatagattatgcacatacagctgatggtatgaataaactgattgatgctgtacaaccatttgttaaacaaaagctaatctttttagtaggtatggctggggaaagagatttaacgaaaacacctgagatggggagagtagcatgtcgagcagattatgttatttttactccagataatcctgctaacgatgatcctaaaatgttgacagctgaattagctaaaggtgcaacgcataacaattatatagagtttgatgaccgtgcagaaggtattagacacgcgattgatattgctgaaccaggtgatacagttgttttggcctcaaaaggtcgagagccttatcaaattatgcctggtcatgttaaagtcccacatcgcgatgacttaattggcttaaaagcagcatatcaaaaatttggtggtggacctcttgaggattaa

SEQ ID NO: 4306 - DNA, 1176 bp, Staphylococcus epidermidis
atggttactcaaaataaaaagatattgattattactggatcatttggtaacggtcatatgcaagtcacgcaaagtattgtcaaccaattgaatgagatgaatctcaatcatttatcagtcattcaacatgatttgtttatggaagctcatccaattatgacttctatatgtaagaaatggtatatcaatagctttaaatattttagaaatacatataaacgattttactatagtcgccctaatgagctcgataaatgtttttataaatattatggattaaataaactcatcaacttacttattaaagaaaagcctgatctcatattattaacatttccaacacctgtgatgtcagtgttgaccgaacaatttaatataaatatccctattgcgacagttatgacagattatcgcatgcataaaaattggattacaccatattcacaaagatattatgtagcaacaaaagatactaaagatgatttcattgaagctggtgttcctgcttcatatattaaagtgacgggcattcctattgctgataaatttgaagaatctattgataaagaagaatggttatcgcaacaacatttagacccttcaaaacatactatattaatgtcagcaggtgcatttggtgtttcaaaaggctttgactatatgattaataatattttagaaaaaagtccaaattcgcaagtggtcatgatttgtggacgtagtaaggaacttaaacgttcattaaaagctaagttcaaagataatccaagtgtaataatattaggatatacaaatcacatgaatgagtggatggcatcaagccaactaatgattacaaaacctggtggtatcacaatttccgaaggacttagtcgttgtattcctatgatttttttaaaccctgcacccggtcaagaacttgaaaatgcatattactttgaaagtaaaggatttggaaaaatagcagatactccaaatgaggcaattgatattgtttctgacttaacaaataacgaagagactttaaaggttatgtcatctaaaatgctagaatcaaaggtaggatattctactagaaagatttgtaaagatttattagatttaataggtcactcatctcaaccggatgaaatctatggaaaggttcctttgtatgcaagattcttcgtcaagtaa

SEQ ID NO: 4307 - DNA, 1212 bp, Staphylococcus epidermidis
atggaaaggttcctttgtatgcaagattcttcgtcaagtaattactcaagtaacagaaactttgttatgatgttggtaattctgtttctgatggaatttgcaagaggtatgtacatactaagttatataaactttttacctacagtgacctctatcgcaatagcaatcacatcatttgctttttccattcactttatcgcagatgctgcaacaaattttgtcatcggctttttacttaaaaaatttggttcaaaattagtacttacatctggattcttacttgcttttataagcttgtttttagtgatatggttcccggcatcaccattcataattattttcagtgctattatgttaggaattgctgtgagtccgatttgggttatcatgttatctagtgtagatgaaagaaatcgcggcaaacaaatgggttatgtctacttttcatggttgctaggtttattggtgggtatggttatcatgaacttgcttattaaattccatcctactcgttttgcatttttaatggccttggttgtgcttattgcctgggtactatactattttgttaatatcaacttaacaaattacaatactaaacctgtgaaagcacaattaaagcaaattgtagatgttacacaacgtcatcttattctatttccgggtatcttgttacaaggagcagctatagcagcacttgtacctattcttccaaaatatgcaacgcaagttgtgaaagtatcaaccgttgaatatacagtagcaatcattattggtggcataggctgtgctttctctatgttatttttatcaaaaatcatcgacaataatagcaaagggtttatgtatggagttatttttagtggctttatactatatacaattcttatattcgggctatctacaattacaaatatatatatagtttgggccataggactttttattgggctaatgtacggtatcctcttaccggcttggaatacctttatggctgggcatattaatcctaacgaacaggaagaaacatggggcgtgttcaacagtgttcaaggcttcggttcaatgataggcccactagtcggaggtctaattactcaatttactaataatttaaataataccttttacttttcagcgatgatttttcttgcacttgcagtattttacggatattactttattaaaacaaacagaagggttaaaccttaa

SEQ ID NO: 4308 - DNA, 510 bp, Staphylococcus epidermidis
atgattttaggattagcattggttccgtcaaagtcatttcaagatgaggtgaatgcttatcgcaagcgatatgacaatcattatgctcaaataatgcctcatatcacgattaaacctcaatttgaaatcgatgatcatgattttaatttaattaaaaatgaagtgaaaaatcgaatttctagtattaaaccagtagaagtacatgctacaaaggcatctaatttcgctccaatcagtaatgttatatacttcaaagttgctaaaacagagtcattagatcaattatttaatcaatttaatacagaagatttttacggtacagctgaacatccttttgtaccacattttacaattgcccaaggtctaacaagtcaagaatttgaagatatatatggtcaagtaaaattagcaggggtagaccatagagaaataattgaagaactatcgttacttcaatatagtgaagaagaggacaaatggactattattgaaacttttacattaggataa

SEQ ID NO: 4309 - DNA, 756 bp, Staphylococcus epidermidis
atgtcggagtttaaagtaggtaagattaataaaaaaataatacatagtgatattttaaatagagatgtaacattatcggtttatttacctgaggattatacaaacttatttaaatatcagttgattttttgctttgatggtttagatttttttagatttggtagaatacaacgcatatatgaacagttacgtgaagaacaatcaatacaacgtgcaattatagtaggattccattacgaagatgttgaaaaacgtagggaagaatttcatccttcaggaagtcgttctaatttaaccattaaagcaatgggaaaagaaattcttccttatatcgatgcgacatttccaacttataaagtaggtaatacaaggttacttattggagatagtttagcaggaagtatcgctttaatgactgcaatgacttacccaactatttttagtcgagttgcgttattgagcccaatgtataatgaaaatattaagaaaaaaattgatacatgtatgaataaaggtcaattgacgatatggcatgccattggtttagaagaagcagattttattttaccaactaatggtaaaagagctaactttttaacacctaaccgtgaattaaatcaactgattaaagaagataatattgaatatttctataaagaatttaacggtggacatcattggaaatcatggaaaccattgctaggagatattctcttacaatttttaggtgatccaataaatggaaaatatgtttaa

SEQ ID NO: 4310 - DNA, 1086 bp, Staphylococcus epidermidis
atgttcaataaggtttggtttagaacaggaatattttttattatgctgttcatactcatcaaactatttatggaagtgcatgaagtatttgctccaatagctactatcattggttcagtcttccttccatttttaattagtggatttctcttttacatatgtttaccttttcaaaacatattagaaaagtggggctttccacgttgggctagtataacaacaatattcataggattaatagctatcatcgctattgtggtatcatttatagcacctatcattatttccaatattaataacttaattaaacaaacaccatcattacaaaaagaagccgaacaattaattaatttctcgttaagacaaatggataaattaccagatgatgtcacacatcgtattaataaagcggttaaatccatgggagatggcgcaacgtctattttatctaattcagtgtcatatattacgtctttcatctcaactgtatttttattaataatggtgcctttcttcctgatatatatgctaaaagatcatgaaaaatttatcccagcaatcggtaaatttttcaaaggagaacgtaaagtttttgttgtagatttattaaaagacttaaacttcactttaaaatcatatattcaaggtcaagtgacagttagtatcatcttaggtattattttatatataggttatacgattataggattaccatatacacctttattagtattattcgccggcgtagctaacttaataccatttttaggtccatggttatcttttgcaccggcagcgatactaggtattattgatggcccttcaacttttatttgggtatgtgtcgtaacattaatcgcacaacaacttgaaggtaacgtgataactcctaacgtaatgggtaaatcattaagcattcatccattaactattattgttgtcatacttgcagctggagatttgggtggtttcacactcattcttgttgcagttccattatacgctgtaatcaaaacattagtgagcaacatttttaaatatcgtcaacgtattgtcgataaagcaaatagtaatgttaaagattaa

SEQ ID NO: 4311 - DNA, 771 bp, Staphylococcus epidermidis
atgttaaatctagaaaataaaacctacgtcattatgggtattgcgaataaacgtagtatcgcatttggcgtcgctaaagtattagatcgattaggtgctaaactggtatttacatatcgtaaagaacgcagtcgtaaagaattagagaaattattagaacaattaaatcaatctgaacatcatctctatgaaattgatgtgcagaatgatgaggatatcattaatggtttttctcaaatcggaaaagatgtaggccagattgatggtgtttatcactcaatcgcatttgccaatatggaagatttacgaggtcgattttcagaaacatctcgcgaaggtttcttacttgcacaagaaattagttcatattcacttactctcgtagctcatgaagccaaaaaacttatgcctgaaggtggaagtattgttgcgacgacttatattggtggtgaggcagcagttcaaaactataatgttatgggtgtagctaaagcaagtttagaggcgaatgttaaatatttagctttagacttaggtgaagataatattcgtgtcaatgctatttctgcagggccaattcgtactttaagtgctaaaggtgtaggtggatttaatacaattcttaaagaaattgaagcgagagcgccgttaaaacgcaacgttgatcaagaagaagtaggtaagacggctgcgtatttattaagtgatctttcaagtggtgtaactggagagaacatccacgttgacggtggattccacgcaattaaataa

SEQ ID NO: 4312 - DNA, 372 bp, Staphylococcus epidermidis
atgtcatctgacacaaacagtttagcacatacaaaatggaattgtaagtatcacatagtctttgcaccaaaatatagaagacaagtgatatatggaaaaatcaaaagagatattggagtgattttacgtcaactatgtgaaagaaaaggcgtagaaataatagaagcagaagcatgtaaatacccagttggtgttgttgaagatcaaatatactatttcaatgaagataatattgataacgttatatttgagggctattctgatcaagatgaaacaagatttcaagaattatttaaagagatgatgggtaatttggatgaagatattaaacgtgggactgttcaacaaaaagatagttacggattgatttaa

SEQ ID NO: 4313 - DNA, 174 bp, Staphylococcus epidermidis
ttgggacggaattatgatgaagtgattcataccgttaattatttaaaagacaaagaggttcaattgatgattaccagcttgcctaggatggatgaagtcattggtaagccattactgtatatagaaagccatgcgttatgtgtatggttcagaaaaggttttaccgttatctaa

SEQ ID NO: 4314 - DNA, 201 bp, Staphylococcus epidermidis
gtgagaaaatatggaacaatccaattgataggtgtctatggaactgcagctgataactcccaattagacttaatatttaatagaaatgttcaagtgaaaagtggacaagcgccagttattcatatgatgccaaaactttatgacatgattaaaataaagtctttgatccaacagaaattatcactcatactatgcctttaa

SEQ ID NO: 4315 - DNA, 129 bp, Staphylococcus epidermidis
ttggatgagtttatatttattatattcaatcaactcttttctcatcctaggttctttcaatataaaaatgttgaacatcataacaagaaattttatacatctaaagatttagctttatctgttatttga

SEQ ID NO: 4316 - DNA, 2259 bp, Staphylococcus epidermidis
atggattttattaatattacaggtgcttcacaaaataacttgaaaaacatagatgtaaatatcccaaaacacttagtaacggtatttacaggtcgttctggttcagggaaatcatctttagtgtttaatactgttgctgcggagtctgaacagctactaaatgaaagttattctagttatattcaatttcatttaaatcaacaacccagaccgaaagtaaagaaaattaaaaatcttcctgtagcaatgacgattaatcagaaaagattcaatgggaattctcgctccacggtaggaacagtttcagatatatatgcttctgttagattactgtggtctagaataggcgaaccgtttgttggttattcagatgcatattccttcaatagtcctaagggcatgtgtaaaacttgtgagggattaggatatattgaagacattaacttagatgaattgctagattgggataagtctttaaatgaaggtgcaatagactttccttcttttggaccagacaaagagcgtggtaaagcctatcgagatagtggtttatttgataataataaaaaattgaaagattatacaaaagatgaattagaattgtttttatatcaagagccaatgacattaaaaaatcctcctaaagaatggagaaagtcagctaaatatgtaggactaatacctagattcagtagaatatttttaggtgataaagaatttaataagaaacgctacgccaaacatcttaaaaatgtagtaaataataaaatctgttcaacatgtaaaggtcaacgtctaaactcgaaaatattaagttctaaaattatgagtaaaaatatttctgatttcacacaaatgacaattaaggaaaatttagagtttcttaataaattagaggatccaacagccaaatatattattgatcctctcaaaaagcagttagaagcactagaatatattggattaagttatttaacgcttaaccgtgtcacaacgacattatcaggcggtgaagcgcaacggcttaaattaatacgtcatttaaatagttctttatcggatttagtttacattatagatgaaccaagtgttggcttgcatccggaagatatagctaaaatcaatgaaattttaaaatcattaaaagaaaaaggtaatactgtgttaattgttgaacatgatcccgatgtcattaaagaaggagactatatcatagatatggggccaggttcaggaaaaaacggcggtgaaatcacatttgaaggaacatataatgaattactatcttcaaatacttcgacaggtaacgcattacgtaacaaacataatttaaaagagaatattcgtgaagctaaccacttttataatatcggtcctgtgacacaaaacaatttaaataacgtaaaaacgtctatacctaaacacgtattaacagtcttaacaggtgttgctggttcaggtaagagtacccttgttaaagcaggttttgaaaataatgaccataccatctttattgatcaaaaagcagttcaaggatctaatagatctaatctattaacgtatttaggtgtttttgatagtgtaagaagctatttcagtaaagaaacaggcttaaataaagctatgtttagttataattcaaaaggtgcctgtccaaattgtggtggaaagggctatattaaaacggaacttgcttttatgggtgatttttcacagacatgtgaagtttgtcatggcaaacgttataaacaagaagtattagatgctaccatagacgggtattcaattgccgatgttctcaatttgacggttgacgaaggtatcattttctttgataaaaagaatgatattaagtcaaaattacaatctgtaagtaagacaggtttgaattatatgtcactaggacaacctttgtccactttgtctggtggagagattcaacgcgtgaaactaggacaacatttagatgaagagataaagaatagtatttttatttttgacgaaccaactacaggcctacatgaatcggatatccctatattgatggagtgttttgatgatttaattgatcaaaacaatactgttattttgattgaacataatttatcgattatgtgtgaagcagattggatcatcgatgtcggcccaggcccagggttggatggcggaaaggtccaatttagtggaacacctaaaaacttcattgatagttcagaaacattgacatctaaacacttgaaacgctatatcaaacagtaa

SEQ ID NO: 4317 - DNA, 378 bp, Staphylococcus epidermidis
atgcaattttattatagtaattgtgaacagaatgcatcaaacttattagtcatcaacgtacaacctaatgaaggattttctttatgtgtgaatggtaagaaaagtaatcaaaataatgaaatgcaaaaagtgaagctttcttatactatgccgattaaagataaaatgaacacagttgatgcatatgaaaatcttatttacgatacattaattggagaacaaacaaaatttacgcattgggaagaattaaaaattcttggaaatttattgatgatattgaaaatgtatggaaacaagaatagccacagtttcctaattatgcctttggatgctatgggcctaaagaaagtgaaaaattacttagtgaagacggattga

SEQ ID NO: 4318 - DNA, 180 bp, Staphylococcus epidermidis
atgaataatgagttcgttcctgcatatagaaatgaacctaatgtaaattcacaatctaatactgaaacttttgtagcaggtaaaatagaaattgaaaactctaaatgggctagtgttacattttatattcgtacagaaaaaagaatgaaaaaaatctatccaaatcgttatagagtttaa

SEQ ID NO: 4319 - DNA, 396 bp, Staphylococcus epidermidis
ttgtttcaaaaaggatactttgaaaattcactaacaattattggcagtggtttaaatgagttaactactgatgaatttagagaaaaagtcaaaaatgctattcaaaataatattgaaaactcaaaggaaattggtgcgtttttaaaacgtttattttataaacaacaggacgctaatagtaaagatagctaccaaaaatttttggaaatgagtttagaactagatgataagtttgacctaaaagaaaatcgattgttctatcttgcaatgtcccctaaattttttggagttgcaacaaaccacttgaaagagtctggattaacgaacgtaaaaggggtgatgcgaataattatagaaaaaccatttggtgatgatttaaaatctgcaaaaaattaa

SEQ ID NO: 4320 - DNA, 204 bp, Staphylococcus epidermidis
atgaaagcagcagaattttcaacaaaagaaattatgaaagaattaaatattagaaatagaacacaagtaaaaagttggtggctatggtatcaaaatgaggaaagtatgtttgttttatatctttatcctcagtcattaattatttgtctatctttgcatttctctactaaccagtgttataatctagataatgaaaatgattag

SEQ ID NO: 4321 - DNA, 264 bp, Staphylococcus epidermidis
atgattatcaatcgaggacctattgtagatatagataatcaaaaatatatatttgattattcagcatgtaattatcctgtcggtgtcgtagaagatcaaatatactattttaacgaagacaatatcgataaagtcgtttttgaaggttattctgatcaagatgagatgagatttcaagaattatttaaagaaatgaaaaataatttagatgatgatattcaacaaggtattgttcaaaagcaagataatttaggtttaatttaa

SEQ ID NO: 4322 - DNA, 624 bp, Staphylococcus epidermidis
atggattatgtatacacaatttataaaaatcctagatataacatcattcaaaaagataatcgctatttaatggtcgatttagaacaaaattggtattcatatttatgtccaatgctgaattggtttatacctattaaattcacagaattaacttatcaagaattcaataatataaacatatttcataatggaggacaaaagagtcatggtatgatggctgctggcgttggcgtcactatcagtgtgctattaagaagtcttgtgggttatatagatattaatattagtcgaatttggatagtttttatgtttttaattggatttgttgctgtgatcacacttcgtttatctataagaaagaagttaaatcatccagcatttaataaaaagagtaaacaaaaagtaatattgataccatcatttaaaaatatgatattggtggtgttttgctattttatgatgctgtttttctcaattgcaccttttcaaatgatttttgaggaaaagaaaaacatcttaggatatatactttgggtaggtgtattatttatatttactactttgaatatggcttcaatttctgatagaaaagtacatgccaaaattaaaaatataagaagatag

SEQ ID NO: 4323 - DNA, 1845 bp, Staphylococcus epidermidis
atggaattcttatctttagttatagtcgtcgtagctgcatttatgactccgatcattgtgcatcgttttaatataaactttcttcctgttgttgtagctgaaatattgatggggatagtgataggtcactcttttctcaatttagtggaaagagatgcattccttaatattttatctacgcttgggtttatctttttaatgtttttaagtggtctagaaattgactttaatgcatttaaaaaggattcacgtccaagacaaggagaagataaacatgaaaaggatgtacctgggcatcttaaactggcactgacagtatttgcatttattatgatgatttcggttgttttagcttttgcatttaaatggttaggattagttaatgatgtccttttaatggtgatcatcatttcaacaatttctttaggagttgtagtaccaacccttaaagaaatgaacattatgcgtacaacgataggacaatttattttactagtagctgtattagcagatttatttaccatgattttactaactgtttatggtgctatttatggtgaaggtggtagtacaatatggcttacaggtattttagtcgtatttacagttgtcttttatgtaatcggtgtgttatttaaacgtatgtccttcttacaaaagttaatggatggtacaacgcaaataggtataagagcagtatttgcacttattattttattagtagcacttgctgaaggtgttggtgctgaatacatattaggtgcatttcttgccggtgtcgttgtttctttacttaaacctaatgaagagatggtcgaaaaattagattcctttggttatggtttctttattccaattttctttatcatggtaggtgtcgatttagatatcccaagtttaattaaagaaccatcgttgttacttattatacctgtactcattttttcatttattatttcaaaattgataccagtattttacattagacgctggtttgacactaaaactaccattgcatctgctttcttacttacatcaactttatcacttgttatagctgcggctaaaattgctgaaaaattaaaagcgatttctccggaaacttcaggcattttaattcttagtgctgtgattacatgtgtcttcgtacccgtgatattcaagaagatgttcccaattcctaatgaagtgggacgccgcatagaagtaagtatgattggaaagaatcaattaactattccaatagcacaaaatttaacttctcaattatatgatatttctttatactatcgaaaagatttgagtgatagtagaaagctctctgacgatattactatgatagaaatagcagattacgaagaagatttattagaacgcttgggacttttcgagcgagatattgttgtatgttctacaaatgatgaccatataaataaaagcgttgcgttaatggctaaaaaacatggtgttaaacgtgttatatgtcgactcgaaagcacaaacgaagatccgacattgaaacatcaaggtatagaggtgtttagtaattatttaagtaataaaatcttactaaaaagtttaatagaaacacctaatatgctgaatttattaagtaatgtagaaacatctctatatgaaattcaaatgttaaattatcagtatgaaaatattcaattacgtaatttcccatttggtggcgatattatttttgttcgtattataagagataacgattcaatcgtacctcatggtgatacacagttacgatataaagatcgtttgattgtgacgggaactaaagaatatgtagatgaattaaagcaagaattggaattttattattaa

SEQ ID NO: 4324 - DNA, 1386 bp, Staphylococcus epidermidis
atgtctaacgaaactgaaatgaaagacaacgttcgtgaagacgtatatgataaagaattatttgatcgattattagatcaaaatgatatagatgaattcagaaaagaatttttagaattacataactatgaacaaagtgaatactttgaagatacggatgatgaaaatagacaaaaaatatttgagtttttatcacccaaagaagtagcaaatttctttgatcaattagactttgatgacgatgattatgagagcctttttgataatatggacgctacctatgctagtcatgtcttagaggaaatgtcttacgataatgcagtagatattttaaatgagttatctaaacctaaagtggcgagtttgctaacattaatgaacaaagataaagctaatgaaatcaaagctttattacattatgaagaagatactgccggcggtataatgactacggagtttatctctttaaaatcaactacacctgttaaagaagcgttaattcacgtaaaagaacaagcgcctgatgctgaaacaatatatgtcatattcgcagtaaatgaagatgaacaacttgttggtgttctatcacttagagatcttattgtagctgagaatgatgcatacattgaagatgttatgagtgaacgtgtcatcagtgctaatgtcggtgatgaccaagaagatattgctcaattaatgagagactatgattttatagctgttccagttgtagattatcaaaatcatttactaggtattattactattgatgatatcctggatgttatggatgaagaagcaagtgaagactactcacgattagctggggtatctgacatagattctacaagtgactcagtgtttaaaacggcgagtaaaaggttaccatggctcattgtgttaacatttttgggtatgattactgctacaatattaggtagttttgaagatactttatctcaagtggcattacttgcagcatttattccaattataagtggtatgtcaggaaattctggtacacaatcattagccgtttctgtccgtaatatatctactggggaaataaatgaacagagtaaatttaagattgcattgcgagaagcgggaagtggtttattatctggtattgtatgtgcagttatccttttcctaattattgtcgtcatattcagacaaccgttattagctttaatagtaggtggaagtttgacatgcgcaatgacagtaggtacattagttggttcaatgattcctttagtaatgaacaaatgtaaaattgatcctgctgttgcaagtggtccttttattacaacaattaatgacattgtgagtatgcttatttatttcggattagctacatcattcatgtcatacctaacataa

SEQ ID NO: 4325 - DNA, 855 bp, Staphylococcus epidermidis
atgattttaacatatcaaattgtacagtcagaaccagtgaaaacttttttgaaaaatcaagattattctaaacgcacgttgagcgccattaaattaaatggcgctttactattaaacggttcacctgtaactgtcagacatgttatgaacaaaggtgatagattagaagttcattttccatgtgaaacaccaagtgagaatttgattccatacgataaggaattagaagtcatttatgaggatgcgtatttgataattgtaaacaagccacaaatgcaaaattgtgcaccttctagagaacatccccatggcagtttagtagaacaagtgcttgcttattatacaaaaaaaggcgaaaaaataaatcctcatattgtgactcgacttgatcgaaatacttcaggtttagttgtatttgctaaatttgggcatgtacatcatttgttttcaaaggtgaaatttaaaaaagaatatgtcgccttagcctatggccatacacaatcttcaggtgttattgaagcgccaattgcaaggcggagtgatagtatcattaaacgagaagttaatgataaggggaagtatgcaaaaacagtctatcaaaggcttatgcaaaatgagactgctagtttatgtaaggttaaattgcttactggaagaacgcatcaaattcgagttcactttgagtatattggacatccattaattggtgatgatttgtacggtggaaatcatccttgcgttcatggacaagcgttacattgctgttcagttgaatttatccaccccatatatagatctcattacctaataaatgttgactacaaacaattaattaaattattcaacatggtataa

SEQ ID NO: 4326 - DNA, 810 bp, Staphylococcus epidermidis
atgcgttatacaatccttactaaaggtgattcaaaatcgaatgcattaaagcataaaatgatcaatcatatgaaagattttcaaatggtagaagatagtgaaaatcctgaaattgtcatttcagttgggggagatggaacgttactacaagctttccatcaatatagtcatatgttatccaaagttgcttttgtcgggatacacaccggtcatttaggattttatgcagattggttacctcatgaagttgaaaagcttattattgaaattaataattcggagtttcaagttattgaatatccacttttagaattaatagtcaggtataacgataatggttatgaaacgagataccttgctttaaatgaagcaacaatgaaaactgaaaatggctcaacattggttgtagacgtcaatataagaggtaaacatttcgaacgatttagaggagatgggttgtgtatatctacaccttcgggttcgacagcttataataaagctttaggtggtgcgctcatacatccatcacttgaagcgatgcaaattgctgaaattgcatctattaataatagagtgtttagaacagtaggctcgccattagtacttcctaaacatcatacgtgtttaattacgccggtaaatcacgatacgattagaaccacaatcgatcatgttagcattaagcacaaaaacgtcaatgcaatacagtatagagttgctaatgagaaagtgcgttttgccagatttcgtccatttccgttttggaaaagggtacatgactcatttatttctagtgatgatgaacgatga

SEQ ID NO: 4327 - DNA, 636 bp, Staphylococcus epidermidis
atgaaccagtgggatcaatttttaacgccatataagcaagctgttgatgagttaaaagtaaaacttaaaggattaagaaaacaatatgaagtgggagaacataattcaccaattgaatttgtgactggaagggtaaaacctatttcaagcgttatagacaaagcgaacaaaaggggtatcccttttgattgtttacatgaagaaatgtacgatatagctggtcttagaattatgtgtcaattcgtggatgatattgacatagttgttgatatattaagacaacgtcaagatttcaaggttatagaagaaagagattacattcgaaatacaaaagcaagtggctatcgttcttatcacgtgattattaaatatcctattgaaacactaagtggacaaaagcacatcttggctgaaattcaaatcagaaccttagcaatgaacttctgggctacaatcgaacatacattaaggtataaatatgatggggcatacccagatgagattcaacatcgtttagaaagagcagcagaagcggcatatttattagatgaagaaatgtccgaaattaaagatgaaattcaagaagctcaaaagtattacacgcaaaaacgtgctaagaaacatgaaaatgattaa

SEQ ID NO: 4328 - DNA, 348 bp, Staphylococcus epidermidis
atgcgtatttacataaatgaaattaaattaaaagatgatggcgtttattgcttctcagaagaatctacagagggactagaagaggtaggtcaaatgcttgttgatagtgataattatggttttgcttatcttttagatgatggacaatcatattcttatttgatttttgttcaggaaacatggtcgatgttgcatgagaatagagataaacgaatcattattaataatcatttagaactaaagcatttccaagaagaattagattatgttttgaataacatagaaggaaacaataactatggtaaggagtttgtttcagctgttgaaaaaactttcgaactagagtga

SEQ ID NO: 4329 - DNA, 591 bp, Staphylococcus epidermidis
atgtctacgaataatgagattgaatttaaacaaatactagatcaagatacttactcaaaaatctatgaacactatttcaaaaatcaatcaccttttaagcaaactaatttctatatcgacacagagaattttaaattaaaacagcatcatgctgctttgcgtataagggtaaaagattatatgtttgaaatgactttaaaagtccctgctgaagttggattgacagaatataatcactcagtaaatatagaacctgaacttgatatgtcacttcaactttctcaattacccaacgatattagaaatattttagaacaggactttaatattttagaaaatgagcttaaagtactaggaaacttaactacctatcgtttagaaaccgattatcaaaatgaattactagtattagataagagtgaatatctcggcaaaactgattatgaattagagtttgaagttcattcttatgatgaaggatattcaaaatttaaaactttacttcaacattttaatcttcaacatcaaaaacccttgaataaagtgcaacgtttttttcaagaaaaacaaaatgcaagtgataaagagtaa

SEQ ID NO: 4330 - DNA, 384 bp, Staphylococcus epidermidis
atggaacacggtgatattatgtctaaaacaccatatgagttgattggtcaaaaagccttgtatcaaatgattgatcatttctatcaacttgtcgagaaagattctcgtatcaatcatttattcccaggcgatttcaaggaaaccagtcgaaagcagaaacaatttttgacacagtttcttggaggtcctgacttatatacacaagaacatggtcatcccatgttaaaacgaagacatatggaatttacaattagcgagtatgaacgtgatgcatggcttgagaacatgcatactgctattcaacacgcccaacttcctgcgggtgtaggcgattacttgtttgagcgattaagacttactgcaaatcacatggtaaattcctaa

SEQ ID NO: 4331 - DNA, 798 bp, Staphylococcus epidermidis
atggctgaagaattaagaatcatggagaataagagtcgtgaagatactaatctatcacctgttagcaaaatagaaatctattctttttttgatccttttagcaaagattgttttaaattatctgcaatcttatcaaaattaagaattgaatataataaatatataaaggtaagacatattttaaacccttctttaaaggtattaactaagtgtcaagctcaaagtacttcagattttgacaatattgcacttgcctataaagccgctgaacttcaaggtcgtatcagagcagaaagatttatacatttaatgcaaaatgaaatcattccaaaacgtgatattattaccgaagatatgatttctgattgtattaataatgccggcattgactatcaagtttttaaagaagacttgcaaaaggacaagttgactgacagcttgaaagttgatcttcacattgcaagagaaatggaaatagaacaagctccctcacttgtttttttcagcgaaaatgttcatgaagaaggtttaaaagtcgaaggattatatccttatcatatttatacttacattattaatgagttaatgggacaacctatagagaaaaatcttcctccaaaattagaatactacattcaaaagaaacaactagtaacaatggaagaacttttaacgatctatgaatggcctgaaaaattgctaaataaagaattaaagaaactcacacttcaacaaaaagttgaaaagttgcaatatccagagggagaattttggaaatctaaaatgcctcagtgttaa

SEQ ID NO: 4332 - DNA, 1809 bp, Staphylococcus epidermidis
atgagtcaacaattaacaagagaagaacaggaacgtaaatatcctgaatatacatgggatttaacaactatttttaaaagtgatgaagcatttgaagaagcttttaaaagtattgaagctaaaataggtgaagaagaaaaatttaaaggtcatcttggtgaaagtgctgaaacattatatgaagcgctaagtcttgaagacgagttaggtacaaaattagaaaaggtatatgtatacgcacatttaaaacaagatcaagatactgcaaatgataaatataccggtttagaagcgcgtgcacatcaacttgttattaaatatagctctgcatggagttttttagtacctgaaattttacaactagatgaagctactattcaatcttttatcgattctaatgatgatttaaaacgatatgaattcgatttgaaattgattaatgagaaacgtccacatatattagatgcgaatacagaaaagttattaacagaagcacaagacgcactttcaacgccttctaatgtatatggaatgttcagcaatgcagatttagaatttgaagatgctatagataaagatggtcaagcttatcctttaacacaaggtacatttatcaagtatttagagtctgatgatcgtgagttaagagcttctgcttttagaaatgtttataaagcatacggtgcgcataataacacgctaggtgctacattagctggtgaggttaagaaaaatgtatttaatgctagaactcatcattatcgttcagcacgtgaaagagctttaagtaataatcatattccagaagctgtttacgataacttaatcaaaacggtccataaatacttacctttattacacagatacacgaagcttagacaagagttactaggtttagacgatttaaaaatgtatgatctttatacacctcttgttaaagatgtcaaatttgaaatgccatatgaagaggcaaaatcctggatgttaaaagcacttgagccaatgggagaagaatacttaaacgtggttaaggaaggtctagataaccgttgggtcgatgtatatgaaaataaaggtaaacgttcaggcggatattcatccggtggacatttaactaatcctttcattttacttaactggtcagacactgtttctgatttatatactttagtacatgaatttggtcactctgcacatagttactttagtagacagaatcaaccatcaaatttaagcgattatacaatctttgtcgctgaggtagcatcaacttgtaatgaggctttacttagtgactacatggacaaacatttagatgatgaacgacgtctattgttacttaaccaagaattagaacgatttagagcaacactattccgtcaaacaatgtttgctgaatttgaacataaaatacatcaaatagaagaagctggggagccgttaacgccaaatcgtatgaatgaagaatatgctaaactgaacaaactatattttggtgaagcagtagaaactgacgatgatattagtaaagaatggtcacgtattcctcatttctatatgaattattatgtatatcaatacgcaactggttatagtgcagctcaaagtttaagtcatcaaattttaactgagggtcaacctgctgttgaacgatatatcaatgaattcttaaaaaagggtagctcaaactatccgattgaaattttaaaaaatgcaggtgttgacatgacaacacctcaaccaatagaggaagcttgtgaagtattcgaacaaaaattagatgcttttgaaaagttaatgaaagcttag

SEQ ID NO: 4333 - DNA, 981 bp, Staphylococcus epidermidis
atggcaatcaatcagcaaggtcaaaaaattttagcgcaacatgcaaacaaatttgataaatatcaatgtcctcactgtaggtctgaggtgatactcaaacaagggatgactttaatagctcactttgcgcataaaacacgttttaatcaccactgttcaaagtcagaatcagttgaacattatgaagcaaagttatatttagcaagaatttataaagcattgaattttaacgtggaaattgaaccttattacaaagaagttttgcaatatccagatattgtgatcaatcaagaaaatgcaattgaagttcaattttctaaaataagtatcagtaaaattattcgccgaacaactggtttaaagcgaataggtttgaatgtgatttggattattaaagatgttcctttgaaatataaatacgttaaattatcaccatttcaaagtgcttttattcatccaattaatagaacattagtaacatgggattccaaaaagtttgtattaatattatatagtcaacttcaacatgtaggcggtaaaaattttgttgctcaaagaaaagttttaaaatttgaagatataataaatatgacttttcaatcaaataatgttcccaattttaggttatctgcttctaatatacaacgttatataaactattgtagaaagcgtcacagtgttttagaacctacactcagtgccatgtatcaattaaatatgtatgattctgatgtaatttctaaattaggatatgttgtaccacatcaaatatatttaataacgcatccaatagaatggcaattaaaatatttgttgctaagaagaacattaaatgacaacgaattatgtaaacaacttcttagtcaagtgaagtttagggtgtttgcaacgtttcaatacgacaaacgtcaaatattaagcactattttacgtgaatttgattatttatatgaacacgaaagcttaaacgtgcaaaagtag

SEQ ID NO: 4334 - DNA, 723 bp, Staphylococcus epidermidis
atgagaatagaacgtgttgatgatacaacagtaaaattgtttataacatatagtgacattgaagcacgtggttttagtcgtgaagacctatggagtaaccgtaaacgtggtgaagagtttttctggtcaatgatggatgaaattaatgaagaagaggattttgtagttgaaggtccactttggattcaagtacacgcttttgaaaagggcgtggaagtaacgatttctaaatcaaaaaatgaagatgctatgaatatgtcagatgatgatacaaatcatcaatttgatgatcaggtaaatgaattattggctcaaacacttgaaggtgaagaaagtttagaagatttatttgaacaacgtaaacaacaaaagaaaaaccatcaagataaacaacaaagacgtgcgcataagccatcaaatgtgagaaatattatagtgaagtttgacgatttagagcaagttatcgactatgcttatcataataatcaaaacactgatgaatttgaagatttattatatatgattgataataaatattattactcaattcattttgatgattcagtttcacaagagatgattaacgatagttatagtcagttattggagtttgcatatccaactgataaaacaaatatttatttaaacgactacgctaagattattatgagtcacaatgttacttctcaagtacgtaaatactttactgatacaaacgaataa

SEQ ID NO: 4335 - DNA, 114 bp, Staphylococcus epidermidis
atggcaaatcaatatatcattggaaattgttgtattttaaaatttatttatacccatggaaagtttgaatttctcgatatggtggatcctacaatcgatgctgccaataagtaa

SEQ ID NO: 4336 - DNA, 378 bp, Staphylococcus epidermidis
atggctacagatcacgcgcctcatgccaaagaagaaaaagctcagccaatgacaaaagcaccatttggtattgtaggaagtgaaacggccttcccattattatatactcattttgttaaaaaaggagactggtcattacaacaacttgttgattacttaacaattaagccagcacaaatatttgatttaccttatggaaaattagaagaaggcagctatgcagatttaacaattatcaatttagatgaagaaagagaaattcgtggtgaagatttcttatctaaagcagataatacaccatttataggatataaagtatatggtaaccctgttttaacaatggttgagggtgaagttaaatttaaggaggacaagtaa

SEQ ID NO: 4337 - DNA, 126 bp, Staphylococcus epidermidis
atgaatttgggagtgagagtaatgaatttagtcgagctacaaggatcaacaagagctgaaaatgaaacaagagggcgagcgcttatctcaagtgaagaaagcttcttagccgagggaataaactga

SEQ ID NO: 4338 - DNA, 1269 bp, Staphylococcus epidermidis
gtgacagtaagaactaaagtttcgacaaaagatatagatgaagcatatttacgtctgaaaaatatagtaaaagaaactcccttacaattcgaccattacttatctcaaaaatataattgtaatgtttatttaaaaagagaagatttacagtgggtacgatcctttaaattaagaggagcttataatgctatttcagtattatccaatgaagaaaaaaataaaggtattacttgcgcaagtgctggaaatcatgctcaaggtgttgcttatactgcaaaaaaactcaatttaaaagctgttattttcatgccagtaactacaccacgacaaaaaatcaatcaagtcaaattcttcggggatagtaacgtagaaatagtattaattggcgatacatttgatcactgcttagcacaagctttaaactatacgaagcaacataaaatgaattttattgacccatttaataatgtatatactattgcaggacaaggtactttagctaaggaaatattaaatcaagctgaaaaagaggataaaacatttgattatgtatttgctgctataggtggtggcggtcttatttcaggagtgagcacatattttaaagcacattccccccacactaaaattattggtgttgaaccaaccggtgccagtagtatgtatcaatcagtcgttatcaaccatagtatagttactttagaaaatattgataagtttgttgatggagcttcagtagcaagagttggtgatattacctttgatattgcgaaagataaagtggacgattatgttcaagttgacgaaggagctgtttgctccacaattctggatatgtactctaaacaagcgattgttgctgaaccagctggtgctttaagtgtaagtgccttagaacaatataaaaagcagattgaaaataaaactattgtatgcatagtaagtggaggcaacaatgatattaatcgaatgaaagaaattgaggagcgttcccttctatttgaagaaatgaaacattactttattttaaatttcccacaaagacctggtgctttaagagaatttgttaatgatgtcctcggacctcaagacgatattacaaaatttgaatatttaaagaaaacatcacaaaacactggaactgttattataggtatacagctgaaacatcatgatgatctcattcagttaaaagatcgtgtatgtcaatttgatccttctaatatttatatcaatgaaaataaaatgttatattcattacttatttaa

SEQ ID NO: 4339 - DNA, 570 bp, Staphylococcus epidermidis
ttggaaatcaaaccaatcactatatataccggaaaaactgtaccccttttttatgacaatatagatactgaccaaatcattcccaaagtgcatcttaagcgggtctctaaatcaggctttggaccttttgcttttgatgaatggcgttacttacctgatggtagtgataatcctgattttaatcctaataaacccgaatatcatggtgcgtcaattctaattactggagataactttggttgtggttctagccgtgagcatgccgcgtgggccttaaaagattatggttttaacattattattgcaggaagttttagtgacatcttttacatgaattgtactaaaaacgcaatgttacctatatgtttaaatcagaaagaaagagaacatttagctcaatttgatgaaataactgttgatttacctaatcaaacagtgtctacggtgtctcagtcttttcattttgatatagatgaaacctggaaaaataaattaatccatggcttagacgatattgctattactttacaatttgaaaatttaatagaaaaatacgaaaaaactttttaa

SEQ ID NO: 4340 - DNA, 1371 bp, Staphylococcus epidermidis
atgggtcaaacactgtttgataaagtatggaaaaaacatgtgcttcatggaaaagaaggtgaaccacaattattatacattgatttacatctcattcatgaagtcacttctcctcaagcatttgaaggacttagaatacaaaatcgtaaactcagaagacctgatctaacctttgcaactttagatcataacgttcccacaattgatatttttaatataaaagatgaaattgcccataaacaaattacaactttacaacaaaatgctaaggactttggtgtacatatttttgatatgggttctgacgaacaaggtattgtacatatggttggaccagaaactggattaactcaaccaggaaaaactattgtatgtggagattcacatactgctacacatggcgcatttggtgctatcgcatttgggataggaacaagcgaggttgaacatgtatttgctacacaaacattatggcaaacaaaacctaaaaatttgaaaattaatataaatggttctttaccaactggagtttatgctaaagacattattttatatttaatcaatcaatatggtgtagatttcggtactggttatgctcttgaatttacaggggaaactataaaaaatttatccatggaagcacgtatgacgatttgtaatatggctattgaagccggagcaaagtatggtttaatgcaaccagatgaaacaacctttgattacgtaaaaggtcgtccttatgctactgattttgatagttctatggcgtggtggaaaaaactttattctgatgatgatgcctattttgataaagttattgaacttgatgtaacaaatttagaacctcaagtaacttggggaactaacccagaaatgggagttagttttagtaatccattcccagaaattaaaaatgcaaatgaccaacgtgcttatgactatatgggacttcacccaggtcaaaaagccgaagatataaaattaggttatgtttttttaggttcatgcacgaatgcaagattatctgatcttattgaagcaagtcatataattaaaggacaacaagtacatccaaatattactgctattgtggttccgggttcaagaactgttaagaaggaagctgaagctctgggactagataaattatttaaagatgctggatttgagtggcgtgaaccaggatgttctatgtgcttaggtatgaatccagatcaagttcctgaaggagtacattgtgcatccacgagtaatcgcaattttgaaggaagacaaggcaaaggcgctcgtacacatttggtatcccctgctatggctgctgctgctgcgattaatggtaaattcattgatgttagaaaggtggtagtataa

SEQ ID NO: 4341 - DNA, 1044 bp, Staphylococcus epidermidis
atgagttataaaatagttgccttacctggagatggtataggaccagagattctatctggtacattagaacttttaaaattaataagtgaaaaatatcattttgaataccatttagaaagtcatcattttggaggcgtttcaatagattattatggtacacctttaactaatgaaacattacaatcatgtaaaaatgcagatgctattttattaggtgcgattggagggcctaaatggacagacccaaataatcgtccagaacacggtttgttaaaactgagaaaatccttaaatttatttgctaatattcgacctacatttgtaactaaaggggctagtcatctttcaccactaaaacaagatattgtagaaggcacagatttagttatagtaagagaattaacgagcgggatttattttggtgaaccaagctatgttaaaaaaaccgaagctttagactcattaaaatattcaagtcaagaaattgaacgtattgtgagaatcgcttttaatcttgcaaatcgtagacgtaaaaaattaacttctgttgataaggaaaacgttctatcctccagtaagttatggcgacagatagtaaatgatgtaaaaaaggattatccagaagtagaagttaatcatatgctagttgatgcttgtagcatgcatctgattacccaacctacgcaatttgatgtgattgtaacagagaatcttttcggagatatcttaagtgatgaagcatctgttataccaggctctctaggtctttctccatcagctagttttggtcaaacaggtacacgtctttatgaaccaattcatggttcagcacctgatatagctaatgaagataaagcgaatccatttggtatggttctatctttagcactttgcttaagagaaagtttaaatcaaaatgatgctgctaacgaacttgagtcaattgtttactcatttattcaatctaataagacaactgcagatttaggtggacaatatcgaacttcagaaatttttaaattgcttaaagaaaaatatctataa

SEQ ID NO: 4342 - DNA, 1536 bp, Staphylococcus epidermidis
atggaagaacatattcaaatttttgatacaacacttagagatggtgaacaaacgccaggagtcaattttacctttgatgaaagattgaaaattgccaagcaactagaaaaatggggagtagatgtactagaagcaggttttcctgcttctagtactggtagctttaaatcagtagaagctatagctaaaactttgactacaacagcagtgtgtggattagctagatgtaaaaaatctgatattgatgctgtatatgaagctactaaagaagctataaaacctcaagtacatgtattcattgcaacctcccctattcatttagaacataaattaaaaatgactcaagatgaagttttaacatcgataaaagaacacgtttcttatgcaaaacaattttttgaagtcgtacaattctctccagaggatgcaacaagaactgaaattccatttttaattgaatgtgttcaaactgcgataaacgcaggagccacaattattaacatccctgatacagttggatttagttatcctactgagtatggcgaaatttttaagcaattaacacaggccgttaagtcaaattctaaaattatctttagtgcacattgtcatgatgatcttggtatggcagttgctaatagtttagcagctattgaaggtggagctagacgtattgaaggtaccgtgaacggtattggtgaaagagcaggaaatgcctcacttgaagaagtcgctttggctttatatgtaagaaaggaccactatggtcttgaatctcaaattaaccttaaagaaactaagaaaacatctgacttaatttcaagatatgctggtatccgtgtacctagaaataaagctatagtcggtcaaaatgcatttagtcacgaatccggaattcaccaagacggtgtccttaaacatcgtgaaacctatgaaatcatgacacctcaacttgtaggtgtaaatacaacagaattgccactaggtaaattgtctggtaaacatgcatttgccgaaaagcttaaagctctagggtatgaaattaaattggaagatcaagttacattatttaaacaatttaaagaaattgctgataagaaaaaaaatgtatccgatagagatattcatgcgattatacatggctctgaacatgaacacaatgctatttttcaacttgataacttacaacttcaatacgtatctaaaggtctacaaagtgcagtagtagttataaaggaaagaaacggacaagttaaacaagattcaagtattggaacgggttcaattgttgcaatttataatgctgttgaccgaattttcaagaaagacgcagaattaattgattatcgtattgattctgtaacagaaggtactgatgctcaagcagaagtacatgtacgaatcattattaatcatattgaagtgacaggcataggtatagaccacgatatattaaaagcttcatgtaaagcatatatcgatgctcatgctaaatatatttcagaatatgagttgaaagaaggtatacgtacatga

SEQ ID NO: 4343 - DNA, 1005 bp, Staphylococcus epidermidis
atgacaaaagtatattacgacgaaacagtaactcaagatgcattacaaggtaaaaaaattgctgtcattggttatggctcacaaggacatgcacatgcacaaaatttaaaggacaatggttatgatgtagtcattggcctgcgtccaggacgatcatttaataaagctaaagaagatggatttgatgtttatacggtaagtgaagcaacacaacaagcagatgtagtgatggtactattgcctgatgaaattcaaggtgaagtatataacaaggaaatcaaaccatatttagaaaaaggaaatgctttagcattcgcacacggttttaatatccacttcagtgttatcgaaccacctagtgatgtcgatgtctttttagtagcacctaaaggacctggtcatttagttagacgtacatttgttgaaggaagtgccgtaccagcattatttggtgttcaacaagatgctacaggccaagctagaaacattgctttaagctacgcaaaaggcattggtgctactcgtgccggggtcattgaaacgacatttaaagaagaaactgaaacagatttattcggtgaacaagctgtactttgtggaggagtttccaaattaattcagagtggattcgaaacacttgtggaagcaggttaccaacctgaattagcttattttgaagtcttacacgaaatgaaattaattgttgatttaatgtatgaaggcggaatggaaaacgtccgttattctatctctaacactgctgaatttggcgactatgtttctggaccaagaataattacacctaatgttaaagaaaatatgaaaaaagtacttgaagatattcaaaatggtaactttagccgtagatttgttgaagataacaaaaatggctttaaagaattctatcaattacgtgaagatcaacatggtcatcaaattgaacaagttggacgtgaattaagagaaatgatgccattcattaaatctaaaagtattgaaaaataa

SEQ ID NO: 4344 - DNA, 234 bp, Staphylococcus epidermidis
atggaacgaacaattcattttacattagttgatcaagtgagtactttgaacagaattactagcgccttcgttcgcttacaatgtaatattgatgaacttcatgttaaacattcagacaaagaaggaatttctaatatgaaacttaaagtcaatattaaagatgatgatacttttaaaattgttcttaaaaaactatcacaacaagtaaatgtactaagtgttaaaagtgaataa

SEQ ID NO: 4345 - DNA, 1743 bp, Staphylococcus epidermidis
atgtcaaatcaaaaatcaatggtttcgcctcacccttctgtgcatcaaacaaaggaatcacaacccttaataacacgcagtggttctcaattattagttgaagcacttcagcaggaagatgtagattttatcttcggttatcccggtggagctgtcttacctttatacgatacattttatgacgggaaaatcaaacatattcttgctcgtcatgaacaaggtgctacacatgctgctgaaggatatgcgcgtgtctctggtaaaacaggagtcgttgttgtgacaagtggacccggtgcaacaaatgccattacaggtattactgatgcatatagcgactctttaccattagtcgtttttactggtcaagttgctacacctggtattggtaaagatgctttccaagaagctgatttactctcgatgaccacacctattacaaaacacaattatcaagttaaaaagattgaagacattccaagaattgttcatgaagcctttcatttagcgaacactggaagaaaaggtcctgtagtgattgatttccctaaagatatgggtgtgcttaaaactgatgttgaacttacaaaagatattaatattcctggttatgaagttaatagtagcccaaataaagaggatattaataagttaatatatatgattaaagaagctaagaaacctcttattcttgcaggtgctggtattaatcactctaaatctaatcatttattaacagaatttgtgacaagacatcaaatccctacagtcacaactctcctaggacttggagcagtaccttatcatcaccctttattcttaggtatggggggtatgcatggatcttatgcaagtaatatggctttaacaaattgtgatttacttatcaatttaggtagtcgattcgatgatcgtcttgcaagtaagcctgatgcgttcgcaccaaatgcaaaggttgtacatgtagatatcgacccttctgaaataaataaagttattaatacagatttaggtatagtcgctgattgcaagcatgtgcttgaaaacttatgccatgagcaagttttaacatcctcccacgaagaatggaacgattattgtattaataacaaaagtaactatccatttaaatatgatgaaaatgataaaaccttttgcaaaccacaaaaagcgattgaatatattggtaaagttaccaatggaaatgcaattgttacaactgacgtaggacaacaccaaatgtggacagcacaattctatccatttaaaaattatggacaatgggtaacaagtggtggtttaggtactatgggatttggaattccatcagcaataggagcacaattagctgaaccggagaaaacagttgtatgttttgtaggagatggcggttttcaaatgacgaaccaagaaatggctttacttccagaatatggacttaacgtcaaaatagtacttattaataacggaactttaggtatggtaaaacaatggcaagataaattctttaataaacgattttctcattctgtatttaacgatcaacctgattttatgaaaatggcggaagcatatggcattaagggattcttgatagattctccagataaattagaatcttcaattgatgaagcatttgcatatcatggaccggcactcattgaagttagaatctcacctatagaaccagttaatccaatggtacctagtggcaaatcaaatcatgaaatggagggttactaa

SEQ ID NO: 4346 - DNA, 1689 bp, Staphylococcus epidermidis
atgcgaagtgatatgatcaaaaaaggagatcaccaagctcctgcaagaagtcttttacatgcgactggcgctcttaaacaacctacagatatgaataaacctttcgtagcaatttgtaactcttatattgatattgttcctgggcacgttcatttaagagaattagcagacatcgcaaaggaagctattagagaagcaggtgctatcccattcgaatttaatactattggtgttgacgatggaatagctatgggacatattggcatgagatattccttaccttcaagagaaattatcgcagatgcagctgaaacagttattaacgctcattggtttgatggtgttttttacattcctaattgcgataaaattacgccaggaatgttactcgcagctgttagaacaaatgtaccagctatcttttgctcaggaggcccaatgaaagctggtctttccgctcaaggtaaggcattgacattatcttcaatgtttgaagcggttggagcttttaaagaaggaacaatctcaaaagaagcatttttagacatggagcaaaacgcttgtcctacatgtggttcgtgcgccggtatgtttaccgcaaactcaatgaactgtttaatggaagttttaggtttagccctaccatataatggtacagctctagctgtgagtgatcaacgtcgtgaaatgattagacaagctgcattcaggttggttgaaaatattaaaaatgatattaaacctcgcgatattatcacacaagatgcaattgatgatgcttttgctcttgatatggccatgggaggttctactaataccgttcttcatactcttgcaattgcaaatgaagcaggtattgactacgatttagaacgtattaatgaaattgctaaaaaaacaccttacctttctaaaattgcacctagttcttcttattctatgcacgatgttcatgaagcaggtggcgtcccagctattataaatgaattgatgaaaaaggatgatactttacatccggatagattaacagttacgggtaaaaccttgagagaaaataatgaaggtaaaaacatcaaaaattttgaagttattcatcctcttgaaaacccttatgataaacaaggtggattatctgttttattcggaaacctcgcacctaaaggagcggtaatcaaggtcggtggagttgatccttcaattaaagtatttacaggaaaggcaatttgttttaactctcatgatgaagctgttgaagccattgataatcatacagtaagagaaggacatgttgttgttattagatatgagggacctaagggaggtcctggaatgccagaaatgctagcccctacgtcttccatagtgggcagaggattaggtaaagatgttgcattaattacggacggtagattttcgggagcaactagaggtattgcagttggacatatttcacctgaagccgcttcaggtggacccattggcttaataagagatggtgataaaattacgattgatttaatcaatagaactctaaacgtcaatcaatctgaagaagaactgtatcgccgtaaaaaccagcttgaaccattcagagcaaaggttaaaacaggctacttagctagatatactagtttagtcacaagcgctaatactggaggtattatgcaagttccggaaaaccttatttaa

SEQ ID NO: 4347 - DNA, 462 bp, Staphylococcus epidermidis
ttgataactattcacaatttaaatgaaatggataaatttgctcaaatacttgtaaaacatttaagtgctaaggacttgattttattaaatggtgacctaggagcagggaaaactacattaacgcaatttataggaaaagcgttaggtgttaaaagaacgataaactcaccaacatttaatataatcaaatcttatacaggttcaagcatacgattacatcatatggactgttatcgacttgaaggtgaggaagatgatttaggtttcgatgaatattttgaagacaatgctatcatagttatagagtggagtaaatttatcaaagatttccttcctcctaatcacttaactattaatataagtgtcaaagatgcgaatgagagacaagtatccattgaaacacatgggcaacattatgcattagtaaaggaggcaattttgaatgaactatcttctaattga

SEQ ID NO: 4348 - DNA, 663 bp, Staphylococcus epidermidis
atgaactatcttctaattgatacgtcaaaccaacctttatcagtagctattatgaaagataatgaagtgattgctgaaaaaacaactgatatcaaaaagaatcattcagtgcaactcatgcccgaaatagcagaaattcttacagaaagtaaaataaataaaacagaaataactgatatcgtggtagcggaaggtccaggttcatataccggtcttagaataggggttactgttgctaaaacattagcgtatgcattaaacactaacttatatggtgtctcatcacttaaagcgcttgctagcacagtaaaagacagtacgaagttgttagtacccatttttgatgctagaagagaagcagtttatgcaggtgtttatcaatatcaggacaatgaattaataaccattattgatgacacttatatacctatttttgaacttattgaaaaacttcatcaattaaaccaaccttatgtgtttgtaggatatcatatcgaaaaaataaaacatttattagacagtgacatcgtagaacagttaccacaagcttcaagtatgaagcaattaatccaaaaaccagaaaatatacattcatttactcctaaatatcataaattatcagaggcggaacgaaattggttaaaccaacaagagaacaattga

SEQ ID NO: 4349 - DNA, 462 bp, Staphylococcus epidermidis
ttggttaaaccaacaagagaacaattgaatattaggaaaatgagtgtggaagatgttcctaaagtttttgatatagaaagaaatagtttctcacacagttcgtggtcaattgatgcattttatcatgaaatagaaaacaacgaatttgctacatattttgttatagaatttagtgacaaaataattggatatgttggtttatggttagtcgttgatcaagcacaaattacaacgatagctatatcaaaggcatttagaggctatggtcttgggcaacttttacttaaatatgcaatgaactatgcacgcttttcttgtgatatgatgagtttagaagtaagaatagataatgatgttgcacaacatgtttataggaatttgggattccaaaatggtggcaaaagaaagaattattatggagaaggcgaggacgcattagtcatgtgggtgaatttgaaatga

SEQ ID NO: 4350 - DNA, 1023 bp, Staphylococcus epidermidis
atgacaaataataaattaatcttagcaattgaaacaagttgtgatgaaacgagtgtaagtgtaataaagaatggcactgaacttttatctaatactgttttaagtcaaatagatagtcacaaacgttttggtggtgttgtacctgaagttgctagtagacatcatgttgaaggaataacagcaactatagatgaatcgttagtgagtgcaaaagtgaaaatggaagacattgacgctattgcagtaacacaaggcccaggattaataggagctttattaattggtattaatgcggctaaagctttggcatttgcttatgataagcctattattccagtacatcatattgctggtcatatttatgccaatcacttagaacaaccattaacatttccactaatgtcattgattgtatctggtggtcatactgaactagtatatatgaaaaatcatttagatttcgaagtgattggtgaaacgagagatgatgcagtaggagaagcttatgataaagttgctcgaacaatcaatcttccttatcctggtggaccgcatattgatcgattagcagctaaaggtaaagatgtatatgattttccaagagtttggctcgaaaaagatagttatgattttagttttagtggtcttaaaagtgctgtaataaataaactgcataatttaagacagaaaaatattgaaattgtagctgaagatgttgcaacgagtttccaaaatagtgttgtagaagttttaacctataaagctattcatgcttgtaaaacttataatgttaatcgcttaattgttgcaggtggtgttgctagtaataaaggattaagaaatgcactaagtgaagcatgtaaaaaagagggtatacaccttactattccaagtcctgttctttgcactgataatgcagcgatgattggtgctgctggatattatttatatcaagctggtttgtgtggcgatttagctttaaatggacaaaataatattgatattgaaactttttctgtttaa

SEQ ID NO: 4351 - DNA, 1617 bp, Staphylococcus epidermidis
atgacgaacaatcaaaccttagtactaattatattaactttcatcatcctaattacacttgtaaatgtaattatctctattatagagagacgtaaacagattgctaaaataaatactttatgggataacaaattaaaattagaaagttttatacgtcctaattcacgattcgatgcccaatatcacgcttaccgtgatcattacaatgagcagtcatttatcgacgataagacttggtcagacctaaatatggatacgttgtttcataaaattaattttaatttcactgcaattggtgaaatgcgactatatgcaactttaagaggtatgtttaaggtaaatcaaacctcattgataaacaagtttaaagataataaagtatttcgtttaaatgtatcttacattctttctaaaattggtaaaaatgtataccctttatttccagatcaaatgttacccactaagcgaaatattttattaatgttttgtccgttgttaccatttatcggggtcgcattcatttttttaattccttcaaaaggtatattaatatgtcttacttttatgattttaaatgcaatattatctttcaaactaaaaaaatcttatgaccaagatttaaaatcaattttttatactgctaatgttataaagcaaagtcaagctttaagtaagattgagagcacgcccgcgataagtgttgattttactcattttaaagcttcacgccgttttagtggtttattagctagagtagaatcacaagatatggcgagtagcataatcatgtttattaaattagtattcatgatagattatgttttatttcatttaatacaacgcagctactttaagtatcaagaagaagttatggcatgttatgactatataagcatattagataatcattactctatagctatgtatcaacatactttgacacattattgttatcctaaaatcaatcacaatattaatggtcttcaaatgaaatcaatcattcatcctctactagatgaagaaaatgcgattgctaacacaattgacatttcaaatcatatattactcacaggctctaatgcatcaggaaaatctacatttatgaaagcagttgcactaaatttgattttagctcaatcgatacaaactgcaacagctcactcatttatttatcaacctggctatgtaatgacatcaatggcaaatgcggatgacgttttaagtggtgacagttatttcatgtcagaacttaagtctattcgtagattatttaacactcatcagtgcaataagatatattgttttatagatgaaatttttaaaggaacgaatacaactgaacgtattgcggcttctgaatcagtattatcgtatttagataatcaaaaagcatatcaggttatcgctgcgacacatgatgttgaactatcaacattattagaaaatacatataataattatcattttaatgaatctattcaagaaaatagcatatttttcgattacaaaattaaacctggtaaagccaatacacgtaatgcaattgaattactacgcattacgcagtttcctatcgatatttatcagcgtgctcaacaaaatattcgaaacctctag

SEQ ID NO: 4352 - DNA, 1935 bp, Staphylococcus epidermidis
atgatacttttacaacttaatgacatctccaaatcgttcgatggtgaagatatcttcacagatgttaattttgaggtgaaaactggcgaaagaatcggcgtagtaggccgtaatggagctggtaaatcgacattaatgaaaatcatagcaggtgtggaaaattacgatagtggtcaaatatcaaaaatcaaaaatttaacaatgagttatttaactcagcaaatgacactcaattcagaagctactgtctttgaagaaatgtctaagccttttgaacatataaagaaaattgaaaatttaattaaggatgaaaccgattggcttgcacgaaatggacaagattatgaatccgatgaatatcaatcacatattgaaaaatatgaaactttaacgaatcgttatgagcaattagatggttatcaatatgaaagtaaaattaaaacagtcctgcacgggcttaactttacagaaagcgatttcaacaagcctattaatgattttagtggtggtcaaaaaacacgtctttctcttgctcaaatgttacttaaagaacccgatttactccttcttgatgaaccaactaaccatctagacatggaaacaaccaagtggttagaggattacttaaagtactttaaaggggcaattgtaattatcagtcatgatagatattttttagataaaattgtaactcaagtttatgatgttgctctaggaaatgtaaaacactatgtaggaaactatgagcaatttataaagcaacgtaatcagtattacgaaaaacgcatgcaagaatttgaaaagcaacaagaagaaatcaagcgtttagaaacctttgtagaaaaaaatattactcgtgcatctacaagcggcatggctaagagtagacgtaaaacattggaaaaaatggaacgtattgataaacctatgatagatgctagaagtgcaaatatacaatttggcttcgactgtaatactggtaatgatgtgatgcacattcatgatttaaaaattggttacgactcacctattacactacctataaacctcgaagtctttaaaggggatcatatagctatcattggtccaaatggtgttggtaaaacaacattgataaaaacaattgctgaaaaacaacataaactaggtggtcaaattatctttggtgctaatttacaaattggttactatgatcaaaaacaagctgaatttaaatcaaataaaaccattctcgattatgtttgggatcaatatccacacatgaatgaaaaagatgtacgtgcagtattagggcgtttcttgttcgttcaagaagacgtaaaaaaaattatcaatgacttatccggcggtgaaaaggcacgattacaattagcacttttaatgttacaacgtgataatgttcttatcttagatgaaccgactaaccatttagatattgattctaaagaaatgcttgaacaagcattgaaagattttgaaggcacaattatttttgtatcacatgatcgttattttattaaccaacttgcaaataaagtttttgatttaaacattaatggtggccaaatgtttttgggagattatcagtattatattgagaaaactgaagaagctgcagctatcaaagcacatgaaacagtaactcaaaataattttgaaaataaagagattaatcaagacgcaaatacttcaacctacatcagtcaaaagcaacaaaaaagacaacaacgtaaattagaaagacaaattgaacattgtgaaagacaaatcgaagaattagaagcacaaatatcacatatcgaagaacagttaacacaacctgaagtatttaacgaccctctaaaagctagtaaatttgccaatcaaaaatccgatatcgaacaaaaattagaacaaataatgttggagtgggaaaaattacaagaaaagctctaa

SEQ ID NO: 4353 - DNA, 636 bp, Staphylococcus epidermidis
atgccagatgattttaaaattcctcgcgctacgttaaaacgtctacctttatattaccgatttgtcagtattttgaaaggtaaaggtatagatcgtgttaattctaaaacaataagtgaagcactacaaattgattcagctacaataagaagagacttttcatactttggtgaattaggaaaaaaaggatatggatataatatagatagtatgcttgaattctttaaatcagaattaagtgagagcgatcaaattaaaattgccattataggtatcggtaatttagggcgtgcattacttacatataacttttcaatacatgatgagatgacaattactgaagcttttgatattagaccagatattataggtgagaatatcggtgacgttgtggtaaaacatagcgatgatatcaaaacgacattagaatcagaagatattgatgtagtcattttaacaacaccagataatgtggcacaacaagtagctgatgaacttgttaaagccggtgttaaaggtatactaaactttacgccacgtcgaattaaaacaccccaagatgtccaagtacatcatattgattttggtatagagttacaatcattattgttcttcatgaaaaattatagtaaataa

SEQ ID NO: 4354 - DNA, 1053 bp, Staphylococcus epidermidis
atggtgtggacaattataagcggattagtcgttggcatattgctaggatttgtaatgcagagaacaagattttgtttagctggtggatttagagatatgtacgttcaaaagagtaacaaaatgttttatgcattgcttattgctattacagtccaaagtattggtttacttattctaaagaacttaaatattatagaggttccagcagaaacatttccagttataggaactattttgggatccttcgtttttggaatagggatagtattagctggaggatgcgcgacaggaacttggtatagggctggtgaggggttaattggaagttgggtggcattaatattttatgcattgacttcagccgtaactaaaactggggtacttcttccaataatgaatcaaataaataaaccgacgcaagtcagcacaagtatgacgagtacaacaggtataccacaatggattctcgtcatgttattaactgtaattacaatatttttagttgtgaaaacaattcgaaaacctaaaataatggtgccccaacttaaacaaaaatatagtggtattagacattacctatttgaaaaaagatatcatccatttgttgctggcattgcaataggttttattgctctacttgcttggcctatgagtgaatctactgggagaatgggtggcttaggtataacaacaccatctgcaaatcttgtaaattatcttatttcaggagatttaaaatttattgattggggtgtgcttttggtactaggtatattcataggttcttatatagctgcaaaagggtctaaagagtttagatggagattgccagatattaagacaattcgcaatagtgcgcttggtggcatatttatgggatttggtgcttcagttgcaggtggttgctctatcggtaatggtttagtagagacagctacaatgagttggcaaggatggattgctttagcctctatgattattggtgtttggtttatgagttattttatttttgtaaaacctatgaaaaagttacaacaagtatctcaaagctaa

SEQ ID NO: 4355 - DNA, 225 bp, Staphylococcus epidermidis
atggtatacgaattaggaacagtagggatggtttgtccatttcctttaatagaagcacaaaagaaaatgaatgaattaaatcaaggggatgaattgaaaatcgatttcgattgcacccaggctaccgaagcattacctaattgggctgcagaaaatggatatccagttacaaactatgagcaacttgatgatgcatcatggacgattactattcaaaaggcataa

SEQ ID NO: 4356 - DNA, 1251 bp, Staphylococcus epidermidis
atgaatatgaatgatacaatatttctatttttatgtactctattagtatggttaatgacaccaggtttaagccttttttatgggggactcgtacaatcaaaaaatgctttaaatactgtaatgcaaagtatggttgccattgtcattgtcacatttatatggataatgattggtttctctttaagttttgatggaggtaatcaatggataggtggtttgaagtttttgggtcttcatcatgttggttttgaaacttcaaaaactttgagtcctcatatccctctctcattatttatgttgtttcaaatgatgttttgtacaattgcggtatctattttatcaggttcgatagccgagaaaatgagattcattccttatctgatttttgtgagtttatgggttctattaatttatagtcctgttgcccattgggtttgggctggtggttggattagtaaaattggagcaatagattatgcgggtggaacagtagttcatataacatcaggcgtatctggtttagttcttgggataatgataggtataggtaagaagaaagaaaaacatactccccataatctattaattacgcttataggtggtatattagtatggttaggatggtatggatttaatgtaggcagtgcatttacattcgatcacatagccatgatatcgtttgttaacacagttattggtgcaagtgcaggtgctttcggttggttaatctttgaatatatcttgaaaaagactacaagtttactaggtcttttatctggagcactctctggtcttgtcgctattacaccagcagcaggatacgtcagttatatgagtgctatgattattgcaataattggtggcatatgttgctatatcgttataaatttaattaaagtaaaactccaatataatgatgcacttgatgcatttggtattcatggtgtaggtggtatcttaggagctgtgtttacaggagtttttcaatcacatcaaattaataatgcggtgcagaatggttttatctatacagctgattttaaaatagtagtgattcaacttggcgcggcaattgcaactgtcgtttttagcgcaatagttacatttttgattgctagatttattaaaatttttactcctttagctactactcaagaagaagataaaacaggtcttgatgctatagtacacggtgagaaagcatatttctatggagagctaaataagtttaatcgtcatatcaagttttaa

SEQ ID NO: 4357 - DNA, 600 bp, Staphylococcus epidermidis
atgaaaaatatatcagatatagcaaaattagctggagtatcgaaaagtactgtttcacgctttttaaataatggatctgtgagtccagcaacgaaagaaaaaataactaaaataatagaagaaaataattatcagccaaatcaatttgcacaaagcttaagagcgcgacgtaccaatttgattggagcaattattccgcgtatgaattcatacgctgttgacgaaacgattaagggtttggtacaccaatgtaatcaacatcgatatcagttattattaaattacacaggattagaaatagatggtgaaatttcggcactaaaaacattatcacgtagtaaagttgatggaatcgtgctaatggcaacacgtattactgaagcgcatattgaagtcattgagaaaattgatgttcctgtcattatagtaggacaagaacacgaccgattatatagtatatatcacgatgattatgaagctggatataaaattggagtactcattggtgaaaaagttgtcgaaatgtacatttctttggcgttagtgaagaagatattgcagttggtattcaacgtaagctgggagttattcaagcgctga

SEQ ID NO: 4358 - DNA, 1473 bp, Staphylococcus epidermidis
gtggagtggactcgtgaagagagataccaacgtattgaggatgttgatgaaacatatcttgagcaactgaaacaccaagtggatacatctttatatagacaaacatttcatatccaacctgaaatgggtttattgaatgatccaaacggactcatttattatgaaggatactactatatttcacatcaatggtttccgttaggtgctgtgcacggtttaaaatattggtttaattataaaagtaaagatttattacattttgaacctcaaggaacacttcttaaacctgatactaagtatgatagtcatggtgtatacagtggaagtgcttttgaatatcaaaatcatctttattatatgtatacaggcaatcatcgtgaccaacattggaatagaatttccagtcaaatgattgccagaatgaacaaagacggaaaaatagagaagtttcctaaacctgtgattcatggacaacctgaagggtatacaagtcatttcagggatccaaaggtatttgaaaaaaatactcaattgtacgctattctaggtgctcaaaatgaaaatgagatggggcgtttacttttatatcgtagtcaagatgttgttgattggcattttgaaggtgagattaaaactaatctgacacaatttggttatatgtgggagtgtcctgattattttagactaggcaataaagatgtcatactcatgtgtccacaaggcgttgaagctgaaggagataaatatagaaatatctatcaatcagggtatatgataggagatttaaactttaataatctatttttcgaccatgaaagttttcaagaattggataatggttttgatttctacgcgccacaaacgtttgttgatgcagacgggcaacgcattttaattggatggatgggactaccagatacagagtatcctacagataaagaggggtgggcacattgccttactattcctcgagtgcttaccattgaaaatggaaaacttaagcagcgaccttttaagcagttagaagatttaagaactaataaagaaacagctttgggatatgctaataaatttaaacgtaaattacatccatatgaaggtaaacagtatgagatgattatagatatattagaaaatgatgcttcagaaatatattttgaattgcgtagctctcgatctgaatctacactgattacttataataaacacgaaaataaactcactttagatcgtaccgatagtgggacactaccatcaaatgtcgatggaacaacgcgttctaccattttagattcaccattaaaacagttacaaatttttgtggatacatctagtatcgaaatattctgtaatgatggtgagcgtgttttaacctcacgtattttcccaaatgaggatgctacaggtataaaagcttcgactgaatctggtcaagtatatttaaaattcactaaatatgaattaaaagggtga

SEQ ID NO: 4359 - DNA, 960 bp, Staphylococcus epidermidis
atgagacgtctatttgctattggagaggcattaattgatttcataccaaacgtaacacattcaaaattaaaagatgttgaacaatttagtcgacaagttggtggcgcaccgtgtaacgtagcggctacagtaagtaaattaggtggaaaatcagaaatgataacacaactaggaaatgacgcgtttggtgatatcattgtagaaacaattgaacaacttggcgtaggtacgcaatatattaagcgaactaataaagcaaatactgcattggcatttgtcagccttcaagatgatggtcaaagagatttctcattttatcgtaaaccttctgcagatatgttatatcaacctgaaaatattgatgatattcaagtattccaagacgatattttacatttttgttctgtagatttaatagagagtgacatgaaatatgcccatgagaaaatgattgaaaaattcgagtcagtagatggtactattgtttttgaccctaatgtacgcttacctttatgggaagataaactcgaatgtcaacgtacaataaatgcgttcatacctaaagcacatattgttaaaatatctgatgaagaattattatttattactgataagaggaatgaagatgaagcgattcaatctttatttagaggtcaagttaatgtagtgatttatacacaaggagcgcaaggtgcaactatttataccaaagatgattatcgtattcatcatgaggggtatcaagtacaagcaattgatacaactggtgctggtgacgcatttataggtgctattatttattgcatactcgagtctcggcattctgaatgtaaagatttatttaaggaaaatgcaaaggatatactagcgtttagtaatcgtgttgcagcacttacaacaacgaaacatggtgctattgaaagtttgccaacaaaagaagatataaaagactattattga

SEQ ID NO: 4360 - DNA, 717 bp, Staphylococcus epidermidis
atgaagatttttgtttgtgaagatgaccaaagacaaagagaacatatggtatcaatcattaaaaactacataatgattgaagaaaagccaatggagttaactttagcaacaaatgatccttatgaggtcttagagcaatcaaaagaacttaatgacattggttgttacttccttgatattcaattagaagctgatatgaacggtattaaattagccagtgaaattcgtaaacatgatcctgttggtaatattatatttgtaaccagtcacagtgaactgacttatttgacgtttgtttataaagtggctgctatggattttatttttaaggatgatccatctgaattaaaaatgagaatcatagattgtcttgaaacagcacatacacgactcaaattattatctaaagaaagtaatgtagatacgattgagttaaaacgtggaagtaattcagtatacgttcaatatgatgatattatgttttttgaatcatctacgaaatctcatagactcatcgcacatcttgataatcgacaaattgaattttatggaaatttaaaggaattagcacagcttgatgaacgtttctttagatgtcataacagttttgtgataaacaggcataatattgaatctattgattcaaaagaacgtattgtttattttaagaatggcgaaaattgtttcgcttcagtacgtaatgttaaaaaaatataa

SEQ ID NO: 4361 - DNA, 531 bp, Staphylococcus epidermidis
atgcctggattacgtaaatattttgatgaacatattgtcccaatgaaagataaattaaaaactcgctctattaaaatgaatggtattgaaaaattgaaagtgagagaaattaaagggctcattactactaaaattattcaagctcaagaaaaacgtattccaattagtattgaggttcctgatgaaattgatcgtatcgatatgaatactgttgagcttagtcgtattataggtattatagttgataatgctattgaagcttctgaaaatcttgaagaaccactcatcaatatcgcattcattgataatgaggaatctgtcacttttatcgttatgaataaatgtagtgaagatattcctaaaattcatgagttatttgaacaaggtttttctaccaaaggcgataatcgcggtttaggtttatcaactttaaaagaactgacagactcaaacgagaatgttttattagatactgtcatcgaaaatggttactttgtacaaaaagtagaaataaacaataaggaatcataa

SEQ ID NO: 4362 - DNA, 141 bp, Staphylococcus epidermidis
atgaatttattaggtggcttacttttaaaattattttctaactttatggcagtaattggtaacgcagcaaaatacaacccttgtgctagttatctcgatgagccacaagtgccagaagaattaactaaactagatgagtag

SEQ ID NO: 4363 - DNA, 564 bp, Staphylococcus epidermidis
gtgaaaatcattgataaaaaaattgagcaatttgctcaatatttacaacgtaaaaataacttagatcacattcagtttctaaaagttcgtttagggatgcaggtcgttgctggtaatattgaaaaaacagtggttctatatggaatatcttatttttttgatttgctcatttttacatttttaactcatattagttactttctattaagactatttgctcatggtgcacatgctaaaacatctcttcaatgtcatatacaaaatattctttattttatatttataccttggctagtgctacattttcctcttagtacaaatatattttattttttagccataattagttttttattagtaatatcttttgcaccggctgcaacaaagaaacaacctatacctaaacatttacttaagaagaaaaaagtactctccatattaagttttatcataatcataacaatcgctttaacactagaagaagtattcaaaaaaattgtaatctcgggtgttgtaatagagtctattacacttttaccaatattttttcctaaggaggattaa

SEQ ID NO: 4364 - DNA, 786 bp, Staphylococcus epidermidis
ttgaaaatccaaatacttcaattcaatgtagaacgtggaaatgttgataaaaatatgcaaaatatcaaaactaagtttaatcaatatttagataaagacaccagtgtcgtcgtgcttccagaaatgtggaataacggttatgcattagaagaattagaacaaaaagctgataaaaatcttaaggacagctctctctttataaaagatttagcacatacatttaatgtagacatcattgcaggttcagtgtcaaatataagagaaaaccatatatataatactgctttagcaattaataaaaacaaagaattgattaatgaatatgacaaagtacatctcgtgccaatgttacatgagccagactttttatgtggtggaaatgtagtccctgaacccttttatttatctgatcaaacacttgtgacgcaaatcatttgttatgacttgcgatttccagagatattgcgctatccagctagaaaaggtgctaaaattgctttttatgtagcgcagtggcctagctcaagactagatcattggttatcattactaaaagcgagagcaatcgaaaatgatatttttattgtagcttgtaatagttgtggtgatgatggtcacaccaattatgcaggaaattcaattgtcattaatcctaatggtgaaattttaggccatttagatgataaagaaggtgtactaacaacacatatcgatgtagacttagtagatcaacaaagagaatatattccagttttcagaaatctaaaaccacatctttataaatag

SEQ ID NO: 4365 - DNA, 1443 bp, Staphylococcus epidermidis
atgaaaaagtttaacattaaacattcatttatgcttacgggctttgctttcatgataactacatcattattcagtcaccaagcacatgctgaggataatcatcctattgacattaatttttctaaagatcagattgatagaaatacagctaagagcaatattatcaatcgagtgaatgacactagtcgcataggaattagtatgaattcggataatgatttagatacagatatcgtttcaaatagtgactcagaaaatgacacatatttagatagtgattcagactcagatagtgacttagattcagatagtgattcagattcagacattgacacatatttagatagtgattcggactcagattcagacagtgactctgactcagatagtgactcagattcagacagcgattcggactcagatagtgactcaggtgcagacagtgactcagatgcagacagtgattcggattcagatagtgactcagattcagatagtgattcagactcagatagtgactcagattcagacagtgactcagattcagacagtgactcagattcagatagtgactcggattcaggaagtgactcagattcagatagtgattcagactctgatacaagttcaggtaagggttcacataccggaaaaaaacctggtaatactaaaggaaatacaaatagaccttctcaaagtaatacgaatcaaccccaaaggcctaaatacaatcaaacaaatcaaaacaatataaaccataatattaatcatacacgtactagtggagacggtgcgccatataaacgtcaacaaaatattattaattctagttcaggtcatagaaatcaaaataatataaatcaatttatatggaataaaaatggcttttttaaatctcaaaataatatcgaacatagaatgaatagtagtgataataccaattcattaattagcagatttagacaattagcaacgggtgcctataagtacaatccgtttttgattaatcaagtaaaaaatttgaatcaattagatggaaaggtcacagatagtgacatttatagcttgtttagaaagcaatcatttagaggaaatgaatatttaaattcattacaaaaagggacaagctatttcagatttcaatattttaacccacttaattctagtaaatactatgagaatttagatgatcaggttttagctttaattacaggagaaatcggctcaatgccagaacttaaaaaacctacggataaagaagataaaaatcacagcgccttcgaaaaccatagtgcagatgaaataacaacaaataatgatggacactccaaagattatgataagaaaaagaaaatacatcgaagtcttttatcgttaagtattgcaataattggaatttttctaggagtcactggactatatatctttagaagaaaagagtaa

SEQ ID NO: 4366 - DNA, 741 bp, Staphylococcus epidermidis
atgaaaaggttatgggtatccctattaaccgttctattctacggtttagctcaaatactacctgggttggttttaggtagccatttacttggagatatgtctaaaatgcaaactgcccaaacaatgagtatcatgcaagtatctatctttatcatcgctgcattgttaatcattttcatgcaagcaaccattaaaaatcctactcaattagaacaaggacataaggaacctaaaagatatattttcgcctgggttctattaggattttgtattgtgatgatttaccaaatcatcatcagtataattttatttgccatcaatggcagtccgcaaagaagtccaaacactgaaaggttaatggctattgctaagcaaatgccgatatttatcgttttaatatccatagtaggtcccattttagaggaatacgtttttcgtaaagttatcttcggagaattgtataactttataaagggatcacgtgtggtaagctttatcattgcttctatagtaagttctctaatattcgctttagcacataatgacttcaaatttataccggtatattttggaatgggagtcattttctcacttgcttatgtttacacaaaacgaattgctgtacctataggcatacacatgcttatgaatggttcggttgtattaactcaagttgtgggtggagattctattaaaaaattgcaagaacaagcaacatttatattccatcttatattttaa

SEQ ID NO: 4367 - DNA, 285 bp, Staphylococcus epidermidis
atgcttaaaccattaggaaatcgtgtgattattgagaagaaagagcaagaacaaacaactaaaagtggcatcgttttaacagatagcgctaaagaaaaatcaaatgaaggtgtgatcattgcagttggacaaggtcgtttattagacaatggcacacaagttgctcctcaagtcagtgaaggtgacacaatcgtcttccaacaatatgcaggtactgaagtaaaacgtggcgacaaaacatatttaattttaaatgaagaagatatattagctattatagaataa

SEQ ID NO: 4368 - DNA, 1620 bp, Staphylococcus epidermidis
atggcaaaagatcttaaattctctgaagatgcgcgtcaagcaatgttacgtggtgttgataaattagcaaacgctgtaaaggttacaattggacctaaagggcgaaatgtggttctagataaggattacacaacacctttaattaccaacgatggtgtaacaattgctaaggaaatagagttagaagatccatatgagaatatgggtgcaaaattagtgcaggaagttgcgaataaaacaaatgaaatcgctggggacggtacaactacagcaacagttttagcacaatcaatgattcaggaaggtcttaagaatgttacaagtggtgcaaatcctgtaggcctaagacaaggtattgacaaagcagtgcaagtggctatagaagcgcttcatgagatttctcaaaaggttgaaaataagaacgagatagcgcaagttggagctatttcagcagcagatgaagaaatcggtcgctacatttctgaagcaatggataaagtaggtaacgatggcgttatcactattgaagaatcaaatgggtttaatacagaattagaagtagttgaaggaatgcaatttgatcgcggttatcaatcaccatatatggtaactgattcagataaaatgatagctgaattagaacgtccatatatattagtaacggataagaaaatttcatcattccaagatattcttccattattagaacaagttgtgcaggctagtcgaccaattttaattgttgcggatgaagtagaaggcgatgcacttactaatattgttttaaaccgtatgcgtggaacatttactgctgtagcagttaaagccccaggatttggtgatcgacgtaaagcaatgttagaagacctagcaatattaactggtgctcaagtcattactgatgatttaggtttagaacttaaagatgcatctcttgatatgctaggtactgcaaataaagttgaagtgactaaagatcacacaacagtcgtagatggtaatggtgatgaaaataatattgatgctcgagtaggtcaaattaaagcacaaattgaagaaaccgattcagagtttgataaagaaaaattacaggaacgcttagcaaaactagctggtggcgtagctgttatcaaagtaggggctgcaagtgaaacagaacttaaagaacgcaaattaagaattgaagacgcattaaattcaacacgtgcggcggtggaagaaggtatcgttgctggtggtggtactgcgttagtcaatatatatcaaaaagtaagtgaaattaaagcagaaggtgatgttgaaacgggtgttaatatcgtattaaaagcattacaagcacctgttagacaaattgctgaaaatgcaggattagagggttcaattattgttgaacgattaaaacatgctgaagcgggcgttggtttcaatgcagcaacaaatgaatgggttaatatgttagatgaaggtatagtagatccaactaaagtaactcgttcagcgttacaacatgcagcaagtgtagctgctatgttcttaacaactgaagcagtcgttgctagtattccagagccagaaaataatgaacaacctggaatgggtggcatgccaggaatgatgtaa

SEQ ID NO: 4369 - DNA, 1176 bp, Staphylococcus epidermidis
atggcaagttacgatcagatagctaaaaataactggcgttaccgtatatcattagggaaaaatgcagaaactggcaaatatgaatatatttctaagactggctttaaacgtaaatcagacgctaaacatcaagctgaaatgattgaacgtcaattaagaaatggtgactatatcgccccttcttctagcacgttcaaacaagtagctgacgattggcttaaacaatacgctaatgatgtaaaagtaagtagtgtcagagcgcgtgagaaagccatacaacacgccatagagtgttttaatactaaaccaatacaaaccatcaagaaacatgattatcagcgctttttggacgatatgagcgcacagtatagcaagaattatgttgatagtattgtggcttctacaaatatgatatttaagtatgcgtatgatacgagattaataaaagctatgcctagtgagggtattaaacgacctaagaagaaagtaagcgtggaagaattagaagatattgagatacacaaaaagtttcttgaaaaagatgaattatttcaattcctggagattgctaagtatcaccattcaccacaaaatagctttgaagtatttaccacattggcatacactggcatgcgtgcaggcgagttgttagcgttaaaatggtctgatatagactttgagaatgacacaattagtattactaagacttattacaatccgaataataataaaaagaattatcagatacttacaccgaaaactgaaagttcaatcggtaaaatatcagtagatcctcatgtgattcaattactcaaagattataaggtaaatgtccaggacgcttggaaaaatgaattatatgtagataataattttgtgtttactgatgtgaatggttatcctcttgtgattaaaaagctgcaattatggataaaagctatacttaaaaagactgacataaccaataaacaaataagcacgcactcattccgtcatacacattgcgccctacttatagaggctggcgtacatatcaaggaaatacaagaaagactacgccacaaagatataaataccacaatgaacatctacgctaaaattaccaactcatataaaaaagacgcttcccacaagtttagtcaactcatggaaaacgtctcaaaagaattattttaa

SEQ ID NO: 4370 - DNA, 684 bp, Staphylococcus epidermidis
atgacggaaattaaattcaacttaggaaattttttaaaagttcttagaagtgataaaaaagaaactactaggggattatctaaaaagattggttattcacatagttatataagttcggttgaaaatggatctaaattatctccttcaagcgattttatacaacaatatttattaggattatttgataaaaatatcggtattacaaatatgtatatagaaaaaattaaatatttatctgaaggtttatatgattttgataccttaccagttaattctgataaggatttaattgaagcaagcaaaaagatgaaagatgagttcttaaaatttaataatattcattcttttgtaaccaaaaaaggtgaaaatttttttgaagaacctataaatgatctaaattttcatctaaatgaattgaataatcaaaaatattataaaggagttgaaatgagtacagaagaaatgcatgaaatagataaattaattaataattatttgataaccatttataatactcaattatctcaaacaagttttttatattttgaaggtcatttaactaaaagtgaatatgagatatattcttcacactatttaaataaattatcaaaattagattcagaaacaaaaggtgatctccctgattttatggaagaagccaaaaaatttgataatggtgattaa

SEQ ID NO: 4371 - DNA, 171 bp, Staphylococcus epidermidis
atgttattaactgtaaaagaaacagctgaatttttaagaataagtgaacgttacgcctataaattaataggcaacaataaaattccttatattaaattaggtggcaaaatacttatcgataaaaattctcttattgattatttacacaaaatagaaatcaaggaggcataa

SEQ ID NO: 4372 - DNA, 315 bp, Staphylococcus epidermidis
atgttcaacattaatattgatgaagatgaagcacgtgctttattagagcaagcaattaatgaacgtgtagatgaattggctagagaaaaattctttatgacctacaaagaattagctgaatacctaaatttaagtaaaccaacgattgaggaactacttattaataacgggctaaagtattatatggtcggttcgacatatcgtttcaagaaatctgatgttgatgaatttatggagaaaatcatatctcacatggatattcataacaatgatttaaaacaaattaatgttaagaagttacttagcacaatttag

SEQ ID NO: 4373 - DNA, 201 bp, Staphylococcus epidermidis
atgaaacaacaagtagtgataacaaagagcgtgatcggttggtttaatgtgagagatgttgaagggaaacttcttttaaatatagcgcctgatgtatttaagaaacactttcctgaagttagtcctaacatagctattgcgtgtatggaactagatattaatagaattgtcgaacttaaagataagaaagtgagtgtatag

SEQ ID NO: 4374 - DNA, 540 bp, Staphylococcus epidermidis
ttggaacaagaacaaaaagaagttatacaagatatttatacaacgttaggaacaactgttggggataaagcaacagaatatgaacatcattttaaagaaggacacaatgaatggactgaaaccgtaaatcgtgaagaacacttacaagcaataattgagtgggctatacaacaaattgaaaataattttgaatttgaagaggagaatggaaaaatgaacaaaaaatttgaaaaagtaaatattaatgatttgaaagtagattatagttatcgttctttagataatcctagtgcagatggtattattgaaaattttgaaagacttgcaattggatatatcacagttagtgcgagagaggatggactatatattattgatggtattcgtcgagttgaagcgcttaaacatctaggttatgtagaatgtcctgctgaagtattacatgggttaactgttgaagatgaggcgcgaatttttgttaatatgaatcagtttcatgatgaagagtatgaagtatatccagatattgaagtggagtaa

SEQ ID NO: 4375 - DNA, 204 bp, Staphylococcus epidermidis
atggctgctaaattagatgtgaataaacaaaatatcatgcaagctatcaactggattattaaaaatgaagaagaaattatatttgaaagtcaaagtcagttaagtttcttcagtcgtgaagatttggagaaaatagactactgtaagcgtactttagaaagtttaattgaagctaaagaaatttataataaaaaaattagttaa

SEQ ID NO: 4376 - DNA, 303 bp, Staphylococcus epidermidis
atggagtgggaattaagaaatttatttgatgagttagaagtagtacaagagaaaattaatgatgttgtaacatcttttgtatggtttgatgatgagtatttcaaatatgatggaaaccatacattaaccaacgatcaaattaaaatgcatggctggaaatatcacgagcatcgtatcaaaaacacacaggttatcgatttaatgcttatgtatatgaaagattttgacgacattatgaaaaaaatccgtgaaatagaaaaagcgtcatctgagaactttggcgaggaatcagataacgcataa

SEQ ID NO: 4377 - DNA, 903 bp, Staphylococcus epidermidis
atgttcaacttaaaatataatgatgaacttcatatattagtatatcaaaatatttacgcaaaaggaactgaaaaagtaaaaaatataatgtggtctgactggtgcgagtggttaactcgcccagccattagccataataaatacgccaatggtttagcgatttatggtgatgtgtctgacggtgtagatgatgaaacgggcgaaattcttcaacatcatagaaaagatgaaaatgtaatgtatagacaagtgttttcattggattatgacgatatagacgatatgaatcgttttattgaaaatattcaaagtaaaatgcaacattttgcttatttcatgtatagcacttttagacatagagatgtgcaagacgaagaaaatgaaaaattacgtccgagatttaggctactaattccaattgatgacattgtaaaaccagatgaatataccaaatatactaaagtaatatcaaaatatattggtgaaacaatagatgaatcatgttttaagtctattcaattgtcagcattaccaactatcaaagataacaataaaccttaccactggtatatcaatgatgcaccatttatcacacgtgaacaattagagaagtgtgttgagaagtttccaaacgaagatgaggtaatcactgtcgattattcaaatcattttcataaacgcgatagttcatattggcgtgaaattgcttttggagttggtgaaggtgaacgcaatcaaacattagcatctttgacaggttacctattacgtcggtatgtcgatgctaacctggtttatggattagtaagtgcttgggcaatgacttgcacgccccttattgatcaaaaggaagttaatagaacatttaaaagtatttataaaaaagatagtaagaacaagtaa

SEQ ID NO: 4378 - DNA, 1704 bp, Staphylococcus epidermidis
ttggaagatgtaactaacgaagatgtgtttgaacttattgagaaaactagtgcgaataaaccatttagacaagaagttatccctaaagggtatgaaatcgaacatcatcagtatggtgtggcactctatcaaattattcctagtaaaaaagatggagaaccagataaaaagatatttcttactaatacgattccccaaattactgaacggtttgaagatattgaaagcaatgaagtgagttttaatatgcttttttatgataatcatttaccagtgaatttaggtgttagtgctgaagaaatatctgacagccgtcaattactgaaattagttaatcgaaaattagatgtaacttcaaccacttcaactaggttgattgattatatcaataagtctaaacgttatagtcctccattaaatgttaaagttgctactcgtttaggtcatgttaaaggatattttatttttccttatcaagaagaaatgaaaaacagcaatatcaaattattcaataatgataggggctttcaaaagttaatagattcgttccaaagtaaaggaacgcttgaaagttattcaaaacaagtatttaaccaaattaaagatttaccaatggttatggttatgctatatgcgtcactaggttcagtattgttgcgtgaatttggattacagccttttatcgtagaaatatcaggtagtacctcaacaggtaagacattcacattaaatttagtttctagcgtgtggggtacaagtgatcttatcactacatggggttctacgaagaacagtattgaagctatggcatcatttttaaactcatttccaatgtttaaagatgatacacgtaatacaaatcccaagtttgttgctaatgcaacttacaatttctccagtggtgaaagtaaatcaagaagtaatatcaatttaacacttaacgctaaaaaagaatggcgaaatataatgctttctactggtgagtcatctatttcaaatatggcagatgaaaaggctggtgtatctgctcgtgttataacgttacaagatcaaccatatccagataactttgatttcaccacattagataaagcatttagagaaaactacggtacgttaggcatagcattcattaagcaatatgaatctaaacaagaggcatacaagagtgcatttgatagttatcaaaggtactttaatcgaaaaggtagcaatgaaatcatgcaacgtttaggacgtgcattcgcattactacagattactggcgaaattctaaatgatattgatggatttgaacacgatcattttaaaattattgaacaagcctatgacagtatggttagaaataataagacgattgataaacctaagcaattgctagaggaattactgcaatatttagatgcgaatagaaataatattgctggtgatggttatagttcggttaaaaacggtgatatcaaagcaatatataaacatgattatctgtgtatattaggtcaaacggtacacgaaaaattaggacatgaaatgcagacaattacaggccaatgggataaaaaaggctatttaataactagtaaagacagaatacaaaaagaagttagatttaattctcaaaaaaacagagggtatgccattaaaaatgagattgtaaaagaattaggatttgatttttctaattcacataatccatataattaa

SEQ ID NO: 4379 - DNA, 522 bp, Staphylococcus epidermidis
atgacaacaattacagaaataggacaccaacaatttaagatgtttataaataataataaatttcagcagcatgtgaaaatggaacaagaaaacatggctaaaggtttgattataagttttttaactaattctactaaaactcacaaaatctttattcaagaagttattttattaaacaaaaaatattatctctattgttttggtggagatatatcattgataactaaagatttcaaagcaatcataaaatttaatattagaaaacctaatccgttacttagtcaatattttaatagtgattggatcgttgaaatagataacttaaattcgcttaaaaaaggacatggaaaaatgctgataaaaaatgtattggcaatttctacaaaacttaatcttgaggcttgcttatggactgagagcgataataatacaaaatattttgaaagatataattttaaaagtatcggtaaagttggaaaagataacgaaaatttaatgattagaagaaaggaacgtgtatag

SEQ ID NO: 4380 - DNA, 645 bp, Staphylococcus epidermidis
atgaacgttgaaattatagcaaatgaatttgaaactagagcagcaacattattaagatatttcaccggactatgtgaaagtagttataaagtaccttttgcatttaagatatataacgatccgtttaatgttgtgtatctgatgagcaaagggaagatgtacgctcatgtattgataaaaaattgtgaagtgagaaaaacttttgagattgcctcagaaaagcatactgagaaacttatagagagcattgaggggtattatgctggttatgaattacatgatggtacacatgacactataagcgatatgatggctagttttatgtttgataatgattatttcatgtatggcctagaaacctttgcagaaagtaataatagtgacatgttcgactacatgagtaaagatttcaatatagatgaacttgagggcgttcaaactagtaatgctgatgtgataggtaatatggaaatgttgtatcagttagctactggaattaatgaaccagcaccagaattagttgaggggcttaaagtcatcactgagtttattcagaatgaacaggctaatgaaaatgatagtaaagtattaattgaacgattgaatgagttaaaacactcttattacaatggaatgaaagcctga

SEQ ID NO: 4381 - DNA, 333 bp, Staphylococcus epidermidis
atgacaattacaattgaaaaagaattaacgagcgatcacattaaggtattaaatgtgttacgcaatactaagcaagagattattacgaaacaaagtatttttaaccaactaaacatagaatttaataaaaacaacgatagatggttaagaaacacaatccatagcctagttgttgattatggttatgctatcggatatagctataaaaaggactcaaaaggctattttatggttaaatctgatgaacaaaaagaattagctttaagaagtatcaagcgtcatattgagggtagtatgaagcgatatgaggcattaaagaaaatggatatttaa

SEQ ID NO: 4382 - DNA, 753 bp, Staphylococcus epidermidis
gtgggtactactattgaaatttttcaagaacaagtaagcgattatgaattattcactagatttaatacttgctatatacaagaacgaatagcactcatggaaaggaatattgaagatatgtatgatcgcactacacctagtttatgtagtgatactgtattagaaagtatttactatgagagttattccgttgaaaatctagcaatcgctatattagagggacgtcaaaaattggaacggtataagaggaaaagtcaaagagatttaaacgctttttataccgttctaggacgtttttcaaagctagaacagaaatatattaaagattatatttatgcacgcttagaatctcatataaacgtgatagagcgatttaaaattgaattgcataaatgtattcaaacaaataggaatgaacgtaataaggctatagagagcgattattcatacattagtagcgagcgtcaaaaggatcagagttatcctcataagttaacgctaaaccaagagcaagcactgagagaaaagaaatctgatgctacagaaaaagaaatgaataatgatgagtttgtagagaaattgaatcaattagataagaaagcatttaaggaattcatctataacagaaatgaaaataatatcgactttgagaaagttttaatattgctgcaaactatcccgaaaagattaacagatagagaaattaaaaagccatacaactacataagagaaataggcttaaaaactaactga

SEQ ID NO: 4383 - DNA, 588 bp, Staphylococcus epidermidis
gtgaaaacttctaaatactttgatgaatataatgaatatgtaataggtcaaagagaaaatattaataaacttgaagatgagcgtcaagagttatcacaacgaattaaagaagataaagagaaatataaagatttaattgctaactcacaagatgatgaggctgatgcactatattcaacattcgataagaatgagcagaagctcaaagcattacagaagcgcctagagacaaagcaagaagtatttgacgatgcaagacgtaaaaaagctattgagattctcaagcatcagggagagcttcctcacttatatcaagaggacaaagaacgtatattatctaaatttgtgccaattattaaagaatataacaaagtgatagaagaaatcgaagcgttaaacaatgaatatgaagatgagttttacagatatgtaaaattatacaatctggaagattttgaagaagataatgaagcaagagacgaaataaaaaattactttagtccaaaccaatacagtaactatgtcggtgctgataagttaccattcattgatacaagaaataaattgagaaatagaggtgctaaataa

SEQ ID NO: 4384 - DNA, 216 bp, Staphylococcus epidermidis
atggctagaaaatacaatttagataaagtttataattatattatgactgaaacaacactttctggagaggaatgcagtgacctactagatgttgtagaagaacaattttctcaaaatatccaagcgcaacgtaaagatgagttagctcaacaatcaaaggctagtaaaagattttcagatttagctaaagaaaatcgaattattaaagataagtaa

SEQ ID NO: 4385 - DNA, 570 bp, Staphylococcus epidermidis
atgagcaaattaaatcccagacaagagaagtttgtggctgagtatttaaagacgttgaatatgacacaaagtgcaattaaagctggctatagtcctcatactgcaagtgaacagggaagtaggctgctaaagaataagaaagtagctaagtatattgatgagcaacgtaagagaattattgacgaaggcgtattatcggcgaatgagctattgcatattcttagtaatgcagcagtaggtgatgagagcgaagtaagagaggtcgtcgttaaacgtggggactttcaacgcaaccccgatactgatagattgaacctcgtatacaatgaacacgtagaaatggttgaagtcccaataaagcctagcgatagattacgtgctagagatatgcttggcaagtatcataaactatttactgagaaaaaagagttcactggtgatactccagtaatcattaatgttggtgaatggaacgaagaagatgaagaaacccaaaagcaaatagatgatatttcaaatcaatatccagacagaccaatattcatagataatgtaccagaagaggattaa

SEQ ID NO: 4386 - DNA, 168 bp, Staphylococcus epidermidis
atgaaagatgagcaagtaaaaatagatgttgattgcatgatagataaagcactaacctacaaaggcaaacatattgttacgatttgtgacttaatgactgatgatgaagcagaaatattttgtcacatgaatgaatctgaaaaaaacaagtgttcacttgccgtttaa

SEQ ID NO: 4387 - DNA, 672 bp, Staphylococcus epidermidis
atggaaagagtagctattttagtagatggtgggtactatagaaaaagaagtgcaaaagtttatggtagggttacggcgaaagaaagagctgatgaattatatagatattgtaatagacacttaaaggatacacattttaaagaagaaatacataataaattatatagaattttttactatgattgtcctccaattgataaacaagtttatcaccctttattgaaaagaaatataaattttgctcaaagtgatactaaaaaatggacagaagattttttcaaagaaataagtaaaaagagaaaagttgcattaagattaggggaattaagagaatcttcagttgaatataatctaaaatactctagtacaaaaaaattactgaatagaagtattgagctaaacgatttggaagaaaaagacttcaccttatcattgaaacaaaaaggtgttgatatgaaaataggtttagacattgcttcattagcatttaaacatcaagtagataaaattgttttaatagctggggatagcgattttgtgcctgctgctaaattagcaagaacagaagggattgattttgtgttagattctttaggttctgatattagagatagcctttcgttgcatatagatggtagacgtacttgtgacgataagtataaaattaattag

SEQ ID NO: 4388 - DNA, 600 bp, Staphylococcus epidermidis
atgaaactctcagctaaaaagcaaaagcagttccatcatttttgtaattactttaaaagtttagaaattaaaacatttttgcaaaatgctatcggcgctctctttttaagtccttttacattaataacttatgcatttattttagcatacaaggttacatatatgaataaatcattaattgaagcaatatcaagcgctgtttctttaattcttattttttgggtattagcattgtatttaatgatgttgtatgtagttaactttaaaaataaaaatttattattaaaatgtgttactctaataattattatttcttatcatatatacatatttattagaaaagatatagaaaatcttactctttttgatgtctgtattattattattacttcagttcttatttcttactggctgacacaaactttcagaaaaataattaattctatttacaattggatatttagccctgaaagtcaacaacgagatgaactaattaaatttaagctttctttcataaaaagcttactcttaggctttttttcttttattgccactatattaggtatagcattaacgattaaaaatttattctttacttaa

SEQ ID NO: 4389 - DNA, 960 bp, Staphylococcus epidermidis
atgaaagacaacaaacctaataattcgaaattaattcaaacatatttaagtaagaaaactttaagatatggtacagcaagtgcattaacattggcactctatttatttaacagtaacgtaactgtgtatgcggatgaaaatactgcaaaccaaaatcaaggaacatcaccaaaaacttcacagacagcacctacaaataatactgaaaatacagatgccacagccataacaacagatcaaaataataatgatgaagaagaatacgatgcgtcatatgaacttccaattctttatgtaactgtctggctagatgatcaaggaaatattattaaagatgctgtggaagatgctaaaacccctgcttcagaaaggcaaccggtgaaaattcctgggtaccaacattatagaacttctgtgagtgacggaattactaagtttatttatcgtaaaattagcactgcacaatcacctatagttgaaaataatcaacaagataataatacaaataaagttgttgaaacaaccaatcaaaataaagatgaagtgaatggaaaagaacaaaatcaagcaaatacttcagtaacaaatacacaaattaccaaaaacgagaaagacgaagacacaaaaacactaaagaaagataaagacgagaaagaatctaaagacaaaaaaacaccaaagaaagacaaagaaaagaaaatcacaaaaactttgaagaaagatagagaggagaaaagcccagtaataccaaaaagcggcaaagacgagaaagacacaaaaataactaagaaagacaaagaagacaaaattacaacaacttccaagaaagataataacaatgatgtacaagataaattaccggaaacaggtaaaacaaaagatattcaaaatcctgctttaataatgttacttgctggtttaggtttattaggattatttagaaataaaataagagaatag

SEQ ID NO: 4390 - DNA, 5922 bp, Staphylococcus epidermidis
atgaaggaaaacaaaagaaaaaacaacttagacaagaacaacactcgtttttctattcgaaaatatcaaggatacggcgcaactagtgtagctattatcggcttcataatcatttcgtgttttagtgaggcaaaagcagatagtgacaaacatgaaataaagtctcatcaacaatcaatgactaatcatttaaccactttaccgtctgataatcaagagaacacctcaaataatgaattcaataaccgaaatcatgatatatctcatttaagtttaaataagtctatccagatggacgaacttaaaaagttgattaagcaatataaagccattaatctaaatgacaaaactgaagaatcaatcaaattgtttcaatctgatttagtacaagcggaatctctaattaacaatcctcaaagtcaacaacatgtcgatgcgttttatcataaatttttaaacagtgctggaaagttaaggaaaaaagaaactgtatcaatcaaacatgaacgaagtgagagtaacacatatcgtttaggtgatgaagttagaagtcaaactttttctcatattcgacataaaagaaatgcagtttcttttagaaatgcggatcaatcaaatttgtcaactgaccctttaaaagcaaatgaaatcaatccagaaattcaaaacggaaacttttcacaagtgtctggtgggccattgccaaccagttctaagagattgacagtagttacaaatgtagacaattggcatagttattctaccgatcctaaccctgaatacccaatgttttatactacaactgcagttaactacccaaattttatgagtaacggtaatgctccttatggcgtaattttaggaagaacaacagatggttggaatagaaatgttatagactcaaaagtagcaggtatttatcaagatattgatgtggtacctggatcggaattaaatgttaattttatatctactagccctgtattttctgatggagctgctggtgctaagttaaaaatcagcaatgtagaacaaaatcgtgtattatttgatagtcgtctaaacggcatgggtccgtatcccactggtaagttatctgcaatggtaaatattccgaatgatattaatagagttcgaatctcatttttacctgtatcttccacaggtcgagttagtgtacaaagatcttcgagagagcatggttttggtgataattcatcttattatcatggtggttcagtaagtgatgtaagaataaatagtggatcttatgtggtctctaaagtgacacaaagagaatatacaactcgacctaatagttcgaacgatacctttgcacgcgcaacaattaatttgtctgttgaaaacaagggccataatcaatcaaaagatacatattatgaagttattttaccgcaaaattcaagattaatttcgactagaggaggtagtggtaattataataatgccacaaataaacttagtattcgattagataacctaaatcctggtgatagaagagatatatcttacacagttgattttgaatcttcaagtcccaaactcattaatttaaatgcacatttactgtataaaaccaatgctacatttcgaggaaatgatggacaacgaactggtgataatattgttgatttgcaatctatagcactattaatgaataaagatgtgttggaaactgaattgaatgaaattgataaatttatacgtgatttaaatgaagctgactttacgatagattcatggagtgcattacaagaaaaaatgacagaaggtggaaacattttgaatgagcaacaaaatcaagttgcccttgagaatcaagcttctcaagaaactatcaataatgttactcaatccttagaaatattaaaaaacaaccttaaatataaaacaccatctcaacctattattaaatcaaataatcaaattcccaatataactatatctccagcggacaaagcagataagctaacaatcacttatcaaaatactgataatgagagtgcttcaattataggaaataaattgaataatcaatggtctcttaacaacaatattccgggtatagaaattgatatgcaaacaggtttggtaacaattgattacaaggcagtttatcctgaaagtgttgtaggggctaatgataaaactggaaacagtgatgcaagtgctgagagtcgtatcactatgccaagaaaagaagcaacaccactttcaccaattgttgaagcaaatgaagagagagtaaatgtagtaatcgcacctaatggtgaagcaacccaaatagctgttaagtatagaactccagatggacaagaagcaacactcattgcaagtaagaatgaatcatcatggacattaaacaagcaaatagatcatgtaaatatagatgaaaatagtgggaaagtaacgattggctatcaagcagttcaaccagaaagtgaagtcatcgcaacagagacaaaaggaaacagtgatgcaagtgctgagagccgtgtcactatgccgagaaaagaagcaacaccacattcaccaattgttgaagcaaatgaagagagagtaaatgtagtaatcgcacctaatggtgaagcaacccaaatagctattaagtatagaactccagatggacaagaaacaacactcattgcaagtaagaacggatcatcatggacattaaacaagcaaatagattatgtaaatatagaagaaaatagtgggaaagtaacgattggctatcaagcagttcaactagaaagtgaagtcatcgcaacagagacaaaaggaaatagtgatgcaagtgctgagagccgtatcactatgccgaggaaagaagcaacacctatacctccaacgttagaagctagcgtacaagaagcaagtgttacagtaacgcctaatgaaaatgctacaaaagtatttattaaatatttagatattaatgatgaaataagtactattatagcaagtaaaataaatcaacagtggacgttaaataaagataattttggtataaaaattaatccattgactggaaaagtcattattagttatgtagcagttcaaccagaaagcgatgttatagcaatagaatcacaaggtaatagtgatttaagtgaagaaagtcgaataataatgccaactaaagaagaacctcctgaacctcttatattagaatctgattctattgaagctaaagtaaatatatttcctaatgatgaagctacgaggatagtaatcatgtatacgagtttagaaggacaagaagcaacactcgttgcaagtaagaatgaatcatcatggacattaaacaagcaaatagatcatgtaaatatagatgaaaatagtgggaaagtaacgattggctatcaagcagttcaaccagagagtgaagtcatcgcaacagagacaaaaggaaacagtgatgaaagtgctgagagccgtgtcactatgccgaggaaagaagcaacaccacattcaccaattgttgaagcaaatgaagaacacgtgaatgtaaccatcgcacctaatggtgaagcaactcaaatagctattaagtatagaactccagatggacaagaaacaacactcattgcaagtaagaacggatcatcatggacattaaacaagcaaatagatcatgtaaatatagatgaaaatagtgggaaagtaacgattggctatcaagcagttcaaccagaaagtgaaattatcgcaacagagacaaaaggaaacagtgatgcaagtgctgagagtcgtatcactatgccaagaaaagaagcaacaccacattcaccaattgttgaagcaaatgaagaacacgtgaatgtaaccatcgcacctaatggtgaagcaactcaaatagctattaagtatagaactccagatggacaagaaacaacactcattgcaagtaagaacggatcatcatggacattaaacaagcaaatagatcatgtaaatatagatgaaaatagtgggaaagtaacgattggctatcaagcagttcaaccagaaagtgaaattatcgcaacagagacaaaaggaaacagtgatgcaagtgctgagagtcgtatcactatgccaagaaaagaagcaacaccacattcaccaattgttgaagcaaatgaagaacacgtgaatgtaaccatcgcacctaatggagagacaactcaaatagctgttaagtatagaactccagatggacaagaagcaacactcattgcaagtaaaaatgaatcatcatggacattaaacaagcaaatagatcatgtaaatatagatgaaaatagtgggaaagtaacgattggctatcaagcagttcaaccagagagtgaagtcatcgcaacagagacaaaaggaaacagtgatgaaagtgctgagagtcgtatcactatgccagttaaagaaaagacgccagctccccctatatctataatcaacgaatctaatgcaagtgttgagataatacctcaagttaatgttactcagttatcgttacaatatatagacgctaagggacaacaacaaaatttaattgctacattaaatcaaaatcaatggacattaaataaaaacgtctctcatattactgtagataaaaatacaggaaaagtattgattaattatcaagcggtgtaccctgaaagtgaagtgattgcaagagaaagcaaaggtaatagcgactcaagcaatgtaagtatggttatcatgccaagaaaaacagctacaccaaaaccgcctattataaaagtagatgaaatgaatgcaagtttagctatcattccttacaaaaataatacagctattaatatacattacatagataaaaaaggcattaagtctatggttactgcaatcaaaaacaacgatcaatggcaattggacgaaaaaattaagtatgtaaaaatcgatgcaaaaaccggtacagttatcattaattatcaaattgtacaagagaatagtgaaataattgctacagctatcaatggtaatagtgataagagtgaagaggttaaagtattaatgcctattaaagagtttacaccacttgcacctttattagagactaactataaaaaagcgacagtttctatattacctcaatcgaatgctacaaaactggattttaaataccgagataaaaagggagattcaaaaataattatagttaaaagatttaaaaatatatggaaagcaaacgagcaaatcagtggtgtgactataaatccagaatttggacaagtagttatcaactatcaagcagtatatccagaaagtgatatactagcagcacagtacgtaggaaatagtgatgctagtgaatgggctaaagttaaaatgcctaaaaaggaattagcaccgcattcaccatcattaatctatgataatagaaataataagatattgattgcacctaatagtaatgccactgaaatggaattatcgtatgtggataaaaataatcaatcattgaaggttaaagcactcaaaattaataatagatggaagtttgattcaagtgttagtaatatatctatcaatccaaacacaggaaaaatagtattacagccacaattcttattaactaacagtaagattattgtctttgctaaaaaaggaaacagtgatgcaagtatatcagtttctttaagggtgccagcagttaaaaaaatagaattagaacctatgtttaatgtgcccgtgtcggtatcattaaataaaaagcgtattcaatttgatgattgtagtggtgtgaaaaattgtttaaataaacaaatatcgaaaactcaacttcctgatactggatatagtgataaggcatcaaagtcgaacatattaagtgtacttttactaggttttggctttttatcttattcacgaaaaagaaaagagaagcagtaa

SEQ ID NO: 4391 - DNA, 1290 bp, Staphylococcus epidermidis
atgatgaatccattagcccaaaaattgaatgatgaaataaagcaatcaagtccagaagtattagatatgatgtcacaattaggtaaagatatgttttatccaaaaggaattttatcgcaatctgccgaagcaaaacgcacaacatataatgctactattggtatggcaaccaaaaaagaaggtaaaatgtacgcaaattcacttaaccaaatgtttaatgaccttacaccggatgaaattttcccatatgcacctcctcaaggtgtagaggaattacgtgatttatggcagaaaaaaatgcttaaagaaaatcccgacttaaagtctaaatctatctctcgtcccatcgttacaaatgctctcacgcacggtctttctctagtagctgatttatttgtagatacagatgataccgtcttattaccgacacacaactggggcaattataaacttgtatttagcacacgtcacggtgctcatatcaatacgtattctatttttgatgactcaggtcacttcactacatctgaacttgtaaaaacattaaaagaatataaaaaagacaaagtgattattattttaaattatcctaataacccaactggttacacaccaaataaaaaagaagttaatactattgtaaatgcaattgaagaactagctaataaaggtactaaagtagtaactgttgtcgatgatgcatactatgggttattttatgaagaagtttaccaacagtcaattttcacggctttaacacaggtgaaatcttctaaccttttaccagtgcgtttggatggagctactaaagaattcttctcttgggggttccgagttggctttatgacgtttggaattgatcatgaaacgttaaaaaatgcgctagaagctaaagtaaaaggattaattcgtagcaatatttcaagttctccactaccttctcaaagtgcaatcaaacatgtacttaaatatcatgagcaatttgataaagaaatcgatcaaaatatcaatattttaaaagaacgctacgaagtaactaaacaagtagtgtatgataataaatatgccaaatattggcaagcctatgactttaattcaggatactttatgtcattgaaattaaatcaagtcgatccagaagaattacgtaaacatttaattaataactattcaattggtattattgctttaaatagcacagatattcgtattgcctttagttgtgtagaaaaagaagatattccttatgtctttgagtctattgctaatgcaattgatgatattaaataa

SEQ ID NO: 4392 - DNA, 171 bp, Staphylococcus epidermidis
atgaaacacttgactaaaatatttgttggattagctattgtactatttatagtagggtattatttacaagcgacagatcacgattcacaaggtataaaattattgttagcagcaattatgtttatgatttgtgcttttattaatagacataatgagcgtaaaaaaaaatag

SEQ ID NO: 4393 - DNA, 378 bp, Staphylococcus epidermidis
atgaaaataattttgaagaacaatagtgaaagtcctatatatgaacagattaagcaacaaattaaagaaaatgttttgaaaggttatgtttcccctggtgaacatcttccatcaatgcgtgagttagctaaagatttaaaagtgagtttaataacgacaaaacgagcatatgaagatttggaaaaagatggatttgtaacaactattagaggtaaaggaacctttgtaaaggaacaagataattctattctaaaggaaaagcaattttttgttattgaaaatttagctcactctatgtcaaaagaagccaaaacaattggaatgcctttagaggaattaatagaaatattgactatgatttatgaggaggacgactaa

SEQ ID NO: 4394 - DNA, 915 bp, Staphylococcus epidermidis
atgaacgcgatagaacttaaagatgttaattatcgatctaacgcatttcaattgcaagatgtctccttcaatgttcctaaaggatatgttacaggttttataggtggaaatggtgcggggaaaactacaataatacgattaattatggatttaattcaatctgaaagtggtacaatctctgtttttgagaaagatataaaaatccatcctcgtgaaataaaaaataaaattggatttgtgtattctgagatttattttaatcaaaaatggacagtaaaaaaattagaaaatatcattgcccctttttatgatcattgggatcatgaaatatttataaagtatttaaaattttttcagctgccatataaaaataaaataaaaactttctcaaccggtatgaaaatgaaactatcgttagcaattgcattcagtcatcatgcagaattatttatcttagatgaaccaacttcagggttagacccgttaataagaaatgaattacttgaaattattcaacaagaattgatagatgaaaataagacagttttcttttcaacacatattatttctgatttggaaaaaattgcagattatatcgtttttctcagtgagggtgaaatcatattcaatgagtctagggataaactatcgcaaaaatacaaaatcgttagtggttctaatgaagacttagatgaagagttggacgaacttttgatttacaaagaaagtaagcaaacaggctatattggtttaacagaatattatcaaacatttaatgaattgtttggtagtggtgttgaaataaaagatgcatctatagaacaattgatgatttatttagaaaaaagtaaacataaacgaaatacaaattcaaaatacaaagtgagatttaactatgaagcaattaatgattag

SEQ ID NO: 4395 - DNA, 648 bp, Staphylococcus epidermidis
atgattagaaacttaaaattacgtagttggacactaattatttacgcattattgcttttattctttcccatttatcatttgttaaataaagatacaccactatattcaattatctcaggaccaatcggattaatactgacgatgatatgtttgatagatataggtcatttattcagagttaatcgtagattaggtggttcatcttcatattatttcttttatagtttgcctgtatcaaagagagatttgcttaacgctaattacatgacatgcattttattaacttttataggtgcgcttatcattagtttatatggatacaacacaagcacaataaaaacagattccatttatttttcgacgactttttcattcatagtagggaatttcttttctatacctatagcgtttagtaagagtactgaacgtaaagatcgagatattccatatatagcttatattgtaggaattatggtggttctgccatttactttatcggtcattttcatcttaatcaattatcttacacacaatgatagccatatcccaatgatatactcatatttcttaaattatggtctattagttgtaagtagcattttcttagtcattaattatttgattcaaattaaaaaaattaagtattaa

SEQ ID NO: 4396 - DNA, 873 bp, Staphylococcus epidermidis
atgaaattacaacatattactaaaaaatatggtcaaaatactgttttagacgatatagattttgattttggcgagagtcaaatcgttggtcttatcggtaaaaatggagttggtaaaacaactttgatgaaggtcatgaataataacattattaactatcaaggaaaggtcgacatgcctaaaagtgagaatgttggctatttaattgagcatcctaagttatatggaaataagacaggtttgtttaatttaaaattatttgcacaagtattaggcgatggtttcgataaggaatatgcaaatcatattattgaagcttttggaatgaaaccatatatcaagaaaaaagttaacaaatattcaatgggaatgaaacaaaaattatcaattgcagtttcattaatgaacaaacctaaatacttaattttagatgaacctacaaatggtatggatccagatggttcgatagatgtattaaagacaattcaatcacttgttcaacaattagaaatgaaaatattaatctcaagtcataaattagaagacattgaattgatttgtgatagagcagtatttcttagagatggtaagttcgttcaagatgtagatatgaaagatgggggaccagaggatagtactattcttactttacaaaaagatgactttaataaagctttagattctctttctgaaaactttaaagtacagcagtctcaaaaagaatcgggagaaattatcattaaagctcaaaatgattatagagagttacttaaatcgttatcccaactagatatttatccaaaatatattgaaacacgtaaaagttcattacgtgatacttactttaatattaatcaaagaggtgataaataa

SEQ ID NO: 4397 - DNA, 732 bp, Staphylococcus epidermidis
atgaagagcttacaattagtcaaatatgatttaataagtatacttaaaagtccgtatacttatttagcatttatacttgtaattggaatgacggtattccaagctagcatgatggcaaattatagttctgcacataaagttaatatagatatggtttttaatttagctaattggcttttcttgtttgctggacttttattcattataaaaacaataacaagagattactcacaaggtactatacaattgtttatgagcagaataactagcagaatgggctatatcattactaaaacggtatctattgtattaatttcattcttatttgcaattattcactacttggtaataattattatacaatctacaactaaaagtgaaaaaatggatggagatagatttttaaataatatttggttttaccttattttctttttattctttggattattcttattactaatcactttaatagtagaaaaacctgctgtcatatttactctaggtattttcttaatactcatcgttccgtttattcagccatttattccaatgattccgaatattggcgatgatattcaggattcatttaaatatataccatttacgtatttaactgaaaaaatgactggtgagattaaattctctaattggcaatggtttatctctattgcatcaatagtggtcttatttattgcaaatatgttatatgcatcaaagagggatatttaa

SEQ ID NO: 4398 - DNA, 366 bp, Staphylococcus epidermidis
atgatgaacattccaatattaaagcatactattgaatttctgaacatcaaagcaagagtatttcatagagatgatgatacacatctgattgatcaatatttaacaaatggtaaatcaagggctatccctatctttgtcttcatgaacgattcattcgaacaattgacagtttggagaccaagagcaaaagaagtacaaaattttgtcaataaaattagaagtaataaattgccagataaaacccatcctaattttgaggatcgacttaaagaaacacatatcattattagtcaaagatataaaactgattcaatattttggaaatcagtttttaacccaataattaatcaacttttatataaataa

SEQ ID NO: 4399 - DNA, 486 bp, Staphylococcus epidermidis
gtgcgaattcaaagtagatggttaatattcgctatttttttaactggagctatttctttattgataggtttgacttattacaaaagtataaaatctgtggatttatctggttacagtgtgaatcaaattagtttaaatcatggttttaatcaaaaaggatttgtggttaataagaaaattaaattagatagatataccttttacaatgataaaaatcataaagattttacagtaaaagtaaaaaataaaacgcataaggttaaaggcatggttttagtcaaagatgataaagttgaaacaaattttggtattaaaatgggtgacccaattgataaagtcatcaataaattgggagaaaactacaagattaataaagtagggaaaaattatcactcaatgacttatgtagaccgttttaataaattaaaattaaacattttatataaagataacattgttaaaagaattgagttctttagtaaataa

SEQ ID NO: 4400 - DNA, 558 bp, Staphylococcus epidermidis
atggataaaataaccttcttaaatgaattagaattagctttagatgatttacctagggaagaaaaagatagtattatgcacaagtatgaaaacttgttctatgaagaagaattgaaagggattagtgaatcacaaattataaaaaagttaaatgatccttatcatatttccaaagaagtaaaagctagaagtgctattcattatgctagttacaaaccaaccttagcaaacatagtaagagcaatactagcatcgttaagtcttggtattttgtcgttatttattattttaataccggttgttatcattgcattacttattctattctgtttccttatttctatttgttttatctttgcaccatttgttttattattttattcagtattacatggtttcgaaaatgctataagtaatgtgtttttttcaatttcttttacaggtttaggaattatgtttattgttattactttgaaaattggtgaaataattcataaacttattttgaaatatcttctttggtatataaagactgttaaaggaagcgttaaagaatga

SEQ ID NO: 4401 - DNA, 837 bp, Staphylococcus epidermidis
atgaaaaagctttttattagtggtttaatcatatttattattttctttgctagtggtgctatgacgtggtttactatagataaaaataaatacgataatcgacattataccaaaacaataaatagcaaaattgaacatttatctataagtacagtaacaaccaatgttaatataatttctggaaaaaaattagctgtttattttactggagataataaaataaatgttacaaaaaataataaaaggttaagtattaaagaaaaacgtgcagtagatagaggatatggattaaattttaatccatttcactcaaacaatagaaagctaacaattgttgtaccagaaaaagaccttaaatctcttaatattcaatcgttattgggagaaattgatttaaatcaagtgaatttgaaacatgtttcattggaaacagatagaattatacaacttaaacgatctgaactcaatcaggtaaacatcgaatcttctaaagcaaatttttatattacagactgtttaatcagggaaggtcgtatgaagcttgataagggtataactcatgttaaaaatagtacattaaatgatactgttttcttggttaatagaggagatatttctatgacggacatgaaatctagcaatgatataaaagcttctacacaaagaggtaatatttattatcgttttggcgaaaaacctaaaaacaccttgcttaaacttcatcctggtcatggaaataaggaaattaaaaatcgatatttcgataaaggaaaagtgggaagcagcgataatatattagaattttacactgtagatggtgatattaaaattgaataa

SEQ ID NO: 4402 - DNA, 1041 bp, Staphylococcus epidermidis
atgcaaaaagtacgttctgatataatgactcatcgtggttctcactatgatttaggagtaaagactgctctttggttacaaaccactcctttattaaaaaatcgaaataaagaatggcgaaagagaattccacgttttgatattgatgtcaaagaaacctatgatatatttcaaatctattcgccacagatttgggaagaaataattggtatgcaagatgtattgaatctacctacaaaacaaatgattttaaattttggccattatcgatttactgatttaaaggacagtggttgcacagtatataaaggtcgtgattttttagtccgaaattatgattatcatcctgcaacatatgatggtagatacttattatttcaacctaatgacgggggattatctcaaataggaccgacttcaagagtgactggtagaatggatggtatgaacgagtatggtttagttatggcatataattttatgcatcgtaaaaagcctgcaaatggatttgtatgttacatggttggtcggctaatacttgaaaattgcaaaaatgtaactgaagcaatcaaatttttaaaggaagtaccgcatcgtagttcattcagttatatactaatggatagacattcgaattatgccattgtcgaagttacacctcgatcaatagatgtaaggtatgaacatatatgcacaaatcattttgaattacttacccatgaaaatagaaattatacaaaagaatctaaagaacgcttaaatcgtgtaataaataaaacaactccttctacaaacaaagatatcgcattcaaattatttaacgacccgcaatacgaaatctatagcaacctatttaaaagttggtctggtacaattcatacttcactatatgaacctaattcattaatagcatggatggcattaggtcaaaacagtcatccaacctcaatcaatttctctaattggctaaaaggaaagaaattgaatataaattactttgaaggcgaaatagatacaccattaacttttgccacacactaa

SEQ ID NO: 4403 - DNA, 171 bp, Staphylococcus epidermidis
atgtggaactttattaaaggattattcaaatttgtctttagtttattagctattactacagtagtagtaggcatcggtgtagttgcctttgcttatatttttaaaaaagactttgaagatatcgaaagaaaaacgaaagaaatcgtttctgatatcgaaaacaacaattaa

SEQ ID NO: 4404 - DNA, 258 bp, Staphylococcus epidermidis
atgatagatcaaaataaagtgagcagaccagtgctttcagacgaccaactttcgcaactaaatatacatttacatgaagcactacaacaatcacgcccagtcaatatcaaatattacgaagaaggatatattaactttatagagctcattgtacatcggattgattcaataaattatgagattgaaggtactgctcctcattcaagagaacgtcataaagtttcatttttagatattatagatatttcttttatataa

SEQ ID NO: 4405 - DNA, 1113 bp, Staphylococcus epidermidis
atgaaaatagtagaagtaaaatctaagaatggtaccaattttatgattttagatggtaataatgaacctatagtagatgcagtaagatatttgaagtatctggatagtgttaagaaaagtttaaataccaagaaaacctatgcctatgcactaaaaaatttttttgtttacttagaaagtaaaaagatatgctataaagaagttagttttgataactttgttgattttataagatggatgaaaacaccttttgaatatgagaatgtcctctcttatcaccgaaaagaaaaaagcattagtcctaagacaattaatctgactatgactgtagtatctaatttttatgattatctctataggagtaaaaaattagatgttaatttctatgattttatgcatatggaaagtaaatactctaaaaaatataaaagtttcatgcatcacataaataaggactatagaacgttgaaaaatattttgaaagttaaagaaccaaagaaaaaaatagaagtgttaactaatgcggaggttaagaaattattagaggaagctaataatattagagataaattcttaatacaattactatatgaaaccggattacgtataggtgaggtattatcattacgtattgatgatattaaatttgactttagaaaaggccatcaaatagttttgaaaaatagatttaatgataatggtacttatttgaaaactggggaaagaaaaatatttatttcccaatcgttaattgatttatacgatgattatgtctacgaaataattgacgaactttcaatatgttctgattatctttttgtaaaaataaaggggagaaatgtaggagaagctatgaattatagtgatatatattcattatttaaaaggctaaaacataaaacatctataaatgttcatcctcatttatttcgccatacacatgcaactgttttttataatgaaactaaggatataaaacaagttcaagaaagacttggtcatagtaatatacaaacgactattaatttatatgttcatcccactgaagaagatatacgtgaagattggaataaagtaaagcatcaatttcaagtttttaataaaggggaatga

SEQ ID NO: 4406 - DNA, 2064 bp, Staphylococcus epidermidis
atgtcaataccaattaatttacctacaaacagtactatgattaatgaattatgtacattacaaagtagaaccatcaatataaaaggagaggttttaataactgaaatatatgatgattacttttttaaaaatgatgagtggcacattacagcttttaacaaattcaagcaatttcaagatagtatcaagaactatagagacaaaagaaaaaatgttttctttaggattaaaagtaaaaatttgaatttagaatttaaatacctttttttgaaactgatagttaaagaggattggtccttatctaatttatttaatactggagcagtaaagcttaataagattgctaagttctttaatgaagtttatccaaatttaaattctttacttgattgtgatataaatacattagaaaagcactggtttaattggctgactgaaaataatataccaataaaaagaagatcatcaacaatagtttttggtgattatgaatacaaaagcggactggcttcttttttaaagaatatgtacattaatctaattaagttcattgataagcgagaagaatgggaaaaagataaatgggatattagaaatttagaaaaatatggattgagttataataaaacactaactggcaattatttaaactttgaaaaaattgagtcaattaaaatgcgagaattagcaaaaaaatatttaaaaaatcgtttgataactggtgatatagcatttgctacagcaaggttttatataagagttttaactaggttttttcaaaatatatctaaaaataaagaaacaaggaatagtttaaatgaactagatagatgtcatatcgaagcatatatagaatttttgtttgaatatgcagctaataaacatttgcaaagtactaagaattttgtgagagaagaattaaaaacaattagaaggttcttaaacgatattataactcaaaactatgctatagcaccgtaccaagatatacgatttttaatttatcctcaagacttacctaaacacgaaaagaaaaatagtagccaaattgattatatcccagattttgtattggaacagctttttgagcatataaatgatttgcataaagatttaatacctgtagtttggatagcttttaaaacaggattaagaatttctgatgtattgacattacaaaataattgccttgcaaaagttaatggaaagtattcaataatcacagatattgctaaaacttttgttaaaggacatagaataccaattgataataaattagctgatataatagcagttttaatagccgattctaaaagtaaaagtacaaaagataataatcctaataattatatttttgctatttataaaggaaaaagaaagggaatgccctttacacaacatatggtcagagcacacttaaatcatttatcaaagactaaaaatattattgatgaacaaggagaaatcttccatttcaaaactcatcaatttagacatacctatgcagtaaaattgttaaatggtggagcagatatattaacgatacaagaattattagcacactcctcaccagaaatgactctaagatatgctaagttacttgatgatacaaagagaaaggcttttgaatcagttattgatcaaggagcttttagttttgatgttgacggtaaaattaaaaatatacagcatagtagtgaactatctgaaaaagcattgaattctttatggcaagaacataaattaaacgcaatggacaatccttatggcacttgtcatgctagattgagtggtgattgtccatacatggaagctccgccatgcctgacttgtaattctgggaaaccatgtaaggatttagctattggattttctgatttagatgttgaaaaatatgaattacatatcaaatcaacggtcaaatctatagaattagctaaaaataataatagacaagatatggttgaaaagcatataaatatattaaataaatatgaagaaatactaggtaatataaaagatggaaacattatattcgggagaagtaatagaataaaagtatag

SEQ ID NO: 4407 - DNA, 366 bp, Staphylococcus epidermidis
atggaaaaatttaatagacaagaacaattaaaacagttgcatgcagaacgaaaagttaaaaccgagaaaaaagttgataaagcaataaatgatttagttcaaaaaaataaagaaattaactttaacatcgtttctaaacattcaaaagtttcgaaagctacattatataaaaataataaaattcgaaagaaaatagagaagttacgtgaacaaaacagagaaatatttgttcataaaaataaaaatgacggtaaagatgcgttaatctcctctttaaaaagaaaagtaaattctttagaaaaagagaaaaaaatgttgaaagaagaaattagcgttttatattctaggctgtatgaggatatttaa

SEQ ID NO: 4408 - DNA, 1371 bp, Staphylococcus epidermidis
atggacaataaaattgaaaagattctagaagatattaataaattacaaggctataaagtaacatatcaatatgctactgctataaatataaaagataataacatgaacccttggtttgaaaaaattgaggaaattctattgaatgtaaaaggagttatacgcattttatctcctgacaaccccccggtaaattatgattattggattttacctggaagatataaaagacatacaaaagaatatcacgaaaaactagaaaaatttttagaaaaatttgctactaatgcaaatattaatgatggattgtttgatcaaaataatatacatggatacaaatataaaaaatatatattcactccacatattgaaattactcatgagaacactttgaatttattttttttaaccttaactatatttaacaatggtacatttgttatagaaatcattgaagacttagagagtataaactttggaagcgacttgtatagtactttctcatgtgtaaaagataagatatatcctctaattaatcaagaaaaaaataatagacaaagacagtatcaattgtatggtaatagacattgtaaaaatattagagatgtttctagacaaattaatagaattataaaaattaatagtaaggatatttttgaatataaagtatctaaaaatatgggttttgaagtttattatttagctaatgaaaatgaatttactgatgatcctttctatgaggacgtgaagattcaagagtggttagtaaatgcgcctattttttcatttgaaggaaaaagtaaacattttaggcaagatggttatagcgataattatataaacttcttgaataaagcatctgtttttgtagtttggatggatgagcaagaagaagatgttttagaaaaatgttctcaaatggcactttatttcaatagttctgctaatttctttttcttagaaactatgttaaatgaattacaattgtatgggtatcaacaatataatttaaatggaaaaaaagaagccctatattttagacaatggatactaaatttcaagagatctattgcaattatttatagaacagagcttttacctagtttatatttatatttgtatctaaagaataataatgattttaaatctccacaatatattgaagaattaaacaaagaagaattatcactaattgaattggagcagtcatataaggaagaagaaagaagcgaaaaattaaataaacttttgttaataataagtcttttatcaattttccaagtagtagaaatttttttcagtgataaaaataatatatttaatatcagtatgatacttataatgattttgctagaagtatttcgaaaaaggtaa

SEQ ID NO: 4409 - DNA, 411 bp, Staphylococcus epidermidis
atgattccaaatcctaatgcgccagatgaatataaatatgaaactgattatagaaaaataccaagaaaatatttaaaccctaaaatccctcaagggcgtggaaaaatcaaatggcaagcttttgcgactctcccgcaacagtttgaaattttagaacaaattataaaggatcaaaataaaatagaaaaaccattgctaacacatgattcattagataatttagatcagatttttcaaataaaaattcaaaatgatgagttatgtacaatctcatattgggaagacggtaacatttcaaaatatacaggaaaaattttaaaaaaggatgaaattagtaatacattttccttttctgatactaacaataatatatataatttaaataatgctaacgtttgtagtatcacttaa

SEQ ID NO: 4410 - DNA, 846 bp, Staphylococcus epidermidis
ttgaaaaagttaatacttttaattgcaattgctttagttttaagtgcatgtaattcaaccagttcacatgctaaagagttaaataatttagaaaagaaatataatgctaatattggtgtctatgcattagatactaaaagtggtaaggaagtaaaatttaatgccgataagagatttgcctatgcttcaacttcaaaagcgataaatagtgctattttgttagaacaagtaccttataataagttaaataaaaaagtacatattaacaaagatgatatagttgcttattctcctattttagaaaaatatgtaggaaaagatatcactttaaaagaacttattgaggcttcaatgaagtatagtgataatacagcaaacaataaaattataaacgaaatcggtggaatcaaaaaaattaaaaaacgtttaaaaaaattgggagataaagtaacaaatccagttagatatgaaatagaattaaattactattcaccaaagagcaaaaaagatacttcaacgcctgctgctttcggcaagactttaaataaacttatcgcaaatggaaaattaagcaaaaaaaataaaaatttcttacttgatttaatgttaaataataaaaacggagacactttaattaaagatggtgttccaaaagactataaggttgctgataaaagtggtcaagcaataacatatgcttctagaaatgatgtagcttttgtttatcctaagaaccaatctgaacctattattttagtcatttttacgaataaagacaataaaagtgataaacctaatgataaattgataagtgaaaccgccaagaatgtaataaacaaattttaa

SEQ ID NO: 4411 - DNA, 1758 bp, Staphylococcus epidermidis
atggctaagttattaataatgagcatagtaagcttttgttttatatttctattgttattattttttaggtacatattaaaacgctattttaattatatgttaaattataaagtttggtatctaactcttcttgcaggattaattcctttcatccctattaaattctctttttttaaatttaataatttgaataatcaagagcccacagttgaaagtaattcacacaatttgaatcctaacataaataccactaaacctgttcatgagtttacaacagacatccataagtttaattgggattcaatagataatatctgcacagttatttggatagttttagttattattttaagttttaaatttttaaattctttattatatcttaagtatttaaagaaacagtcactttatctaaatgaaaaagaaaaagataaaataaacaagatacttttcaatcatcaatataaaagaaatattgtgattcgaaaagcagaatctattcattctccaataactttttggtatggaaaatatattattttgattcccagtttatattttaaaagtataaatgacaaaaaactaaaatatataatattgcacgagtatgctcatgctaaaaacagagatactttgcatttaattatctttcatattttttctattgctatgagttataatccactaatacaaattgtaaaaagaaagatgattcatgacaatgaagtagaagccgatagatttgtccttaataatattaacaaaaatgaatttaagtcttatgcggaagctattatggattccgtattaaaaacctcatttttcaacaaaaatatattaagccattcatttaatggtaaaaaatcattactcaaaagaagattaattaatataaaagaaggcaatctgaagaagcagtcaaaattaattctaatttttatttgtatttttactttttttatcatgataattcaaagccagtttttaatggggcaatccttaactgattataattataaaaagcccttacaaagcgattaccaaattttagatgaaagtaaaaattttggttcaaatagtggatctttcgttatgtacagcatgaagaaagacaaatactatatttataatgaaaaagaaagtagaaaaagatattctcctgattcaacttacaaaatttatttagcactgtttggacttgaccgtcatattataagtgataaaaattcacgtatgtcatggaatcataatcattatcctttcgattcttggaataaggatcaagatttaaatacggcaatacaaaactcagttaattggtacttcgaacgtattagtaatcaattatcaaagaactatacttctgatcaactcaagcaattaaattatggtaataaaaatttgggaagttataaagcctattggttggaagatagtttgaaaatatctaatcttgaacaagtaatagttttaaaaaatatgatggaacaaaataaccattttagtaaaaatgaaaagaaacaattatcttcttcgttattgattagaaaaaatgaaaattatgaattgtatgggaaaacaggtacaggtatagtaaacgggaaatataataatgggtggtttgtaggttacgtaattacaaatcatgataagtattatttttctacacatttatcagatgaaaaagcctctggtgaaaatgctaaattcataaatgaaaaaatattaaaagaaatgggtgttttaaatggccaataa

SEQ ID NO: 4412 - DNA, 381 bp, Staphylococcus epidermidis
atggccaataagcaagttgaaatatctatggctgaatgggatgttatgaatataatatggaataaaaaatcagtatcagctaatgaaattgtagttgagattcaaaaaaataaagaagttagcgataagacgattagaacattaattacaagactatataaaaaagagattataaaacgctataaatataataatatttatttttactcatcaattattaaagaagatgatattaaaatgaaaactgctaaaacctttcttaataaattgtatggaggggatatgaaaagtttagtgcttaattttgcgaaaaatgaagaattaaataacaaagaaattgaagaattgcgagacattttaaatgatattagtaaaaaataa

SEQ ID NO: 4413 - DNA, 138 bp, Staphylococcus epidermidis
atgaaagatatatttaatgaaatggattaccgtaatataccacgagacatgctagataaaaatattcctaccggtcgtggtatggttaaatgggcaccattcgttatatgtactaatctcataaaaaatctaatttaa

SEQ ID NO: 4414 - DNA, 1029 bp, Staphylococcus epidermidis
atgacattaggttatataggttcttatactaaaaagagtggtaaaggtatatatcgcttcaaactaaatgacgaaacaggagttattgaagcgttagaaactggttatgaaattgaagcgtcaacttatcttactcgtaatgaatcgtttttatatgcgattactaaagaaggtgaagaatgtggtgtagctagttttagtattaaagaagatggacaactggaattaattaataaatgtctagaatcaaaacagggaactggttgttacattcaagtgtctagtaatggtaaatatttatttgaagcggtttatggtgcaggacttgcaaggatttataaattaaatcaaattacgggagcaatagagaagttaatagaagaacttgcgcatgaatttccaactggctcacatgaaagacaagattcatcacatgttcattttttaaatgaaacacctgatcataagtatgttgtagctactgatttaggtacagatagagttgtaacatacaaatttggtgaggatggtttaaaccaatatgcagtttctcaattcaataattcagacggacctcgccacatcgcttttagtaaagatgggcgacacgcgtatatcgttcatgagctatcaaatgaggtgagtgttacagaataccaagatggtaaattcattgagctagaaagacattcaactattccaagagactttgacggggaatcgaaactagcagcagtaagactatcgcatgatgggaagcacttatatataagtaatagagggcatgatagtattgctatttttgaagttttaaaagatggcaggtcactgagaagtattgaaatacaaccaagttacgatgcctttccaagagactttaatataactgaatcagataattatttaatttgcgcacatcaagaaggggaatcaaaagtttcaatttttgagcgtgataacataactggtaaactttcattaaaagataaaaaagctatagctaatgaaggtgtctgtgtactactataa

SEQ ID NO: 4415 - DNA, 1380 bp, Staphylococcus epidermidis
atgacaataattagagataaatttaacaatagtaaagctttttttaatacgcataaaacaaaaaaccttaaatttcgaaaacaacaacttaaattactaagtaaaaatatcaaaaatcatgaaaatgaattattagatgccttatataaagatttaggtaaaagtaaggttgaagcatacgcaactgaaattggtatgcttttgaaaagcataaaactaatgcgcaaagagttaaaaaattggtcgaaaaccaaacaaacggatacaccactctacttattccctacaaagagttatattaaaaaagaaccttacggtacagtgcttattataggaccatttaattatccggttcaattagttttcgaacctctcataggagcaatagctgccggaaatactgctatagttaaaccttcagagttaacacctcatgttgctattgtgattagggacatcattgaagatacatttgatgaaacatacgtctctgttgttgaaggtggtattgaagaaactcaaacgttattaagtttaccatttgattatatattctttactggaagtgaaaaagtcggaaaaattgtctatgaagctgcagcaagaaaattaattccagttactcttgaacttggcggtaaatcacctgttattgtcgatgatacagccaatatcaaagtagcgagtgagcgtattagttttggtaaatttacaaatgctggtcaaacgtgtgtcgctccagattatatattagttcagcggaaagttaaaaatgatttaataaaagcgcttaaaaaaacaattactgaattttacggagaaaatattgaaaaaagccctgatttcggacggattgttaatcaaaagcactttaatcggttgaatgacttgattcaaattcataaagataatgttgtttttggaggtaatagttctaaggaagatttatatattgaaccaactcttttggataacataaccaatgacaataaaattatgaaagaagaaatattcggtcccattttgcctatcattacttatgataatttcgacgaagtacttgaaatcatccaaagtaaatcaaaaccattaagtttgtatctttttagcgaagatgaaaacatgacacatagagtgcttgaagaattatcatttgggggcggtgcaattaacgataccttaatgcatttagctaatcctaacttacctttcggtggcgtaggttcttcaggcataggtcaatatcatggtaagtattcctttgatacatttagtcatatgaaatcatatacatttaaatctacacgtctagaatcgagtttatttttccctccatacaaaggtaaatttaaatatattaaaaccttcttcaagaactag

SEQ ID NO: 4416 - DNA, 930 bp, Staphylococcus epidermidis
atgacaaaaacttttattttcggtcacaaaaatccagatactgatgctatttcttcagctttaattatggctgattttgagcaacaaactggtaatactgaagcaaaagcttatcgcttaggtgaaataagtgcggaaactcaatttgcactagatcattttaacgtagaagctccagaattattaaacgaagatttaaaaggacaagatgttattttagtcgaccataacgagtttcaacaaagtgcagataccatttcaaacgcaacaattaaacatgtgatagatcatcatagaatttctaactttgaaacagctggccctttatactatagagcagaacctgttggttgtagtgcaacaattttatataaaatgtataaagagcgtggttttgaaattaaaccagaaatcgctggacttatgatttcagctatcatttctgatagtttattatttaaatcacctacgtgcacaaaagaagatgtagatgctgctcaagcacttaaagatattgcaaatgttgatttagaagcatatggtttagagatgttaaaagcaggtgcttcaacaacagataaatctgctgaaacacttgtcaatatggatgctaaatcattcaatatgggagattatgtaacacgtattgctcaagtcaatactgtagatattgatgaagttttagatcgtaaagatgaatttgaaaaagttatgttagaaatgagtgccaatgaaaaatacgatttattcgttcttgtagttactgatattattaacagcgattctaaaatccttgtagttggtgctgaaaaagataaagttggagaagcatttaaagtacaactagatgatggtatggctttcttatctggtgttgtatcacgaaaaaaacaagttgttcctcaaatcactgaagttttaactcaataa

SEQ ID NO: 4417 - DNA, 555 bp, Staphylococcus epidermidis
atgagtaacaaagcattaatcattgtagattactcttttgattttattgacgataatggtaaattaacatgtggcaaacccggacaagaaattgaaacttttattactcaacgtataaaaaattatcatgataatcaacaggaaatatttttcctaatggacttgcattatgaaaatgatcaatttcatcctgaaagtaaattattccccaatcataatattcatcaaacaccaggtcgtgagttatatggagaggtaggaagattatacaactctattaaagaccaaatgaatgtacattatttagataaaacgagatacgattcattctacggcacgccattagatagtttattacgtgaaagacaaatcaatgatattgaaattgtaggtgtttgcacggatatttgtattttgcacaccgctgtttcggcatacaatttaggttataacatcactatcccaattagaggcgtagcatcatttaaccaagatggtcatcaatgggcactctctcattttaaaaattcccttggtgcaaaagtagaagattaa

SEQ ID NO: 4418 - DNA, 1098 bp, Staphylococcus epidermidis
atgtttatcaatgcaaaagatttcggattaaaaggaaaaagtaaatataaagatacaagagcgattcaaaaagcattaaattacgcaaaaaaaggcagacacactgtttatatacctaaaggaacttattatatcagaaaagctttagttatttatgattctacaacattgttattggatgaaggtgcaatacttttaagaaaagggaaagatgcactattaaaaaatggtagacgcttaaaactatatcatggctataatggaaatagtcacatttatattaaaggaggaacttttgatatgaatggaggcgaatacccatataataatacagccatgtgcatgggacatgcagaagacattcaaattttaggtgtaacattcaaaaatattgttggagggcatgcactcgacgcatgtggaatcaatggtttacacatatcagaatgtgattttaaaggatttcttgatattgatggagatcgttctttctctgaagcagtacaattggatatacaagtacctggcgcttttcctaaatttggaactacagatggaacgattacgaaaaatgttgtcattgaaaaatgctattttggtcgttcagatcatcctaaaatgaaagcgtggaatagagctattggctctcatgccagtagatataactgctattatgaaaacattcatatcaatcaaaacatctttgataatttaaatgagtatgctttaactcctctaaagtcaaaagacacatttattacaaaaaataaatttataaattgtaatggtggaataagatttcttggagtgaaagatggtaaaaatgctgccgatcctattacaggacaagtgatggaaactcaagctggcgaaaatttcaatgtgataggtaatacttttattgggaagatgaaaagagatgcgattcatattagaagttatcatcacgtccgacatcaacacgtttttatagcggcaaatcaatttgaagatgcttcacaatcaatacatttagaaaatattaatggacttactttaaatcaggaacaaactaaaatcaaaatcaagagtattgatgtgaaaaatatcagtaattaa

SEQ ID NO: 4419 - DNA, 168 bp, Staphylococcus epidermidis
atgtataaagaatataatatggctcaacttactttaccaaaggaaacttcagttcttatcgccacaaatgatattttagaaacaattcctaagactgaattcgatgaattcagtcatcatcgtggtgcaacatcttttcttgtcacattttctatactaatcgtgtga

SEQ ID NO: 4420 - DNA, 804 bp, Staphylococcus epidermidis
atgcatttatattatctaggacctaaaggaactttttcatatctagccgctaagcaatttgaatcacatgaacagtatgacttcattccattatctaacttgcatgaagtcattcaatccgtatctaaagataaacaggctgtcggaattgtccctattgaaaactctattgaaggtactattaacattgtcgctgattcattagcacatcatgatgtatacgcacatggtgaaattcaactagatatagatttttcactttacggtcatcattcaaattcacttgatgatattcataaagtatattcaattgctccagcaatcagtcaaacaataaactacattcatcgtcaacagtttgactatgattatgtagatagcactattcaaagccttaacatgataaaagatggtattggagcaatagctcctcttgggagtggggaaacttatggctaccatactttagatcaacatatacaagattaccctcataatgtaactagatttgtagtagtgaaaaatcatactcattttattgaacatccaaacacaactatcttccttatcacgcctaagtatgataagccaggacttttagctagtgttttaaatacttttactttattcaacataaatttatcgtggattgaatctagaccacttaaaactcaattaggtatgtatcatttttatgttcaagccgatactgctataaataatgatgtgaataaaattatttcaattttagagactttggattttcaagttaaaattatcggcgcttttaataagaaaaactaa

SEQ ID NO: 4421 - DNA, 1068 bp, Staphylococcus epidermidis
atgctaatagataaagcaagatcatttattcagaccatgtatagcgaattaaaatataatactaatgaaattgaaaatagaatgaaagagattgagcaagaaattaacttgactggtagttacacacatacttatgaagaattatcttacggtgcaaaaatggcatggagaaactcaaatcgttgtattggtagactgttttgggattctttaaatgttaaagatgcccgagatgtatgtgacgaaaaagaatttataaaatttatacatacacatattaaagaagctactaacgacggaaaaatcaaaccatatattacaatttttagtcctgaagatacacctaaaatttataataatcagttgattcgttatgctggttatgaaaatgttggcgatccatctgaaaaaaaggttactcgtttagctgaacatctaggttggaaaggtaaaggttcaaattttgatattttacctctgatttatcaattgcctaacgacactataaaaatacacgaacttccaaatgatattgtaaaagaagtttctatacatcatgaacactatcccaagctttcaaaattaggtttaaaatggtatgcggtacctattatttcaaatatggatttaaaaatcggtggtattacttaccctacagcaccttttaatggatggtatatggtaaccgaaattgctgtacgtaatttcacagacacctatcgttataatcttttagaaaaagttgcagaagcttttgaatttgatacacttaaaaataattcatttaataaagatcgagcactcgtagagttaaatcatgctgtgtatcattcatttaaagctgatggtgtttctattgttgaccacttaactgcagcgaagcaatttgaaatgtttgaacgaaatgaacatcaacaaaacagagatgttactggtaagtggtcttggctggcacctccactttcaccaactttaacttctaactatcatcatggatatgataatacaatgcatcatacgaatttcttctataaaaaagaagaacctatgaagtgccctttccattaa

SEQ ID NO: 4422 - DNA, 1344 bp, Staphylococcus epidermidis
atgccatttaatagtggatatgcggtattcaacggattgaaacgcgttgtgaatttcatcgaaaactttgggtttacaaatgaagatatcacatatttaaaatcgataggttacgaagaagattttctaaactacctaaaagatttgaaatttacagggaatattaaatctatgcaagaaggtgaaatttgttttggtaatgagccattattaagagttgaagcacctttaatccaagcgcaacttattgaaactattttgttaaatatcattaatttccaaacattaattgcaactaaagccagccgaattcgtcaaatagcaactcatgacactttgatggaatttggtacaagaagagctcaagagatcgatgctgcactgtggggcgctagagcagcctttattggagggtttgattctacaagtaatgttagagcaggaaaactttttaatatacctgtatctggcacacatgcacacgcactagtacaaacatatggtgatgagtatatagcattcaaaaagtatgctgagcgacataaaaattgtgtgttcttagttgatactttccatactttaaaatcaggagtaccaaccgcaattaaggttgcaaaagagttaggagatactattaattttataggtatcagattagattctggtgatattgcgtacctatctaaagaagctcgtagaatgttagatgaggctggttttacagaagctaaaattatcgcatcaaatgatttggatgagcagactattacaagtttaaaagcacaaggcgctaaagttgacggatggggagtaggtacaaaactgattacaggatatgatcaaccagccttaggcgcagtttataaattggtttctattgaaacagatgatggcacaatgagtgatcgcattaaattatcaaataatgctgagaaagttactacaccaggcaaaaaaaatgtttatcgtattattaataataaaacaggcaaggctgagggcgactatattacgctagaaggtgaaaatcctaatgacgaatctccattgaaaatgttccatcctgttcacacttacaaaatgaagtttattaaatcatttaaagcggttaatctacatcaatctatatttgaaaatggcaaacttgtataccatcttccagatgaatatgaagctcaggactatcttaaaaataatttaagtattttatgggaagaaaataaacgatatcttaacccgcaagattatccagtagatttaagcactaaatgttgggaaaataagcataagcgtatttttgaagttgctgaacacgttaaagagatggaggatgaaaatgagtag

SEQ ID NO: 4423 - DNA, 828 bp, Staphylococcus epidermidis
atgagtagattgcaagatgttgtggttaatgaaatgaaagtaaaaaaacaaattgacagtgtagaggaaatccaggaaattaagcaatttattaaagcgtatgtaaaatcacattcatttatacaaactcttgttcttggaatatcaggtggtcaagactctactctaacaggtaagttagcacaattagcagtaaatgaattgaaagaagagggacgtaactgtaaatttatagcagtgaaattaccttatggtgtgcaacaagacgctcatgaagtagaagatgcacttgagtttattaatcctgacacaacatatacagttaatattaaaccagcagttgatcagagtgttcaatcacttagtgaagcaggcatcaaacttactgattttcaaaagggtaatgaaaaagcacgtgaacgaatgaaagttcaattttcaattgcttctaatactcaaggtatagttttaggaactgatcactctgccgaaaatattacaggattttacactaaatatggagatggtgctgcggacattgcgcctatctttgggttaaataaaagacaaggtaaacaattactagcttatctaggagcacctaaacacctttatgaaaaagtgccaacagctgatttagaagatgataaacctcagttaccagacgaggaagcactaggcgtatcttatcatgatattgatgattatttagaaggcaaagaaattcctgcaactgctcgtgaaacaatcgaaaaacattatgttagaaatgcacataagcgtgaacttgcttatacacgatattcatggcctaaatataacaaatga

SEQ ID NO: 4424 - DNA, 627 bp, Staphylococcus epidermidis
atgtcagcaattgctcaaaatccatggttaatggtcttagcaatttttataattaatgtatgttatgtcacatttttaacaatgagaacgatattgactttgaaaggttatcgttatgttgcagcagtagttagttttatggaagtcttagtttatgttgttggtttagggttagtaatgtctagcctagaccaaatccaaaatatttttgcttatgcattaggattctcagtcggtattatagtaggaatgaaaatcgaggaaaaacttgcgttaggttatacagttgtcaatgttacttcatcagaatatgagttagatttaccaaatgaattaagaaatttagggtatggtgtaacccactacgaagcatttggtagagatggaagtcgaatggtaatgcaaatattaacaccaagaaaatatgaattaaagttaatggatactgtcaagaacttagatcctaaggcatttattatagcgtatgaaccaagaaatattcacggaggattctgggttaagggtgtacgtaaacgtaaactgaaagcttatgaaccagaacaactggaagttgtagtagatcacgaagaaatagtaggtggtagctcaaatgagcaaaaagtttag

SEQ ID NO: 4425 - DNA, 180 bp, Staphylococcus epidermidis
atgagcaaaaagtttagagttgaagataaagaaacaattgcagattgtctcgacagaatgaaaaaagaagggtttatgccaatacgtcgtattgagaaaccagtttataaagagaacaaagatggcagtatagagattttaaaacaggatattatatttgtaggtgctttaatccaataa

SEQ ID NO: 4426 - DNA, 1296 bp, Staphylococcus epidermidis
atgatagaacgttattcaagagatgaaatgtctagtatttggacggaccaaaatcgctatgaagcatggttagaagtagagattctagcgtgtgaagcatggagtgagttaggttatattcctaaagaagatgtaaaaaaaattcgtgaaaatgccaaagtaaatgttgaacgcgctaaagaaattgaacaagaaacacgacacgatgtagttgcatttacacgccaagtttctgaaactttaggtgatgaacgtaagtgggtacattatggattaacttccactgatgtagttgacactgccttaagttatgtaattaaacaggcaaacgaaatccttgaaaaagatttagaaagatttatagatgtattagctgccaaagctaaaaaatatcaatatacattgatgatggggcgtacacatggagttcatgctgagcctacgacttttggcgtaaaaatggctctttggtatactgaaatgaaacgtaatcttaagcgttttaaagaagtgcgtaaagaaatagaagtagggaaaatgagtggagcagtaggaacatttgccaatattccacccgaaattgaggcttacgtatgtgaacatttaggaatagacactgcagctgtttctactcaaacattacaaagagatcgtcatgcttattacattgctacattagcactaattgctacatcaatggaaaaatttgcagtagaaattcgtaatttacaaaaaactgaaactagagaagtcgaagaggcatttgcaaaaggacaaaaaggatcatcagcaatgccacataaaagaaatccaatcggttctgaaaatattacaggtatatctcgtgtgattcgaggatatattactactgcatacgagaatatacctttatggcatgaaagagatatctctcattcttctgcagaacgtatcatgttaccagatgttactattgctctagattatgcactcaatcgatttacgaatattgttgatcgactaacagtttatgaagataatatgagaaataatattgataaaacgtatggtttaatcttctcacaacgcgtactactagcattaattaataaaggcatggtacgtgaagaagcttatgataaagttcaacctaaagcaatggaatcttgggaaacaaaaacaccatttagagagttaattgaacaagattcatctataactgacgttctatcaagtgaagaattagatgattgcttcgatcctaaacatcatcttaatcaggtcgatactatattcgcgcgtgctggtttatcttaa

SEQ ID NO: 4427 - DNA, 303 bp, Staphylococcus epidermidis
atgcaaattgaaaaattaagaggtcagtcattagatgaattatttgatgcaatcttagcactagaaaacagagaagaatgttatcagtttttcgatgatttatgtactgtaaatgaaatacagtcattatctcagagacttcaagttgctaaaatgattaagcaaggttatacttatgcaactattgaagaagagtctggtgcatcgactgcaacgatttctagagtaaagcgttcgttacaatggggtaatgatgcttatacaatgattttggatagactaaatattgaaacaaaggcataa

SEQ ID NO: 4428 - DNA, 693 bp, Staphylococcus epidermidis
atgtacgacataaccaagtggaaacatatgtttaaattagatccggctaaatcaatttcggatgaaaatttagaggcactgtgtatgtctaacactgatgcaataattattggtgggacagatgatgtaacagaagataatgttattcatttaatgagtagagtaagacgttatccgttaccacttgtcttagaagtttcgaatgtagaaagtgtgatgcctggttttgatttctattttattccaacagtcatgaatagtaaggatacaaaatatcataacgaaattttactagaagcccttaaaaaatatggacatgtgattaattttgatgaagtttttttcgagggatatgtcgttctaaacgcaaatagtaaagttgcaaaaattaccaaagcttatactcaattaggtatagaagatgtcgaagcatatgcacaaatggcagaagaattatatcgatttccaatcatgtacgtagaatatagtggcacatatggagatgttgataaggttaaagcgattgcaaatatgcttcaacatactcaattattttatggcggtggtataacaaacattgacaaagctaacgaaatgtctaacattgcggataccattgttgtcggcgatattatatataacgacattaaaaaagcattaaaaactgtaaagataaaggagtctaataaatga

SEQ ID NO: 4429 - DNA, 2190 bp, Staphylococcus epidermidis
atgaatgcgctagtaaaaaatatgaattcagagcaaagtgaagcggttagaacaacagaaggcccattgcttattatggcaggtgctggatcaggaaagacacgtgtgttaacacatcgcattgcgtatttattagatgaaaaagatgtatcaccttataatattttagctattacgtttacaaataaagcagctaaagaaatgaaggcgcgtgtcgaacatcttgtgggagaagaagcgcaagtgatttggatgtccacttttcactctatgtgtgtaagaattctgagaagagatgctgatcgtattggcattgaaagaaatttcactatcattgatcctaccgatcaaaaatcagtgattaaagatgtattgaaaagtgaaaatatagacagtaagcgatttgagccacgtatgtttattggtgcaattagcaatttgaaaaatgaattaaaaacacctgaggatgctcaaaaagaggcgaatgattttcactctcaaatggttgcaacggtttacaaaggttatcaaagacagttatcacgtaatgaagcactcgactttgatgatttaattatgacaactattaatttatttgaacgtgtacccgaaactctagaatactatcaaaataaatttcaatatatacatgtagatgagtatcaagataccaataaagcacaatataccttagtaaaactattagcaaacaaatttaaaaatttatgtgttgttggtgattctgaccaatctatttatggttggagaggagctgatatacaaaatattttatcttttgaagaggactatcctgaggcaaagacaattttcctcgaacagaactatcgttcaactaagaatattttaaatgctgcaaatgaagttataaaacataattctgaacgtaaacctaaaggtctatggactgcaaattctggcggagacaaaattcagtattatgaagctatgactgaaagagatgaagcagaatacgttgttaaagaaataatgaagcatcaacgcagtggtaaaaaatatagtgaaatggctatattatatagaacaaatgcccaatcacgtgtacttgaggaaacatttatgaaatcaaatattccttatacaatggttggaggtcaaaagttctatgaccgtaaagaaattaaagatttacttagttatttaagagttattgctaatagcaatgatgatattagtttgcaacgtattattaacgtgcctaaacgtggtattggaccttcatctgttgaaaaaatccaaacctatgcacttcaaaataatataagtatgtttgacgcattggctgaggtagattttataggtctctctaaaaaggtaactcaagaatgtatcagtttttatgaaatgattcaaaatttaatcaaagaacaagaatttctcgaaattagtgaaatcgtagatgaagtactacaaaaatcaggctatagagacatgcttgatcgagaacaaagtattgaatcacgaagtcgattagaaaacttagatgaatttatgtctgtacctaaagattatgaggaaaatactcctttagaggaacaatcacttattaattttctaacagatttatcattagttgctgatattgacgaagcagatacacagaatggagtaacattgatgacaatgcattcagcaaaaggtcttgaatttcctatagtttttattatgggaatggaggagtcgttgttcccacatatcagagcaataaaaagtgaagatgatcatgaaatggaagaggaacgtcgtatttgttatgtagcaattacacgagcagaagagttgctttatatcacaaatgcaacgaccagaatgttgtttggtcgttctcaatccaatatgccatctcgatttttaaaagaaatcccagaagacctacttgatagtcataccggtcaaaaaagacaaactatatctccaaaatctcaacctaaaagaggttttagtaagcgtactacatcaactaaaaaacaagtttcatcatctgattggaaagtaggagataaagttatgcataaagcatggggtgaagggatggttagtaacgtgaatgaaaaaaatggatctgtagagttggatattatatttaaatcagaaggtccaaaacgattattagctcagttcgcaccaataacaaagaaggaggactcatag

SEQ ID NO: 4430 - DNA, 1998 bp, Staphylococcus epidermidis
atgcaagatgttaaaaagcgtgtggaaaaattacatgacttattgaatcaatatagttatgaatattatgtacaagataatccctcagtgcctgacagtgagtatgataagttattacatgagctgattgaaattgaagaaaaatatccagaattcaaatcgacagactctccaacagtgcgtgtgggtggcgaagctcagtcttcttttgaaaaagtaaatcacgacacgcctatgttaagtttaggtaatgtttttaatgaagaagatttaagaaaatttgatcaacgtattcgtgatagtattggtaaggtagaatacatgtgtgaacttaaaatagatggtttggctgtttcgctcaaatatgaaaatggtcgttttgttcaaggacttacacgtggtgatggtacgacaggtgaggatatcactgaaaatctaagaactatacatgctataccactaaaaattaaagaacctctcaattttgaggtccgtggggaagcttatatgccacgtcgttcattcattcatttgaataatgaaaaagaacaaaatggtgaacaaccttttgcaaatccacgaaacgctgctgcaggctctttaagacaacttgactctaaactagctgcgaaaagaaagttaagcgtcttcttatatagtgtgaatgacctaaccgagtttaatgcaacaacacaaagtgaagcgctagaggaattggaccaattaggttttaaaactaaccaagaacgtgaacgagtatcagatattgagggcgtacttaattatatagagaaatggacaagcaaaagaggatctttatcttacgatattgatggtattgttataaaagttaacgatttatctcaacaagaggaaatgggttatacgcaaaaatctccaagatgggcgattgcttataaatttccagctgaagaagttattacaaaattattggatattgagctaagtattgggcgtacgggtgttgtgacaccaactgcaattctagaacctgtaaaagtagctggtactacagtttcaagagcctcacttcataatgaagatttaatacatgaaagagatatacgtatcggagatagtgttgttattaaaaaagccggggacatcatccctgaagttgtaaaaagtattttagatagacgacctaacgaatcggaaatttatcatatgccaacacattgtcctagttgtggacatgaattagttcgtattgaaggagaagttgctttacgttgtattaatccaaaatgtcaggcacagcttattgaaggacttatacatttcgtttcaagacaagcgatgaatatagatggtttaggtactaaaattattcatcagctatacgaaaatcagttaatcaaagatgtcgcagatattttctatttgaaagaagaagatttattaccattagagagaatgggaaagaagaaagttgataatcttttattagcgatagaaaaatctaaagaacagtcattagagcatttattatttggactgggtattagacatttaggtgtaaaagctagtcaagtacttgctgagcgatatgaaacgatggatcaactttttaaagtaactgaaagtgaattaattgaaattcaagatattggagataaacttgcacaatctgttgtaacatatctcgaaaatagtgatattcgttcattaattgaaaaattaagtaataaaaatgttaatatgtcttataaaggaattaaaacaactgaaatcgaaggtcatcctgattttagtgggaaaacaattgtattaacagggaaactcgagcaaatgacgagaaatgaagcatctgaatggttgaaaatgcaaggtgctaaagttacaaacagcgtgactaaaagtactgatattgtcatagctggagcagatgcagggtctaaattagccaaagctgagaagtatggtactgaaatttggactgaagcagcatttattgaaaaacaaaatggaatctaa

SEQ ID NO: 4431 - DNA, 1209 bp, Staphylococcus epidermidis
atgaagcgaacaatatttttactcatgtcgatactgttattattaacggcttgcggagatggacataaacaaacttcatcagataaagaacaaagtgaacataaggataaccataataaaaatcaagtgaaacaaatagcgactgataaaaaagttcaaggtgataactataggactatattacccttcaaagaaagccaggctcgtggattattacaagataatatggcaaatggttataatggagaagattttgaaagtggtttactagaattaagtaaagaaatctttccaacaaataagtatttatatcaagatggacaatatttagataaaaaaacgattaatgcatacttagatccgaagtatacgaaaaaagaaattgacaagatgagcgaaaaagaaaagaaaagaaaaaatgctaatgagaatcttggactcaatccatctcacaatggtgaaacagatgaagagaaaatagctgaaaattctccagcctatctttcaaatatactcgagcaggatttttatggaaatagtgattctaaaggtaaaaatataaaagggatgacaattggtttagccatgaatagtgtttattattacaaaaaagagaaagatggcgaaacatttagtaaagatttatctgataaagagattgaaaagcaaggtaaacagatggctagtgaaatgctttctcgtttacgtgagaatagtgatttgaaagatattcctattcattttgctatctataaacaatcaagtcaagattccattacaccaggtgaatttatagttggtactacggttgaagagggtaaaactaaaattaactcatgggataatattaatgaaaaagcagccttaattccttcgtcaactgcagctgattatgatgaaacgctgaataataactttaggcagtttaatgataatttgcaatcgtatttttcaaacttcacacaagcagttggtaaggttaaattcgtaaataaaaaagctaaacaacttacagttgatttgcctatagattattacggacaggcagaaacgataggtattacacaatatgttacagagcaagccgaaaaatattttgataaactagatgagtatgaaattagaatcaaagatggaaatactccacgtgctctcattagtaaaactaaagacgataaagaaccacaagttcatatctatcataattag

SEQ ID NO: 4432 - DNA, 1536 bp, Staphylococcus epidermidis
atgtttacattaggtacagctctcagtaatcaaattgatgcaaattggcagacttacgttatgattattgtctatttcataatccttctaattattggcttctatggttatcgacaagctactggaaacttaagtgaatttatgttgggaggacgtagtatcggaccatatatcacagctttatcagctggtgcctctgatatgtctggatggatgattatgggacttccaggttcagtatacagtacaggtttatccgccatttggataaccattggattaaccttaggtgcatacattaattattttgttgttgctccaagactacgtgtttatactgagattgcgggagatgctattacactcccagacttttttaaaaatagactagatgataagaaaaatattattaaaattatttcaggattgattattgtcgtatttttcactctatatacgcattcaggtttcgtttctggcggaaaactctttgaaagtgcttttggattgaattatcatgcaggacttttgatagtggctattatagttattttttacactttctttggtggctatttagctgtatcaattactgatttttttcaaggtgtgattatgcttattgctatggtaatggtacctatcgttgcattgcttaagctcaacggttgggatacatttcatgatattgctcaaatgaaacctacaaacttagatttatttagaggaaccactgttttaggcattgtttcattattctcatggggactcggatattttggtcaaccacatattatagtaagatttatgtctatcaaatcacataaattactaccaaaagccagacgtctgggaataagttggatggcagtcggtctattaggagcgattggtgtgggattaacaggaatttcatttatatctgaaagacatattaaattagaagatcctgaaacactatttattgtgatgagtcaaatattatttcatccgcttgtaggtggatttttattagcagccatccttgctgcaataatgagtactatctcttcacaattactagtaacatcaagttctttaactgaagatttctataaactaatcagaggttcagataaagcatcatcacaccaaaaagagtttgttttgattggacgcttatcagttctacttgttgcgatagttgctattacgattgcttggcatccaaacgatacaatactaaatttagttggtaatgcttgggctggttttggagctgcatttagtcctttagtactctactctttatattggaaagatttaacacgtgcaggagctattagcggaatggtagctggtgctgtggttgttattgtttggatttcttggataaaacccttggctacaatcaatgcattctttggtatgtatgaaatcattccaggtttcataattagcgtattgattacctacatcgtaagtaaattaacaaaaaaacctgatgattatgttattgaaaatcttaataaagttaaacacatcgttaaagaataa

SEQ ID NO: 4433 - DNA, 303 bp, Staphylococcus epidermidis
atgactaaagtaacacgtgaagaagttgaacatattgctaatttagctagacttcaaatttctcctgaagaaacagaagaaatggctaatactttagaaagtattttagattttgcgaaacaaaatgatagtgccgatacagaaggtattgagccaacttatcacgtattagatttacaaaacgtattacgtgacgataaagcaatcgagggcattcctcaagaattagcattgaaaaatgcgaaagaaacagaagatggtcaatttaaagtgccatccatcatgaatggggaggacgcttaa

SEQ ID NO: 4434 - DNA, 1458 bp, Staphylococcus epidermidis
atgagtattcgttttgaatctatcgaaaaattaactgaattaatcaaaaataaagaaattaaaccttctgatgtagtaaaagatatatacgcagctattgaagaaactgatccaacaatcaagtcattcttagctttagataaagaaaatgcaataaaaaaagccgaagaattagatgaattacaagctaaagatcaaatggatggtaaactatttggaattcctatgggaatcaaagataatatcatcacaaaagatgtagaaactacatgtgcaagtaaaatgttagagggatttgtacctatttatgaatcaactgtaatgaacaaactacatgatgaaaacgcggtattaattggtaaattaaacatggatgagtttgcaatgggtggctctacagagacttcatattttaagaaaacattaaatcctttcgatcacacagcagtaccaggaggatcttcaggtggttctgcagcagcggttgcagcaggtttagttccttttagtttagggtcagacactggtggttctattagacaacctgcatcttattgtggcgttgttggtatgaaaccaacttatggccgtgtatcacgtttcggtttagttgcatttgcttcttctttagatcaaattggaccaatcacgcgtaatgttaaagataacgcattagtacttgaggcaatttccggtgttgatgcgaatgattctacaagcgcacctgttgatgatgtagattttacttctgatattggtaaagatattaaaggtcttaaaattgcattacctaaagaatatttaggtgagggtgtaagtgaagaagttaagacttctgtaaaagaagcggttgaaacgttaaaatcacttggtgctgaagttgacgaagtctcattaccaaatacaaaatatggtattccatcatattatgttattgcgtcatcagaggcttcagcaaatttagcgcgatttgatggtattagatatggatatcattctaaagaagcacaatcgttagaagaattatataaaatgtctagatcggaaggctttggtgaagaagtcaaaagacgtatcttcttaggtacttttgctttaagctcaggttattacgatgcatactataaaaaatctcaaaaagttagaacgttaattaaaaatgattttgacaaagtatttgaatcttatgatgttgtggttggaccgacagcacctacaacagcatttaatattggcgaagaaattgatgatcctttaacaatgtatgcgaatgacttattaactacaccagttaatcttgccggtttacctggtatttcagttccttgtggacaatcaaacggacgcccaattggtttacaattaattggtaaaccttttgatgaaaaaacgttatatcgtgtcgcttatcaatttgaaacacaatacaacttacatgacgcatacgaaaatttataa

SEQ ID NO: 4435 - DNA, 1428 bp, Staphylococcus epidermidis
atgcattttgaaacagtaatcggacttgaagttcatgtcgagttaaaaacggactcaaaaatgttctctccatcacccgcacattttggagctgaaccaaattcaaatacaaatgttatcgacttagcttatccaggtgtattaccagtagttaatagacgtgcagtagattgggcaatgagagcttcaatggcattaaatatggatattgctacaaattcaaaatttgatcgtaaaaactatttctatccagataatccaaaagcatatcaaatttctcagtttgatcaacctattggagaaaatggctatattgatattgaagttgatggagaaacaaaacgtatcggtattacacgtcttcatatggaagaagatgcaggtaaatcaacacataaagatggttattctctagtagacttaaaccgtcaaggtacgccattaattgaaattgtatctgaacccgatattcgttcacctaaagaagcatatgcttatctagaaaaactacgttcaatcattcaatatacaggtgtatctgattgtaaaatggaagagggatccctacgttgtgatgctaatatttcacttcgtccatatggtcaaaaggaatttggtacaaaaactgaattgaaaaaccttaactcatttaactacgttaaaaaaggtttagaatatgaagagaaacgtcaagaagaagaattattaaatggtggagagattggtcaagaaacacgtcgatttgatgaatctactggtaaaacaattttaatgcgtgtgaaagaaggttcagatgattatagatatttccctgaaccagatattgtaccattatatgtagatgaagattggaaagcacgtgtaagagaaacaattccagaattgccagatgaacgtaaagctaaatacgtaaatgatcttggactaccagaatatgatgcgcatgtattaacattaactaaagaaatgtctgatttctttgaaggcgcaattgaccatggtgcagatgttaaacttacttccaactggttaatgggaggtgttaacgagtatcttaataaaaatcaagttgaattaaaagatacgcaactaacacctgaaaatttagctggtatgattaaattaatagaagacggaacaatgagtagtaaaatcgctaaaaaagtttttccagaactagcagaaaatggtggagatgctaaacaaattatggaagataaaggtttagtacaaatttctgatgaagcaacactacttaaatttgtaacagatgcattagataataatccacaatcaatagaagattataaaaatggtaaaggtaaagctatgggattcttagtgggccaaattatgaaagcttctaaaggtcaagctaacccacaaaaagttaatagcctattaaaacaagaattagataatcgttaa

SEQ ID NO: 4436 - DNA, 951 bp, Staphylococcus epidermidis
atgagaaaacgtgcaagaattatatataatccaacatcaggaaaagaactttttaaacgtgtattaccagatgcactgattaaacttgagaaagcaggttatgaaacgagtgcatatgcaactgaaaaaattggtgatgctacttttgaagctgaaagagcactagaaagtgaatatgatttactcattgcagctggaggtgacggtacgttaaatgaggtggtcaacggaatcgccgaacaacccaatcggcctaaattaggtgtaataccaatgggcaccgttaatgactttggaagagcacttcatttaccaagcgatataatgggggcgattgatgtaatcattgatggtcacacaaccaaggtagatattggaaagatgaataatcgttatttcattaacctagctgcaggggggaaactaacacaagtatcttatgaaacaccaagtaagttgaaatcaattgtaggaccgttcgcgtattacattaaaggattcgaaatgttacctcaaatgaaagcagtagatgtacgtatcgaatatgatgataacatcttccaaggagaagctttactattccttttaggtttaacgaattcaatggctggctttgaaaaattagttccagatgcgaagcttgacgacggttatttcacgttaattattgtagaaaaagcaaatcttgctgaattgggtcatattatgacactagcgtctcgaggtgagcatacaaaacatcctaaagtcatttatgctaaagcgaagtctattaatatttcatcatttactgatatgcaacttaatgttgatggtgaatacggtgggaaattacctgcaaatttccttaatttagaacagcacatagaaatttttacacctaaagatgtatttaacgaagaactattagaaaatgatacgataactgatattacgcctgataagcaataa

SEQ ID NO: 4437 - DNA, 1371 bp, Staphylococcus epidermidis
ttggaaacaattaagaaaaacgaagttaaaacgggaaaggttattgatttaactcatgagggacacggagttgttaaagttgatcgatatccaatttttattcctaatgctttaattgatgaagaaattaaatttaaattaattaaagtgaaaaagaattttgctataggaaaattgatagaggtcataagtgaaagtgatgatagagtgacaccaccttgtatttattatgcaaagtgtggtggttgtcaattacaacatatgacatatagagcacaattggatatgaaaagagaacaagtagttaatctttttcatagaaaaggcccttttgagaatacggttataaaggaaaccattggcatggtcaatccctggcgataccgtaataaatctcaaattcctgtaggtcaaagtaactcgaatcaagttataatgggattctatagacaacgtagccatgacattatagatatggatagttgtcttatacaagatagacaacatcaagaagtaatgaatcgagtgaagtactggctcaatgaattaaatatatctatatataacgaaaaaacaaaaacaggtttaatacgtcatttagtagtaaggactggttatcataccgatgaaatgatggttatctttgttacaaatggagcaacatttaaacaatcagaactattagtaaacaagctaaaaaaagaatttccaaatataacaagtattaaacagaatataaacaatagccattctaatgtcataatggggcgtcaatcaatgactttatatggtaaagataaaattgaagaccaattaagtgaagtaacttatcatatttcagatttatcattttaccaaattaactcatcacaaactgaaaaactttatcagcaagctctgaattatgctcaattaacaggaaaagaaatagtattggatacgtattgtggtataggaacgattggtctatatatggcaccactagcaaaacatgtttatggtgtagaagttgttccgcaagccataaaagatgcggaagacaatgcgactaaaaaccaacttaaaaatacgactttcgaatgtggaaaagcagaagatgttatcttaacatggaaatcacaagggattaaaccagacgtagtcatggtagatccacctagaaaaggatgcgatgaaactttcttaactactcttttaaaattaaatccgaaaaggattgtttatatatcatgtaacccttcaacgcaacaaagagatgcgcaaatattggctgaacaatacgagttagtagaaattacaccagttgatatgttcccacaaacaactcatattgagactgtagcattatttgtacgtaaagaggaagagtga

SEQ ID NO: 4438 - DNA, 543 bp, Staphylococcus epidermidis
gtgcataaaatagatttatcaggcaacaaatttcaaatccaacgatttgttctgttgcaaattgtattggcgctatttacaatactatttacttataaatgggcttatcaaacaacgcatatcattgaacaaaatcttgtcatgaatcttatttttggatttgtaggtttcgcagtactagttattttgcatgagtttattcatcgtattttgttcattatattttctaaaggtgaaaaaccatctttaaaatatgataaaaacaaaattattgtacagttctctcagacttgttttcatcggtggcaatttacaattatcatgatagcaccacttgttatcataagtgcgaccttactagcacttattcaaatatattccttctcatctttaatctttatgtttagtatacatacaagttattgtatgatagatgtgtttttagtagcattggcattacaaagcaaattcaaatatatacaaacctatggagaaggtttgtatctttatcatcaaaagcctactcaaacctattatgaataa

SEQ ID NO: 4439 - DNA, 1071 bp, Staphylococcus epidermidis
atgactgaaagaagaattattcatatagatatggattatttttttgctcaagttgaaatgagagataatcctaaactaaaaggaaaacctgtcatcgttggcggtaaagcgagtcatcgaggcgtagtttctacggcatcatacgaagcaagagcttatggtgttcactctgctatgcctatgactcaagcacataagctatgccccaatggatattatgtaacaagccgttttgatacttatagagaggtatctggtcaaatcatgaaaatattcagaagctatacagaattagtagaacccatgtctttagatgaagcttatttagatattacacatttagtgagaccggatttaccagcatcaaccattgcaaattatattcgcagagatatatacgaagtaacacgtttaactgcgtcagccggcgtgtcttataataagtttttagcaaagttagcgagtggtatgaacaagccgaatggtttgacagtaattgattacaataatgtacatgaaatattaatgcaattagatattggagatttcccaggggtaggcaaagcttcgaagaaaaaaatgcatcaacatcatatatatacaggtcaagatttatataataaagatgaatttgaattaatacgtttattcggtaaaagaggacgaggtttgtataataaagctcgaggtatagaccataatgaagtaaaggcgagtagagttcgtaaatctgttggtactgaaaggacattttctacagatgttaacgatgatgatgttattttaagaaaaataagagagctttcaggaaaaacagcagaacgtttaaataaaattcaaaaatcaggtaaaacagtcactgtaaaaataaagacctatcaatatgaaacaatctcaaagcaaaaaagtttgagagatcctattcgtactgaaactgatatctataatattgcctatactttatataacgacttaaaagatccagagattccgattcgattaataggtgtaacggtcgggagtttagagcaatctgattttaaaaatttaacaatatatgattttatttaa

SEQ ID NO: 4440 - DNA, 555 bp, Staphylococcus epidermidis
atggtacaaaatgcatttgttgcactggactttgaaactgctaacagtaaacgaacaagtatttgctctgtaggtatggttaaagttattgataatcaaataacagagtcatttcatacccttgtgaatccttttgactactttactgaaacaaatattactgtacatggcatccatcccgaagatgtgcaagatgctcctggattcaagcatgtctatccatatatgctaaaatttattgatcaacttcctgttgttgcccataatgctgcttttgatatgaatgtgttacatcaaagtttaaaaagtcataatatagatacaccttctttgacatacttttgttcatatcaattagctaaacgaacaattaatgcatatcgatatgggctaaaacatttaatgaatcattaccatttagattttcacggtcatcatgatgcgttaaatgatgctaaagcttgtgcaatgattacctaccgcttattgaaacattatgatgatcttcaaagcatgttgagtatatatggaaaaaatctcaaagataaaggctga

SEQ ID NO: 4441 - DNA, 501 bp, Staphylococcus epidermidis
atgttaagtaaagaactattagcagctttaaatgaacagatgaatcaagaatattttgcagcgcatgcatatatggcaatggcagcatactgtgacaaagaatcttatgacggatttgcaaatttttatatagaacaagctaaagaggaacgtttccacggtaaaaaaatctatgactatatcaatgatcgtggcgaacatgccatctttgatacaattaaagctcctaaagtagaattttcttctattttagaaacatttaaagatagtttagctcaagaacgtgatgttactcaacgtttctataatctatcagaattagctcggaatgataaagattatgctacaatttcatttttaaattggttcttagatgaacaagttgaagaagaatctacatttgaaactcatatagattaccttactcgtattggcgatgattgtaatacactttacctatatgaaaaagaattagcagcgcgttcattcaacgaacaataa

SEQ ID NO: 4442 - DNA, 1314 bp, Staphylococcus epidermidis
atgagacaatggactgcaacccacatggctaagttagcaaggaaagcaagtatagctgtaggtaaaaagggtacagacttgccgggacagattgcaagacgtgtggatcataatattttaagaaaattagctaaacaagtagatgacattgtttttataagtgggactaatggtaaaacgactacatctaacttaattggacatacattaaagaaaaatcaaataaacattattcacaataatgaaggagcaaatatggcagcagggataacttctgcttttattatgcaaagctctaagaatactaatattgcgataattgaaatagacgaaggatctattccacgtgttttaaacgaagtcacaccttctatgatggtgtttacaaatttctttagagatcaaatggatcgatttggtgaaatcgatattatggttgataatattgcaaaatcaataagtaacaaagggataaaattattattaaatgcagatgatccgtttgtgagtcgcttgaaaattgcaagtcattccattgtgtattacggaatgaaaaaatttgcgcatgactttgaacaaagtacaatgaatgaaagtaaatattgtcctaattgtggacgattattgcaatatgactatatacattataatcaaattggacattatcattgtgagtgtggatttaagcgagaagaacctacatatgaagtgtcatcatttgatgcttcaccattcttaaaaatgataataaaccaaagtgagtttaatatgaaaattgcaggagattttaattcttataatgcaatagcagcctataccgtattaagagaattaggattaaatgatgatgcaatacgcaaaggatttgaaacatatacgtctgataatggtcgcatgcagtatttttcaaaaaataagaaggaagctatgattaatctagcaaaaaatccagctggaatgaatgcaagtctatcagtaggcgagcaaattgatgataaaaaaatttatgttattagtcttaatgacaacgcggcagatggtcgagatatttcatggatatacgatgcagactttgaaaagctagctacccaagatatcgaagctatcattgtaagtggtacgcgtgctgaggaactacaattacgtctcaaacttgctgaagttgaagtgcctattaaggttgaaaaggatatctacaaagcgactgcattaactatgaaatacagttcatttacggtagcaattccaaactatacatcattaacaccaatgcttgaacaacttaatcgctcatttgaaggagggcaatcgtaa

SEQ ID NO: 4443 - DNA, 726 bp, Staphylococcus epidermidis
atgaatgaactaacggtttatcatttcatgtcagataagcttaatttatacagtgatattggtaatatcatggcattaaaacaaagagctaaaaaaagaaatattaagataaatgttaaagaaatcaatgagactgagggagtcacatttgatgattgcgatattttcttcattggtggtgggagtgatagggaacaagcgcttgccacgaaagaattaagtaaaattaaaacttctttaaaaaatgcaattgaagatggtatgcctgggttaactatatgcggtggttatcaatttttaggtcataagtatattactcctgatggtaccgagttagaaggattgggtgttcttgacttctataccgagtcaaaaaaagaacgcttaactggagatatcattatagagagtgatacttttggcacgattgttggatttgaaaatcatggtggtagaacatatcatccgtatggaacattaggccgagtaacgtatggttatggtaataatgataacgatcgaaaagaaggtatacactataaaaatctattaggttcttatcttcacggcccaattttaccaaaaaatcatgaaataactgattatctacttgagaaagcatgtgaaagaaaagggatactatttgagcctaagaagatcgataacacagaggaagaagctgctaagcaagttctgattaaacgtgcaaaagaaaataaaaaataa

SEQ ID NO: 4444 - DNA, 537 bp, Staphylococcus epidermidis
atgaagatttttaaattgacgtcattgacactagctgctttaacgttagcctttccgttttcacatgtcgcacaagcacatacttacttagaaaagcatcaccaaacaaacgaaaccaaacaatctcatagcttttctttagaaggtgaggctggtgaaaatccaacatttttaactcaacctcaatttattaattctctagataatggtcatttaaatattaatggttatcagattcaacaagatgatactaatgatattgaatacaaaaaggtttatgatcaagaaattagagctacaagcaatcatacagcgataagtgtacgtttcagtattaataatcaatcactatcacttgaaagtatgaaagatgcatacccaaatgagagattgaatcatattccacatacaagcaatgattcacaatatccagaagacggtatatatgtctatcacggtaaaatgattaaattacaatacaaagtgacacatggatttgttacgagcgtgacgataggtgaaggtgtagacgaatag

SEQ ID NO: 4445 - DNA, 987 bp, Staphylococcus epidermidis
atgaatgataaatggtatagacatataattggagcgcgaactattaaaactggtttggctactttttttacgtctttattttgtatgttgttaaacctcactccaatttttgccatacttactgcaattgttacaattgaacctactgctaaagcatcattaaaaaaggggtataaaaggttgccagcaacagttattggtgcgttatttgctgttgtctttacatatgtcttcggtgatcaatcaccgttaagttatgctttaagtgctacatttaccattctgatatgcactaaacttaatttacaggtaggaacaactgtcgcagtattaacttccgttgcaatgattccaggtatacatgaagcatatgtgttcaatttcttttcacggttacttacagctcttataggacttgttacggctggattagtcaattttatcatcttaccacctaagtattatcatcaacttgaagagcaattagcccttagtgagaaaaaaatgtatcgtttattttatgaacgctgtaatgagttattattaggaaaattcagctcggaaaagactagtaaagaattatcaaaattaaacattattgctcaaaaagttgaaacattaatgagttatcaaagagatgaacttcattatcataaaaatgaagataattggaaattattaaatcgccttacaaatcgcgcttataacaaccgtttatttatttcacatttatctaacattatttatttacccaaacatacgtctattgcttttgatgctaatgagaagatagcattgattaatattagtaatagtattaatggcatcattcaaaaaggaagctttgcacgtcaaaaaaaatctattgcaacactaaagtcttctgttaaacagatggatgagtttgaccaaaatcaaatgaaaagtacactcatatatgaaattctactcatatacaaaattttagattcacgttatgcaaaataa

SEQ ID NO: 4446 - DNA, 756 bp, Staphylococcus epidermidis
atgattgttaaaactgatgaagaattacaagcgttaaaagaaataggttacatttgtgcaaaagtcagagatactatgaaagaagctactaaacctggagtgactacccgtgaattagatcacattgccaaagatttatttgaagagcatggggcgatatcagcgcctattcacgatgaaaacttcccaggtcaaacttgcattagtgttaacgaagaggtcgcgcatggaatccctggtaaacgagtaattcgtgaaggtgacctagttaatattgatgtatcagctttaaaaaatgggtactatgctgacactggaatttcatttgttgtagggaaatcagatcaaccacttaaacaaaaggtttgtgacgtagccacaatggcttttgaaaatgctatgaaaaaggtgaaaccaggtacaaaattgagtaatattggaaaagctgttcatgcaactgcacgccaaaatgacttgactgtgattaaaaatttaactggacatggtgttggacaatcacttcatgaggcacctaatcatgtcatgaattattttgatcctaaagataaaacattattaaaagaagggcaagtcattgcagtagaaccattcatatcaacacatgctacatttgtaactgaaggtaaaaatgaatgggcttttgaaactaaagataaaagttatgtcgctcaaattgaacacacggttatagttacaaaagatggtccgttacttacaactaagattgatgattaa

SEQ ID NO: 4447 - DNA, 387 bp, Staphylococcus epidermidis
ttgaatattttagatttatatttacaacaatttataaaacgaattactaaaaaaagtatcaatgactataaaatgtcattagataagcaaattaaaaatattgatacttatattaattatttaagagaaaaaagattacaattaaagaagttaattgacaccctcacgctctcattagaaaataaatatatagatttagtaaacaatcaagcaatctattgtgctgaggaaatacatgataatgatattgatatgattaaatcacaattaaatgatgctgagtcttattatgcgagaattgaagcggatataaatttacaatctagaatgaaaataactactgaagaagcattccactttatatatcatatgagtgctgtagcatag

SEQ ID NO: 4448 - DNA, 702 bp, Staphylococcus epidermidis
atgacacgcaaatatatatcaactgaaatgttgattatttttactgctttaatgattattgctaatttttactatatattttttgaaaaaattggctttttactagtactcctattaggatgtgtacttgtatatgtagggtatgtgtattttcataaagtaagaggactactatctttttggataggaaccttattaattgcttttacacttttgtctaataagtacacgattattattctatttatatttttaattgtagtcatcatacgttatttggtttataagtttaaaccattaaaagtgattgctacagatgaagacatcacatcacccatttttattaagcaaaaatggtttggtgaacaacatacaccagtgtatgtatataaatgggaagacgtacagattcaacacggtataggagacatacacattgatatgacaaaagcggcaaatattaaggaaacaaataccatagttgtgcgtcatattttaggtaaagtacaagtagttgtacctcttaattataatataaatttacatgcgactctcttctacggcactgcttatgtgaacgataaatcttataagattgagaataaccatgttcaaattgaagaaaaaacgaaagatgataattatactgttaatgtttacgtttcatcattcattggagacgtagaggtgatttacagatga

SEQ ID NO: 4449 - DNA, 1047 bp, Staphylococcus epidermidis
atgaatcactacataagagctataggctcaatgcttatattagtatatagtatgcttattgcttttttatttattgataaagtgtttgtaaatattatcttttttcaggggatgttttatacacaaatatttggaatacctgtttttctatttttaaatttattaattgttcttttatgtattatagttggatctgttttagcttataaaattaatcaacaaaatgattggattatttcacaaatagaaagatcaatagaaggacaaacagtaggtatcaatgatcaaaatatcgaattatatacagaaacgatagatatttatcatacactagttccattaaatcaagaattacatcgacttagaatgaagactcaaaatttaactaatgaaaactacaatattaatgatgtaaaagtcaaaaagattatcgaagatgagcgacaacgacttgccagggaattacatgattctgttagtcaacaattatttgctgcgagcatgatgctatcggcgataaaagagtcgaaattagaaccacctttaaatcaacagataccaattcttgaaaaaatggttcaagactcacaacttgaaatgagagctttgttattacatttaaggccgataggtttaaaagataagtctttaggtgaaggaattaaagatttagtcatcgatttacaaaagaaagtaccaatgaaagttgtgcatgaaattcaagattttgaagtgccaaaaggcattgaagatcacttgttcagaattacacaagaagctatttcaaatacattgagacattcaaatggtacaaaagtaactgtggaattatttaatcaagaggattatcttttactaagaattcaagataatggaaaagggtttaatgtagatgaaaaatttgaacaaagttatggtttgaaaaatatgcgagaacgagcgttagaaattggtgcgacgtttcatattgtatctttacctgattcaggtacacgaattgaagttaaggcaccattgaataaggaggagaattcaagtggcgattaa

SEQ ID NO: 4450 - DNA, 630 bp, Staphylococcus epidermidis
gtggcgattaaagttttatttgttgatgatcatgaaatggtaagaatcggtatttcaagctatctttcaactcaagaagatatagaagtagtaggtgagggtgcttctggtaaagatgctatcactaaagcgcatgagctaaaaccagatttaatattaatggatttacttatggacgatatggatggtgtagaagcaactactgaaataaaaaaagatttacctcaaattaaagtagtcatgttaacaagctttatagaggataaagaagtttatcgtgcacttgattctggagtagatagttatattttaaagacaacaagtgcaagtgatatagctgatgctgtgcgtaaaacgtatgaaggtgaatcagtatttgaaccagaagtgttagtaaaaatgcgcaaccgtatgaaaaaacgtgccgagctttatgaaatgttgacagaaagagaaatggagatcctattacttatagctaaaggatactctaaccaagagattgcaagcgcctctcatatcaccatcaaaacagtaaaaactcatgtaagtaacatactgagtaaattagaagtacaagatcgaacacaagcagtaatatatgcgttccagcataatttaattcaataa

SEQ ID NO: 4451 - DNA, 1179 bp, Staphylococcus epidermidis
atgtcaaaaaaagagaaaacaacttctaaatatcttaattcaatagaagataaagagcataaaaagaataaaaaaatagaagttgaccgtacatatatagaacctcaagaattccaatctaagaaacctaaaaaaaagaatcaaatattttttgtttcccggctgaataaaccagcaaaatacaccgaaaactctaatttcttttcttacctgatttataggataggtaaagatgacgctgcaggtttagcagcacagatgacatatcattttgtattagcacttttcccaatgctaatttttttacttacgctacttggtcaatttatcacgattgatgctaatcagattaatcaaaaagtaagtcaatatgtccctgatcaagaaacagctagcatcgttggtggaattgttaaagatatctctgacactgccagtggaggtattttgtcagttgggttaattttagctatttggtcagcatcaaatggaatgtccgctattattaactcatttaatgttgcttatgacgttgaggattctcgaaacggtgtagtagttaaattattaagtattctatatacacttgttttaggtgcagtatttgttgttgctgtagtacttataacactaggtccagtcattaataaatttttatttggaccactaggtattgataatcaaattgaatggatttttaatttagtacgaattgttattccattgattattattttcatcatatttactgtactttattcagttgcacctaatgttaaaacaaaattacgttctgttattcctggcgctattttcacttccattatttggttactagggtcctttgcattcggttactatatttcaaactttagtaactattcgaaaacgtacggaagtttagctggtattatcattttattcttatggttgtatatcacaagctttattattattatcggtgctgaaatcaatgcaattattcaccaaagaaaagtcatagctggtcacacacctgaagaagccgctattaaacatgatgataacaatgaaaatcactataacgaaaatacgacttatgaatactatgaagatagcaaagatgtagatatctctaatgaagatgacacgtataatatcaatcatcaatctaaagaagaacatcacacaagcgactga

SEQ ID NO: 4452 - DNA, 285 bp, Staphylococcus epidermidis
atggaaaataaattagtacctggtattttaattggtgccgtaattggtggcgcggctgctcttgctgataaatctacacgtcattctttaaaacaatcattcaaagacatcaaagaaggaaatcgtacacgtaaaccttcaaaaataagtagcatcaaagatgaagtaatgtattggaaagatacattagatgaaatacgtcgtaataatcctgaattagaacgttctattaaagatgccaaagaaacttttgtaaatcgtaaaaatcaacgcttaggtaaataa

SEQ ID NO: 4453 - DNA, 465 bp, Staphylococcus epidermidis
atgatacatgtagcatttgtatgtctcggtaatatatgtcgttctccaatggctgaggctatcatgagacaaagactacaagaaagaggtatttcagatataaaagttcattctagaggaacaggacgttggaatttaggcgaacctccacataacggaacacaaaaaattctacagaagtaccatattccttatgatggtatggtgagtgaacttttcgaacctgatgatgattttgactatattattgctatggaccaaagtaacgtagacaatatcaaacaaatcaatccaaatttacaaggacaattgttcaaattgctagaatttagtaacatggaagagagtgatgtaccagatccatactacacaaataattttgaaggtgttttcgagatggtgcaatcatcttgtgataatttaatagactacatcgtaaaagatgcaaatttgaaagagaggtaa

SEQ ID NO: 4454 - DNA, 216 bp, Staphylococcus epidermidis
atgtcattatctaatgaagaaatgatttctaatataagacaaaaattaaatattgtaaatcaagcattacttaatccggaaaaatttaaatcaacacctcatcaagacataagcgaaatatatgacttcgtaatgtctaaagattcattctcgcctagtgaggttacggctattgctgaccatttaggacagcttagacaagatatggaggattaa

SEQ ID NO: 4455 - DNA, 1242 bp, Staphylococcus epidermidis
atgacgaattatcataataagttaaaacaatatgcagaattattagtaagagtgggaatgaatgtacaaccacagcaacctgtttttatacgttcatctgttgaagcgttagaattaactcatttaatcgtcgaggaagcatataaagcaggggcagaagatgttcgagtgagctacacagacccgaaattaaaaagattaaaatttgaaaacgaatcagttgaacactttgaaaaacaagaactcaaacaatatgatattgaagagcgtcttgattatgttaatcgtggcgcagcgaacttagcgctcattgctgaagatccagagctattaaatggaatagatgcgcataagttaaaagcgtatcaaactgtatactcaaaaggatttaaaccatatatggaagcaagtcaaaaaaaccaatttccatgggtagtggctgcgttccctactagggattgggcacgtcgtgtctatccagagttggatgttgaatcagcatatattaaattcattgatgaagtatttgatattgttcgtgtagatggacaaaatccaattgaaaattgggaaaaacacattaaagatttaagtgttcatgctaaacgattacaagagaaaaactatcaagctttacattacatatcagaaggcacggatttaatagtagggttacctaaaggacacatatgggaagatgcaacaagttatgtaaatggggacggtcaaccttttattgctaatatccctacagaagaagtttttacagctccagatagaaacaatgttaatggatatgtaacaaataaattacctttaaatcttaatggtaacattatagacgggtttacattgacttttaaagatggtgtgataattgatgtcaaagcagaaaaaggtgagaaattacttaaagatttaattgcaactgatgaaggtgcttgtagattaggtgaagtagcactagtgcccgatgattcaccaatatcaaatagacgcacaatattctataacactctttttgatgaaaatgcatcatgccacctagctatagggtcagcttatagttttaatatcaaaggtggtactgaaatgactacagaagaaaaaattgcaaatggactcaatgattccaatattcatgaagatttcatgattggtagtcctgatttaacaatttatgggatattgcaagatgaaacaaaagaattagtttttaaaaatggaaattgggctaaatag

SEQ ID NO: 4456 - DNA, 531 bp, Staphylococcus epidermidis
atggctaacacaaatagaaaaagcaaaaaaatgtcagatgctaaatgcatcaaaacaagacaggtatatccacaagataccaatcatcatcacacaatgttcggtggaactttaatggcaaatattgatgaaatagctgctattactgctatgaagcacgctggcaacccagttgttactgcgtcaacagattctgttgactttttaagacctattacaactggagatattttatcatatgaagcaatggtttcttatgcaggaacaagttcgatggagatatgtgttcaaattgttattgatgatgtttataaaaacgagcgccacttggctgctttaagttttttaacttttgtagcattagatagtgatggaaagccaacatcagtacctgatgttgaacctgaaacatctgtagaaaaatggttccatgaaactgcgccacaacgtgttgctagacgtaaagaacgtcgtaaagaaagtatagatacaattgaatatttatctagagttagacatatcgaaaagtaa

SEQ ID NO: 4457 - DNA, 1143 bp, Staphylococcus epidermidis
atgataatatcaaacaaatcccctatttctatcaacaatgatccatgggaagcatataatgatattttagaacataaccaattaacattaagtaatatagaatttacaactacaaatttatgtaatatgcgttgcagtcattgtgcagttggttacactttacaaactaaagatcctgatcctcttccaatggatatcatctatcgacgtttggacgagatacctaacttaagaacattgtctattacaggtggagaaccaatgttttccaaaaaatcaatcaaaaacgtcgttaagcctctacttaagtataccaaacatcgtggtatatatgttcaaatgaattcaaatttaactttacctcaagaccggtatttagatattgcagaatacatagatgttatgcatatttcacataattggggaaccattcaagagtttactgatgttggctttggtgcaatgagaaaacaacctcctctaaaagccaagttgaaattatatgagcaaatgcttgaaaattccagcactttatcagaccaaggcatgttcgtatcggcagaaacaatgcttaatcaaagcacagtcccttatctaagtaaaatacataacgaagtggtaaatgacatgaaatgtagccgtcatgagattcacccaatgtatccatctgattttgctagccaattaaatgtattatctcttaaagaaatgaaagaagctattcatcatttgttagatatacgtgatgaaaacacatggatgttgtttggtactctacctatctatccatgtttaaatgatgaatatgatcaacatttattgcaacgtttaagaaaatcgaagaatgttacaatgagaaatgaccctgatggtcgtagccgtttgaatgttaatgtatttactggcgatgttattgtgactgattttggtgatgaaaatggtacaatatctaatatacaaaaggataaattgacagatgtattcaaccagtggttaaatactgaccttgcacaatctttaaattgtcattgtgcagaatatcaatgtctaggtccgaatgttttagttaaaaatatgtattacccaaatactgatttcaagaaaaaagaacaaatcatgcatcaacatcaaatattttcataa

SEQ ID NO: 4458 - DNA, 162 bp, Staphylococcus epidermidis
atgagtgaacagcaaacgattgatcaaattaaaacacgattaaacaaatttattgaagacattgatcatgtaaatccggatgaggtacgtgtagaagatattgatgagtggattggtttacttgatcagttggaagaaaaagtgaaacaagtttcaaaataa

SEQ ID NO: 4459 - DNA, 135 bp, Staphylococcus epidermidis
ttggggccccaacaaagagaatttcagcgagaaattcaacagacaaagcaagttggggttggggccccaacaaagagaatttcagcgagaaattcaacagacaaagcaagttggggttggagaatgacaatgtaa

SEQ ID NO: 4460 - DNA, 519 bp, Staphylococcus epidermidis
atgacaaaaaaagtagcaattattctagcagatgaatttgaagatatagaattaacaagtcctaaagaagcattagaaaatgctggatttgaaacagaagtgattggtgatacagctaaccatgaagttgttggtaaacacggtgagaaagtcactgtagatgttagcattgctgatgctaaaccagaagattatgatgcattattaattcctggtggattttcacctgaccacttacgtggtgatgaagaaggtcgctatggtacttttgctaagtatttcactaaaaatgatgttccaacatttgcaatttgtcacggaccattagtattagttgatactgacgatttaaaaggacgtacaatcacgggtgttattaacgtacgcaaagatttatcaaatgctggtgcgaatgttgtagatgaatcagtagtggtagacaacaacattgtaacaagtcgtgtacctgatgatttagatgacttcaatagagaaattgttaaaaaattagaagcataa

SEQ ID NO: 4461 - DNA, 810 bp, Staphylococcus epidermidis
atgaaaagaagcgataaatatacggatgattatattgaacaacgttatgagtctcaacgacctcattacaatacatattatcaaccaatagggaaaccaccgaaaaagaaaaaaagtaaaagaattttcttaaaagcaattatcactatattaattttattgattatattttttggtgtcatgtactttatttcttcaagagcaaatgtagatgatttaaaatcaattgaaaataaaagcgattttgttgctgccgaaaatatgcctaactatgtaaaaggcgcatttatttcaatggaggatgagcgtttctataaacatcatggctttgatataaaaggaacgacaagggcattgttttcaactattagcgatagagatgtgcaaggtggaagtacaattacgcaacaagttgtaaagaattattattacgataatgaacgatcctttacaagaaaaatcaaagaattatttgtagcgcgtaaagttgaaaagcaatacagtaaaaatcagattttaagtttctatatgaataatatttattatggtgataatcaatatactgtagaaggtgctgcaaatcattattttggtgtaacggtcgataaaaacaattcaaatatgagtcagattagtgtgttacaaagtgctatattagcaagcaaagtaaatgcaccaagtgtgtatgatgtaaatgatatgtcgaataattacatcaatagagttaaaaccaatttagagaaaatgaaacaacaaaattttattagtgaatcacaatatcaagaagctatgtctcaacttggaaattaa

SEQ ID NO: 4462 - DNA, 804 bp, Staphylococcus epidermidis
atgccaaaggtaactaaaatagaagtacaaaaaaagaataaagaacgctttaatctctttttagatggagaatttgaaatggggatagatattgatacattagttaaatttaacttaaaaaaagatcaaatacttgaaccgtcagatatgcagaatattcaagaatatgatcactaccgtcgaggtgttaatcttgcaattcaatacttgtcttataagaaacgtactgaaagagaagttatacagtatttagaaaaaaacgatattcaaagtaatgctattcaagatgtcattgactattgctataaggaaaaatttattgatcatgaagactacgcagaaagtttaaaaaacaccatgatacacactacagataaaggaccagaaatatatagacaaaaactctatcaattaggtattgaagttacgattattgaaaaatatgtcgaagcatatgaacaacaacaaccattagatgacgtcatcaaagttgctaaaaaagtgatgaagtctaaaaagggtcctgaagcaaaggtaaagcaaaaagtaacacagtcacttctccaaaaaggatataagtttgaaacaattcaactagttatgaatgaaatagatttttctcaagacgaagaaacattagaccatttattgcaacgtgatttagagaaagtctataataaaaattgtaaaaaatatgacagtgataaaagtgttattaaaaccatagaggcactcatgagaaaaggctataattatgataaaattaaatctaaattagaagaaagcggtatatctaatgaataa

SEQ ID NO: 4463 - DNA, 315 bp, Staphylococcus epidermidis
atgaataaaaagaaaatgagtgaaatgtccgagcaagaactaagacatgaaatacaattatttaaagaaaaaatgcgtaaagcagagatgaatggcattatgaatgaatatgatgtttatcaaagcaaagtgattatagcagaaagctatcttgtggatcgcaataaaattgaacctggaaaaatctataaactcaatgatggtagtaaacagtactttaaagtagaacgactcaagggtgtatttgcatggggatttagaataaacagtagtgaacctgaggaaggtctaccattagcattattaaaattttag

SEQ ID NO: 4464 - DNA, 1518 bp, Staphylococcus epidermidis
atgggaagctcaatagttttaaaattactcaaggtaacacattactatagaaatcataattcaaaaaaatggtatcgaccattaggttatgatgctgaggacatcaacctaaataatatttctttgcatatatatcaaggtgaagcattaggtataatcggagaacctggatcttctaaaactttgattggtagaattttaagtggttcagtgaaacctgataaaggtaaggtcgtccgaactaaaaacttgtatttcggtgatattgatgatcgaaagattaataatttaactgtgagccaatatgtgagcgaactcgtacaactttttccttatgaagtaactgagcataaagttgaacaaattattcaatgggcacatttaggtgattacatagaagaaaaggtttctaatttaagcgaaaaatcatacgcacaacttttacttagtattgcacgttcttcaaaaaacgatattatcattttaaatcacgttttatcacatttagatgaaacatttatagaaagagctacagttttatcaaaagattatattgaagctaataaaacactagtcttaattgataatgatgtagaaaagataagcaaaacaagtaactacataacatgggtatcacacggccagatacgcaaggaaggttctctaaatcaggtattaccaacttttagagaacatgaaaaagatcgtactagtttaaaatcagaaatggaaattgagaactttgattatgattggaagcagaatcgctctcgtattcctgaaatgacttataattttaaaagaatagaacgttataatcatgctaagccaccaagatttctagtgagattttggaccttatttgtcagctttttgattgggcttgttttaatgagcgtacttttctttaacaacttaggtatggtcaaactagggaacattaatacccaagcatccatacagaatcagaataaagatacttacgaagaaaaacttgcatatggattagcattagatggatcagttactttaaacgggtctaaagatttaaaagtacctaagtatagtttaattacaattactggagaaaataacaaaagataccgggtcgaaatgaatcaaaagagatatagtgttagtaaaaatcaagtgttttatttcaatccagctgggttatacgaatctcatacttttaagaaattgtcaccttatataaaatcaaattatagtacttacgtagagtactttaacagtcacttacatcaaaaacatgataaagtaacagaaacgcttagacctgataaagataaaaagtatgttgtaccgatcacgcaacaacctataaaaatgatatttggtgataatgataaactgtctggatttgttattccaatgacaaataaaacggaattgaaaaaagcatttaatatcacgaaagatgtatggattacaaaaagtggaagcggttattttatcgctgatatgaaagaagaaaaatggatttatattgaattgtag

SEQ ID NO: 4465 - DNA, 831 bp, Staphylococcus epidermidis
atgatagataatttaattgtatatattaaaaacttaccacatctttttagtttttgtactcaaaggcttaagcaaacatggaagtggtttgcaattagcctaattataggactagtaattattctagcattagagggattttttaatttcaaccatactaccgatattgttcaagtgcgttggttattcagaatttcatcattcatcatattcagcattattatacaatctatttatatagcttataagtactatatcagagattttgttgtcatgaagtcatttcatatatctgcagttacacctactatagttatagcgatgttaggtttaataacaatacttattctggggatagttattattattcttaagcctgtgaattttgaagcatcaatactttcatttttatattatttagtaattttagcaatttttatcagtgtgacttcgataatattgggcttgctgagttatgcaattaaacatgtaaaactgatatttattatagtaagtgctatcagcttctttatggttccaattacatacatccctaatacaaatttaaatgtggttaatcatattatgatgttaaatcctctgtattatttcgtaaatggtagttcgcaagctatagtatttggtacaatcagcatgagcaatttaccttatcatttatatattattattttaattggaatcatctgtgtgattaattatgcgcttgtgcgtcacatagcatttgataaatatcaaaaccaatctaaccaaaagaattattcaaaaaagaataaagaaaaggaatgtttaaacgtaaaattagataagtaa

SEQ ID NO: 4466 - DNA, 975 bp, Staphylococcus epidermidis
atggacacagccacacatatcgttatgggtgtgggtcttacagctttagcaacgcaagatccagttatggcagaatcatttgctgctactgcgacgactttaatcgcaggttctttaataccagacggtgatactgtattgaaattaaaggataatgcgacatatatttcacatcacagaggaatcacacattcattaccttttacaatattatggcctatattaattacattttttatatttgtaatatttagccaaacgaatcctttacatgtatggttatgggcacaactagcagtgtttttacatgtctttgtagatatttttaattcttatggtacacaagcattacgtcccataactaacaaatggattcaattaagcgtgattaatacctttgatccgataatattcattattttaagtaccggtgtcttattgtggatattaggtattcacccgtatattgttttctttccaattatattaattctcataggctattatattgtaagatttaagatgcaagcagcaattagaaaacaagcactccaaaaaattgagcaatcgcatacaccagtaaaagtattcgtagctccaacaataaaatttcatgtatggcgggtcgcaatacaaacagataagcatgattatgttggtgtttccaaatggaaaaatgtagatttcactgataaagttaaacgccagtctatgactcctgattcgatattatggaaagttaaaggtaataaagatatatatacatttttaaacttttcttcaatttaccgttggcaaactacaccattagatgatggcacaacagaaattcgacttatggatttacgatacttaaataaaggtcgttattcttttgtagctattgcacatttaacacttgaaaatgaaattgatcactcttatattgggtgggtatttagcgaagataaattacaacgtaaattattttcataa

SEQ ID NO: 4467 - DNA, 1044 bp, Staphylococcus epidermidis
atgtatctagaaaattcttttaaaaaagatattgaagattggtttcataaaaatcaaagagatatgccttggagagaaacgactaatccttattatatatggctaagtgaagtgatgttacaacagacgcaagtaaacactgttatcgattactactatagatttatacataggttccctacaatacagtcgttgagcgaagctaatgaagatgaagtgctgaagtattgggaagggttgggctattatagcagagcgcgtaatttccatactgccgtaaaagaagttaataataattatgatggtgaggtaccatacgatcctgaatcatttaaaaagttaaaaggtgtgggtccatatactcaggcggcggtcatgagtatagctttcaatcatcctttagcaactgtcgatggtaatgtttttagagtatggtcacgattaaacaatgactatcgtgatataaagttacagtccactcgaaaagcattcgaacaagaattacacccgtatgtgttgaaggatgcgggaacatttaatcaagcaatgatggagctaggggcgttagtatgtacgccaaaatcaccattgtgtttgttttgtcctattcaagaacactgtgaggcatttcatatggggactacacaagaattaccagtaaaaaccaaaagtttaaataagaaaaccattgagcaaaaagtttttcttattcgtaatgataatggtcaatatttacttgaaaagcgtaaagaaaaacttcttaatggtatgtggcaatttccaatgagagaacaaacaaatgcaaacgatgtgatatctgatgatttaggaaaaagtatcgaaacaattaacgaaccagtatttaaattaaagcatcaatttacccatcttacatgggaaattaaagtatacaatgttacagcacctcttaatataaaggaaaatgatttacctaaacaaatgacgtggtttaatttagatgatagggagcagtatacatttcccgtaccaatggataaaatatataagtttattgaaggttaa

SEQ ID NO: 4468 - DNA, 543 bp, Staphylococcus epidermidis
atggtaaaggaatccatacctaaagaaggagaaaacattaagattcaaagttataaacatgatggtaatattcatcgtgtctggtcagaaaccacaattttaaagggaacggaacatgtgattattggtggtaatgatcacactttagtaactgaaagtgatgggcgtacatggattactcgagaaccagcaattgtgtactttcattctgaatattggtttaatgttatttgtatgtttagagaagatggtatttattattattgtaatttatcttcgccttttgcatgtgacgaagaagcgttaaaatatattgattatgatttagatatcaaagtttatccgaacggaaaatatcatttacttgatgaagatgagtacgagcaacatatgaaccaaatgaattatccacacgatatcgatattattttaagaagaaatgttgatattttacaacaatggatagaacaaaaaaaggggccttttgctcctgactttataaaggtatggaaagaacgttataaaaaaattagagattattaa

SEQ ID NO: 4469 - DNA, 1737 bp, Staphylococcus epidermidis
atgataaaacgatatttaaagtttgtaaaaccttatagatatcgtattattgcaacaattatagtagggattattaaattcggtattcccatgctcatacctttattgattaaatatgctatagatggcgtgattaataatcattcgcttacaaatcaagaaaaatttagtcaccttggtgtagcaataggaattgcattatttattttcttaattgttcgcccgccgattgagtttattagacaatatttagctcaatggacaagtaataaaatactatatgatattcgtaaacaattgtataatcacttgcaagcactaagtgttcgcttttatgcaaataatcaagtcggtcaagtcatttcaagagtgattaatgatgtcgaacaaacaaaagactttattcttactggattgatgaatatctggcttgactgtataacgattattatcgcactttctattatgttcttccttgatgtaaaattgacgtttgctgcaatttttatttttccattttatattttaactgtttattttttctttggaagattacgaaaacttacacgtgtgcgctcacaagctctagcagaagtacaaggtttcttacatgagcgggttcaaggaatgtctgttattaaaagttttgctattgaagacaatgaagctaaaaattttgataaccataacaagaattttttacaacgagccttccaacatacaagatggaacgcatattcttttgctgctattaatactgttacagatttaggcccaataattgtgattggcgtgggttcatatttggcaattacaggatcgattactgtcggaactctagcagcatttgtcggttatctagaacaattatttggaccacttagaagactagtatcttcatttactacacttacacaaagttttgcatctatggacagagtatttcagttaatggatgaggattacgacatcaaaaatggcattggagcacagccaattaaaatcagtaagggtcaaattgatttaaaacatgtgagtttcaaatataatgaaaatgaaaaagaagtattacacgatataaatttaacaattaacaaaggcgaaactgtagcatttgtaggtatgagtggtggtggaaaatctactttgattaatcttataccaagattttatgatgttactcaaggtgaaatacttatcgatcatcataatgttaaagatttcctaactggtagtttaaggaatcaaataggcttagtacaacaagataataatcttttttctgatacggttaaggagaatattttgttgggtaggcctgatgcgactgatgatgaagtcgtagaagctgcaaaaatggcgaatgcccatgattttatttcaaatttaccgaatggatatgatactgaagtaggagaacgaggagttaaattatctggtggacaaaaacaaaggttgtcaattgcacgtatctttttaaataatcctcctgttttaatattagatgaagcaacaagtgcattggatttagagagtgaagctattattcaagaagcacttgatgttttaagtaaggatagaacaacattaattgttgcacatcgtctatctaccattactcatgcagatagaatagttgtaatggaaaatggacgaattgttgagactggcacacaccaacaattaattaataaacgcggtgcttatgagcatctttatagtattcaaaatttataa

SEQ ID NO: 4470 - DNA, 1095 bp, Staphylococcus epidermidis
ttgagacttggagctcggattttcaaaactggtatagccattatcttagctatgtctatcgcttctttacttcctgataatattggtctaaaaacgttagcaggtgtcagtgcagtagttgccatgcaaccgagtgtttatcgctcaatcaaaactgtttctgaacaagctattggtaatgtgattggtgcattacttgcagtaacaatggtaacgatattcagtaataatttcattatcatgggcgttaccgttattttactcattgcaattttgttccaatttaatcttgcccatgtagcaacacttgcaagcgtaactgcacttataattatggggcaacacactggttctttctatgttgccgcattttttagatttgtactagtgatgattggtgtattgagttcttctgttgtcaatctaatttttttacctcctaagtttgaaacaaaaatttattataattctatgaatatttcttctgatatatttgtttggtttaaacttgtactcaatgacacatcagaatttcataatattaaacaggatggtgatcaactaaactcacgcatcaataaattagaaaagattttcgactattacaatgaagaaagaccattaacaaaaaaacatatttatcaacagaatagaaaaaaaatactatttagagaagtagttagaacgaccagacaagcatatgaagtgctaaaacgaatgtcacgatatcaaaatgatttatatcaactaaataatcaattacttttacaaatcaaattagaacttgattcattagttactttacatgaacaaatatttaagagtctatcaaaaaaagctagatatgatgtcactcaattagattatgaagttgacaatcctcagaagaaaaacttgatggatgcttttcagcaagaattaattaaaaacccacatcagacgcaatattcttatagcaatatgatgcaaattattgctgaaattgaagaatacagatatcaacttgaacacttagatagaatccgtttaagtttctttacctatcaccgttctgatactgatatagacatttcagatgaggactttgacttataa

SEQ ID NO: 4471 - DNA, 1290 bp, Staphylococcus epidermidis
atgaaatttactgaaagcgaacgtcttcagcaactttctaatgaatatattttgggaggtgtgaattcaccttcaaggtcgtataaagcagtaggtggtggggcaccagtagtaatgaaagaaggtcatggcgcttacttatatgatgtagatggtaataaatatatcgactatctacaagcttatggtccaataataactggtcatgcacacccacatatcaccgaagctatccaagatcaagcagcaaaaggcgtactttatggtacccctactgaattagaaataaatttctcaaaaaaacttagagaagcagttccttctttagaaaagattcgtttcgtgaactctggtactgaagcagttatgacaacaattagagttgctcgtgcttatactaaaagaaacaaaatcattaagtttgcaggctcttatcatggtcattctgatttagttttagtggcagctggaagtggaccttctcaacttggttctccagattctgctggtgtcccccaaagtgttgcacaagaggttattacagtaccgtttaatgatatagaatcatatagagaagctattgattattggaaagacgacattgctgcagtattagtagagccgattgtgggtaattttgggatggtcatgccacaaccaggtttcttagaagaagtaaataaaatttctcatgataatggaacattagttatctatgatgaagttatcactgcttttcgtttccattatggtgcagctcaagatttattaggtgttaaaccagacctcactgcttttggtaagattgttggcggtggtttaccaattggaggctatggtggtcgacaagatattatggagcacgttgcaccattaggtccagcttatcaagcaggaacaatggccggtaacccgttatctatgagagcaggtattgctttattagaggtacttgaacaagaaggtgtttatgataaacttgatcaattaggtcgtcgtcttgaagaagggttacaaaaattaatagataagcatcatattacagcaacaataaatcgaatctatggctcactgacattgtatttcacaaatgaaaaagttacacattatgaacaagttgaaaactctgatggagatgctttcgctcaattctttaaattaatgttgaaccaaggcattaatctcgcgccttctaaatttgaagcatggttcttaactacagaacatactgaagaagatatcgatcgcacactagaagcagctgattatgcatttagtaaaatgaaataa

SEQ ID NO: 4472 - DNA, 459 bp, Staphylococcus epidermidis
atgattagtaaaggtgaacaatttccctctttttctttagaaaatcaagatggcaattttatttcaaatgaaacaattaaaggtcgtaaaacgattctttatttttatccaagagataatacaccaacgtgtactactgaagcttgtgaatttagagatcacattgaagattttaatcaacttgatgtagatatatatggcataagcgcagattctaaaaagaaacatcaaaattttataaaaaaacaccaattgaattttgacttactcgtagataaagattatcaacttgctaataaagttggggtttaccaattgaaaaaatcatttggcaaggagaatatggggattgtaagaactacatttattctcgatgaaaatggtaacattattgatgtgattgaaaaggtaaaggtaaaaacacaaattgaaacaataaaaaatattctggagggttaa

SEQ ID NO: 4473 - DNA, 951 bp, Staphylococcus epidermidis
ttgaaaattgttagcttaaatagattaaatgaaatagaaaatgaattaagaaaacaatttccaaacgaagaatttaaattttatgacaaagctataaatatccctattaatgatagaaaaactatggacattttaataggttatgatggcaaaatagatcgtacctttattgaacattgtatcaaccttaaatggattggatggtttgcaacaggtgtaaataatttaccgttaaattatattaaagagcgagatatcattctaacaaatggtaaaggtatacaagctaaacaagtgtctgaatatataatgacattcattttgcatgattataaaaagatgaaaacttcctatagaaatcaattagaaaaaaattatgactccagaattactggtaaaagattaaacgaagagactttattattcttgggaactggtgcgattgcacaaagggctgcttatttagccaaagcttttggaatgaaagtaataggggttagtaagtcaggaaaaaatgttgaacaatttgatgaagtttatacaattgaagagttagatgatgttattgaaaaggcaaatattattgttaatgcattacctgaaacagaagaaacaatttacttattaaaaagaaaagatttcatacaaatggacaataatgccttatttataaatgtaggaagaggaacaattgttgatgaggaagtgctcatcaatgtactcaaagatcgattaatcagacatgcttatttagatgtttttgaaaaagaaccacttagtaaggacaatcctttatatgatttagataatgtgaccataactgctcatattacaggtaatgattctaataataatagagaagctacggacattttcaaaaagaatcttgagcattttctcaataattatgatgtaattgagaataaagtagacttagattatggttactaa

SEQ ID NO: 4474 - DNA, 453 bp, Staphylococcus epidermidis
gtgagtgcggaacttgaatctattgatcatgaacttgaagagtcaattgcttcattaagaaaagcgggcgttcgcattacaccccaaagacaagcaattatgcgttatcttatatcttcacattcacatccaacagcagatgaaatatatcaagcactttcacctaaatttcctaatataagtgttgctactatctataataatctaagagtttttaaagatattggtatagtcaaagagttaacatatggtgattcatctagtaggtttgattttaatacacataatcactaccatattatatgtgaaaaatgtggtaaaatcgttgacttccattatccacaattagatgaagtagagcaattagctcaacatgtaacagattttgatgttactcatcatcggatggaaatatatggagtatgtaaagaatgtaaagaagaaggaaattga

SEQ ID NO: 4475 - DNA, 354 bp, Staphylococcus epidermidis
ttgattactattttgctcgttatgttaggtggaggaataggtgctgtacttagagcccttatcacaaatatatgccaacgcttattcaatagtaaaattcctattgcaacatctatagtaaatattacaggtagcttaattatcgggtttatgatgggacacgcactcgatagccatcatatgtttcctttctttgttacaggtgttctcggaggtttaactactttttcaacattatcatctgaacttgttaatatgttaagccctcaatttaaaccaatacgttttgtagtttattccctattacaatttattttaggtttcattgcttgcttttatggatatcgcatctaa

SEQ ID NO: 4476 - DNA, 366 bp, Staphylococcus epidermidis
atgcaatatctatatatttttgtaggtggtgctttaggtgcattgataagattctgtttatcaatgcttaatgaaggttcaaccattccgttggggacatttgttgcaaatttattaggtgcttttttaatgggtagtatcggcgcattaagcctttcactttttaaaactcatcctaacataaaaaaagggcttaccactggtttacttggtgcgttaactaccttttcaacatttcaatttgaacttgtaacactatttaatcagcatcattttatactatttactatatatggtgtgacgagttatattctaggaatactaagttgttacctcggtgtcaaaataggaggtagattttcttga

SEQ ID NO: 4477 - DNA, 309 bp, Staphylococcus epidermidis
atggctcggtcaaaaaagtacttttatcttagtctattaatgataattttaagttttttctttaataccaataattcattattgagtaatatatttcaatcgtttatgaaaattgttgttgttacaagtatcgttaatattataatacttattttatcgattgtttttgccgataaatctataaagtatgctaaggaaagttcagattggattagatttgcaagcaaaatattaccattgattattttaatcactattattatccatatactttcatctttacatacttttggttacatttttaaataa

SEQ ID NO: 4478 - DNA, 714 bp, Staphylococcus epidermidis
atgacaaaattaaatgttaaagtgtttgcggatggtgcagatattgaagaaatgaaatcagcatataagaatcaactcgttgatggttttacaacgaacccaagcttgatggctaaagcgggtgtaactgattataaagcttttgcagaggaagtggttagtgaaataccagacgcttcaatttcttttgaggtgtttgctgacgatttacctactatggaaaaagaagctgagattttaaagcaatatggtgataatgtatttgtaaaaattcctattgttacaacaactggtgagtctacactaccattaattaaacgtttatcatcgaaacaggtaaggttgaatgtcacagctgtctatactatagagcaagtaaaagcaattactgacgctgtgactgaaggtgtgccaacatatgtgtcagtatttgcaggacgcattgcagatactgggattgatccacttcctttgatgaaagaatcagttaaggtcactcatagtaaagaaggtgttcaattattatgggcaagttgtcgtgaagtatataatgtaattcaagctgatgaaattggagctgatattattacttgcccagctgatgttgtaaaaaaggttaataacaatttaggccgtgatataggagaactttcagtagatacagtcaaaggttttgccaaagacattcaaagttccggtttgtcaattttataa

SEQ ID NO: 4479 - DNA, 444 bp, Staphylococcus epidermidis
atgagtaaaaatgaattcatcaaaagagtaaataagcaattatggtttttagatgctaaagagaagaatgcgcttaacaaatatattgactcagttgatcagaataaaagtattgataccaataagccaataagattttcaaatgaatatttaaagaaatttatatttaatcataagaaaaaatcgacttctcatgtgttcgtacttttaatttgtatggttttagcttatgcatttttgctcggactctttattttagggttagtggccagcttagctatcgtgcatacctatatcaacccaaatattgatttatcagtttttgttatgttaactgttttgattgtcgcgataattataatgattgctagtttatatgctattaaacatacgactgcattgtttactaagaagcttttagaatataaatttaataaaaggtag

SEQ ID NO: 4480 - DNA, 444 bp, Staphylococcus epidermidis
atgaaatgtatatcaacgcattcacttttatatattcaaactgcgttttcaacaaatgttgaaacctatattcagtatgaacattacgctattcatttaccatgtacacctgaaaaaacattacattatttattggaattacatcaaaaatcctatcataatcaatgtatgttatctaaaaatattttaaacattaaaaaatttatacctatctatattaatgaggaaaccatattatttccagttacgcaaaaacgtgcaccgattaaatattttatcaatgcacgaaatattataggaattcattcttcaattcataccacaatgattgtttttgaagatggtacgactatcgaactgaacatcccctatacacttgtaacaaaaaaatggcaagaaagtcttaccgtaggtcatatcatagagaaaactaccttttattaa

SEQ ID NO: 4481 - DNA, 480 bp, Staphylococcus epidermidis
atgtcatttgaggaagcatataaaaaatacaacaatatcatacattatttgttaaaaagttatcaaatcacttataattatgatgaattttatcaacaaatgctcattaaaatgtggcaacttacactcgattttgatgaacagcaatcttcttcttttaaatcttatctatttatacgcctaaaattctatcttatagatttatttagacaaaaagacaatacgcttaatatatgtagcattgacgccctttcagaactttctccgtcattttcaatcaacgaaatcgatttacttattaaagatatttcacaacagttacttccacgcgaacgagattggttaaccttatatttacaaggatacaaacaatatgaaatttcccaaattttagatttttcacctacaacgattaaaaaaataaaatctaacgcaatacgaaaactacgttgttatttaaattcatctacaaaggattga

SEQ ID NO: 4482 - DNA, 216 bp, Staphylococcus epidermidis
atggattacgcacatttaaatctcgagcacttttttgcaagaaatgatgatttggatatcattagagatcgatctgattttgtgatgattaataattttaccaatgaaatgaaataccgtgaaggtgaaattgaaggaactatagatttgaatcaatactattataaaaatagatcacaagctgtaagtttcataatgatgaattataagaactaa

SEQ ID NO: 4483 - DNA, 852 bp, Staphylococcus epidermidis
atgactaagcacaagaaaggctcaatattagctatcataggtttgctaattgtatttgttgttacaggttttatcttcttttcaatgatttcagatcaaatatttttcaaacatgtcaaaccagttgaaaaggttgaaaaattagataaaactttagataaagcatctaaaaagcaaatacacaattatacgagccaacaagtatctaacaaagcaaatacagcttggcgtgatgcgtctggtacagaaattaaagaagctatggatagtagtaaattcatagatgatgataaacaaaaatatcaatttttagatttgtctaagtatcaaggcattgataaaaacagaattaaacgcatgttgtttgatagaccagtactactaaaacatacagatgattttattaatgctgcaaagtctaaacatgtcaatgaagtatatcttatttctcatgctctattagaaacaggcgcagctaaaagtgaactggctaatggtgtagaaatagatggtaaaaaatattacaatttctatggtgttggtgcattagatagtgaccctattaaaacaggtgccgaatatgctaaaaaacatggatgggacacaccacaaaaagctatttatggtggcgctgattttattcataagcatttcttatctcatgacgatcaaaatacactttatagtatgagatggaaccctaaaaacccgggtgaacaccaatatgctactgatataaaatgggctgaaagtaacgcgaatatcattgcagatttctacaagaacatgaaaacagaaggtaaatacttcaaattatatgtttataaagatgacgataaacaccaaaaataa

SEQ ID NO: 4484 - DNA, 1485 bp, Staphylococcus epidermidis
atgcgtgtagcaataataggtatgggaacagctggtgtaagtgtgttacgccaactcgttaaacatgaaaacttttctcaattaaaagtagatgtatatgacgatgatagaaatatgggccaaggtgttccatttcaaaatgatagtagcgaactacttattaacatgccatcaaaatccatgagcttaaatcttgatgatgatcaagagttttggaagtggtatcaaaatcagacggaatttaattttagtaatcctcaatatttgcctagatttgtatttggtcattatatgaagtcttatttatcttattataatgaccaatttgataatttaactattatcaatgataaagtacaagaaatttttacacaatccgatgttgatgacacagatttaaaatatcatgtatgtacatgtgatgatgaaaaagaatggcgtgaatacgattatttatttttaacttttggaacttttagttaccatgacccttatgatttgaagggaactaaaggctatatacaaacgccgtatcctacatatcatacacttgataatgttaaagattcagatcgaatcgtgattattggaacagggttggctagtttagatgctgtgagatatgtagctgcacatcatccatctttacccattactatgacaagtcgttctgcagcattgccaagtgttagagggaaaatgactaaaattcagtttacgcatttaactaaatcacgatttaatggaattatgaaaaatcactttggtaatgtaccattagaaaaagtagtttcattatttttaaaagaatgtgaagattatggaatagattttaaaaaacttatttatcgtagaaccggaaaccatgtcaaagacttggagtatgatttaaatcatgaagaagaaatggggatattccaaagtatcattgaacatttaaaagaaaatttaaactggatttggaatagtttgagcgttaaagatcaagaaacttttaatcgtaaatacactaaaattattcagttaaattctaatccaatgcctcctagaacagctcgtttacttatcaagttaatacagaataatgaacttgtcattaaaaaagggctagaagacatagtccataaaaataatcaatttatgttgaagtataacgacactacgcaaaattatgagttgtttgacatcgttattaatgcaacgggctctaaaacacatctttctcaattagatgaggacgatcaattaattttaaacttagaaaatagacaaattgttcaacgtcatcctatgggtggcattcaaattatcccagaaacaaatcaagtcataagccctagatatggaaccttaaaaaatgtgattgcaattggacaaatgaccaacggtgtcaataaacttagaaatggcgtaaagatgattgttaatcaagttgttgatacagtatctcaattatatataacacaggaaaatagaaataagtaa

SEQ ID NO: 4485 - DNA, 1032 bp, Staphylococcus epidermidis
atggatgatgctattcaactagcaaaaatggtaaatggacaaacaggtgttaatccaccagtaggatccgttgttgttaaaaacggtaggattgtaggtttaggtgcacatttaaaaaagggagataaacatgccgaagtacaagctattgaaatggcaggtttaaatacccaaggtgctaccatatacgtttcattagaaccttgcacacaccatggttcaacaccaccttgtgtggataaaatcattgaagcgggcatatctaaggtcatctatgctgttaaagatactactttagtaagtaagggtgacgagattctgagagaagctggtatagaggttgaatttcaatataatgaaaatgcagctgcattataccgtgacttttttactgctaaaagaaacgaagttccagaagtaactgtaaaggtctcatctagtttagatggtaaacaagcaacagactttaatgaaagtaagtggataacaaacaaagaagttaaagaagatgtttatcaattaagacatgagcatgatgcagttattactgggcgtagaaccattgaagcagacaatccattgtatacaaccagggttcctgatggaaagcatccgattcgagttattctttctaagaaaggtcaactcgattttaatcaacaaatatttaaagatactgcatcggagatatggatttacactgaaaatgaaaaattaaaaacagataaaagttttattaaaataataaatataagtaattgtgatacaacgacaatattacaagacttatatcaaagaggtattgggaaactgctagtcgaggcaggcccaaatattacatctcaatttctccaatccaaacatctaaatgaactcattttatatatagccccgaaattaattggtggttctggcaaacatcaattttataagactgacgaggtcattgatttgcctgaagcaactcaatttgaaattgttgattccaagttaattaatcaaaatttaaaattgaaattacgaaagaagtga

SEQ ID NO: 4486 - DNA, 633 bp, Staphylococcus epidermidis
atgtttacaggtatcattgaagaaataggtactgtacaacaagttcgctctgagcaatcagtaagaacgcttgaaattaaagcacaaaacattttagttgatatgcatattggtgattcaataagtgttaacggtgcatgtttaactgtgatagatttcactgactcaagtttttcagttcaagtcatcaaagggactgaaaacaaaacatatcttggaagtgttcaacgtaatacagaagttaatctcgaaagagccatgagtggcagtgggagatttggtggacatttcgtgttaggtcatgttgatgagcttggaacaatttctaaaatcaatgaaactgctaactcaaaaattatttctattaaaacaactaaaaacattttgaatcaaatggtaaagcaaggttctataactgtagacggagttagtcttactgtatttgatttacatgattatacttttgatatacatcttataccagaaacacgtcgatctactattctttcatctaaaaaagtgggcgacaaagtgcacttggagtctgacgtactattcaaatatgttgaaaacatcatgaatcaaaatcaatcgcagttaacagaagaaaagcttagagcatttggtttttag

SEQ ID NO: 4487 - DNA, 1182 bp, Staphylococcus epidermidis
atgcaattcgatacaattgagttggctatagaggctttaagaaatggagagagcattattgtagttgacgatgaagatagagaaaatgaaggagatcttgtagctgttacggaatggatggatgataataccattaattttatggctaaagagggtcgtggtctgatttgtgcaccaattgataaatctatagctgaaagattaaaactacaatctatggagcaaaataacactgatatttatggcacacattttactgtaagcattgatcattataaaactactacaggaatcagtgcacatgaacgtacacaaacggctagagcactcatagatgaaaatactaatcctgaagattttcatcgtccggggcacttatttccacttatagcaaaagagaatggtgtgttaacacgtaatggtcatactgaagctgccgtagatttggcacggttaacaggagcacaaccagctggagtaatctgcgaaattatgaatgatgatgggacaatggctaagggtgaagatctccagtcatttaaagaacgccaccatttaaaaatgattactataaaaagtttggttgcttttcgtaaggctgttgaacttaatgttaatcttaaggcaaaggtcaagatgccaactgattttggtcattttgatatgtatggatttacaacggattatagcgatgaagaaatcgtagctattgttaaaggagatttaaaaagcaatcctaatgtacgtatgcattctgcttgtctgactggggatatttttcatagtcaaagatgtgattgcggggcacaacttgaagcgtcaatgaaatatattgacgaacatggtggaatgattatttatttacctcaagaaggtagaggaatagggttaattaataagttgcgcgcatatgagttgatagaaaaaggttatgatacagttactgcaaatcttgctcttggttttgatgaggatttgagagattatcatgttgcagctgaaatattaaagtattttgatataagtgaaattaacttgctcagcaataatcctaaaaaatttgaaggtttagaagattacggcattgagatcgtagatagaattgaacttatcgttccagaaacacaatataaccatagttatatggaaactaaaaaaaataaaatgggacatttaatatag

SEQ ID NO: 4488 - DNA, 462 bp, Staphylococcus epidermidis
atgaattttgaaggtaaattagttggtaaggatttaaaaattgcgattgttgttagtagatttaatgattttattactacacgtctacttgaaggggctaaagatacacttattcgtcatgaagtagaagatacaaatattgatgtagcttatgtgcctggcgcattcgaaattccactcgttgcaaaaaaattagctcaaaaaggtgaatatgatgctgtgattacattaggatgtgtgattagaggcgcaacttcacattatgactatgtatgtaatgaagtagctaaaggtgtttctaaagcaaacgacatttcagatactccggtgatttttggagttctaacaactgaaagtattgaacaagcagttgaaagagctggtactaaagctggaaataaaggttcagaagcagcagttagtgcaatcgaaatggctaatctaattaagcaaatcaattaa

SEQ ID NO: 4489 - DNA, 1002 bp, Staphylococcus epidermidis
atgtccttatttaaagattttttcattgcgttatctaatcatacatatcttaataaaatagctaaaaagatgggacctcaaatgggagcaaatcgtgtagtcgcaggaaatacgattcatcaattaattgagactatacaatatttaaatgattataatatttcagttactgtcgactcattgggtgaatttgttaatactagagaagaaagcattaaagctaaagaagagattttagaaattatcgatgcaatatatagcaataatgttaaggcacatatgtcagtcaagataagtcaacttggaagtgagtttgatttaaatcttgcttatgaaaacatgagagaaattttacttaaagctgataagaatgggaagatgcatattaatattgatacagagaagtacgatagtctttctaaaattcaacatattattgatagattgaaaggtgaatttaaaaatgtgggtacagtcgttcaagcttatctgtatgaagccgatgatataattgataaatatcctgaattacgtttgagacttgtgaaaggtgcttataaggaagatgcgtcaatcgcttttcaatcaaaagaagaaattgacgcaaattatattagaattattaaaaaacgactactaaattcaaagaactttacatcggtggctacacatgacaatgaaataatcaaccaagtcaaacaatttatgaaggaaaatcatgtcagcaaagataaaatggaatttcaaatgttgtacggtttccgcacggaattagcacaaaaaatagctaatgaaggttatttttttacagtttatgtaccatacggtaatgattggtttgcgtactttatgagaagactagcagaacggcctcaaaacttgtcattagctataaaagaatttactaaacccaaaatcttaaaaaaggtaaccttgggtataggtatatttgcaactttattgacgtctcttattcttggcattaaaagacataaaaaataa

SEQ ID NO: 4490 - DNA, 828 bp, Staphylococcus epidermidis
atgtggaagtgggaaacagaaaatgacgcaaaaggcgttgttgtcattgctcataatattttagaacatacaggtagatatgcatatgttatcacgatgttaagacgaaatggttatcacgttatcatgggcgatttaccgggacaagggcaaacttcacgagctcaaaagggacaaatagatgattttaatacgtatcatgaaaatatattagagtggataaaaatagctaatgaatataaaattccaacatttgttttaggtgtgggactaggtggtctcatcattttaaatctgcttgagaaaacagaattacctattgagggtatcttgttattttcacctatgttagaactaaagagagactataaagggcgcaaaaataaattgatttctaatgttggtaaaatttctaaagatactagatttaaagttggtataactcctcaagatttaacacgtaatgatgaaattattgaagaaacagcaaatgatggactaatgcttaaaaaggtaacatatagttggtataaccttataaatgaaaagatgaaagaaacaatggatcatatcagagatattaaacctatttcagcattgataatgtatggtaccaatgataaaattttagaaactcaatctattaatgaaatgaaagataaattaaagtcgaaagagatgtactttaaagtttgggatggattatatcatgaaatacataatgaacctgaacgcgatttggtgatgagatatgttctatcatttttaaataatagtgtaaatactatgggttttatagtaaatgaagaggaaattgaagacatttaa

SEQ ID NO: 4491 - DNA, 402 bp, Staphylococcus epidermidis
ttggctaatagtgaaaagaacagggtttatggtattttacaattagagacattattcaaagagattgattcaatttttaatacaatcaaagaagaatatggaatgtctaaagaggaaattttgattttacttacacttttggaaaaaggctcaatgactttaaaggaaatggataaatatgttcatattaaaccgtataaacgtacacgtacttataataatttagttaatcttgagtggatttacaaagaaagacctcaagatgatgaacgtacagttattattcattttaatgacaagcaaaattctaaaaaagaagatttattaaagtttattgatgactcaattaaaatcaagtctgaaccaatgcaatctagtttacaatctattttagcagtttaa

SEQ ID NO: 4492 - DNA, 564 bp, Staphylococcus epidermidis
atgaaactagaacgtattttacccttctctaaatcgttaattgattctcatattaatcataatagtattgtaattgatgcaacaagtggtaatgggaatgatactgcttattttgctcaacatgttccaaatggacttgtctatggattcgatatacaagaacaagcaattttgaatacgcacaaaaaaacaaaagattattcgaatgtaaaattaatccaatctggtcatgaaaatgctaaattgcacattcccgcccaacatcacggttgcatagatgctgctatttttaatttaggttatttaccgaaaggtaacaaagaaattgtcactaaacctgaaacaacaattatggctattaatgaaatctttgatatcttaagtattgaaggaattattatattagttatatatcacggtcatgaagaaggtaaagtagaaaaagaagcactacttgaatttttacaaaactttgatcaaaataaagctcatatattgcaatatcaattcataaatcaaaagaataacgctccttttatctgtgctattgaaaagcgtaattaa

SEQ ID NO: 4493 - DNA, 954 bp, Staphylococcus epidermidis
atgggtaactatttcccgtatgcctttgaagataaacgctatcacacatggaactatcatttaaaaaacaagtttggtcagaaaatatttaaggtcgcattagacggaggttttgattgcccaaatagagatggtactgtagctcatggaggttgcacattttgttctgcagcaggaagcggtgactttgcaggtaatagagctgaaccaattgaagttcaattcaaaaaaataaaagaacgtatgcatgaaaaatggagtgaaggtcaatatattgcatactttcaggcgtttacaaatacgcatgcacctgttgaagtactaaaagaaaaatatgaacctgtcttaaaagaagatggcgtcgttggtttatcaatcgcgacaagacctgattgtttgcctgatgatgttgtagaatatttagctgaacttaatcagcgcacttacttatgggtagaattgggcctacaaactgtgcatcagtcaacttccgatttaataaatcgtgctcatgatatgcaaacatactatgacggcgtaacaaaattacgcaaacataatataaatgtttgtacgcacataatcaacggcttaccaggtgaaaattatgacatgatgatggagactgctaaagaagtcgctcagatggacgttcaaggtattaaaattcatttattacacttgctaaaaggaacgcctatggttaaacaatatgaaaaaggtatgctcgagtttatgagtcaacaagattataccaatcttgtttgtgatcaacttgaagtattacccccagaaatgattgtgcacagaatcactggagatggacctatagatctaatggtcggaccaatgtggagtgttaataaatgggaagtattaaatgaaattgataatgagcttactagacgaaactcctatcaaggtaaaatgaacaagcagagtatacaatcatga

SEQ ID NO: 4494 - DNA, 1215 bp, Staphylococcus epidermidis
atgaatatacctaaatcagtatggtggctagttataggtatggcacttaatataaccggcgccagttttttgtggcctttaaatacaattttcatgaaggaagaacttcataagagtttaacaattgcaggtatcgttttgatgattaattcatttggaatggttgtaggtaatttgttaggtggttttttgtttgataaacttggtggttacaaaacgattttaataggtacatttacgtgtttatgtagtaccacattactcaacttgtttcatggctggccatggtatgcaatttggttagtactacttggatttggtggcggaatgatagttcctgctatttatgcgatggcaggtgccgtttggcctaatggaggaagacaaacttttaatgctatctacttagcacaaaatataggggttgctttaggcgcggcattaggaggttttgtggctgaatttagtttcaattatatttttatggcaaacctcattatgtatgtactttttgccatcgtggcgattacacagttcaatttagagattaatgctaaatttaaaccacaagattcgatagatttaaaaagcaaagaaaataaaaaacgatttactgctatgatgctagtatgtgcaatgtttgcaatttgttggattgcatatattcaatgggaaacaacgatagcttcattcacacaatcaattaatatttcaatgtctcaatatagtgtattatggacaattaatggaattatgattttagtagctcaacctttaataagaccaattattatcttattaaaaggtaatttaaaacatcaaatgtttgtaggtattttaatttttatgagttctttcctagtgacgagttttgcaaatcactttgctatatttgtagttggcatggtcattttaacttttggagaaatgtttgtttggcctgcagtaccaactatagcaaatcaacttgcaccagttggaaagcaagggcaataccaaggatttgttaattcagcatctacagtgggtaaagcatttggaccatttattgggggtatacttgtagatacatttaatatgagtatgatgtttattgggatgattatattattaagttttgcactgttatttttaagtttctatgataaagtgttacccaagaattttaaaaatcaacatcaatcaagaagacgacgaaatcagaatggtatttaa

SEQ ID NO: 4495 - DNA, 2418 bp, Staphylococcus epidermidis
gtgttgaattataatcataaggaaattgaaaaaaagtggcagaattactgggaagaaaataagacctttaaaacgaatgataatttaggacaaaagaaattttatgcattagacatgtttccttatccatctggtgctggtttacacgtaggtcatccagaaggatatacggcaacggatatcatctcacgatataaaagaatgcaaggttacaatgtattacatcctatggggtgggatgcttttggtttgccggcagaacaatatgctttagatactggtaatgatcctcgtgaatttacacagaaaaatattcaaactttcaaaagacaaattcaagaattaggatttagttatgattgggatagagaagtgaatactacagatcctgaatattataaatggacgcagtggatatttattcagttgtataataaagggttagcttatgttgatgaagttgctgtcaattggtgtcctgcattaggtactgttttgtcgaatgaagaggttgtcgatggggtatcagaacgtggcggtcatcctgtttatcgtaagcctatgaaacaatgggtactcaaaattacagaatatgctgatagattactagaagatttagatgagttagattggcctgaatcaattaaagacatgcaacgaaactggattggacgttcagaaggtgccaaagtaacatttaaaattgagcaatctgaccaaaatattgaagtgtttacgacacgaccagatacaatctatggtacttctttcttagttttaagcccagaacacccacttgtgaatgaaattacgacaagtgataaagaacaagaagtcaaattgtatcaaaatgaagcatcaaaaaaatctgatttagaacgtacggacttagctaaagaaaaaacaggtgtgtttactggaacatttgcaattaatccgctctctggcgataaattacctatttggatagcagattatgttttatcaacttacggtactggtgcagtaatggctgtgcctggacatgatgagcgagatcatgaatttgctacgaagtttaatttaccaattatcgaagttatagagggtggcgaagttcaaaaatatgcatacacaggtgaaggaaaacacattaattctggagaattagacggtctagaaaatgaagcggcaataagtaaagcgatagaattgcttgaatctaaaggtgctggtgagaaaaaagtcaattataaattacgtgattggttatttagtaggcaacgttattggggagagccaattcctattatacattgggaagatggatcaatgactacagttcctgaagatgaattgcctttactacttcctgaaacagatgaaattaagccatcaggtaccggtgaatctccacttgcaaatatagatgcgttcgtaaacgttatcgatgaaaagacaggtatgaaggggcgccgagaaaccaatacaatgcctcaatgggctggcagttgctggtactatttacgttacattgatccacataacgaaaaaatgatagcagatcctgaaaaattaaagcattggctacctgttgatttatatattggaggcgtggaacatgcagtacttcacttattatatgcaagattctggcataaagtgttatatgacttaggtgttgtaccaacaaaagaaccattccaaaaactatacaatcagggaatgattttaggcgaaggcaatgaaaaaatgagtaagtctaaaggtaatgtgattaatccagatgatattgttgcatcacatggtgctgatacattacgactatatgaaatgtttatgggacctttagatgctgcgatcgcatggagtgaaaaaggtttagatggttctagaagattcttagatcgtgtttggagacttatcattactgatgaaaattcaatcaataaaaaaattgtagattctaacaatcattcacttgataaggtttacaatcaaactgtgaaaaaagtaacagaagattttgatacacttagttttaatactgcaatcagtcaattaatggtgtttattaatgagtgttataaaactaatgaagtttacaaaccttatatcgaagggtttgtaaaaatgttatcgcctattgcaccacacattggtgaagaattatgggatcgattagggcatgaaaataccattacttatcaaccatggccaacatttgatgaaagtttattagtagatgatgaagttgaaatcgtagttcaagtcaatggtaaagttagagcaaaaatcaatattccaaaagatttatctaaagaagaaatgcaagacttagccttgtctaatgataatgttaaaatgagtattgaaggaaaagaagttaaaaaagttattgctgtacctcaaaagctagttaatatagttgctaaataa

SEQ ID NO: 4496 - DNA, 312 bp, Staphylococcus epidermidis
atggagtcaataacagtagatgaattaaagaaaaaaatattagattcaaatccagttaacattgtagatgttcgcacaaacgaagaaactgaaatgggtgttattcctggagcaaaaacaattcctatggatgaaattcctgataatttaaaagaattcaataaaaatgacacgtattatattgtgtgtgcagcggggtcacgcagtgctaaagtagtttcatatttagaagaacaaggtgttcatgctgtaaatgtcgaaggtggaatgaatgcatggggcgatgaaggtactgtaattgataatatttaa

SEQ ID NO: 4497 - DNA, 11079 bp, Staphylococcus epidermidis
atgaatctatttagaaaacagaaatttagtattagaaaatttaatataggtattttttcagcattaatagctacagtcgcatttttagctcatccggggcaagcaacagcatcagaactggaaccttctcaaaataatgacactacagctcaatctgatggagggttagaaaacacatctcagtctaatcctataagtgaggaaaccacaaatacattatctgggcaaacagtaccttcatctactgaaaataagcaaacacaaaatgttcctaatcataacgctcaaccaattgcaataaatactgaagaagctgaatctgctcaaacagcatcttataccaatatcaatgaaaataatgatacgagtgacgatgggttacatgttaatcagccggctaaacatcatattgaagcccaatctgaagatgtaacaaatcacacgaactcaaatcattcaaattcatcgattccagaaaataaagctacaacagaatcatcaagtaaacctaaaaaaagagggaaaagatcattagatacaaataacggaaatgacacgacaagtacaactcaaaatacggatccaaatttaagtaatacaggtccaaatggcattaacactgtaattacatttgatgatttaggaattaagacaagtactaatcgctctcgacctgaggtaaaggtagttgatagtctaaatggctttacaatggttaatggtggtaaggtcggtttattaaatagtgtgttagaacgtacaagcgtgtttgatagtgccgatccgaaaaattatcaagcaatagataatgtcgtagccttaggacgtattaaaggaaatgatccgaatgatcatgatggtttcaacggtatagaaaaagaattttcagtgaaccctaattctgagataatattttcatttaatacaatgactactaaaaacagaaaaggtggaactcaattagttttaagaaatgcagaaaataatcaagaaattgcttcaactgatattcaaggaggcggcgtatatcgtttattcaagttacctgataacgtacataggttaaaagttcaatttctacctatgaacgaaatacactcagattttaaaagaattcaacagctacatgatgggtatagatactattcttttatagatacaattggtgttaattctggttcacatctatatgtgaaatcaagacaagttaacaaaaatgtaaagaatggtaaagaatttgaagttaatactcgtatagagaataatggtaacttcgctgctgctataggtcaaaatgaacttacttataaagtaacactaccagaaaatttcgaatacgttgataattcaactgaagtttcatttgttaacgggaatgtgcctaattctacggtaaatccgttttcagttaatttcgatagacaaaatcatactttaacgtttagtagtaatggtttaaatttaggaagaagtgctcaggatgttgctagattcttgcccaataaaatactaaatattagatacaagcttagacctgtcaacatctcaacgccacgtgaagtgactttcaatgaagcaattaaatataagacattttctgaatattacattaacactaatgacaatactgttactggtcaacaaacacctttcagtattaatgtcatcatgaataaagacgatttatcagaacaggtcaataaggatatcatcccatcgaactatacacttgcttcttataataaatataataagttgaaagaacgtgctcagactgttctggatgaagaaacaaacaatacaccttttaaccaaagatactctcaaactcaaattgatgatttgttacacgaattacaaacaacactaataaatcgtgtgagtgcttcgagagaaattaatgataaagctcaagaaatgactgatgctgtatatgatagtacagaattaactactgaagaaaaagatacattagttgatcaaattgaaaatcataaaaatgaaatttctaataacattgatgatgaacttacagatgatggtgttgaaagagtcaaagaggctggattacatactctagaaagtgatactccacatccagtaacaaaaccaaatgcacgacaagttgtgaataacagagcagatcaacaaaagacgcttatacgtaacaatcatgaggcaactaccgaagaacaaaatgaagcgattagacaagttgaggcacattcatctgatgctatcgccaaaataggtgaggcagaaacagataccactgtaaatgaagctagagacaatggtacgaaattaatagctacagatgttccaaatccaactaaaaaagcagaagctagagcggcagttaccaacagtgcaaattcaaaaattaaggatatcaacaataatacacaagcaacattagacgagagaaatgatgctatcgcacttgttaatagatcaaaagatgaagcaattcaaaatattaacactgcacaaggtaatgatgatgtcactgaagcacaaaataatggaacgaatacgatacaacaagtaccattaactccagtgaaaagacaaaatgcaatagcaactatcaatgctaaagcggatgaacaaaaacgtttaattcaagcaaacaataatgcaacgactgaagaaaaagctgatgcagagcgtaaagttaatgaagcagtcataactgcaaatcaaaatattaccaatgcaactactaatagagatgttgatcaagcacaaacaactggaagtggtatcatatctgctattagtcctgcaacgaagattaaagaggatgcacgtgcagcagtagaagctaaagctattgcacaaaatcaacaaattaattcaaataatatggcaacaactgaagaaaaggaggatgcattaaatcaagtagaagcacataagcaggccgcaatagcaactatcaatcaagcgcagtcaactcagcaagtttctgaagctaagaataatggcataaatactattaatcaagatcaacctaacgcagttaagaaaaataatacaaaaataatattagaacaaaaaggaaacgagaaaaagtcagcaatagctcaaacacctgatgctaccactgaagagaaacaagaagctgtcagtgctgtttcgcaagctgttaccaatggcattacccatatcaaccaagcaaattctaatgatgatgttgatcaagaacttagtaatgcagaacaaattattactcaaactaatgtcaatgttcaaaaaaaacctcaagccagacaagcattgattgctaaaacaaatgaaaggcagagtacgattaatactgacaatgaaggcactatagaagaaaaacaaaaagcaattcaaagtttgaatgatgctaaaaatttagctgatgaacaaattacacaggctgcttctaatcaaaatgtcgacaacgccttaaatataggtataagtaatatcagtaaaatacagactaatttcactaaaaagcaacaagctagagaccaagtaaatcaaaagttccaagaaaaagaagctgagttaaattcaacacctcatgcaactcaagatgaaaaacaagatgcgttaactagattaacacaagcaaaggaaactgcactcaacgacataaatcaagcacaaacaaatcaaaatgtggatacagcacttactagtggaattcaaaatattcaaaatacacaagttaatgttaggaaaaagcaagaagccaaaactacgattaatgatattgttcaacaacataaacaaactatacaaaataatgatgatgctacaactgaagagaaggaagtcgcaaataatttagttaatgcatcacagcaaaatgtaattagtaagattgataatgctacaacgaataatcaaattgatggtattgtgagtgatggtagacaaagcataaatgcaattacacctgatacatcaattaaaagaaatgctaaaaatgatattgatattaaagcagctgataagaaaataaaaattcaaagaataaatgatgctacagatgaagaaattcaagaagcgaatcgtaaaattgaagaagctaagattgaagcaaaagataatattcaacgcaatagtactagagatcaagtaaatgaagcgaaaactaatggaataaataaaatagaaaatataacaccagcaactactgtgaaatctgaagctagacaagcagtacagaataaagcaaatgaacagattaatcatattcaaaacacgcctgatgcaactaatgaagaaaaacaagaggcaataaatagagtaagtgctgaattagcaagagttcaagcacaaataaatgcagaacatacaacccaaggtgtcaaaactatcaaagacgacgcgataacttctttatctcgaattaatgcacaagttgttgagaaagagtctgcaagaaatgcaatcgaacaaaaggcaacacaacaaacgcaatttattaataataatgataatgctacagatgaagaaaaagaggtcgccaacaatttagttatcgctacaaaacaaaaatcattagataatattaactccttatcttcaaataatgatgttgaaaatgctaaagtagcaggaataaatgaaatagctaacgttttaccagcaaccgctgttaagtcaaaagcaaaaaaagatattgatcaaaaactcgcgcaacagattaatcaaattcaaacgcatcaaactgctacaactgaggaaaaagaagcggctattcaattggcaaatcaaaaatcaaatgaagcaagaacagcaattcaaaatgaacatagtaacaatggtgtcgcacaagctaaatctaacggcattcatgaaattgaattagttatgccagatgcgcacaaaaaatctgatgctaaacaaagtatcgataataaatataatgagcaaagtaatactatcaacactacaccagatgcaacagatgaagaaaagcaaaaagcattagataaattaaaaatagctaaagatgcaggatacaacaaagttgatcaagcgcaaacaaaccaacaagtatctgatgcaaaaactgaggctatagatacgataactaatattcaagcaaatgttgcaaaaaaaccatccgctcgagtggaattagattcaaagtttgaggatttaaagcgtcaaatcaatgcaacgcccaatgctacagaagaagaaaaacaagatgcaattcaaagattgaatggtaaaagagatgaagttaagaatctaataaatcaagatagacgtgacaatgaagttgaacagcacaaaaatattggacttcaagaattagaaacgattcatgctaatccaactagaaaatctgatgcgctccaagagttacaaactaaatttatttcacaaacagagttaattaataataacaaagatgcaactaatgaagaaaaagatgaagccaaacgacttcttgagattagtaaaaataaaactataacaaatatcaatcaagcgcaaactaataatcaagttgataatgctaaagataacggcatgaatgagattgctaccataataccagcaacaacaattaaaacagatgcaaaaacggctattgataaaaaagctgagcaacaagttacaatcatcaatggtaacaacgatgcaacagatgaagaaaaagcagaggctagaaagctggttgaaaaagcgaaaattgaagccaaatctaatattacaaatagtgatactgaaagggaagtcaatggtgctaaaaccaatgggttagaaaaaataaacaatattcaaccatcaactcaaactaaaacaaatgctaagcaagaaataaatgacaaagctcaagaacaattaatccaaattaataacacgcctgatgcaaccgaagaagaaaagcaagaggcaacaaatagagtcaatgctggattagcacaagcaatacaaaatattaataatgcacatagtactcaagaagtaaatgaatctaaaacaaatagtattgctacaatcaagagtgtacaacccaatgtgatcaaaaaaccgactgctataaatagtttgactcaagaagctaataatcaaaagacgttaataggtaatgatggtaatgctactgatgatgaaaaagaggctgcaaagcaattagtgacccaaaaattaaatgaacaaattcaaaaaattcatgaaagtacacaagataatcaagttgataacgtaaaagcacaagctatcactgcaattaaattgattaatgcaaatgcacataaaagacaagatgccattaatattttgactaatctagctgaaagtaaaaaatcagatataagagccaatcaagatgcaactactgaagagaaaaatacggcaatacaatctatagatgatacgttagcacaagcacgtaacaatattaatggtgcaaatacaaatgcgttagtggatgagaatttagaagatggtaagcaaaagttacaacgtattgtgttgtcaactcaaactaaaacacaagctaaagcagacattgctcaagcaataggtcaacaaaggtcgacaatagaccagaatcaaaatgctacaacagaagaaaaacaagaagcccttgagagacttaatcaagaaacaaatggagtcaatgatagaatacaagcagctttagcaaatcaaaatgttacagacgaaaaaaataatatattagaaacaataagaaatgttgaacctattgtaattgtaaaaccaaaggctaatgaaataattagaaaaaaagctgcggaacaaacgactttaataaatcaaaatcaagatgcgacactagaagaaaaacaaatagcacttggcaaattagaagaagtaaagaatgaagcgttaaatcaagtatcacaggcacactcaaataatgatgtgaaaattgtggaaaataatggaattgctaaaatttctgaggtccatcctgagactataattaaacgtaatgctaaacaagaaattgaacaagatgcgcaaagtcaaattgatactatcaatgcaaataataaatcaactaatgaagaaaaatcagccgctatagatagagttaatgtagctaaaattgatgctattaacaatattactaatgctacaactacacaattagttaatgatgctaaaaatagtggtaacacgagtattagccaaatattaccaagtacagcagtcaaaactaatgcattagcagctctagctagcgaagctaaaaataaaaacgctataatagatcaaacaccaaatgcgacagcagaagaaaaagaagaagcaaataataaagttgatcgtcttcaagaagaagcagatgctaatatcctaaaagcacacactactgatgaagttaataatattaaaaatcaagctgttcaaaatattaacgctgttcaagttgaagttatcaagaaacaaaacgctaaaaaccaattaaatcaattcattgataatcaaaagaaaattattgaaaatacgcctgatgcaacactagaagaaaaagctgaagctaatagattgcttcaaaatgtactaacttccacatcagatgaaattgctaatgtagatcataacaacgaggttgatcaagctttagataaagctagaccaaaaatcgaggcaattgtaccacaagttagtaagaaacgagatgctttaaatgcaatccaagaagcatttaattcacaaactcaagaaatacaagagaaccaagaagctacgaatgaagaaaaaactgaagcattaaataaaataaaccaattacttaatcaggctaaagtaaatattgatcaagcacagtcaaataaagatgtagatagtgcgaaaacacgtagtattcaagatatagagcaaattcaaccacatccacaaacaaaagcaaccgggcgtcacagattaaatgaaaaagctaaccaacaacaaagtactattgcaactcatcctaattcaacaattgaagaaagacaggaagcaagtgcaaaactacaagaagttcttaaaaaagccatagctaaaatagataaaggtcaaaccaatgatgatgtagaaaagactgtagtaaacggaatagctgaaattgaaaatatattacctgctactacagttaaagataaagctaaagctgatgtaaatgctgaaaaagaggagaaaaacctacaaattaatagtaatgatgaagcaacgactgaagaaaaattagttgctagtgacaatttaaatcacgttgtcgagacaacaaatcaagctattgaggatgcaccagataccaaccaagtgaatgtagaaaagaacaaaggtataggtacaattagagatattcaaccacttgtagttaaaaaacctactgccaaatctaaaattgaaagcgcagtagaaaaaaagaaaactgaaattaatcaaacacaaaatgcaactcatgatgaagtaagagagggtttaaatcagttaaatcaaattcatgaaaaagccaaaaatgatgtaaatcaatctcaaactaatcagcaagttgaaaatgctgagcaaaatagtttagatcaaatcaataacttcagaccagattttagtaaaaaacgtaatgcagtagctgaaattgttaaagcgcaacaaaacaaaattgatgaaatagagcaagaatttagtgctacacaagaggaaaaagacaatgctttacaacatttagatgaacaggttaaagaaatcattaattctataaatcaagctaatacagataatgaagtagataatgctaaaacttctgggttgaataacataactgaatacagaccagaatataataaaaagaaaaatgctatattaaaattatatgatgtttcagatactcaagaagctataattaatggttatcctgatgcaactgaagatgaacttcaagaagctaatagtaagttaaataaaatacttttagatgcaaaaaaacaaattggtcttgcgcacacaaataatgaagttgatgatatttataatgaagtttcccaaaaaatgaaaactattttaccacgtgtagatacaaaagcggtagcacgttctgtacttaatgcacttgctaaacaattgattaaaacttttgaaaatactgcagatgttactcacgaggaacgtaatgatgcgattaatcatgtaaaagaacaattatctttagtattcaatgccattgaaaaagaccgaaaagatatacaagttgcgcaagatgaattatttggattaaatgaattaaatagtatatttatcaacataactcaaaagccaactgccagaaaagcaattagtggtatggcgagtcaattaaacaactctatcaataatacgccatatgctacagaagaagaacgacaaattgcactgaataaagttaaggcgattgttgatgatgcaaatgaaaaaatacgagaagctaacactgatagcgaagtacttggaacaaaatcaaacgcaataacattgttacaagcaatcagtgcggatgtacaagttaaaccacaagcatttgaagaaatcaatgcacaagctgaaattcaaagagaacgaattaatggaaatagtgatgcgacaagagaagaaaaagaagaagctttaaaacaagttgatacattagtaaatcattcatttattacaattaataatgttaataaaaatcaagaagtttatgatactaaagacaaaacgattgaagctattcataaaatcaaaccaatatcaactatcaaaccacaagcattaaatgaaatcactattcaactagacactcaacgtgatttaataaagaataataaagagtctacagttgaagaaaaagcctcggctatcgataaattaattaaaactgcagcaagaatagccgaatcaatagataaagctcaaacaaatgaagaagttaaaaatattaaaaaacaaagtattgatgaaatttctaaaatactacctgttattgaaattaaatcagctgcaagaaatgaaattcatcaaaaagcagaagttattcgcggattaattaatgataatgaagaagcgactaaagaagaaaaagatatcgcattaaatcaattagacacaactctaacacaagcaaatgtttcaattgaccaagcattaacaaatgaagctgttaatagagctaaagaaatagcaaattctgaaattaataaaatttctgtcattgccattaaaaagcctgaagctatagcagaaattcaagaactagcagataaaaaattaaataaatttaaacaaagtcaagaagctactattgaagaaaagcaatcagctatcaatgaattagaacaagctttaaaatcagctattaatcatattcatcaatctcaaaataatgaatcagtgagcgctgcattaaaagaaagtatatctttaatagactcgattgaaattcaagcacataaaaaattagaagctaaagcatacattgatggatatagtgacgataaaattaatgacatatcttctagagcgactaacgaagaaaaacaaatatttgtaagtaaacttaaagcattaatcaatcgtacacataaacagattgacgaagctgaaacatttgtttcagttgaaacaattgtccgaaactttaaagttgaagcggataaattaaactcaattgtacgtaaaaaagctaaagcatcgaaggaaattgaattagaagcagaccatgtaaagcaaatgataaatgcaaatttaagtgctagtactagagtgaaacaaaatgctcgtacattgataaatgaaattgttagtaacgctttaagtcaacttaataaagtaaccacaaataaagaagttgatgaaatagttaacgaaacgattgaaaaacttaagtcaatacaaataagagaagataaaatattgagtagtcaacgttcatcaacatctatgacggaaaaatctaatcaatgttatagttccgagaataatacaattaaatctctaccagaggcaggaaatgctgataaatcactaccattagcaggagttactttaatatctggtttagcaatcatgtcctcacgtaaaaagaaaaaagataaaaaagtaaatgactaa

SEQ ID NO: 4498 - DNA, 1263 bp, Staphylococcus epidermidis
atgtatcaaacaattgttatcggaggtggcccaagtggggctatggctgcagttgctgcaagtgaaaaaaataaatcagttttattaatcgaaaagaaaaaaggtcttggacggaaactaaaaatctcaggtggtggtcgttgcaacgtaactaatagacttccatatgatgaaatcataaaaaatattccgggtaatggtaaattcctatatagccctttttcagtttttgataatctttctattataaatttttttgaaacccgtggagtcaaacttaaagaagaagatcatggtagaatgtttccagtttcaaataaatctcaagatgttgttgatgtgcttattaaccaactcaaagaaaatcatgttgaggttaaggaagaaacaccagttgtcagtgtttcctatgaccataattttaaagttaaaacacaaataggtgaatttgaaagtcacagtttaattattgctacaggcggtacatcagttcctcaaaccggttctactggagatggttacaaatttgcaaaatctctaggtcattctataacagaattattccctactgaagtgcctatcacttcatcagaaacttttatcaaatcaaatcgcttaaaagggttaagtttaaaagatgttaatttatcggtcttaaagaaaaatggtaaaaaaagagtaagtcatcaaatggatatgatattcacacattttggaattagtggtcctgctgctcttagatgtagtcagtttgtttataaagagcagaaaaatcaaaaaaagaaaaatatccatatgcaattagatgtttttcctgaattaaacgtagatcaactatctcaaaaagtgagaaaaatacttaatgcagaaccagataaatatattaaaaatagcttgcgaggattaatagaagagcggtatttattgtttattctcgaacaatctggtattaatgatgaaatgactgcacatcatttatcaaatcaacagtttcaaacttttattaatcttctaaagacttttacctttacagtagatggcacacttccattagacaaagcttttgtgacaggcggcggtatttctttaaaagaaatagaaccaaaaactatgatgtctaaattagtgccaggattatttttatgtggcgaagtcctagatattcatggatacactggaggttataatataacaagcgcattagttacgggtcatgttgctggaatgtttgctggtgaatttaaaatagatcaaaacaaataa

SEQ ID NO: 4499 - DNA, 1662 bp, Staphylococcus epidermidis
atgagtgaaagtaaagaaatggttcgtggaacctttttaattacaataagtattttaattacaaaagtattaggtgtcttatttattattccgtttactgctttaataggtggacaagccaacatggcaccttttacttatgcttatgcaccatacaatatagctatagctatagcaacagctggtgttccgcttgccgcgtcaaaatatgttgctaaatataatgcactaggtgcatataaggtcagtcagaagttttataaatcaagttttgtagtcatgagtattacaggaattgtaggtttcctagttttatatttattagcaccatacatagctgaactaaccttatcacgtaatactcatggtaatagtggatggacagtagctgatatcacttggattattagaataataagtatggtagttatatttattccagttctcgcaacttggagaggaatatttcaaggatacaaatcgatgggacctactgcagtgtcagaagttacagagcaaattgcaagaattgtatttattttagtaggtagttatttaacgctcaatgtatttggaggtacagttcttcaggcaaatggtattgcaacgtttgcagctgcaataggtgcaatcgcaggaatacttacattatggtattactggattaaaagaagaaaaaatattaaaaaaatggtcgactcagatacagcgaatctaaatgtttcatacgggaaaatgtataaagaaattattgcttatagtataccgtttgtcatagtaagtttgaattttccactatttaatttggtcgatcagtttactcataatggtgcgcttaaccttgtaggtgtcaaacctggtttgcaagatatattctttaacatgttaaacatgtctacaaacaaaatagtaatgattccaacatcattaagtgctggatttgctgtcagtttaataccatttataactaaaacctatgaagaaggtagatatgcagagatgcatcgacaaattagaacttcgattggagttttaatgttcattactgttccagctagtattggtatcatggcattagcgcaacctttgttcacagtattctatggttttgatccagttgttcacggtcacgatccaaatttcgatggaagtagattattattttattatgctcctgttgcaattttaatttcattattaagtgttacagcatcaatgttacagggtatcgataaacaaaaactaacagtttttattattttaggatctgttttaattaaactgattctcaattatcctttaattatgttattacacacacctggcgctgtattaagtacagcaatagctttattatttgcaatttgttgcaatttctatattcttaaaaaatatgcaaactttaaatttagttacagttggatacatttagctaagattattctaatttcaatcatcatgatgattggggttgaggtgattttcttcattttaagattattcttggaaccaactagatttaattacttgattattgttgcaattggtgtcattgtgggagcaatcatttatggtggtattacaatcaagactaaattagctgatgaatttttaggtgatattcccgctaaaataagacgtaaagtgaagatgttgcgatga

SEQ ID NO: 4500 - DNA, 693 bp, Staphylococcus epidermidis
atgagattagataaatttctagctaatatgggtgttggaacgcgatcagaagttaaacagttactcaaaaaaggatctgttaaagtcaaccaaaatatagttaagttacctaaacttcatgttaatcctaattctgatgagataatggtaaatgatgaagtagttagttatatcgacaaagtgtatatcatgttaaacaaacctaaaggttatatttcagcgacagaggatgagttgcatcctactattattgatttgatacctgaatatgcacatttaaatatttttccggtcggacgtttggacaaagatacagaaggattactccttgttacaaatgatggacagtttaatcatgaagtaatgaatcccaataagcatgtttcaaagacttatgaagtctattcaaaacacccaataactcaattcgatattgataaatttaaatccggaatagaattatcagatgggaaattaaagcctgcaattttaaagaaagttgatgattatgtatcacatgtcactatttacgaaggaaaatatcatcaagttaaaagaatgtttcatagtatcgaaaatgaggtattagaattgaaacgcataaagattgctcaactagaactagatcataatttagatttgggtagttatcgtttgttaacacaaatagattttgataatcttaagaactaa

SEQ ID NO: 4501 - DNA, 429 bp, Staphylococcus epidermidis
atgggaaaaagtactaatttatttaaagttgcattaggcattggtggtgcaattactgctgtagcattatcacgtaaagaaagtcgagataaacttaaacaagaatataataaatataaagaagaccctgaatcatataaatctagcgctaaagatttagcaactcaaataggtaataaagctaatgaaacaattcaagaagttaagaagaaccctaaagactatgttgaacgtatcaaaagtaatcctaaagaatttttagaagaagaaaagtctaaaattattggcaaaaatgatcagacacaagatgatattgaagaaggaaaatttgatgctgaaggcggtgcaactgtcaataacaatttaagagttgttactgaagatgacttaaaaaataataaaaatgcattacaagataaaaaagaataa

SEQ ID NO: 4502 - DNA, 1410 bp, Staphylococcus epidermidis
atgtggaaagaaaaggttctagagtacgaaaatcaaatgattgaagatcttaaaggtttattatctatagaaagcatcagagatgattctaaagccactgctgatgcacctgtgggaccaggaccgagagaagctcttgattacatgtacaatttaggtaaaagagatggtttttcaacgcatgacgttgatcatatagctggtagaattgaagctggtaaaggagaagatgtattaggtattttatgtcatgtcgatgtagtacccgcaggcgatgggtgggattcaaacccattccaaccagtagtgacagacaatgcaattatagccagagggacactggatgataaaggacccaccattgctgcctattatgcagttaaaattttaaatgagatgaaggtagattggaaaaaacgtatacacattattatcggaactgatgaagaatcagattggaaatgtacagacagatatttcaaaacagaagaaatgcctgccttaggttttgctccagatgcagaattcccagcaatacatggtgaaaaaggtataacaacctttgatttagtacaaaatgaagtgacagaagatacagatgaacctgactatgagttattaaaatttgaatctggtcaaagatacaatatggttcctgattatgctaaggcagaagtgctcgtcaaagaaaatatgacagatgtcattcaaaactttgaaaactttttacaacaaaatcaactacaaggtgaaagtacagttgacagtggtattttaatattaacaattgagggtaaagcagttcatggcatggatccatctttaggtgttaatgcaggattgtttttacttaaatttttagcaagtcttaatctaaataaaagcgcaaaagatttcgtagaattcaatgagcgatacttatttgaatctcactttggtgaaaaaatgggtatgaagttccatactgatattatgggagatgtcactactaatatcggggttatcagttatgataaagaaaaagcaggccgttatggtattaatctaagatatcccgaaggatttaaatttgaagacgcaatcgatagatttagaagtgaaattaatgaactaggttttaatttagaacttggcaaagttcaaaaaccacactatgtcgataaaaatgatccatttgtaaaaacacttgtaaacgcatatagaaatcaaacaggtgatatgactgaaccatatacgattggtggaggaacatatgcgagaaatttagataagggtgtcgcatttggtgcgatgtttgcagattcagaagatttaatgcatcaaaaaaatgagtatataactaaaaagcaattgatcaatgcaacaagtatttatttagaagctatttacgctttatgtgtggaggattaa

SEQ ID NO: 4503 - DNA, 849 bp, Staphylococcus epidermidis
atgacaaaagtttttataaatggtgaatttgttaatgaagaggatgctaaggtttcatacgaagatcgaggctacgtgtttggggacggaatctatgaatatatacgggcatatgatgggaaattgtttaccgttaaagagcattttgaaagatttttaagaagtgctgaagaaataggactagatttaaattatactattgaggaattaattgaattagtacgccgattattaaaagaaaataatgtagtgaatggcggtatttatatacaagctactcgtggtgctgctcctcgaaatcattcatttcctacaccacctgtaaaacctgttattatggcgtttacaaaaagttatgatagaccttatgaagaattagaacaaggagtttatgccattacaactgaagacattagatggttacgttgtgatattaaaagtttaaatttattaggaaatgtattagctaaagaatatgctgttaaatataatgctgcagaggctatacaacaccgaggtgatattgtcactgagggtgcatctagtaatgtttacgcaattaaagatggagtgatatacacgcatccagttaataattttatattgaacggaattactcgccgtgtcataaaatggatagcagaggatgaacaaataccattcaaagaagaaaaatttacagtagaatttcttaaaagtgctgatgaagttatcatttctagtacttctgcagaagttatgccaattacaaaaattgatggtgaaaatgttcaagacggacaagttggtactataacacgacaattacaacaaggatttgaaaagtatattcaatcgcatagtatttaa

SEQ ID NO: 4504 - DNA, 792 bp, Staphylococcus epidermidis
ttggagcagttttatcagttagggtggacacttgattcggcaggaggagcttctggtgaagcatatatggctgaacaagatggacaaaaattatttttaaaacgaaattcaaatccttttattgctgcgctatctgcagaaggaattgtacctaaacttgtttggacgaaacgtattgaaacaggtgaagtagtaacagctcagcattggaaaaatggcagagaattaaatgaagatgaaatgaaccaaacaagagtcgctgaactactacataaaattcacggttcaagacctttattaactatgctaaagcgtatggagatggaacctattacgcctgacattatgttgaataaaattaacgcatcactttcaagagaagttttgacacatcatgttgtgagaagagctttaacttaccttgaagatcatataccgaatttagacgcacgtttctttactgttgtacatggagatgttaatcataacaactggttattatcagatcgggatgaactttaccttgtggattgggaaggtgcaatgattgcagacccagcgattgacattggtatgctgctttacaattacgttcctcaaaacaaatggtctcagtggtttaaaacttatggcgttgaagaaagtgtcaatttgaataaacgtatgaaatggtacacagttattcaagcaataggtcttattcaatggtatgaagaacaaaaacgctatagagatatgaatacatggctgaaatttttaaatgaagtaatgaatagtaacttatttatataa

SEQ ID NO: 4505 - DNA, 651 bp, Staphylococcus epidermidis
atgatgagagttcgttacaaaccgtgggccgaagattatttaaagaaccatcctgatttagtagacatggatggtgctcacgcaggtaaaatgtctgagtggttcgaaaaagaacaaccgatttatattgaaattggttcaggaatgggacaatttataacaacattagcagcacaatatccagagattaattttgtatcaatggaacgtgaaaaaagtgtgatgtacaaagttcttgataaaacaaaagaaatgggtcttaaaaatttaaaaatgatttgtaatgatgctattgagcttaatgagtatttcaaagataaagaaatatctagaatttacttaaatttttcagatccttggcctaaaaagcgccatgcaaaaagacgtttgacgtatcatacataccttgcattatataaacaaatacttaaagatgacggtgaaattcattttaaaactgataatcgtggtttgttcgcatttagtatagaaagtatgtcgcaatttggaatgtactttactaaaatgaatttaaatttacacgatgaagatgatgaagataatatagtgacagaatatgagaagaaattctctgaaaagggatctcgtatttatcgaatggaagctaaatttcataaatgtttcgaatag

SEQ ID NO: 4506 - DNA, 315 bp, Staphylococcus epidermidis
atgaagtcagttaattttaaaaaaataactatattgtttttttctacagcttttttaatattaatcttttctctcatttttttgacgaagaaaaaactgtataacgccgaattattactaaatgaagtcaaaacttattttagagaagtaaaaggttcctatattgtgcaagaaccaatcgttttagaaaatataaatcataatcaaccaatataccaaggtggtatcacagtattaaaaaatgaccatcttattaattatgaattttatgcagatgctgtgtcaggacaaatcattgatataattgaactctga

SEQ ID NO: 4507 - DNA, 1086 bp, Staphylococcus epidermidis
atgactattgataactcaaaaacattggaacgaattaaaatattaacagagcttcatggagcacctggttttgaagatgaagtgagaagatatatgaaaagtgaaatggaaccatacgtggataagtttattcaaaataagatgggtggtttctatggtataaaaaaatcaaataaagaaaacgcacctcgagttatgatagcagcacatatggatgaaataggttttatgattactcatattaatgataatggaatgattcaatttacgaatttaggtggcgtggctaatgatatttggcaaggacaaagattaaaaataaaaaatagatacggtaaagaaatcataggtgtagttgctaatattcctaaacattttagaacaggaaatgaaagcatacctcaaatcaaagatttaatgctagatattggtgcttcttcatcagaagaagtgcgcaatcggggtgtagaggtgggcgatacaatagttcctcacacaataatgactcagttgtcaaaaaacagatacagcgcgaaagcctgggacaatcgatatggttgtgtcttagctattgagatattagaattattaaaagacgttcaactagatgttgacttatatgttggtgccaatgtacaagaagaagttggacttagaggagctaaagctgccgcaaagcaaattgatcctgatattgcattcgttgtcgattgctcccctgcaaatgatatcaaaggtaaacaacaactttctggtgtgttaggggaggggactttaattcgtatcaaagatggtactatgatacttaaaccattatttagagattatctccttaagctagcagaagaaaatcagattgcatatcaatattatatatcaccaggtggtacagatggtggggagattcataaagaaaatgaaggtataccaacagctgttattggagtatgtgcgcgttatattcatagcactgatgcggtctttgatattagagattatttttctgcacgtcacttgctaaaagaaagtattattcatttaacaagtggacaaattcaacaattacaatatggaaaggaattttga

SEQ ID NO: 4508 - DNA, 312 bp, Staphylococcus epidermidis
atgattaaacttgaatcagaacaacaatttgaagaattaaaaaaagggtatacagtatttgaattcactgctggatggtgtccagattgtaaagtaattgaaccggatttacctaaattagagaaaaaatacagtcaattacaatttgtgtctgtagatagagatcaatttatagatatttgtgttcaaaatgatattttaggcattcctagttttcttatctttaaagaaggtcaacttttaggaagctatataggtaaagagagaaaatcaattgatcaaattgatcaatttttatctcaacacatttaa

SEQ ID NO: 4509 - DNA, 855 bp, Staphylococcus epidermidis
atgaatgtcttccaaatgagagataaattgaaagcgcgtttaaaacatttagacgtagaattcaagtttgatagagaagaagaaacgttacgtattgtaagaattgacaatcacaaaggtgtaacgattaaacttaacgctatcgtcgcaaaatatgaagaacaaaaagaaaaaattatagatgaaatttgttattatgtcgaggaagcaatcgctcagatgggtgatgaagtgattaataatgttgaggacatacaaattatgccggttataagagctacaagtttcgacaaagaaactaaggaaggtcatgcatttgtgttaacagaacatactgctgaaactaatatatattacgctcttgatctagggaaatcttatcggctaatagatgaaaatatgttacaaacgttaaatttaactgctcaacaagtgaaagaaatgtcactatttaatgttcgtaagttagagtgtcgctatagtacggatgaagttaaaggtaatattttttacttcatcaacacaaatgatggatatgatgcaagtcgtattttaaatacttcttttttaaatcatattcaacaccaatgtgaaggtgaaatgcttgttggtgtgccacatcaagatgtattaattcttgcagatattagaaataaaacaggttatgatgttatggctcatttgactatggaattctttactaaaggacttgttccgattacttctttatcatttggttatgataacggacatctagagccaatatttattttggggaaaaataataaacaaaaaagagatcctaacgttattcaacgtttagaagcgaacagaaaaaaattcaaaaaagattaa

SEQ ID NO: 4510 - DNA, 597 bp, Staphylococcus epidermidis
atgaacttattttacaatcctaaaggtgttggagatgttgcatttattcaaattgaaccttcagttggtccttttgaatatgaacaaaaacatggtgtggtagaaatcaaaaaagaaaatgaggtagtaggttataatatatttaatgtgtctaataatgtgacaataaatgataatggacatattaaactaactactgaattaatcaaagatttacaacaactgattactgaagcaggttttgattatcaacttgatactgatgtatcgcctaaatttgtagttggttacgtagaaactaaagaaaaacaccctaatgcagacaaactaagtgtgttgaatgtaaatgtaggtactgaaaaacttcaaattgtttgtggagctccaaatgtagaatctggtcagaaggtcgttgttgcaaaagttggggccgttatgccaagcggaatggtaattaaagatgcccaattacgtggggtagattctagtggtatgatttgctcaatgaaagaattaaatttgcctaatgctcctaaagaaaaaggaattatggtacttaacgatgactatgatattggtcaggcattttttgaataa

SEQ ID NO: 4511 - DNA, 3510 bp, Staphylococcus epidermidis
atgagctggtttgataaattatttggcgatgacaacggttcgaatgacgatttgttacgcaaaaataaaaatagacgtcagtctcagcaatcaaaacaaaataatcaagactcattactgcctcaaaataatgatatttatagtcgaccaagaggtaaatttagatttccaatacaagtttctgaaaatgaatatacgcaaaaaaatgaaaattataatgaacataaccaagaagaaacaaacgatataatgagatcatataaccagcatgataatcctgaatttgattcttctggtaaaagacatcgacgccgacgccaagcgtattcaaaacacgatcaatctaagattacacaacaaaagcaatttgcagataacaattatacaaataataacagtgtttttaatcaaaacgacaataagaaatcttcacaacaacgtaaatcaatacaatctgaaaatatcaaaaacaaagcaaacactaagaatacgtcgacatctcctgaatttacatatttaaatcatagttttaaatcaagcgaggtaccctcagcgatttttggtacaaaaaaacgaagaccgattgagaatggtgtcataccgccagaacataaggaattaaatgataaagagattgttcaacaggatgaagtctcgcattcaacgaaatcaatagatgcatcaaaaaatgtttctaatagtaacgataacaatattgaaaaaaatcaacagaaaaaacaacaaacaactgctcaaactgagtcatcatcagaaaatatgcataatgttgaaaagtcaaattatcaaactactaagcgtaaaacaccaaattactctaaagtagataatacgattaatattgaaaatatctatgcttcacaaattgtagaagaaatcagaagagaaagagaacgtaaagttctacagaaacgacgttttaagaaagccttacaacaaaaacgtcaacaaaatcaacagtcagaagaggattcaattcaaaaagctattgatgaaatgtatgctaagcaagcccaacattacacaggcgaaagttcattggatttagaaaatgaaagtaatcaagattcgtcatctaatagtctagagaaacaatcaaatagcagcaacattgacaataaagaagcccaaaataacacacctttatttaactacgaagaaattgacttagatacgacatcagatgtatataaagttaatgaagaagaaactgaatctaaaaatgatgaagatttagtatcatcaaatcattatcattctaatgatgatgcggaagtagaagatgccgaatatcacgaattagatgataaccgacaacaaaaccaaagtaactctcaagacgatataattagttcaaaatcaagtacttcaaatatgtatgataatgcaatcagtgcaagtgtagataataacactgaaagagctaaatcaaatgaagataaaaatgatacagaaattacacacttagatggaacaacaagtgcaaaagttagtgacgagaaaattgaatctaatacaaacaatcatttagaacaagataagaatgtaaaattaaaaaatgtaaattcattaaaatcttcaaattctgatacaggtcaaacaagaaaacaacgttttggtggtagtagaccgtttaatgttttaatgacaccatcagataaaaagagaatgatggatcaaaaccacaaaaaagtaagtgttccagagcttaaacctgaaaaacaagcgaatgcaaatcatagaaaagacagcgaatctaataaatctgaagaatttaaacaaatcaatactaatagagaaaccgattctaatagttatgaatctaatggcatagagcatgatatgaattcatcaagtgatgagcacgtatatgaaacaccatccaaacaacaggatgagcaaatacaaaagctacaagatgattttcattttgaaaacgcaaatcatgctaaaattaacaattcaaatgaaactggcaatcaaagtaatataagtcattcaaaacggtcacaatattcaacaaatgaaagtaaaaatattgatacacaaacttcaaattcaagtacatcaaatcaaaattttcaacgtattcgtaaaggaccgaatattaaattgccgagttatcaattattggaagccccagaaccacatgaaaaagatcaagattggatagataataaaaagcaagaattaaacgacgcattatattatttcaatgtgcctgcggaagtgaaaaatgtaacagaaggaccgagtgttactcgattcgaattatctgttgaaaaaggtgtcaaagtatcaagaatcacggcattacaagatgatataaaaatggctttagctgctaaagatattagaattgaagcaccaattccaggtacaagtttagtaggtattgaagtgccaaatcaaaatcctactaaagtgaatttaaggtcaattattgaatcacctaaatttaaaaatacagagtccaaacttacagttgcaatgggttatcgaattaataatgaacccttattgatggatatcgctaaaacacctcatgcacttatcgctggtgctacaggttcaggtaaatcggtatgtataaatagtatcttaatgtctttactttataaaaatcatccagaagaattgcgtttattactcattgatccgaaaatggtagaacttgcaccttataatgatttaccacatctcgtatcacctgtaataacagatgtaaaagcagctacacaaagtttaaaatgggctgttgaagaaatggaaaaacgttataaattgtttgctcaatatcatgtcagaaatattactgctttcaataaaaaagcaccttatgagcaaagaatgcctaaaattgttatagtaattgatgagttagctgatcttatgatgatggcaccacaagatgtagaacaatcaattgcacgtatagctcaaaaagctcgagcttgtggtatccatatgttagttgctacacaacgaccatcagtgaatgtaatcactggtcttattaaagctaatatacctactagaattgcatttatggtttcatcgagtgttgattctagaacgattttagacagtggtggcgctgaaagattattaggttatggtgatatgctttatttaggtagcggtatgaataaacctatacgtgttcaaggtacatttgtttcagatgacgaaatagatgaagttgttgactttattaagcaacagcgtgatcctgaatatttatttgaagaaaaagaattattaaagaaaacacaaactcaagcacaagatgatttatttgatgatgtatgtgagtttatggttgaagagggacatatttctacttctcttatccaaagacatttccaaattggttataacagagcggcaaggattatcgatcagctagaacaattaggatatatttcaggtgctaatggttctaaaccaagggatgtttatattacagaagcggatttaagtaaagaataa

SEQ ID NO: 4512 - DNA, 1314 bp, Staphylococcus epidermidis
atgacacactatcattttgtcggaattaaaggctcaggcatgagttcattagcacaaatcatgcatgacctcggtcatgaagtacaaggttcagacatagaatcatacgtttttacagaagttgcattaagaaataaagggattaaaattttaccttttgatgcaaataatattacaaaagaaatggttgtcatccaaggtaatgcatttcctgataatcatgaagaaattgttagggcacatgaattaaagcttgatattataaaatatcatgactttcttggtcatgttataaatcaatatacatctgttgctgttacaggtgcacacggtaaaacgtctacaactggtttgttgtcacatgtgatgaatggagataaaaagacatcattcctaatcggtgatggtacaggtatgggactaccaggaagtgactattttgcttttgaggcttgtgaataccgtaggcacttcttaagttatcatccagattatgcaattatgactaatattgattttgaccatccagattattttaaaaatatcgatgatgtttatgatgcattccaacatatggcattaaatgttaagaaaggaattattgcttggggcgatgatgaatatttacgtaaattagatgtggatattccggtttattattatggctttaaagaaacagatgacatctatgctaaaaatattcaaattactgaaaagggtacgcaatttgatgtatatattaaaggcgaattttatgatcaattcttatccccacaatatggaaatcacaacattctaaacgcacttgctgtaatagcaattagttatttagaagacatgaatgtagaaaatattaaagaagcactgataacatttggtggtgtaaaacgtcgttttaatgaaacaaaagtatcaaatcaagtaatagtagacgattatgcacaccatccaagagaaattagtgctacaattgagacagcgcgaaaaaaatatccgcaaaaagatgttgttgccgtttttcaaccacatacgttctcaagaactcaagcatttttaaacgaatttgctgagagtttaagtaaggcagaccaagtatttttatgtgaaatattcggttcaataagagaaaatacgggagatttaactatagaagatttaatcaatcgtattgacggctcgacgcttatagatgaaaatagtattgatgtattagaaaaatttgataacgctgtaattttatttatgggcgctggtgacattcaaaagttactaaaagcttatttcgaaaaattaggcgtaaaaaatgatttttaa

SEQ ID NO: 4513 - DNA, 492 bp, Staphylococcus epidermidis
atggattggattttaccaattgcaggaatcatcgctgcgatagcgtttttaattttatgtatcggtatcgtcgtggtacttatttctgttaaaaagaatttagactatgtggctaaaacactagatggtgttgaaggtcaagttcaaggtattactcgtgaaacgactgatttacttcataaagtgaatcgcttaactgaagatattcaaggtaaagttgatcgtttaaattctgtagttgatgctgttaagggcattggagactcagtacaaaacttaaatggatctgtagatagagttacaaactcaattacgcacaatatttctcaaaatgaagataaaatttctcaagttgtacaatggtcaaatgttgcaatggaaattgctgacaaatggcaaaacagatacaatcgtagaggaagtgcaaactacaaaacaaacactgtagcagatgatgcaaatcatagctacaattcacgtgttaataaataa

SEQ ID NO: 4514 - DNA, 1224 bp, Staphylococcus epidermidis
atggaacattataatcgtgataatttcgagaaaagccatacaagcgaagaattgtatcatcgcacatctcgttcacaatctaactcattgaagcgtaaggattttgtagttagtttcatagcaagtgcgatagtaggttctgctgttggattgtactataaaaataaaatatataaaaaaacggatgaattgaaagaaaaagaacaagatttacgtagtaaagttgaaaactatagacaacgagcggaagatacagtggtttctgttaaatctaaagttgagcaattaaaatatgattccaaagataatatccatgcagatgaattacaagctcaaaaagctgctattcaacgcgaaacagacttagcggatgaatcaccggaagcgcaagcaattcaagaagcaaaaaaagaaacaaaacaagtggatgatgtgagaccatcagcaacagaattagcagctcaacaaaatgctattcaacacgaaacagacttagcggatgaatcaccggaagcgcaggcaattcaagaagctaaaagtgaagttgattcaaacaataaaacatctacgacgcacatagatagtgagaaagaaccttctgctgaagaaattgcaattgctcaaacggcagttaaagaagaagcacgcaatcatgatttagcaaacccttctgcaagtggagaagatactaaaagtaagtcagaaactgaaacagaaaaattagctgcagcggcaaaagcaaaaaaagatagaataaataataataatgaagttgctagtaacacgaaaaatctaatgcaagaagaagctataaaagcttcaaataactctgatgttccaaatcttgtaactaatttaaatcaatctcaagcatcagatactaattcagttgcttatcgcttagcacaggcagcaaaagaaaaaagatctaagctcacaaatggctctaaagaaacacaacttacagaagcgttgttaaaagaaccatcaattgctaaagctcaaacaaaattgaagcgtatccctacacttattactgaatctaaaaaacattcaaataatccgcacagccaaaaaaattcgaatcagactaagaatataacagcaactaaagaggattccaaaggcaaacagcaacatacacctaaccaaaacaaacgtaataaacaacaaaaagtagaaaaaactagtagcaaaattgaaaaacgaacatttaatgattaa

SEQ ID NO: 4515 - DNA, 1092 bp, Staphylococcus epidermidis
atgactaataaattagaacagtatagagaagaaattgtttccttaaatgatcaaatattagaattactatcgaagcgaggagaattagcacagaaaattggtgaagaaaaaattaagcaaggtacacgagtatatgatcctcagcgtgaaaaggaaatgattaatcagctattagataaaaataaaggtccatttaacgacaatgtgattaagcaattatttaaagaaatttttaaagcctctacagatttacaaaaatcagaaaatgaaaaacatctttatgtatcacgtaaattgaaacctgaagatacgatcgttaaatttgataatggtggaatcattggtgatggtaataaatcatttgtatttggtccttgttctgtagaatcacaagaacaagttgatgctgtagcacaagatttgcaggctaaaggcgagaaatttattcgtggcggagcgtttaagccgagaacttctccttatgatttccaaggtcttggagtagaaggtctcaaaattttgaaaaatgttaaagataaatataacttaaatgtagtaagtgaaatagttaacccaaatgatttcgaaatcgcttcagattatttggatgttttccaaattggtgctagaaatatgcaaaattttgagttactcaaagaagctggtcgtacagataaacctattttattgaaacgtggtttatcagcaacgatagaagaatttatctatgcagcagaatatattgcttcacaaggtaaccgaaatattattttatgtgagagaggtattcgtacatacgaaaaagcaactagaaatacattagatatctctgctgtacctattttaaagcaaggaacacatctacctgttatggttgatgtaacgcatagtacaggtagaaaagatattatgttaccgacagcgaaagcggctttagccgttggtgctgatggagttatggctgaagttcatccagatccttctgttgcgttaagtgatgccggtcaacaaatggatcttaatgaattcaatcaattttatcacgaattaaaaccacttgctgatatgtacaattcgaagaaactgaaatag

SEQ ID NO: 4516 - DNA, 990 bp, Staphylococcus epidermidis
atgacagttacaatttatgatgtagcccgagaggctagggtatcaatggcaactgtttcacgtgtagtaaatggaaaccaaaatgttaaaccagaaacacgtaataaagtaaatgaagtcattaaaaggttaaactatcgacctaacgcagttgcaagaggtcttgcaagtaaacgtacaacgacagttggagttataattcccgatatttcaaatgtttattattctcaacttgcaagaggtttagaagatattgcaacaatgtacaaatatcactcaattatctcaaactcagataatgatccagaaaaagaaaaagaaatttttaataatttattaagtaaacaagtcgatggtattattttcttaggtggaactatttctgaagaaattaaaagtcttattaatcaatcatctgtaccagtcgtagtttctggaacggatggtaaggatgatcatattgcatctgtaaatattgattttaaacaagcagccgaagaagcaacacaatatcttatagagaagggtgctaaaacattttctttaataggtggagaatactctataaaggcacaagatgatgttttagagggccttaaaaatgttttaagtcagcatcaactaaaattagacgatacattacatttaactggcaatgaaagttacaaatcaggtataaaaacatttgaacaattgcaatcgaatttaccagatgctgttctttgtattagtgatgagcaagcaataggtatattgcatagtgcacaagatgctggagtgaaagtacctgaagacttacagattattagttttaacaatacacgtttagtagaaatggtgagaccacagttatctagtgttattcaaccattgtatgatattggtgctgttggaatgagattactgactaaatacatgaacgatgaagaaattgaaaatcctaatgtcatattgcctcatagaatagaataccgtgggacaactcagtaa

SEQ ID NO: 4517 - DNA, 1668 bp, Staphylococcus epidermidis
ttggcacaattatcagatttagaaatagcaaacttatcaaaacttaaaccaataagtgaaattgcaagaaaagtagggattactgaggatgctttagaaccatacggccactataaagctaaaatagatattaatcagatacaagaacaggagaaaaaagggaaagtcgtattagtaactgctatgagcccaacaccagctggtgaaggaaaatccacagtaactgtaggtttagcagatgcatttaacaagttgaatcataatgttactgttgcattacgagaacctgccttaggaccaacttttggtattaaaggaggcgcaacaggtggtggttatgctcaagtacttcctatggaagatattaatttacattttaatggtgattttcatgcaattactactgcaaacaatgcactttccgcatttatcgacaaccacctacatcaaggaaatgaattgggaattgatcaacgaagaattgaatggaaacgtgttttagatatgaatgatcgtgcgttacgtcatgttaacgtaggattaggtggtacaactcacggagtacctagagaagatggttttaatataacagttgcgtcagagataatggctattttatgtctaagccgaaatatcaaagatttaaaagaaaaaataagtcgaattaccattggttatacacgtcatcataaacctataacagtttctgatttgaaagtagaaggtgcattaactttaatacttaaagatgcgattaaaccaaatttagttcaaacaattgagggaactccagctcttgttcacggaggcccttttgccaatattgctcatggttgtaactctatattagcaactgaaactgctagaaacttatctgatattgttgttacagaagcaggatttggttctgatttaggtgccgagaagtttatgaacattaaagctcgtgaagcaggtttcgatccatcagcagttgttgttgtagcaacgattcgtgctttgaaaatgcacggtggtgttgcaaaagaccaacttcaacatgagaacatagaggctgttgaagcgggacttgttaatcttgaaagacatgtgaataatattaaaaaatacggtgtcgaaccaatagtagctttaaatgcatttattcatgacacaccttctgaaacagcgtgtgtgaaacaatgggctaaagataatcaagtgcgtattgctttaacagaagtatgggaaaaaggtggagaaggtggaattgaacttgctaaccaagtgttcgatgtaatgcaggaacctcaaaactttaagcatttatatgagttaaaacaaccactcgaagctaaaattgaaacgattgttaaagaaatttatggaggttcaaaagtaaatttcagtagtaaagcacaaaaacaattaaagcaatttaaagagaatggctgggatgaatatccgatttgtatggctaaaactcaatattcatttagtgatgatcagacattgttaggtgccccgaatgattttgaaataacaattagagaacttgaagccaaaacaggcgctggattcatcgttgcattaactggtgctataatgactatgcctggtttaccgaagaaaccagctgcactaaatatggatgttactgatgatgggaaagcaataggtcttttctaa

SEQ ID NO: 4518 - DNA, 798 bp, Staphylococcus epidermidis
ttgattggttttattatactgttgtcattagtattatacttccaacaactaactaaagatgcttcgtcaataagtgatcgagagttgaaagcaaaaatccttcatatacctggcgatgagctaataaatcataataatcaaattttagaagaatatgatcattcacaaaatacactcatagttggaccgaaccatgtaaattcaaatattatacatgcacttacagcctctgaagatacattattttataaacataacggtattatgcctaaagcacttttaagggcgatgcttcaagatatcacaaattcaaaccaatcttctggtggtagtactatcacgcaacaattagtaaaaaatcaagtgctctcaaataaaaaaacttatagtcgtaaagcaaatgaaattatcttggctacacgggtcgaaaatttattatcaaaagatgaaatcatatatacgtatttaaatatcgtcccatttggtcatgactacaacggtgccaatataactggtatatcgtctgcttcatatagtctgtttggtatacctgcaaaagatttgaatattgcacaatcagcttatctcattggcttactgcaaagtccatacggctatacgccttatgacgaacacggcaaagtaaagccttaccatcttttaaaattgagcatgaaacgtcaacaatacgtacttaaacgtatgcgtgttgaaggaaaaatttctaaacaacaatacgaaaacgctaaaaaatacaatattaaacagcacttgctgaaacaatcgaaagacgaataa

SEQ ID NO: 4519 - DNA, 1266 bp, Staphylococcus epidermidis
atggctaatgctttaatagaagatttaaaatggagagggttaatttatcaacaaacagatgaagagggtatcgaagaattattaaataaggaacaggtcactttatattgcggcgcagatcctacagctgatagtttacatattggtcacttgttaccttttttaacattaagacgcttccaagaacatgggcatcgtcctatcgtcttaattggtggaggtactggtatgataggagatccttctggaaagtctgaagagcgcgtgttacaaacagaatcacaagttgaagctaacgtcaaaggcctgtctaatcaaatgcatcgattatttgaatttggcagtgataaaggggcaaaattagttaataataaagattggcttggtcaaatttcgttgattagttttcttagagattatggtaaacatgttggcgttaactatatgctaggaaaagattctattcaaacacgtttagaacatggtatctcttatacagaatttacttatactattttacaagctattgattttggctatttaaatcgtgagttaaattgtaaaattcaagtaggcggatctgatcaatggggtaatattacaagtggtattgaattaatgcgacgaatgtatggacaaactgaggcatatggcctaacaatcccattagtaactaaatcagatgggaagaaatttggtaaatcagagtctggagctgtgtggttagatcctgaaaagacaagtccatatgaattttatcaattttggattaatcaatctgacgaagatgtaattaaattcttaaaatattttacttttttagaaaaagaagaaattaatcgattagaacaatcaaaaaatgaagcgcctcacttacgtgaagcacagaaagcactagcggaaaatgttacgaaatttattcatggtgaagcagctttaaaagacgctatacgtatttcaaaagcactgtttagtggagatttaaaatcattatctgctaaagaacttaaagaagggtttaaagacgtacctcaagtaacgctatctacaaaaacgacaaatatagttgaagcacttattgaaacaggtattgcttcatctaaacgccaagcacgtgaagatgtaaacaacggtgcaatatatattaatggtgaacgtcaacaatcagtcgattatgagttaagtagtaaagaccttattgaagatgaaattacaataattcgacgaggaaagaaaaaatatttcatggttaattaccaatcataa

SEQ ID NO: 4520 - DNA, 1239 bp, Staphylococcus epidermidis
atgtcagaacaagaaaagaatcaacaccactatcgtaattcttcacagaagcgacacacttttccatggattaaaacaattattgttgcaataatcgctggaattattggagcacttctcgtcttaggtattggtaaactcctaaataaaaatggttttaacaatgaaagtgctactgttcatcaagtttcaaatagtcatggtggcaatcagttagatggtaaaagtaatcaatacaaatcagtacatgacatgattaaagacgtttctcccgcaattgtcggcgtgataaacatgcaaaaatctacaaaccttgatgatttattcaacggtaaggcatctaaatcaaaagaagcgggaattggttccggtgtgatttatcaaataagtgaaggttccgcatatatcgttacaaataatcacgttgttgatggtgcttcggaaattaaagttcaactacataattcaaaacaagtagatgccaaattaataggtaaagacgccctaacagatattgctgttctaaaaataaaagatacaaaaggaataaaagcaattcaatttgctaattcgtcaaaagttcaaacaggagatagtgtttttgcaatgggtaatcctctaggattagaatttgcaaattctgttacatcaggaattatttcagctagcgaacgtacaattgacgccaatacttctgctggtaatactaaagttaatgttttacagacagacgctgcaataaatcccggtaattcgggtggtgcattagtggatattaacggaaatctcgttggtatcaattccatgaaaattgcggcagcacaagtagaaggtataggttttgctatacctagtaatgaagttagagtgaccatcgaacaactcgttaaacatggtaaaatcgaacgcccttcaatcggtataggtcttataaatttaagtgatattcctgaaaactatcgtaaagaactacatactcataaagacaaaggcgtttatgtagctaaagtagacagtgaaaatgccattaaaaagggtgatattattactggaatagatggtaaacaaataaaagatgatacagatttaagaacttatttatacgagagcaaaaaaccaggtgaaacggttactctaaaagttatcagagatggtaagacacaagacattaatgtaaaattaaaaaaacaagcatctgcatctgaatcatctcaatcacaaagtcaatttgctcaataa

SEQ ID NO: 4521 - DNA, 624 bp, Staphylococcus epidermidis
atgtacaattttataagtaagattttagatgttattttagtgaaaatgtctaaatcattatatgttattggtaaggaaaatattcctaaagatagtaaatatgttgtaacttgtacgcatgaaagttataacgaagtaatcatgttaggaatggcattactacctaatcaaatccattatatggctaaaaaagaattatttaagaatcagtgggctggcaaatttttgaaatcactaaatgcatttccagttgatagagaaaatcctggtccaagtacattaaaaaaaccagtgaatttacttaaagaacataaaactataggtattttcccaactggtcatcgtacttcagtagagggagccccattaaaacgtggtgcagctactatagcaatgcttgggaaagcacctatcttaccagcagcttatgtgggtccaaaaaaaattcatggtttgattacaggtcaagcattaatcaaaattggtaaaccaattgagatggatgatattccaaaggatttgaaacggaacgagaaagttgatttcttaaccaaagaaatcgaaagacgcacaactcaattacaaaaagaacttaatgaaatttcacatagtttaaagaaatag

SEQ ID NO: 4522 - DNA, 1437 bp, Staphylococcus epidermidis
atgttacctgtagcagttctgccagcagccgcaattattgtaggcataggtcatgttttagatgctttaaatatacttcctcaagctgcactctttttcacaagtgttgggaccactatattagagcaattaggtatattatttgctattggtgtagctatcggtatggctaagaagaatgatggcgcagtagcattagcggcagcgttaggattttttatagttacagtagtactatctccagaaaaattagcaactttgttacaaattaaagaatctaaaattgatttagcattcagtcaaatgaataatggaaatgtgtttgtagggattattataggtttgattgctgcatatagttataacaaatttagtgaaacgaatttacctatggccttatcattcttcagtgggaaacgacttgttccaatcatgacagcattcttttgtacaattttagcgattattttattattgatttggcctccagtttataatgggatagttacttttggtaagtggattgttggtatgggtccattcggtgcattattatatggtttttttaatagattgttaatacctactgggttgcatcatgcgctcaataatgtattttggtttgatactgctggaataaatgacataggtaaatttcaaagtggtaaaaatgccattaagggaattactggcagataccaagcaggatttttccctgttatgatgtttggtgtaccggcagcagctttggcgatgtatcatactgcaaagacgaatcaaaaaaaacaagtttatgcttggtttttagcaagttcagtttcggcattctttgtgggtgtaactgaacccatagagtttgcattcatgtttgtagctccagttttatttgttattcatgctgttttaactggattatcattatttatagcagcaatgtttcattggacagcaggattttcatttagtgcaggtcttatagattatgtgctttcattggttaatccgatatctaatcaaccttggatgttattattgcagggtgtagtcttttttattatctattacgttatctttagagttgtcatacaagtctttaatttaagtactataggtaggggagataatgaacttatcgatccaacatcaaatgatacttctgaaatggaagtattacagaacaaaaccactacaagtaaatattatcaaaacgcaaaacgtattttagacggattaggtggtaaagaaaacattattagtttaaatcattgtgcaacaaggcttagattggagcttaaagataattcgattatagatgagcagaaaattaaaaatgctggagctattggtataactcaaaatggacaccattatacccaagtgattattggaacacacgtacaacaagttgccaatgaaatggatcaccaaatgaattag

SEQ ID NO: 4523 - DNA, 1125 bp, Staphylococcus epidermidis
atgaaggctatattatttgatgtagatggcgtatttttaagtgaagaacgatgttttgatgtttcagcaattactgtagctgaacttttatcgagtccagattttttaaattgtgacatagatattcattttgatggtaatttaactgaaaatgatataaacaaaatacgtagaaacgtatttaataatgaccgaatattaaatcaactaaagtcacttggtttaaattcaaattgggatatgctatttattgtatttagtattcatttaattgataaagctaaacaattaaaaccatcattacgagatcaattacttgatgaattattgtttaccaaagagactttaaaggaaatagcaaaggatttaactgataaaacgataaattatagcttaccttacgatgtgatagcttcgtttagaaatggtaaagatgctatttacgaagatttggaagtttacgctaaaaatcaattagaacttaacaacactagtttatttaaattgaaaagtgctttatggacattagcaaaagatatatatcaagaatggtatttaggaaaagctttatttaatcaagttgaatataaaaaagatattcaagattttaagaaaggtttcatttatgatgaggtcattcttaaacctatagaagaaattcaattattacttcaaaatctaatagaagcgggatatcaaattgcgatagcaactggtagacctcgaactgaaacaattatttcatttcaatcattgggattaaaatcttattttaaagatgaacatatcgtaacggcaagtgaggtgttgctagcagagaaacaatttcctcaatatcaacctttaggaaaacctaacccgtttagttacatcgctacgttaaatggaaattataatgaccaatatgaacgatatgcgacaaagcaagaagatatcgtaaataaagatgaggtttacatagtaggcgactctttagctgatttattaagtgcgaagaagataggggctacgttcattggtactttaactggtttaaaaggtaaagctgctcactctgaattagttgcaaatggagcagatcatgtagtagaggatataactaagattcgaaaaattctattatag

SEQ ID NO: 4524 - DNA, 1596 bp, Staphylococcus epidermidis
atgagtcataagatattagtatcagacccaatttctgaggatggtttacaaagtattttaaaacatccagaatttgacgtagatatacaaacagatttatctgaaaatgatttagtaaatatgatttcaacttatgatgctcttatcgtacgaagtcaaacccaagtaacagagcgaattattaatgctgcaacaaatttgaaggtcattgcaagagctggtgtaggtgtggataatattaatatagaagcagcgactttaaaaggtattttagtaattaatgctcctgatggtaatacaatttctgctacagaacattcagtagctatgttgcttgcaatggcacgaaatattcctcaagcacaccaatctttacgtaacaaagaatggaatcgtaaagcatttagaggggttgaactttatggcaaaaccttaggtgttatcggtgctggtaggattggtttgggcgtcgctaaacgtgcgcagagtttcggtatgaaaattttagcgttcgatccttatttaacagaagataaagcgaagtcattagatattcaaattgcaactgttgatgaaattgccgaaaaatccgactttgtaacagttcacacaccattaacacctaaaactcgaggaattgttggttcatctttctttaacaaagctaaacaaaacttacaaatcataaatgttgccagagggggtattatagatgaaactgcacttattgaagcattagataataacttaatagatcgtgcagctattgacgtatttgaacatgaacctcctactgattcccctctcattcaacatgataaaattattgtcacaccacatcttggcgcctctactgtagaagcgcaagagaaggttgcagtctctgtatctgaagaaataattgaaattctaactaaagggaatgttgagcatgctgtgaatgctccaaaaatggatttaagcaaagttgataaaacaactcaaagctttataggtttaagtacaactattggtgagtttgctattcagcttctcgatggtgctccgagtgaaattaaagttaaatatgctggtgacttagcgcaaaatgacactagtttaattacaagaacaattataacgaacatcttgaaagaagatttaggtaatgaagtcaatattattaatgcattagcaatacttaaccaacaaggtgtcacgtataatatagaaaaacaaaagaaacattctggctttagtagttacattgagctagaactagttaatgatcaagataaaatcaaaattggcgcaacggtattcgcaggttttggcccaagaatagtacgtattaatgattactcacttgattttaaacctaaccaatatcaattagtaacatgtcataaagataaacctggtatagtaggacaaacaggcaacctattgggaagtcacggaattaatattgcgtcaatgactttaggacgtaacgatgctggtggagatgctttaatgattctttctattgatcaacaagcaagtgaggaagttataaaaattttaaatgaaacaagcggattcaacaaaattattagcactaagttaacaatttga

SEQ ID NO: 4525 - DNA, 1164 bp, Staphylococcus epidermidis
atgcagtattaccaacctttattattaacacctggaccaactcctgtaccggaacaaatcttgagtgccgtacaattaccaatggtaggtcatcgttctactgactttgaggaaattgctagtgaagcatttaaaggtttaaagccagtatttggtagcaaaaacgaagtacttattcttacatctagtggcactagcgtattagaagcaagtatgcttaacatcgcgaatcctgacgatcatattgtgataattgtttctggtgcatttggaaatcgctttaaacaaatcgcacaaacttattataatcatgtacatgtatatgatgttaactggggtgaagctgtaatagttgatgactttatcacttatttaaagcaattaaacgttccagtcactgcagtattcactcaattttgtgaaacatctactggtgtcatacatccagttcaccaattaggtcatgcacttaaagcttttgataattccttatattttattgttgatggtgtaagctgtatcggtgcagtggatgttgatttaacaaaagataaaatcgatgtattagtttcgggaagtcaaaaagctatcatgctaccaccaggtctagcatttgttgcttatagcgatagagcaaaaaaacgatttgctgatgtaaaaacaccgagattctatttagatttaaataaatacataaaatcacaagagcaaaattcaacgcccttcacccctaatgttggtctatttagaggaataaatgcttatgtagaacttgtaaaaaaagaaggattaaatcacgttatttcacgccattttaaaatacgtaatgccttaagagcagcactaaaggcacttgaattagaattattagtaaaagatgatgctcatgcctcacctactgtgacctcatttgttccaaaaaatcaagaagaacttaatatcattaaaaatcaacttaaatctcaattcaatataactattgctgggggacaaggacacttaaaaggacaaattttgagaattggtcacatggggaaaatatctccttttgatattttagcagtcgtgtctgcattggaaattattttaacttctaatagaaatgtcaattatattggaacagggataactcaatttatggaggttattagacatgagtcataa

SEQ ID NO: 4526 - DNA, 441 bp, Staphylococcus epidermidis
atggttagacatgattttaaagttaaaactgaatggctaggtggacgcgaagaagtaggtaaacttcgaggagatattatcaatgaaaatatatccatcccctcttcactcggtggccaaggagaaggcacaaatccagatgaattactagtaagtgcagcatcatcttgttacatcatttcactcgctgcaacactagaaaagagtggttttactaatgtaaaaattaatcaacagtcaataggtacagcctcgtttgaaaataaaaaatttaaaatggaacgtattacacattatccctcaattaaagtaccctcttctcaaacagaaaagcttaaaagtattttagataaattattagtgattgcagataataattgtatgatatctaatgcaatacggaataatgtcattatttcaattgaacctaatttaatataa

SEQ ID NO: 4527 - DNA, 747 bp, Staphylococcus epidermidis
atgaaatttcgacgtccaaatcaacatttccaaatcgtagcgcatagaggattacctgaagattatcctgaaaatactattatcgcttatcgacatgcgctcatgttacatatagatatgttggaaattgatgtacattacacaaaagataaagaacttgtcgttatacatgatgatactatcgatcgtacgtcaaatggtaaaggtaaggtttctgattttactttaaaagaattaaaagcgttagattttggtttctataaaggagagaaatttaaaggggagagtataccgacttttgatgaagtgttagatttagcagataacttttcacaaaaattattaatagaaataaaaaagcctagtcagtatccaaatattgaaaatatgattgttgataaattgaaggaaagacaaatatctaaatctaaagtgattttacaatcattcgattttgattgtgtaaaaaaattgtcagcaatgaatttagattatgaattaggtttattaattagtaagaaaaaatattggcacaagttaccaaatttcaaaaaaattgccaaagttgctgattatgctaatcctaattatcaaattgtttcgaagaaatttatgcaacttgctcatgaggaagagttaaaagtattaccttatactgtaaataaattaaaagaatcacaaaaattaatagatattggtgttgacggtattatttccgatgtacctgaagatttatttgagctataa

SEQ ID NO: 4528 - DNA, 603 bp, Staphylococcus epidermidis
atggctcgattcagaggttcaaactggaaaaaatctcgtcgtttaggtatctcattaagcggtactggtaaagaattagaaaaacgaccatatgcaccaggacaacacggtcctaaccaacgtaaaaaattatcagaatatggtttacaattacgtgaaaaacaaaaattacgttacttatatggaatgactgaaagacaattccgtaacacatttgatattgctggtaagcaatatggtgtacacggtgaaaacttcatgattttacttgctagtcgtttagatgcagttgtttattcattaggtttagctcgtacacgtcgtcaagcacgtcaattagtaaaccacggtcacattgaagtggatggtggacgcgtagacatcccatcttactcattaaaacctggtcaagtgattacagttcgtgaaaaatcacaaaacttagatattattaaagaatctgttgaaattaacaatttcgtaccagaatatttagacttcgatgctgacaacttaaaaggtactttcgttcgattccctgaacgtagcgagttaccagctgaaatcaatgaacaattaatcgttgagtactactcaagataa

SEQ ID NO: 4529 - DNA, 117 bp, Staphylococcus epidermidis
atgaaaaaacaaaaaagagtgttacatgcttatcgagatatattgttttatgtgtcttcaccttatagcgacagttacgcgacacgtccacattgggaacaacatagagctagataa

SEQ ID NO: 4530 - DNA, 471 bp, Staphylococcus epidermidis
atgacaaagaatattccaacaaattacaaactgatatcaaaacaacttgctagtttaatcgaagatgaaaagaatttaattgcaatattaagcaatacttctgcccttcttaacgatacaattgatcaaattaattgggtaggtttttaccttattgaaaataacgaacttattcttgggccatttcaaggtcatcctgcttgtgtacatattgctattggtaaaggggtttgtggcactgccgtttcatctggtgaaacacaacgtgttaaagacgtccatcaattccctggccacatagcttgtgacgcaaatagtcaatcagaaattgttattccattacatcaaaacggcaagattatcggagtattagatattgacgctcctataaaaaacagattttcacaagatgatcaagaaggacttgaatccattgtaaaaactttagaaaaacaactcaatcaaatttaa

SEQ ID NO: 4531 - DNA, 1695 bp, Staphylococcus epidermidis
atggtgttatttatcatattagcaatattagtagttattttaattgctattggcgtattgttttatatgcgctcaaacaaaagaaatttaattgaaaaaacagaagagcgtaagaacgaaattgaacaattacctttagatgataacctaagaaaacttactggtttaaatttaaaaggtgaaacaaagactaagtatgatgcaatgaaaaaagacaacacagaaactacaaataaatacttagctccagtggaagaaaaaattcaaaatgctgaagagttgttagagaaatttaaattcacggcagcacaaactgaaattgatgatgctcacgaattaatggatcaatacgaagagaattatcagcatcaagtaactcaagtggacgacattataaacttacataaagaaaatgaagcattgtatgaaaagtgtaaagttgactatcgtgaaatgaaacgtgatgtattagccaatcgtcatcaatttggtgaagcagctgaaccacttgaaaatgaaatcgaaaattatgagcccaagttaaatgaatatgagaatttaaaaagtgaaggtaattatgttcaagctcataatcacattgctgctttagaagatcaaattaaaaatttaaaatcttatatggatgaaattccagaattaattcgagaaactcaaaaagaattaccaggacagtttcaagatttaaaatatggatgtagagacttaaaggttgaaggctatgatttagaccatgtcaaagtcgatggtacaatacaaagtcttaagacagaattaagttttgttgaaccaatgattagtcgattagaattagatgaagctaataataaacttgaaaatattaatgataaattagatgaaatgtatgatcttattgaatatgaagtaaaagccaaaaatgaagttgaagaaacgaaagatatcattactgatgacttatttaaggccaaagatatgaactatacattacaaaccgaaattgaatatgttcgtgaaaactactatattaatgaatcagatgctcaaagtgtaagacaatttgaaaatgaaattcaaagtctcatctcagtttatgatgatattttaaaagaaacttctaaatctgcggtacgttacagtgaagtacaagataatttacagtaccttgaagatcatgtatctgtgattaacaaagaacaagataaacttcaaaatcatcttatccaattacgcgaagatgaagctgaagcagaagataatttattgagagtgcaatctaagaaagaagaagtttatcgacgtttattagcttctaatttaactagcgtcccagaacgttttattatcatgaaaaatgaaattgataatgaagtaagagaagtaaatgaacaatttagcgaacgtccaattcatgttaaacaactaaaggataaagtagcaaaaattgttattcaaatgaatacatttgaagatgaagctaacgatgtacttgtaaatgctgtatacgcagaaaagcttattcaatatggtaatagataccgtaaggaccatcatcatgttgataaaagcttaaatgaagctgaacgattatttaaaaataaccgatataaacgtgcgatagagatagctgaagaagcattagaaagtgttgaacctggtattaccaaacatattgaagagcaagtgattaaagaatag

SEQ ID NO: 4532 - DNA, 1140 bp, Staphylococcus epidermidis
gtgatttatttagacaatgcagccactaccaaagctgatcaagatgttgttgattcattcgtgaaagtgaaccaaacattatacttcaatccaaatagtcctcatcatgcaggggttcaagctgaacaattattattaaaagcaaaaagtgaaatcaatcgtatattaaacttaaataatcagtttgatatcatttttacaagtggcgcaactgaatcgaataatatactgctaaaaggtattgcgtatatgaaaaaagaaactgctaatgagattatcacatcagtcttagaacatccttcagttttggaagtaatgaggtatttggaaagggaaaaaggttttaaattaaaatacgttgatgtgacaaaagaaggtaagttggacacagaacacttaaaatcattaatgacagataaagtaggacttgtgacatgtatgtatgtcaataatattatgggacaaattcaacctattgaagaaatagcaaatattgtaaaaaattacccacgtgcacactttcatgttgatgcagtccaggctttaggtaaagtgcctatgcaaattaatcatattgatagtttgagtttaagtggtcataagtttaatggacttaaaggtcagggactactacttttaaaaaatattcaaaacatagaacctatagtacatggtggtgggcaagaatatgggctacgaagtggtacaattaatctaccaatggctatctctatggttagagctataaagaatgcagttgatcaaacaaaagagcttaatttacgtttaagcaattataaaaataaattactttcatttttagcagaatacaaaaatgtatttatcaactctcctcaaaatgcatcacctcatattataaatataggatttccaggtgttaagggtgaggtacttgttaatgctttttccaaacaaaacgtaatggtttcaactacaagcgcttgttcttctaagatgaataaattgaatgaggttttacttgcaatggaaattgcagagtcaaaaatagaaggtagtataagaatttctttaggggcacatacgactgaaaacgatatattaagttttatgaatgcatttgaatctgtatataaggaaattaaggagctgttaaagtaa

SEQ ID NO: 4533 - DNA, 1224 bp, Staphylococcus epidermidis
atgcaatatgatcatttattagttagatatggagagcttacgcttaaaggtacgaatagaaaaatgtttgttaatcaacttaaagataatgtgaaacgcgcgcttattccattaagtggttatcatgtcaaaggaaagagggatagaatgtacatagaattatcccctgaagcagacataaatgaaatcattcaacgcttatctaaagtttatggtataaaatcaattagtccagttataaaaattgataaaaacgaagagaaaattaatcaatcagcaatacagttatctcatgactttgaaaaaggttcaacttttaaggttgatgtaaaacgcgttgacaagtcatttcgattggatacgtacgaattgcaacgtcaagtcggtggagcaatactaaaagaaaataataatataacagtgaatgttaaaaatcctgactatgaaattaaaatagaagtaagaatggatgctatttatatttatgaaaaagtaatcgctggtgcaggtggactgccagtcggtacaggtggtaagacattacttatgttaagtggtggtattgattctcctgtagcgggaatagaagtaatgaaacgtggtgtaactgttgaagcaatacattttcatagtccaccgtttacgagcgaaaaagccaaagataaagttatcgaattaacaagaattctagcggaacgtgttggtcctatcaaattgcatctcgtgccatttacagaaatacaaaagcaaattaataaagttgtacatcctcgttatacgatgacttctacaagaagaatgatgatgcgtatatctgataaagttgtacatcaaataaatgctaatgctatcgtaaatggagagaatcttggtcaagtagcaagtcagacgctaaagagtatgtacgctattaatcatgttacagctacacctgttttaagacctctattaacgttagataaagaagacattattaagaaagcgaaagaacttggtacatttgaaacatctattcaaccctatgaagattgttgtacaatatttactccgaaaaatcctgtaactgaaccggactttgacaaagtaataaaatatgaaagtgtatttaattttgatgaaatgatagaaaatgcagttgaaaatattgaaacattaacaatagatcaaaattataaaagtgcgaaagaacaatctacagattcattgattaaagatttattctaa

SEQ ID NO: 4534 - DNA, 765 bp, Staphylococcus epidermidis
atggattggaatttatcgattatgttgatgattgttgcctttggttttatcgcttcattcgtcgattctgtagttggtgggggtggactaatttcaacccccgcattacttgcagttggtttgccaccatctgttgctttaggtacaaataaatttgcgagttcttttagtacgttaacaagtgcattaaaatttttacgttcaggtaaagttgacttgaaaatagtaggaaagatgtttccactaatatttgttgcttctggtggtggtgctatcattgcgacatacataccagcaaatattttaaaaccgctaatcattatagcattgtcattagttcttatttataccgtcatacaaaaagattggggaaatataagaacatttaccgattttacttttacaaaagcagtattatttacattaatatttattgttattggattttatgatgggtttttaggtggtggtacaggctcctttatgctatttacacttttattatttggctttgactttttaagtgcagctggtaatgcaaaggttttaaattttgcatcaaattgtggtgcgttattatttttcatgattttaggtcaggtcaattatttttatggtattattatggcttctagcatgatgataggtgcgttgttaggtgctcaatttgctttgaaaaaaggggtaggatatgtaaaagctttatttttagtggttactgcaatattaattataaaaaatctctacgattttattgtgcagtaa

SEQ ID NO: 4535 - DNA, 495 bp, Staphylococcus epidermidis
atgactcaaattacatttaaaaataatcccattaaattatcaggttctgaagtgaatgaaggtgatatcgcaccaaatttcacagtgcttgataatagtttgaatcaaattactttagatgattataaaaacaaaaagaaattaattagtgttataccatctattgatacaggagtatgtgatagtcaaactcgaaagtttaatgaagaagcttcagcagaagatggtgtagttttaacgatatcagtagatttacctttcgcccaaaaaagatggtgtgcatcaagcggattagataatgtaattactttaagtgatcataaagatttatcttttggtcgaaattatggacttgtgatggatgaattacgcttacttgcacgttcggtatttgtgttaaacgaaaacaataaagtagtatataaggaaattgtcagcgaaggtacgaattaccctgattttgaagctgcattaaaagcttacagaaatatttag

SEQ ID NO: 4536 - DNA, 948 bp, Staphylococcus epidermidis
atgtctgaagaaaatactattatggaacgtctatttcataaattagatgataaagctaaaacgttaaacaaagaaaatggacagagttttatcgaaaatttagggttagctatggaagatatttatacaaaccaaagagaacttttagaacaagcaacgcttcaagatagaaggaaagcttttcaatttgcatatttaagtttattacaagaagaaaatattcaagctaatcatcagatcacgcctgactctataggactcattctcggttttcttgttcaacgctttttagaacataaaaaggaaatgcacattgtagatattgcaagtggggcaggtcatctaagtgcagctgtgaaagaagtactttctgataaaacaattatgcatcatctgatagaggtagatccagtgctatcacgtgtaagtgtgcatttggctaattttttagagataccgtttgacgtttatcctcaagatgcgattatgccattaccattggaagaggctgatgtcgtgattggagatttcccaataggatactatcctttagatgaacgtagtagagaaatgaagttaggctttgaagagggacacagttattcccatcatctgttaatagaacaatctattaatgcgctaaaaggggcaggttatgcatttttagttgttcctagtcatctccttgaagatgataaagtgaaacagttggaaaatttcattgctacagagactgagatgcaagcatttttaaatttacctaaaacattatttaaaaatgaaaaagcacgtaaatctatattgattttacaaaagaaaaaatcaggcgaaactcgaccagttgaagtcttattagccaatatccctgattttaaaaatcctcaacaatttcaaggtttcatttctgaattgaatcagtggatagtcacaaatcatacaaaaaaatag

SEQ ID NO: 4537 - DNA, 1254 bp, Staphylococcus epidermidis
atgtcaaaattaattttggcggtaaatgctggtagctcatctttaaagttccagctaattaagatgcctgaagaaaaactagtaactaaaggtgtgatagaacgtattggtttaagcgattctatcttcaccattcatgttaatggcgagaagcttactgatatcagagatatccataatcatgaagaagccgttaatataatgttagatagttttaaagaacatgaaatgattaaagacatcactgatattcaaggaacaggtcatcgtgttgtacacggtggtgaaactttccctaaatcagttgttgttactgatgaagtagaatctcaaattgaagaattaagtgaattagcacctttacacaatccagctaatttaatgggaattagagcttttagaaagttattaccagaaatcccacacgttgcagtgtttgatacttctttccatcaaactatgcctgaacaagcttatttatatagcttgccatatcattactatgaagactatggcatacgtaagtatggtttccacggtacaagccataaatatgtatctcgtagagctgctcaaattgttggtagaccaattgaagatttaagaattatttcttgtcacatcggtaacggtgcatctattgcagctatagatggtggagaatctattgatacatctatgggattcacaccacttgctggtgtaacgatggggactcgttcggggaatcttgatccagcattaataccattcattatggaaaaaacgggtaaaacagctgatgaagttttagaaatacttaataaagaatcaggattattaggtcttactgggacatcaagtgatttgcgtgatttaactgaagaagctaaacatggacgtcaacgttcccgtgttgctctggatttatttgcttcaaaaattcacaaatatattggctcttatgcagctagaatgcatggtgtagatgttattgtatttactgcaggaataggtgaaaattcacatattattcgtggtaaagttttagaaggacttgagtttatgggtgtttattgggatcctaagaagaatgaaagtttacatggtgaagaaggttatattaactatccacattcacctgtaaaagtacttgttgtacctactgatgaagaagtaatgatatctcgtgatgtgattaaatatggtaaacttaatgataatacacccaaaaaagaagaatttgataccaacgaaagtatcgaagtgaattaa

SEQ ID NO: 4538 - DNA, 156 bp, Staphylococcus epidermidis
atgtataaagactataacatgactcaacatactctactaatggaaacttcagttcttatccccacaaatgatatttcacgacatgtaaatgatattgcagaaacaattcccgatactgaattcgatgaattcagatatcatcgtggcttaatataa

SEQ ID NO: 4539 - DNA, 504 bp, Staphylococcus epidermidis
atgatgatttcttataaaaacatattaatcgcagtcgatggatctcacgaagcagaatgggcttttaacaaagctgtcggtgttgctaaacgtaacgatgctcaattaactattgtgaatgtaattgactcacgtacgtattcttcttatgaagtatacgatgctcaattcacagaaaaatcaaagcatttctccgaagaattacttaaaggttataaagaagtagccacaaatgcaggtgtaaaaaatgtggacacacgtttagaattcggctcacctaaagcaattatacctaaaaaattagcgcgtgatgttggtgctgatttgattatgagtggtacatcaggtttaaatgcggtagaacgttttattgttggctctgtatcagaagcgattgttcgacatgcaccttgtgacgtattagttgtgcgtacagaagaaatgcctgaagatttccaacctcaagtagcaacacctcaattacgtgaaaaatatcaagattag

SEQ ID NO: 4540 - DNA, 1116 bp, Staphylococcus epidermidis
atgaaaattgggattcctaaagaaataaagaataatgagaatcgagtggggttatccccaagtggtgtacatgcacttgtagaccaaggacatgaagttttagtagaaacaaatgctggtctaggatcttactttgaagatggtgattatcaagaagccggtgccaaaattgttgatgagcagtcaaaagcttgggatgttgatatggtcatcaaagttaaagaaccacttgaatcggaatacaaattctttaaagaagagttaatcttatttacttatttacaccttgcgaatgaacagaaattaactcaggcacttgtggacaacaaggttatatctattgcctatgaaactgtacaattaccagacggttctttaccgttattaacaccaatgagtgaagtggctggtagaatgtctacacaagtgggagctgaatttttacaaagatttaatggaggtatgggtatcttactaggtggcatacctggagtacctaaaggcaaagtcactatcattggtggtggtcaagcaggtacaaatgcagctaagatagctttaggattgggagctgaagtgacaatactagatgttaatcctaaacgtttagaagaattagaggacttatttgatggcagagtaagaacaattatgtctaatccattaaatatagaaatgtatgtgaaagaaagcgatttagtgattggagcagtccttattccaggtgctaaagctccaaacttagtgactgaagatatgataaaagaaatgaaagatggatcagtgattgtagatattgcgatagatcaaggtggaatttttgaaacaactgataagattactactcatgataatccgacttacactaaacatggtgtcgtgcattatgctgtagctaatatgccaggtgccgttccacgtacatctacaattggattgaacaatgcaacattaccttatgcgcaattattggctaataaaggttatcgtgaagcatttaaagtaaatcatccattatctctaggtctgaatacatttaatggacatgtgactaataagaatgtagctgatacatttaattttgaatacacttcaattgaagatgcattgaaataa

SEQ ID NO: 4541 - DNA, 1056 bp, Staphylococcus epidermidis
atgactaaaataaaagaaatcaaaaaagttttacaacaagaagatgctgatgcagcatggattacgacacccttaaacatcttttactttactgggtatcgaagtgagccacatgaaagactcttcgctttgcttattccatcaaatgaagagcctgttttattttgtccaaaaatggaagttgaagaagtaaaacaatcaccgtttaaaggtaaaatcatcggttatttagatactgaaaacccattcgacaaatactctaaaactttctctaaaatgctcattgaaagtgaacatcttacagttaaacgtcaaagagaactaacaaaagcctttaatatagaacactatcaagatgttgatcaatcaatcaaggacttacgcaatatcaaatcagaagatgaaattatcaatataaaaaaagcagctgcgttagctgataaatgtattgaaattggtaaatcctttcttaaagaaggtgttgaagaaagagaagttgtcaaccatatcgaaaacgaaataaaaaaatatggtgttaatgaaatgagtttcgacacgatggtactcttcggtgaccatgctgcttcaccacatggaacacccggtgacagaaaattacagcaaaatgagtttgtactatttgatttaggtgttgtataccatcattattgcagtgatatgacacgcacaattcattttggcacacctaataaggaagcacaaaatatatataacattgttttaaaagcagaaacagaagcaattaaatctattaaaccaggagttaccatcaaagatattgataaaattgctagagatatcatcgaagaagcaggttatggtgattacttcccacatagactaggtcatggattaggtcttgaagaacacgaatatcaagatatatcaagtgtaaataataatcaacttgaagcaggcatggtgattactatagagcctggcatatatgtccctcatgtggctggtgttagaattgaagatgatattttagtaactgaaaatggttatgaaatattaactcaatacgaaaaataa

SEQ ID NO: 4542 - DNA, 690 bp, Staphylococcus epidermidis
atgaaactttcatttcatggtcaatcaacaatttattttgaaggtaacggcaagaaagttatagttgatccatttatctctggcaacgataaatgtgacctagatgaacaaacgttagaggtagattacattatcttaacacatggtcacgctgaccattttggtgatgtagttgaattggctaatcgtaatcatgcaactgtgattggttcggcagaattacaaggatatttatctacttatcacggagtcgaaaatgttcatggcatgaacattggtgggaaggctaaatttgattttggaacagtcaaatttgttcaagcattccatagttctagctttacacatgacaatggtgtgcctgtatatttaggtatgcctatgggaattattgtcgaagctgaaggcaagactatctatcatactggggatacaggattatttagtgatatgaaactgatagcagatagacacccagttgatgtatgttttgttcctattggagataactttactatgggaatagaagatgctagttacgctattaatgaatttattaagcctacaatcagtgttcctattcattacaatacattcccgttaattgaacaagatccagagcaatttaaggatgcagttcaggtaggggaagtacaaattcttaaaccgggtgaatcagtggaattttaa

SEQ ID NO: 4543 - DNA, 414 bp, Staphylococcus epidermidis
atgtataaacatattctacttggggtagacactcaaattaaaaatgagaaagctcttaaagaggtgtctcgtttagctggtgaaggaactatcgtcacagttttaaatgccattaatgagcaagatgctcaagcgtcaatcagagctggcgtacatttagataagctaaccgaaaaacgttctaaaggtttagaaagtacacttaaaactctagaagactacggcattgattatgatgaagttattgtaagaggcaatgctaaggatgagctattaaaatttgcaaatagtggtaaatatgaaattattgttctaagtaaccgaaaagctgaagacaataagaaatttgttttaggtagcgtaagtcataaagtagctaaacgtgctactattcctgttttaattgttaaataa

SEQ ID NO: 4544 - DNA, 1299 bp, Staphylococcus epidermidis
atgacaaagaatgaacaaataattaaacatatcgaatctttatcaattggctctaaaatctctgtacgaaagattgctaaagatcttaatgtgtctgaaggtactgcgtatagagcaattaaagatgcgagtcaacttggaattgtagcaactattgacagagttggtactgttagaatcgagaaacgaagtagagaaaatttagataacttaacgtttaatgaaattgcaaatattgtcgagggtcaaatacttgccggtagagctggacttaataaatcagtttcaaaatttgcgataggagcaatgcaatttgatgatattctgaaatatataggcaaacacacattattaattgttggaaatagagaaaatgtacagattgaagctttaaaacgtgaaacttcaatactcatcacaggtggttttcgtccaagtgctgaaatcatacgttatgcagatgagcatgaattaccaattatttcttcaagttatgatacattcttagttgctaatatcatcaataaagcaatgtttaatcaaaaaatacgcaaagaaatacttgtggttgaggatatagttaaaccaatcaatgaactatcagtgttatttgattcaatgacaatacatgattacaaaaaaatagcgaatgaaaccggccatacaaggtttcctatagtaaacgaagaatttaaattagtaggtatagtaactagtagagaaatcattaatatgaacgaagaagacctattaggtaaagttatgactaaaaatccattgagtgttaaattaacaaatacggttgctagttgtgcccatttattaatttgggaagggattgaattattaccagtaactgataataataaaaaagctgtcggtgtgattaacagacaggatgttttaaaatcaatgcaattattaggtagacaacctcaaattggtgaaacagtcaatgatcaaattgccaaacatatttcaatacatcaacaaggaataaatgtcgacgtatctccactcattacaaatcattacggtacactaagtaaagcagtatttgttggaattattgaggaaacgattcggcacgaaatgagaaagtataaaaaaggtaatgtcatgatagaaagtatgagtattatctatattaagactgtaccaattgaatctactattgaagtacattatgaaatgttagatgttggccgatattttgctaaattagaagttactatgattaataatggtgaaaaagttgctaatgcattagtaatttgtcaaatgtttgatggattttaa

SEQ ID NO: 4545 - DNA, 939 bp, Staphylococcus epidermidis
atggaagtaaaaatgaatgaaataatggaagcattagaacaaagtgaattaattattattcacagacatctaagaccagatccagacgcatatggttcgcaattaggtttgaaatattacttacaaaagaagtttccaaacaaacaaatttatgcagtaggagctaatgaagattctttgaaattcataggtttgatggacgaaattgacgatgatatgtacaagaaagcgactgtagttgtatgtgatacggcaaatgcgccaagaatagatgaccaacgttatgatacaggtaccaaacttttaaaaattgatcatcatcctgctactgatcagtatggagatattaactatgttaataccaaagcttcttccactagtgaaataatttacgaattcatttcacatttcaatgatgaacatatcattgatgaacaagttgctagagtattatatcttggcatcgttggtgatactggacgttttttatttaataatacaacgccacgaacaatgcaaattgctggaaaattacttacatatccttttgatcacaaccaagaattaaacaaaatgtctgaaaaggatccaaaactattaccatttcaaggatatatattgcaaaattttgatttaaatgataaaggattttgcaaagttaaaataactaaagacatacttgaaaaatttcaaatacaacctaatgaagcgtctttatttgtaaatacaatcgcagatattcgaggattaaaaatatggatgtttggcgttgatgaaggagatcaaattagatgtcggttgcgttctaaaggtcatattattattaatgatgtcgctaatacatttggtggtggtggacatccaaatgcatctggagtttcagtaaatagttgggagcaattcgggcaactcgccgaagctttaaacgacaagttataa

SEQ ID NO: 4546 - DNA, 3198 bp, Staphylococcus epidermidis
atggtagcacatttaaatattcatacttcttttgacctgttagattctagtttaagaattgatgcattaatagataaagctaaaaaagaaggatatcgtgcgcttgcaataaccgatacaaatgtattgtacggttatccaaagttttatgatgcttgtattgcagctcacatacatccaatctttggtatgactatatatttaacggatggtctctatactattgaaacggttgttttagcaaaaaataatcaaggactcaagtcattatatcaactttcttctgctataatgatgagaaataaagaagaagtgccaattgaatggctaaaaagatacgacgaacatttaattatcatatttaaagaggctgagttgtctcataagcaagttattgatgcttttgaaggtaagaaagaattatatttaaatcacaatagtaataatacattgactggcaaacgtgtatggatgcaatctgcaagatacttaaatgaagatgatgctgaaaccattccagcgttacatgccataagagataatactaagttagatttaatacatgagaaagaaacacttgatgaacattttcctagtatagaagaacttcaaacactaaatcttagtgaagatatgattactaacgcgaatgaaattgaagaattatgccaagcagaaattgcataccatcaatccctgttgccacaatttgtgacacctaatggtgaaacttcgaaagattatctttggacgatacttatacataggttacgagaatgggaacttaatgataaaacttatttcaatcggttgaaacatgaatataaaattattactgatatgggtttcgaggattattttcttattgtaagtgatttgattcattttgctaaaacacatgaagtgatggttgggccaggtcgtggttcatcagcagggtcattagtaagttatttattaggtattactactatagacccgttaaaatataatcttttatttgaaagatttcttaatcctgaacgcgtaactatgccagatattgatattgattttgaagacacgagacgtgaaaaagtaattaagtatgtacaagataaatatggtgaacatcatgtatcaggtattgtgacatttgggcatctgttagctcgtgctgttgctagagatgtaggaagaataatgggatttgatgaaacgagtttaaatgagatttcaaaacttattccacataaattaggtataactcttgaagaagcataccaaaagccagagtttaaagcatttgttcatcgtaatcatagaaatgaacgttggtttgaagtgagtaaaaagttagagggattaccaagacatacgtctacgcatgctgcaggtatcattatcaatgatcaaccattattcaaatttgccccattaacaactggtgatacaggattattaacgcagtggactatgacagaagcggaacgtataggattattaaaaattgatttcttgggattacgcaatctatcaattattcatcaaattattttacaagttaaaaaggatttaaatataaatattgatatagaagctataccttatgatgataaaaaagtttttgatttattatcaaacggtgacactacaggtatatttcaattggaatcagacggtgttagaagcgtattaaaaagattgcaacccgaacattttgaagatatcgtagctgtcacatcattatatagaccaggaccaatggaagaaataccaacttatataacccgtagacataatcctaaccaagttgcttatttacatccagatttagaaccaatcttaaaaaacacatatggtgttatcatttatcaagaacaaataatgctaatagcaagtcaagttgctggttttagttatggtgaagcagatattttaagaagggcaatgagtaaaaagaatcgtgcaatcttagaaagtgagcgtcaacatttcattgatggtgcaaaaaataacggttacggtgaacagataagtaagcaaatttttgatttaatacttaagtttgcagattatgggttcccacgtgcccatgctgttagttactcaaaaattgcatacattatgagctatttaaaagtgcactatcctcattatttttatgcaaatatcttgagtaatgtaataggaagtgaaaaaaagactgcagctatgattgacgaagctaagcaccaaagaattagcatcttgcctcccaatattaatcaaagtcattggtattataaggcaagtaataaaggaatatatctgtctttaggtacaattaaaggaattggatatcaaagcgttaaattaattattgatgaacgtcagcagaatggaccttatagagatttctttgatttttcaagacgtataccaaaaagggtgaaaaatagaaaattacttgagtctcttatcttagtaggcgcattcgacacttttggcaaaactagagcgacattattacaagcaattgatcaagtattagatttgaattctgatgttgagcaagatgaaatgcttttcgatcttttaactcctaaacaatcgtatgaagaaaaagaggaactacctgatcaattattaagtgattgtgaaaaagaatacctaggattctatattagtaaacatccagttgaaaagaaatttgaaaagaaacaatatttaggcatatttcaattgtctaatggaagtcactaccaacctatacttgttcaatttgaccatatcaaacaaataagaacgaagaatggtcaaaatatggcatttgtaacgatgaatgatggaagaacgatgatggatggagtgattttcccagataagtttaaaaaatacgaaacttctatttcaaaggaacagatgtatatcgtattaggtaaatttgaaaagcgtaaccaacaaatgcaacttatcatcaatcaactttttgaagttgaagcgtatgagcaaacaaaattgtctaattcgaaaaaagttattttacgtaatgtaacacatctagaaccacaatttgaacattcaaaagtagaatctaatgaacaacatgcattaaatatttatggttttgacgaaagtgcaaataagatgacaatgttgggacaaattgaacgtcaacgtcaaaattttgatctattaatacaaacttattcgccagctgatattagatttatttaa

SEQ ID NO: 4547 - DNA, 1230 bp, Staphylococcus epidermidis
atgtctttaagagatgacgctttagaaatgcatagagagaaccaaggtaaactagaaattacaccaaatgttaaagtgacaaataagcaacaattaagcctagcatactcacctggcgttgcagaaccttgtaaagaaatccatgaagattcaagaaaagtatatgagtacactattaaaggaaatacagttgctgttgtaacagatggaactgctgttctcggtttagggaatattggagcagaagcaagtattccagtaatggaaggaaaggcagcactgttcaaaagttttgcgggtattaatggtgtgccaatagctctagatacaactgacactcaagaaatcataaaaacagtaaaacttattgcaccaaactatggtggaattaatcttgaagatatatcagctccccgctgttttgaaattgaagaaaccttaaagaaagagaccaatatacctatttttcatgacgatcaacatggtacagctattgttactatggctgggttaatcaatgctttaaaaattgtagataaagagttaacggatataaaagttgtattaaatggtgcaggtgcagcaggtatcgctatagtgaagttacttcatgcttatggtgtgaataatatgattatgtgcgattcaaaaggtgctatttattctggcagaaattttggtatgaatgatacaaaaacatatgtagctaagtggacgaataaagataaagttgaaggttcacttgaagaagtgattaaagatgcagatgtttttataggtgtatctgtagcggatatattaactcaagatatggtgaagacaatggctgatgatccaattatttttgctatggctaatcctaatcctgaaatcaatcccaatgaagccaaacaggcaggtgcaaaggtcgtaggtacaggtcgatctgattttccaaaccaaattaataatgtattagcatttccaggtatttttagaggtgcattggatgttgaagccactcatattaacgaagatatgaaaaaggcagctgtagaagctatcgttcatttaatagacgaaaatgagttacatcctgattactgtataccaggaccatttgataaaagagtagctccatcagtagccaaaaatgtagctaaagctgctatggaatccggtgtagcaagaattaaaattgatacacaagaaatatttgataaaactatgaaacttactgacttaaaatag

SEQ ID NO: 4548 - DNA, 858 bp, Staphylococcus epidermidis
atgtttaaagatttttttaatcgaagcaagaaaaagaaatatttaacagttcaagattctaaacaaaatgatgtacctgctggtataatgacaaaatgtcctaattgcaaaaaaataatgtatacaaaagaattgaatgaaaatttaaatgtatgctttaattgtgatcatcatatagctttaaccgcatataaaagaatagaagcaatttcagacgatggatcatttatagaatttgatagaggtatgacatctgctaacccattagactttcctgggtatgaagaaaaaattgaaaaagatcagcaaaagactggacttaatgaagcgttagtgtctggtactgcgaaattagatggaatacaatatggtgttgcagttatggatgctcgttttagaatgggaagcatgggctctgtagttggtgaaaaaatatgcagaattattgattattgtacagaacatcgtttgccatttattctgttttctgcgagtggtggagctagaatgcaagagggaattatttctttaatgcaaatggggaaaacaagtgtttctttaaaaagacattctgatgcaggactattatatatttcttacataactaatcccactactggaggggtttctgcaagttttgcttcggttggagatattaatttaagtgaacctaaagcactaatcggatttgctggtagacgtgttatagaacaaacaattaatgaaaagttgcctgatgatttccaaactgctgagtttttattagagcatggtcaacttgataaagtcattcatcgaaaagatatgcgtgagactttatcaaatattttaaaaatccatcaagaggtgagtaactaa

SEQ ID NO: 4549 - DNA, 945 bp, Staphylococcus epidermidis
atgttagattttgaaaaaccactttttgaaattagaaataaaattgattctttaaaagaatcgcaagaaaaaaacgaagttgatcttcaagatgaaatagatatgctggaagcatcattaaaaagagaaactacaaaagtgtacactaatctaaaaccttgggatcgtgttcaaatcgctcgtttaccagaaagaccaaccacattagattatattccctatatttttgattcatttattgagttacatggcgatagaagttttagggatgatccagcaatgattggtggaattggttacttagatggtaagtctgtaacagttataggccaacaacgtggtaaagacacgaaagataatatttatcgtaattttggtatggctcacccagaagggtatagaaaagctttgcgtttaatgaaacaagcagagaaatttaatcgtccaatatttacttttatagatactaaaggtgcttatccgggtaaagcagctgaagaaagaggtcaaagtgaatcaattgcaaaaaatttgatggaaatggcttcattaacggtaccagttattgctgttgttattggtgaaggcggaagtggcggcgctttaggaattggaatctcaaatcgtgttctgatgcttgaaaatagtacttattcagttatttcacctgaaggagcagctgcacttttatggaaagatagtaacttagctcaaattgccgctgaaactatgaaaatcactgcgcatgatttactagatttaggtattatagatgaagtgattaatgagccacttggtggtgcgcaaaaagatgaagaagcacaagctttatcaattaagaaaatgttccttaaacatttaaatgaattaaagcaactcacacctgaagaattagcaaatgatcgttttgaaaaatttagaaaaattggttcagttgtggagtga

SEQ ID NO: 4550 - DNA, 924 bp, Staphylococcus epidermidis
atgaacgctgctgttcgtgcagtgactcggacagcaatttacaataatattgaagtttatggtgtttatcaaggttaccaaggtttacttgatgatgatattcataagcttgaattgggttcagtaggggatacaattcaacgaggaggaactttcctcttttccgcaaggtgccctcagttcaaagaagaggatgtacgtaagaaagctattgagaatttacgtaagcgtggtatcgaaggtttagttgttattggaggagatggcagctatagaggggcacaacgaattagtgaggaatgtaaagaaattcaaacaattggtattcctggtacaattgataatgatattaatggtacagattttacaattggttttgatactgcattaaacactattattgaatcagtcgataagattagagatacggcatcaagtcacgcaagaacgtttattgttgaagttatggggcgtgattgtggagatttagctttatgggctggattatctgtaggtgctgaaacgattgttttaccagaagtcaatacagatattaaggatgtagctgaaaagattgaacagggtattaaaagagggaaaaaacattctatcgttatggttgcagaaggttgtatgagcggccaagaatgtgcagatgagttaacgaagtatattaacattgatacacgagtttcagtgttaggtcacattcaacgtggcggtagcccatctggtgctgatcgagtattagcttctcgacttggtggatatgctgttgaactattaaaacaaggcgagacagctaaaggtgttggcattaggaataatcaattaacctctacgccgtttgatgaaatttttgctgaaagtgatcgcaaatttaatagtcaaatgtatgaattagcaaaagaattatcaatttaa

SEQ ID NO: 4551 - DNA, 1758 bp, Staphylococcus epidermidis
atgagaaagactaaaattgtatgtacaataggaccagcttcagaatcagaggaaatgctcgaaaaactaatgaatgcaggaatgaacgttgcgcgtttaaatttctcacatggtagtcatgaagaacataaagcaagaattgatacaattcgtaaagttgctaaacgtttaaataaaacaattggcttgttattggatactaaagggccagaaattcgtacgcacaatatgaaagatggacttattgttttagaaaaaggcaaagaagtcattgtcagtatgaatgaagttgaaggaacacctgaaaaattctctgtaacatatgaaaatctaatcaatgatgtcaatattggatcatatatactattagatgatggtttagttgaacttcaagtcaaagaaattaacaaagataaaggcgaagttaaatgtgatatcttaaatactggtgaattaaaaaataaaaaaggtgttaacttacctggtgttaaagttaatttacctggtatcactgataaagatgccgatgatatcagatttggtataaaggaaaatgtagactttatagctgcaagttttgtaagacgtccaagtgatgttttagatatccgtcaaattcttgaagaagaaaaagcagaaataacaattttccctaaaatcgaaaaccaagaaggtatcgataatattgaagaaattcttgaagtatctgatggattaatggtagcacgtggtgatatgggtgttgaaattccaccagaaagcgtaccaatggttcaaaaagatttaattagaaaatgtaataaattaggaaaacctgtaattactgcgactcaaatgcttgattctatgcaacgtaatccacgtgcgacacgtgcagaagcaagtgacgtagctaatgcaatatacgatggtactgacgctgtaatgttatcaggcgaaactgcagcaggtcaatatcctgaagaagctgttaaaactatgcgtaatattgcagtttctgctgaagcagcgcaagactataaaaaattattaagtgatcgtactaaattagttgaaacttcattagtaaatgcaattggtgtttctgttgcacatactgccttaaacttaaatgtaaaagctattgtagcagcaactgaaagtggttcaacagcacgtacgatttctaaatatcgtccacattcagatatcattgctgtaacacctagcgaaaaaactgctagacaatgtgcaattgtatggggagtaaatccggtcgttaaagaaggacgtaaaacaactgatgctttactaaataatgctgtagcaacagcagtagaaactggtagagtttcaaacggagatttaattattattactgctggtgtacctactggagaaaaaggaactacaaatatgatgaaaatccacttagtaggtgatgagattgctaaaggccaaggtgttggtagaggatctgttgtaggccatgcaattgtcgcagatagtgctagtgatttagaaggtaaagatttatctgataaagttattattacaaattctgttgatgaaacattagtaccatatgttgaaaaagctataggtctaattacagaagaaaatggtattacttcaccaagcgcaattataggtttagaaaaaggcatacctactgttgttggtgtagaacaagcaactaaagaaattaaaaatgatatgttagtgactttagatgcgtcacaaggtaaagtgtttgaaggttatgctaacgtcctttaa

SEQ ID NO: 4552 - DNA, 1359 bp, Staphylococcus epidermidis
atggctgagaatttacaaagagaattgagcaatagacatgttcaattaattgccatcggaggtgctataggaactggtctgttcctaggtgccggacaaactatcgcaatgactggtccctcaatattacttacttatattattatagggttcatgttatttatgttcatgcgtggattgggagaaattattattcaaaatacgaatttcaaatcttttgctgacgtgaccaacacatatataggaccgttcgcaggatttgtaacgggttggacttactggctatgttggattattactggtatggctgaagtgactgcagttgccaaatatataagtttttggttcccagacatacctaattggattagtgctttattctgtgtacttattctaatgtctttcaatttattaagtgcaaagttgtttggtgagcttgaattctggttcgcaatcattaaaatagttacaatcattgctttaatcgttataggtgtaatcatgattttattcgcattcaagacaccatttggtaacacaagtttaactcatttgtatcaacatggaatttttccaaaaggagcttctggattctttatgtcattccaaatggcattgttctcatttgttggtattgaaatgattggtgttactgcaggagagacaaaagatccagaaaaaactatacctaaagctatcaatagtgtacctattagaattttaatcttttatgttggtgcattagcagtcatcatgtccattattccatgggataaagtagatccagataatagtccattcgttagattgtttgcattaattggtataccgtttgcagcaggaataattaatttcgttgttttaacagctgctgcctcttcatgtaacagtggtattttctcaaacagcagaatgctttatggactttcaaaccaaaatcaagcaccaccaacatttgctagtactaataaacatggtgtgccacataaagcaatcattgcatcatcagctttattgttaattgcagcactactgaattacatattccctgatgcaacacttgtatttacttatgttactacgatttctacagtattatttgttgtggtttgggcattaattattattgcttatattaactatagtcgtaaaaatccagaacttcataagaaagcgacatataaactaccaggcggtcaatacatgggataccttatacttattttctttgtttttgtatttgccttgttatttataaatgttgatacaagaagagcgatttactgcacgcctatttggtttattttattaggtttaatgtacttaagatacaaaaaagctgataaagaatcacgataa

SEQ ID NO: 4553 - DNA, 1122 bp, Staphylococcus epidermidis
atggcagaattaaaaagaggtttagaaggggttattgcagctgaaactaaaattagctcgataattgacagtcagttaacatatgcgggctatgatattgacgatctcgcagaaaacgcgcaatttgaagaaataatttttttactatggaattatagacttcctaatgaaaatgagttaagtgaattaaaagaaaaattatttgattatatgactcttaataatagagtatacaagcactttgaggagtatgtgacggatcatgtacatccaatgactgctctacgtacatcagtatcatatgtagctcattttgatccagaagcggaaaatgaatctgatgagaataaatatgatagagctattcgtattcaagctaaaatcgcttctttagtaacggctttcgctagagttagagacggtaaagaacctgtcaaacctaactctgaacttagttatgcagcaaatttcttatatatgttaaggggagaactaccaacagaagttgaagttgaagcatttaataaggcattaattttacatgctgatcatgaacttaacgcatctgcatttacggcacgttgcgcagtatcttcattatcagatatgtattcaggtgttgttgcagctattggttcattaaaaggaccattacatggtggtgcaaatgaacgagtgatgtcaatgcttaaagaaataggaagcattgataatgtagatcactatttagatgaaagatttgcaaataaagataaaattatgggctttggtcatcgtgtttataaagatggtgatccaagagctaaatatttaagagaaatgagccgtaaaatcactgaagaaacagggcaaagtgaactgtttgaaatgtcattagccattgagaagagaatgaaagaagaaaaaggacttattcctaatgtcgatttctttagtgctacagtctatcatagtatgaatattccacatgacttattcacaccaatatttgcagtaagtcgtacttctggttggattgctcatattttagagcaatatcgagacaatagaattatgcgaccaagagctaaatatataggtgaacaaaatcgtaaatatgtgtctattgaagaaagaccataa

SEQ ID NO: 4554 - DNA, 1269 bp, Staphylococcus epidermidis
atgtctgcagaaaaaataacacagagtaaagatggtttaaatgtacctaatgaacctattattccgtttattattggtgatggtattggaccagatatttggaaagcagctagccgagtaatcgatgcagctgttgaaaaagcgtataatggagaaaaacgtatagaatggaaagaaatcttagcaggtcaaaaagcttacgatgaaactggagaatggttgccacaagaaacgttagaaacaatcaaagaatatttaattgctgttaaaggtcctttaacaactccaattggtggtggaattcgttcattaaacgtagcactgagacaagagttagatttattcacttgtttacgtccggtacgttggttcaaaggcgttccttcaccggttaaacgacctgaagatgttgatatggttattttccgtgaaaataccgaagatatatacgcagggatagaatttaaacaaggtacatcagaagtaaaaaaagttatagatttcttacaaaatgaaatgggagcaactaatattcgtttccctgaaacttctggtattggtataaagccagtatctaaagaaggtacagaacgtctagtaagagcagctattcaatatgcacttgataataatcgtaaatcagtaactttagttcataaaggtaatattatgaaatttactgaaggttcatttaagcagtggggctatgatttagctcataatgaatttggtgataaagtgtttacatggcaacaatatgatgaaattgttgaacaaaagggtaaagatgctgcaaatgaagcacaaagtaaagctgaacaagaaggtaaaattattattaaagactctattgctgatatcttcttacaacaaatattaactcgtccagctgaacatgatgttgtggcaactatgaatttaaatggtgactatatctctgatgctcttgcagctcaagttggaggcattggtattgcgcctggtgctaacattaactatgaaactggacatgctatttttgaagcaacacatggtactgcacctaaatatgctggtttaaataaggttaatccgtcatcagaaattttaagttcagttttaatgcttgaacatttaggttggcaagaagccgcagataaaatcactgactctattgaggcaacaattgcttcaaaaatcgtaacatatgattttgcgcgtcttatggatggtgcaaaagaagtttcaacatctgattttgctgatgaactaattaagaatattagataa

SEQ ID NO: 4555 - DNA, 711 bp, Staphylococcus epidermidis
atgtcacaaaaaatattagtggttgatgatgagcaatccatcgtgaccttactaaaatataatttagaaacagcagggtatatagtcgaagtcgcttatgatggtgaagaggcattgaaaaaagttgaaacagaacaaccggaactaattgtattagacgttatgttgccaaaaaaagatggtatagaagtatgtaaaacaatcaggtctgataaaaatttagtaccgattttaatgttgacagcaaaggacgatgaatttgatcgagttttagggcttgaactaggtgccgatgactatatgacaaaaccattttcacctagagaggtagttgccagagttaaagcaatattaagacgttctcaatttgtaaatgaaattgagaaggaagatgttgatgatgaagatattatcattggttcaattagaattcgacctgaattctttgaagtctataaagaagatgaattattagaattgacgccaaaagaatttgaattgttattatatttaattgaaagacaaggaagagttattactcgagaacatatgttgaattcagtgtggaattatgaattcgctggagattctcgaattgttgatgtacatataagccacttaagagataaattggaagaaaatcctaagcaacctaaattgataaagactgtacgtggtttaggttataaactggagagacctaaagcttaa

SEQ ID NO: 4556 - DNA, 1698 bp, Staphylococcus epidermidis
atgttgaagtttcatctgcgtttattactattaattagtactattacaatcattagttttattggtttaggcgctatcattcacaacacaatttatcaaacattaactagtaatcaaattaaaagcttagatagtgaagctcgtaattatgttaatctctttaataataataaagagaaagaaatcactaatatagctcataatgaaaaaaatatcatattaataaaagaaaaagataaagataaaattatttactcaagtggaaatattaaagatattgaccatagaattgataatgaagctaatccttcgaaattaatcaataaaaacacaaaactcggtatgcgttacacctataagaatacaatagatgataaaacaatatacataagtggaattaataatgaaattattgatttacaaaaagatttatggaaatacttgtctattgttggagtcattgtattatttacggtttatttagcaagtagaagtatcaatcgaacatatattagacctatcaatgaagtaacttatgctacatcacttctagcagatggatattaccatgttcgtgttccagaaagtaatgtgaaggaaactagggcattatttgtgactacaaatgacttagcacgacgattgcaaaaattaaacaatagtcaaaaaattcaatccaatagattaaaaactaccttagaaaatataccgagttcagtactgatgattgataaacatggagaaattgtagttgctaatcatgcttattatcaggtgtttaaccctgatcaaatggtagaaaataaaagttacattggtttcatagatgatagtattgaaaaattaattattgaaagttttagaactgaaaaagttatctatgaacaattagaagttgctattaataacgtacatactaaatatttcgatgtatcttgtatccccattttaactaaatctaaaaaaaatttacaaggtatggtggttgtgcttcatgacattactaatttgcagaaattagaaaaccttagaagggaatttgttgcaaatgtgtcacatgaactaaaaacaccgattacttcaatcaaaggttttgcagaaactctgattgaaggtgctaaaaatgatgaacaatcgcttgatatgtttttaaatattattttaaaagaatctaatagaatagagtcattggttacagacttattagatttatcacatatagaacagcaaaaagaacttgaaataaattacatgaatttatctgaattagctattaatataatagataatttgcaaacacaagcatacaataagagaatcaaaatacaatctgaaattgaaaaagatgtcatcattgaggcacatgaaaataaaatagcgcaagttattactaatttgctatcaaatgctataaattattcttcagaagataataaggtaatagtaagagtatatagaaatgacaataaagtttatttagagattcaagattatggtattggtataagtgaaacagatcaaaagcgtatatttgaacgtttctatcgtgtagataaagcgagaagtagagattcaggtggtacaggacttggtctgtctataacaaaacatattgttgaagcacataatggtagaatagacgtgaaaagtgcacctggcaaaggttcgatattcaaagttctatttaatgataattaa

SEQ ID NO: 4557 - DNA, 2631 bp, Staphylococcus epidermidis
ttgaataaattagtattaatagatggtaatagtctaagctttagagcgttttatgctctccctttactttcaaaccatgcaggtattcatacaaatgcagtttacggctttgctatgctcttagaaaaaataattaaagaagaaaaaccgaatcattttttagttgcatttgatgcaggtaaaacgactttcagacattctaagtacagtgaatataaaggtggtcgtcaaaagactccacctgaattaagtgagcaatttccatatattcgtcaacttttagatgcgtatcatattaaaagatatgaacttgataattatgaagctgatgacattataggaacattaagtagacaagctgatgaagaagattttgaaaccattatcattacaggtgatagagacttaactcaattagccactgataatgttacaatatattatacaaaaaaaggtgttaccgacgttgatcattatacacctaaatttatagcagagaaatataatggtttagtgccgaaacaaattatcgatatgaaaggtctaatgggggatacctctgacaatattcctggcgttgctggtgtcggcgaaaagacggctattaaattacttaatcaatttgagtcagtagaaggggtctatgaacatattgaggaggtcactgcaaaaaaactaaaagaaaaactcatcaatagtaaagatgatgccttaatgagtaaagatttagcaacaatcaatgttcacagtccgattgaagtatcattagaagatacaaaattaactctacaagacgacactacagaaaaaattgaactatttaaaaagctagaatttaaacaactattagcagatatagacacatcctctacgaatgaagaagtcatagataaaacttttgaaattgagcaagactttcaaaatgtagatttgaatgatttaaacgaagcggtaatacattttgaactcgaaggcactaattatcttaaagacactattctcaagtttggtttttatacaaatcatcaacatgtagtgataaatgctgaggatgtaaaggattataaacatttagttcaatggcttgaagataaaaatacaactaaaattgtctatgatgcaaaaaaaacttatgtatctgctcatcgattagggattaatatagaaaatattgaatttgatgttatgttagcaagctatattattgacccatcacgttctattgatgacgttaaatctgtggtaagtttatatggacaaaattatgtaaaagataatattacaatatttgggaaaggtaagaaacatcatatacctgaagaaccaattctaaacgaacacattgcctctgtgacagaagctatagcagctgtaactccaaccatgaaatcacagttagaagattataatcaaattgaactgttgaaagatttagaattaccattagcaagaattttaagtgaaatggaagaaattggtatatataccgatatcaatgatttgaaagaaatggaattcgaaattcaaaaaaaattggatgtattaatatccaatattcatgagtcggctggtgaagcgtttaatatcaattctcctaagcaattaggtgttgttttatttgaaacattacaattgcctgtcattaagaagaccaaaacgggctattcaacagctgtagacgtattagaaaaactacaaggtgagcatcctattatagatgatattttagaatatagacaacttgctaagttgcaatctacgtatgtagagggattacaaaaagtaataagcaaagatcatagaattcacacacgttttaatcaaacgcttgctcaaactggtagattatcaagtatagatcctaatttacaaaatatacctatacgattagaagaaggaagaaagattagaaaggcctttaaaccaacttctaaagatagtgtgattttatctgctgattattcacaaattgagttacgtgtacttgctcatattacgcaagatgaaagtttaaaacatgcatttataaacggacatgatattcacactgcaacagcaatgaaagtatttaatgttgaatctgaccaggttgatagtttaatgagacgtcaagcaaaagctgttaactttggtattgtatatggtatcagcgattatggattgagtcagagcttgggtattactagaaaacaagcaaaagcatttattgatgattatttagctagttttccaggtgtaaaacaatatatgtcagacattgttaaagatgcaaaagcacaaggttatgtggaaacactacttcatcgtcgtcgatacattcctgatataacaagtagaaactttaatttaagaagttttgcagaaagaacagcaatgaatacacccatacaaggtagtgcagctgacataataaaattagcaatggttaaattcagtgaaaagattaaagaaactaaatatcatgctaagttattattacaagttcatgatgaactcatatttgaaataccaaaatcagaagtagaagattttagtaaatttgtagaagaaattatggaacaagcattagtgctcgatgtacctttaaaagtagattcgaattatggtgcaacatggtacgatgctaaataa

SEQ ID NO: 4558 - DNA, 873 bp, Staphylococcus epidermidis
atgcctgaactacctgaagttgaacatgttaaaagaggtattgagccatttataaaaagtgcaaaaatagagaaagtaacttttgctaaaaatgtaattaacggtaagaataataaccgtgagacgattataaaaggtatggaattagatacttttaaaaaacttactgaaggttatgttataaaaaaagttgaaagaagaagtaagtacattattttttatatagcggatcatgacgatgatagaatcttagttagtcatttaggtatggcaggcggattctttgttgttaataaccttgatgagataagtacaccgaattatcgaaagcattggcaagtcattttcgatttggataataaacaaaaattagtctattctgatatcagacggtttggagaaattagaaatatagtcaattttgatagttatccatctttattagaaatcgctccagaaccatttgaagaggtggcatttgaacactatttagaatgtttgacaatgaaaaaatataagaataaaccaataaaacaaacgattcttgatcatcgtgttatagcaggagctggaaatatctatgcctgtgaagctttattcagagctggtattactccggataaaattactaattcactcactaaacaagaaagaaaatccctcttttattatgttcgagaagttttagaagagggtataaaatatggaggtactagtatttcagattataggcatgcagatggtaaaactggacaaatgcaattacatttaaatgtatataaacaaaaaaagtgcaaggtttgtggtcattcgattgaaacaaaagtgatagctggtagaaatagtcatttttgcccaaactgtcagagataa

SEQ ID NO: 4559 - DNA, 612 bp, Staphylococcus epidermidis
atgtctaaagtgattgggataactggtggtattgccactggaaaatcaacagtttcagaattattaacagcatatgggtttaaaatcgtagatgctgatattgcttcacgcgaagcagttaaaaaaggctctaagggtcttgaacaagttaaagagatttttggggaagaagcaattgacgaaaatggtgagatgaatcgtcaatatgtaggagagatagtttttaatcatcctgacttacgcgaggctcttaatgaaatagttcatcctattgtaagagagataatggaacaagagaaaaacaattatctagaacatggatatcatgtaattatggatatcccattgttgtacgaaaatgaactacaagatactgtagatgaagtttgggtggtttatacatctgaaagtattcaaatcgatcgtttaatggagaggaataatttatcattagaagatgctaaagcacgtgtttatagtcaaatatctatagataaaaaaagtaggatggcaaatcatgtgatagataatctaggtgataaattagaacttaaacagaatttacaaaaattacttgaagaagaagggtatattcaatcggagagtgaatag

SEQ ID NO: 4560 - DNA, 117 bp, Staphylococcus epidermidis
atgcataaagattataatatgactcaacttactttaccaaaggaaacttcagtacatattcccacacatgatatgtcacaatatgtgaatgatattgtaaaaaattccaggtactga

SEQ ID NO: 4561 - DNA, 150 bp, Staphylococcus epidermidis
atgatgtggttttcacaaattctaaacccttcttataaaatgattaatcgatatagagtaaatccaaaagtagatgttttattagaatccttatttattcaattccatagtcaatgtttgaatcaaaatcttataaatgataaagcttaa

SEQ ID NO: 4562 - DNA, 1026 bp, Staphylococcus epidermidis
atggcaacgaatattgcaattaacggtatgggtagaataggtagaatggtgttacgaatagcactaaataataaaaatttaaatgttaaagcgattaacgctagttatccacctgaaacaattgcacatttacttaattatgatacgacgcatggagtttatgataaaaaagttgaaccgattgaaagtggtattaaagtgaatggacatgaaattaaattactttctgatcgcaatccagaaaatttaccatggaatgagatggatattgatgttgttatagaagcgacaggtaaatttaatcacggagataaagcagttgctcatattaatgcaggtgctaaaaaggtattactcactggaccgtctaaaggtggagacgttcaaatgattgttaaaggagtcaatgataatcaacttgatattgatacatacgatatttttagtaatgcatcttgtactactaattgtatcggaccagttgcaaaagtcctcaatgataaatttggaatcataaatggtctgatgacaactgttcatgcaataacaaatgatcaaaaaaatattgataatccacacaaagatttaagaagagcacgttcttgtaatgaaagtattattccaacgtcaacaggtgctgctaaagcacttaaagaagtattgcctgaagttgaaggtaaacttcatggaatggctttaagagtaccaacaaaaaatgtctctctcgttgatttagttgttgatttagaacagaatgttacagttacacaagttaatgatgcatttaaaaatgccgatttatcaggtgttcttgatgttgaagaagctcctttagtttctgtagactttaacacaaatcctcattcagcaattattgattctcaatctacgatggttatgggacaaaataaggtgaaagttatcgcttggtatgataatgaatggggttattcgaatagagttgttgaagtagctgacaaaattggacaattaattgatgataaagcaatggtaaaagccatttaa

SEQ ID NO: 4563 - DNA, 471 bp, Staphylococcus epidermidis
atgaaatgcccaaaatgtaattctacacattccagagtggttgattcaagacatgcagatgaggccaatgcgattagacgtagaagagaatgtgaaaattgcggaacgcgttttacaacatttgaacatattgaagttagtccattaatagtagtgaagaaagatgggactagagaacaatttttaagagaaaaaatattaaatggtttagtaagatcttgcgagaaacgaccagtacgttatcaacaacttgaagacataactaataaagtggagtggcaacttagagatgagggacaaactgaaatttcttctagagaaattggagagcatgttatgaatttgttaatgcatgttgaccaagtttcctatgtaagatttgcatctgtatataaagaattcaaagatgttgatcaactcttagagtcaatgcaaggtatcttgagtgataataaacggagtgataaatag

SEQ ID NO: 4564 - DNA, 1371 bp, Staphylococcus epidermidis
atggggttacaaacctatgaatatggtctaaaaccacaagatggatttgaggtgattacacatttcgaattcacctcacaacatttagatattttaaatcgactattcacccctttaatcggagttgaatcaattggactctatcattttatgagtcaattcatagatgaaagtcaacaactcgggttaacgcattatatattcatgaatgaactaaaaattaacttattagatttcagggagcaaatggacaatttagaggctattggattgattaaaacatttgtaaggcatgaagaaaagtactctcactttgtttatgagttaattcagcctccaacagcctatcaattttttaatgatcctatgttatcagtatttttatttagtgaggttgataaaaaacgttatcaagcacttaaatcttatttcgaaaaagatgagaaagatttaagcaaatatcaacagacaactagaaaatttacagaagtattcaacgtacctaaaaaggtcaatgtttctgatcaaattaatttaaagcaaatcaaacactatgatggtatagatttatctaatgaaacttttgattttgaaatgttgagacagatgttgaaccatcattttattagtaatgaaattatcgataaagaagctaagaatttgattatacaacttgcgacactttatggaattactgaagatggtatgaaaaatgttatattaagttccattaccagtgcacaacaattatcttttgaagaaatgcgtaagaaagctagaacttattacctgattgaacatgataatcaattaccaaaattagagcatcaaacaaataaaattaacgatgaaaaaaaagatcgacaagcggaagatacaacaaatgattggttacaactgctagatgaaacaagtccgattgatatgttagcaagttggtctgattcggaacctacacagtcgcaaaaaagtatgatagaagaattgattaaccgtgaaaaaatgaattttggtgtaatcaatatacttttacagtttgttatgttaaaagaagatatgaagttgccaaaatcttatatttttgaaattgcttccaactggaagaaaattggtatttcaaatgccaaacaagcatatgaatatgcattacaagttaatcaacctaaaaattacgaaacacattctaatgataaacgacagaacaatcgtggaagacaaaatcaatttttatccaaagaaaagacacctaaatggcttcaaaatagggacgatcaagaagaaaataaagaaataaatgatgacactctcgaagaagatcgacaagcatttcttgaaaagttaaatcaaaagtggaaggaggaagataactaa

SEQ ID NO: 4565 - DNA, 921 bp, Staphylococcus epidermidis
atgaaaagtttcagaaatatcatgggcgattctcaaaatctagataaacgtatacaaaaaataaaacaaaatgtaatcaatgatactgacgttaaacattttcttgagaaaaatcgtagaaatataactaatgagatgatagacgaagatttaaatgttcttcaagagtataaagatcaacaaaaagtttatgatggacatcgctatgatgattgtccgaattttgtaaaaggacatgttcctgaactatatattgaaaatgaaagaatcaaaattagatatctaccttgcccgtgtaaaattaaacatgatgaggaacgatttgattcacaacttattacatctcaccatatgcaaagagatacacttcatgcaaagctcaaagatatttatatgaataatcgagagagacttgatgtagcaatggcagctgatcaaatctgtacagcaattactaacgatgaaaaagtaaaggggttatatttatatggtccttttggtacaggaaaatcattcatattgggtgctattgcaaatcaacttaaatcgcaaaagatttcatcaacaattgtatatttaccagaatttattcgcactttaaaaggtggctttaaagacggtagttttgagaaaaaattacaacgtgtgcgagaagctaatattttgatgttagatgatattggcgcagaagaagtcacaccgtgggtaagagatgaagtgattggtcctttattacattatagaatggtacatgaacttcctacattttttagttctaactttaattatagtgagcttgagcatcatctttcaataactagagatggcactgaaaagactaaagcagcacgaattattgaaagaattaagactttatcgacaccttattatttgactggtaaaaattttagaaacaattga

SEQ ID NO: 4566 - DNA, 1938 bp, Staphylococcus epidermidis
atgaatcaaattaatattcaatttccagatggtaatacaaaagaatttgataaagggactactacagaagacatcgctcaatcaattagtccaggattaagaaaaaaagcagttgcgggaaaattcaatggtcaacttgtagatttaacacgccctttagaacaagatggagctattgaaattattactcctgggagtgaagaagcgttagaagtacttcgtcattcaacagctcatttaatggcacaagcattaaaacgtttatacggagacgttaaatttggagttggacctgtaatagaaggcggattctattatgattttgatatggatgataaggtttcatcggatgattttgataaaattgagaaaacaatgaaacaaattgtgaacgaaaatcataaaattgtaagagaagtagttagtaaagaaaaagcaaaagacttcttcaaggatgacccttataaattagaacttattgatgcaattcctgaagatgagagtgtaacactttatactcaaggtgaatttactgatttatgtcgaggtgtacacgtaccttctacttctaaaattaaagagttcaaactattatctacagctggtgcttattggcgtggaaatagtgataataaaatgttacaacgaatttatggtacagcattctttgacaaaaaagatttgaaagcacatctaaaaatgttggaagaacgtcgtgagcgtgatcatcgtaaaattggtaaagatttagaattgtttacaaacaatcaactcgttggtgctggtttaccattatggttaccaaatggtgctacaatacgtagggaaatagaacgttatattgtcgataaagaagtaagtatgggatacgatcatgtttacacaccagtattagccaatgttgatttatataaaacatctggtcactgggatcattatcaagaagatatgttcccagcaatgaagttagatgaagacgaagcaatggtcttaagaccaatgaactgtccacatcatatgatgatttataaaaacaaacctcattcttatcgcgaattacctatacgtattgctgaattgggtactatgcatcgttacgaagcaagtggtgcagtatcaggtttacaacgtgttcgaggaatgacattgaatgattcccatattttcgttagacctgatcaaattaaagaagaatttaaacgtgtagttaatatgattcaagatgtgtacaaagattttggttttgaagattatcgcttcagattgagttatagagatcctgaagataagcataagtactttgatgatgatgaaatgtgggaaaaagctgaatccatgcttaaagaagcatcagatgaattaggtttaacttatgaagaagctattggtgaggcagcattctatggacctaagttagatgttcaagtaaaaacagctatgggaaaagaagaaactctatcaacagcacaacttgattttcttttaccagaacgttttgacttaacgtacattggtcaagatggagaacaacatcgtcctgtagttatacaccgtggtgtagtttctactatggaacgttttgttgcatttttaacagaagaaacaaaaggtgcatttccaacttggttggcgcctatgcaagttgaaattattcctgtaaatatagatttacattatgattatgcaagacttttacaagatgaactaaaatcgcaaggtgtccgcgttgaaattgatgaccgtaatgaaaaaatgggatataaaattcgtgaagctcaaatgaaaaaaataccttatcagattgttgtaggtgaccaagaagtagagaatcaagaagtaaatgtaagaaaatatggttctgaaaaacaagaatcagttgaaaaagatgaatttatttggaatgttattgatgaaatccgtttgaaaaagcatagataa

SEQ ID NO: 4567 - DNA, 1503 bp, Staphylococcus epidermidis
atgaaaaagaataataaacaaaatgacggtgttcaaagaggattaaaagatagacatatttcaatgattgccattgggggatgtataggaactggtctattcatgacttctggtggagctatacatgacgcaggtgcattgggtgctttgattgcctatgcagttattggagcgatggtgttctttctaatgacgtcgttaggggagatggcgacatatttgcctgtgtcaggttcatttagtacttatgctacacgctttgtcgatccttcactaggttttgctttaggatggaattattggttcaactgggtgataacagtagcagctgatgttactattgcagcgcaagttatacaatattggtcccctatgcaaggtataccagcttgggtctggagttgtattttccttattattattttcgcgcttaattctttatccgttagagtatatggagagagtgaatattggttcgcacttatcaaagtagttacagtcatcatatttataggaattggtatcttaactattttagggattatgggtggagaatttgtaggatttgatacgtttacaaaaggagatgggccaatactaggtgggaatttaggaggtagcttgctatcaattcttggtgtatttctagtcgcaggcttctcattccaaggaactgaacttattggtattacagcaggtgaatctgaaaatccagaaagagcagttccaaaagcgattaaacaagtattttggcgtatacttttattttacattctagctattttcattattggtatgttgattccatatgatagtaaggcattaatgggcggtggtgatagtatagctacttcaccttttacattagtatttaagaatgctggattagcttttgctgcttcatttatgaatgctgttatattaacaagtgtattatcagcaggtaactcaggaatgtatgcttcaacaagaatgttatattcgatgagtaaagataaattagcttataattcttttggaaaaacaaataaaagtggcgtaccttatgtatctctaattgcaactggagtactagtcattcttattttcgcattgcaacatttaagtggagatgcatatgaatacattgtagctgctagcggaatgactggttttattgcttgggttggtatagcaatcagtcactttagatttagacgcgcatttgataaacaaaattatgataaatcaaaattaaaatataaagcgaagttattcccatttggtccgatttttgcaggtattttatgtgtaatagttatcattggacaagatgtagattttattaaaacaggtaactttgatatgaatagattttttataacttacatgggaatacctgtattcttaattttcttcttttatcataaatttagatataaaactaaaaagattcctctaaacaaagttgacttaaggcaagatgtttcgatggaagaagtaagacaccataaaaataattaa

SEQ ID NO: 4568 - DNA, 528 bp, Staphylococcus epidermidis
gtgtcaaccatagcaaaagatcaaactcaaattaatgagaaaattcgtgcaaaagaactacgcttaataggccaagatggtgaacaaattggtgttaaatctaaacgtgaagctttagaaatggctgaacgtgtggatttagatttagttgttgtagcaccaaatgcaaaaccacctgttgcgagaataatggattatggtaaatataaattcgaacagcagaaaaaagaaaaagaaatgaagaagaaacaaaaagtcattaacgttaaagaattacgtttaagcccaactattgaagaacatgatttccaaactaagttgaaaaatggacgcaagttcttatctaaaggcgataaatgtaaagtttcaattcgtttcagaggtcgtgcgattacacataaagaaattggtcagcgtgtgttagaaaaatttgcagatgaatgtaaagatattgcaactgttgaacaaaagcctaaaatggaagggcgtcaaatgtttattatgttagcgcctatcaacgaaaaataa

SEQ ID NO: 4569 - DNA, 201 bp, Staphylococcus epidermidis
atgcctaaaatgaaaactcaccgtggagcagctaaacgtgttaaaagaactggttcaggtcaattaaaacgttctagagctttcacatctcacttattcgcaaataaaaatactaaacaaaaacgtcaattacgtaaagctaagttagtttctaaaagtgatatgaaacgtgttaaacaattattagcatacaaaaaataa

SEQ ID NO: 4570 - DNA, 357 bp, Staphylococcus epidermidis
atgccacgagttaaaggtggaacagtaacaagagcacgtcgtaaaaaaacgattaaattagctaaaggttactttggttcaaaacatacattatataaagtagctaaacaacaagtaatgaaatcaggtcaatatgctttccgtgaccgtcgtcaacgcaaacgtgatttccgtaaattatggattacacgtattaatgcggctgcacgtcaacatgacattagctactcacgtttaatgaacggcttgaaaaaagctgagattgatatcaatcgtaaaatgttatcagaaattgcaatctcagatgacaaagctttcgctgaattagtatcaaaagctaaagaagctttaaaataa

SEQ ID NO: 4571 - DNA, 612 bp, Staphylococcus epidermidis
atgtctaaatttgatgaacaaataattgttgtaaacagagatattttatttaacaaagataagaatgcttttaatggttttttacataaaaataatttcaaaggaaaagaaatttttagtgcgttaagtaaatatgaagtgaaaagacgtggtgatatggaagatgatccatcgtttaaacaattaatatcatattgcctactagaaaatgagaagggtgaaatccttatttacgaacgtctttctggtggtggagaagaacggttacatggtcagtcatcaatcggtgttggtggtcatatgaacgatgttgttggagctgattctattaatgaagttttaagagttaatgctcaaagagaattagaagaagaagtaggattaagtaataataaatctcaaaatatggaatatttaggttttataaatgatgatgacaatgatgtgggtaaagttcatatgggcgtcgtatttaaaatcactgtgcattcaaacgatgttgaagctaaagaaactgatacgctaaaaattaaatggatagaacaaggcgacattcaatcctatgaggattttgaaacatggagtgcattaattcttcaagatatatcatga

SEQ ID NO: 4572 - DNA, 924 bp, Staphylococcus epidermidis
atggctgatattataccttttccacagtctaaaagtaaaatgattaagcaaataaatgatgcagaaagaaatgcagattttgaaaagatgtatcaattgtttaatgtatatgaacagcatttcgaccttaacgaggagattgcactaaagaaatgccagatgcttttacaattgaatgcttatttagagttacgagaagaggcaattattttgttaaaacgtggattcaactgttatgacgaattgatgatatattatattaaaagtctgaatggcttaggtcaatttaatgaagcagttgaagtaattaatcaaattatcgatgaagttaaaaatcataaaaccagaatggaactttttccacttaaagaatatgcgatatcgagacttgatgaagatagaaaggcattgtcctcatctttatcagatttcggttcgcttaacacacgtgaacaaacttctttaatattacaacttattgataatggacattataattttaaagaatcagtagcgaatatactaatttctatggatttaccaaaaaatttagtgagcttaatgttggaatatttaagatttgctgaatattctcatacaattacaatccataaatatggtgaaactatcaatgtaaaccctaatcatttaagtggcattgagcatacgacgataaaagacaaggtcattcctgtcgtaatgaatagattagaagatggagcgttgcatattttaaaagaagcacaacatattatgaataatcattctatactcatgtatcctatagatatagagtcgttatacactattgataattggatagatgcatatgatgtttacttcaaacaattaattggtatagatataaatggctgtaacaatgatactttacaattcattaaatcattagataatgaaatgtaa

SEQ ID NO: 4573 - DNA, 1302 bp, Staphylococcus epidermidis
atgacagcaacttgggaaaaaaaggaaggtaatgaaggcgttttaactgttactgttcctgcagagaaagtaaataaagcattagatcaagcatttaaaaaagtggtcaaacaaattaatgtgcctggattccgtaaaggtaaagtgcctcgtccaatttttgagcaacgttttggtgtagaagcactttatcaagatgcagtggatattttattacctgaagcttatggtgaagcaattgaagaaacagaaattaatccagttgcacaaccagaagttaatgtaactcaaatcgaaaaaggtaaagatttcatttttgaagctacagttacagttgaacctgaagttaaattaggtgattacaaaggattagaaattgaaaagcaagaaactgacctttctgatgaagaattacaagaatcaatcgaccatagcttaagtcaccttgctgaaatggttgttaaagaagatggtgctgttgaaaacggtgacacagtaaacattgatttctcaggttcagttgatggtgaagaatttgatggtggacaagctgaaggttatgacctagaaattggttctggatcattcattcctggctttgaagaacaaatagaaggaatgaaaactggcgatgaaaaagatgtagttgtaacattcccagaagaataccacgctgaagaattagctggtaaagaagctacatttaaaacaaaagtcaacgaaattaaattcaaagatgtaccagaattaaatgatgagattgctaacgaattagattctgatgctgaaaacgtggacgaatataaagaaaatcttcgcaaacgtttaagtgaacagaaagcaactgaagctgaaaatactgaaaaagaagaagctattaataaagcaacagaaaatgcttcaattgatattcctgaagcaatgattaatactgaattagatcgtatgattcaagaatttggtcaaagaatccaacaacaaggcttagatttgcaaacatattatcaaatctctggtcaaaacgaagagcaactaagagaccaaatgaaagacgatgcagaacaacgcgttaaaacaaacttaacgttaactgcgattgctgatgaagaaaatattgaagtatctgatgaagatattgataaagaattagaaaaaatgagcgagcaatttaacatttctgtagaagatattaaatctactttaggtaatacagatattgttaaaaatgatgtacgcattcaaaaagttattgatttattaagagataatgcgaaatatgttgaagctactaaagaagactag

SEQ ID NO: 4574 - DNA, 1263 bp, Staphylococcus epidermidis
atgttcaaattcaatgaagatgaagaaaatttaaaatgttctttctgtggtaaagatcaagatcaagtaaaaaaattagtcgcaggaagtggcgtttatatttgtaatgaatgtattgaattgtgctcagaaatcgttgaagaagaattagcacaaaatacatctgaaggatttacggagttaccaactcctaaagaaattatggatcacctcaatgaatatgtcattggtcaggaaaaagccaaaaaatcattagcagttgctgtatataatcactataagcgtattcaacaattgggtccgaatgaagatgatgttgaattacaaaaaagtaatatcgcattaattgggccaactggtagcggtaaaacattattagctcaaacactagctaaaacactaaatgtaccatttgcaattgctgatgctacaagtttaacagaagcaggttatgtaggtgatgacgtagaaaacatcttattacgtcttattcaagctgctgatttcgacattgataaagctgaaaaaggtattatatatgtcgatgaaattgataaaattgcgcgtaaatctgaaaacacttcaatcacgcgtgacgtgtctggtgaaggtgtacaacaagcattgcttaaaattttagaaggtacaactgctagtgtaccgcctcaaggtggtcgaaagcatccaaaccaagaattaatccaaattgatacgacaaacatcttatttatcttaggtggagcttttgatggtatcgatgaagtcattaagagacgcttaggagaaaaagtgataggatttgctagtaatgaagcagataaatatgatgaagaagctttactggaacaaattcgtccagaggatctccaatcatatggcttaattccagaatttattggtcgtgtacctatagttgctaatcttgaaactttagatgttgctgcacttaaaaatattttaactcaacctaaaaatgcgctagttaaacaatacactaaaatgctagagttagataatgtagaattagagttttctgaagaggctctatctgctataagtgaaaaagcaatcgaacgtaaaacaggagcgcgtggattacgttcaattatagaagaagcattaattgacatcatgtatgatgtaccttcttctgaaaatgtaagtaaagtagtcattactgaacaaacaattaatgaagaaattgagcctgaattatatgatgatgaaggaaatctaattaataagaacaagacatctgcttaa

SEQ ID NO: 4575 - DNA, 588 bp, Staphylococcus epidermidis
atgaatataaattttaataatattaacttaattataagtgctgtaaaaaaagcacagtatcctgacactggattaacagaagtagcgttaagtggacgctcaaatgtagggaaatctacatttattaatagtatgattgggcgtaaaaatatggcgagaacgtcacaacaacctggtaagacacagacattgaatttctataatatagatgaacaacttatttttgttgatgtaccaggatatggatacgctaaagtaagtaaagttcaacgagaaaaatttggtaaaatgattgaagaatatattacacaacgagagaatttaaaacttgttattcaacttgtcgatttaagacatcaacctactgaagatgatgtgcttatgtacaattatcttaaacattttgatataccaacacttgtaatatgtactaaagaagataaaattgccaaaggaaaagtacaaaagcatatcaaaagaataaaagacaaattagaattagaatctggagataatattataagttattcttcaattaaaaatagtaaacagcaagaaatttggaactttattgaaacatatatataa

SEQ ID NO: 4576 - DNA, 1347 bp, Staphylococcus epidermidis
atgcattttgttgcaattagcataaatcatcgaacagctgatgtaacattaagagagcaagttgcttttagagatgatgccttacgattagcacatgaagatttatatgaaactaaagcaattttagaaaatgtcattttatctacatgtaatcgtactgaagtatacgctattgttgatcaagttcatacaggacgttattatatacaaagatttttagcgcgctcttttggatttgaggtagatgatattaaagatatgtcggaagttaaagtgggggacgatgcagttgaacatttattgcgtgtcacttctggcttagattcaattgtgcttggtgaaacacaaattttaggacaaatgcgcgatgcatttttcttagcgcaaaatactggtacaactggaacgatttttaatcatttatttaaacaagcgattacttttgctaaaaaagcacacagtgaaacagacattgcagataatgctgtgagtgtttcttatgctgctgttgaattagctaaaaaggtatttggaaaattaaaaagtaaacatgctgtcgttattggagcaggggaaatgggtgaattatcactcttaaatcttttaggttctggaatttcaaatgtaacaattgttaatcggacattatctaaagctaaaattttagccgaaaaacacaatgtttcatatgattcactttcagcattaccatctttattagaaacaacggacatagtaattagttctacaagtgctgaagactatatcatcactaattctatggtgaaaacaatttcagaaactagaaaactggattcattagttctgattgatattgcggttccacgagacattgaaccagggattgatgcaattacaaatatttttaattatgatgttgatgatttgaaagatttggtagatgccaatttaagagaacgtcaattagctgctgaaactattgcaggacaaatacctgaggagattgattcacacaacgaatgggttaatatgcttggtgttgtacctgtaatcagagctttacgtgaaaaagctatgaatatccaagcagaaactatggaaagtattgatcgtaaattgccagatctctctgaaagagaacgtaaagtcatttcgaaacatacaaaaagtattatcaatcaaatgttaaaagatcctatcaaacaggctaaggaattaagtactgataaaaaaagtaatgaaaaattagagctatttcaaaacatatttgatattgaagccgaagatcctcgtgaaaaagcaaagttagaaaaagagagtagagcaaaggaaatcttagcgcatcgaatatttagttttgaataa

SEQ ID NO: 4577 - DNA, 813 bp, Staphylococcus epidermidis
atgcaagaaaccctgttaattcgatttcatgaaatcatattaatgatttatctgtttagtattatatgttactttgttgatttcattaataaaaattataagactagaactgtaggtttttattcattagggattgtttgggttttacaaacaatctctttgtctattttttttattcatactaaacaagtgccactaggttctatatttgacgtttttttctctttaacttggattattatatcaatttcgttgatattgaatttgattaaagtaatgaatttttctgtttttttccttaatttgattggatttatcctaatgagtttaaatacttttcagcctgaacattatcaaacgcaaattcaacaaattgcagtaattaatgaattattacttgttcatatagcacttgcagtattaagttatgcattttttgcaatcgcatttgtaaattcattactctacattattcaatatcgaaatttaaaggagaaaaatttcgatcaaaattactttagaattggtagtgttgctactttagaaaccatcgttttctattcaacacttgttgcatggattatccttatattaagtacgattttaggtgcacaatggggtatctttgcagtcggtaaacaaatatttatagatccaaaagtaatattttcaacaattattactttattatatggtgtttatattttcattagaataaaaaaatggatatcacaaagaaatcttatctactttaacattatattattttgtttgtgtatgattaatttattctttttaactcattttagataa

SEQ ID NO: 4578 - DNA, 927 bp, Staphylococcus epidermidis
atgcgtaaattaattgttgggtcgcgaagaagtaaattagcgctaacacaaagtcaacaatttatagataaattaaaatttatcgatccgtctttggatattgaaataaaagaaattgtaactaaaggcgacaaaattgtagataaacaattatccaaagttggaggtaaaggactttttgttaaggaaatccaaaatgaattatttaataaagagatagatatggcgattcattctctaaaagatgtaccaagtatgattcctgacggtcttaccttaggatgtattcctgacagagaaattccttttgatgcctatatagcaaaaaatcatataccattacaagaattgtctgagggcagcattgtaggtacaagttctttacgtcgtggcgctcaaattttatcaaaatacccacatttaaaaattaagtggattcgtggaaacattgatactcgattaaaaaaattagagactgaagattatgatgctattatattagctgctgctggattaaaacgcatgggttggtcagataatattgttacgacttatcttgatcgagatatattactgccagctatagggcagggtgcacttggtattgagtgtaggagtgatgacaaagaacttttagatttactatctaaagtacacaatcatgatgtagcacaatgtgtgactgctgaacgtacttttctatcagaaatggatggcagttgtcaggttcctataggtggatatgcaacaattgctcaagataaccaaattgaatttacaggactgattatgtctccagatggtaaggaaagatatgagcatacagcattgggtactgatcctgtaaaattgggtatagaagtgagtcaagtacttaaaaaacaaggtgcttatgacataattaaaaaattaaacgaagcagaataa

SEQ ID NO: 4579 - DNA, 681 bp, Staphylococcus epidermidis
atgaaaccagttatagttatgacgcagacgaatgaagttcatagtcatttagttgatattatccataagccttttatccaactaaaacaacttcattttaatgaaaaattgcttgatcatagctacgactggcttattttttcgtctaaaaacgcagtaaaatacttttatccttatttaaaaaacgttaaagttaaaaaggtagctgttataggtgataagacagctcagtattgtaatgaattaggtattagtgtcgactttgtgccacgtgatttttctcaagaaggctttttggacgagtttaagattagcgaacaacatttattgttgccctcaagtgaaaaagcacgtcctaaattagttcaacaattgagcaaatataatgaagtcgttaaaattgatttatatagaccagtaccgaattttaaaaatataagtcaagttaagtctcttgttagaaaacatcaaatagacgcagtgactttttctagttcctctgcagttgaattttatttcaaagaggacaatgtgcctgaatttgatcattattttgctatcggtaagcaaactgctaggaccattttaaaattcaatacatctgtaaaagtggcaaataaacaaacattagattcacttattgataaaataatagaaagtagggaacaaaatgaaatttga

SEQ ID NO: 4580 - DNA, 975 bp, Staphylococcus epidermidis
atgaaatttgatagacatagaagattgcgttcatctaagacaatgcgtgatttagtaagagaaactcatgttagaaaagaagatttaatatatccaatatttgtagttgagcaagatgatataaaaagtgaaattaaatcactaccaggcatataccaaattagtttaaatttattgcatgaagagattaaagaggcatatgatttaggtattagagcaatcatgttcttcggtgtgccaaatgacaaagacgacattggatctggtgcatatgatcataatggagttgttcaagaagcgacacgaatatctaagaatttatataaggatttacttattgttgcagatacttgtctttgtgaatacacagaccacggacactgtggcgttattgacgatcatacgcatgatgtagacaatgataaatcacttccattacttgtaaaaacagctatttctcaagttgaagctggagctgacatcattgctccaagtaatatgatggatggttttgttgctgaaattcgtgaaggccttgatcaagcgggatatcaaaatattcctatcatgagttatggtattaaatatgcatcaagctttttcggtccattcagagatgctgcagattcagcaccttcttttggggatagaaaaacctatcaaatggatcctgcaaaccgtttagaggcattaagagaattggaaagtgatcttaaagaaggttgcgatatgatgatagttaaaccatctttaagttatctagatattattagagatgtaaaaaataatacgaacgtgccagtcgtagcatacaacgttagtggagaatatagtatgacaaaagcagcagcgttaaatggttggatagatgaagagaaaattgttatggaacaaatgatatctatgaaacgtgcaggtgctgatttaataattacttattttgcaaaagatatctgtcgttatttagataaatag

SEQ ID NO: 4581 - DNA, 1287 bp, Staphylococcus epidermidis
atgatgagttttgaaaaatctattaaagcaatggagcaagctgagaaattaatgcctggcggtgttaacagtcccgtaagagcatttaaatcagtagacacaccagctatttttatggatcatggtgaaggatctaaaatatatgatattgatggaaatgaatacattgattatgtgctaagttggggcccattaattctgggtcataaaaatcaacaagttatatccaaattacatgaagcagtagataaaggtacaagcttcggcgcttcaacacttcaagaaaataaacttgctgaacttgtgattgaccgtgtaccttcaattgaaaaagtaagaatggtttcctcaggaactgaagctactttagacacacttcgtttagctaggggttatacaggacgtaataaaattataaaatttgaagggtgttatcatggacacagtgattctttattgattaaagcaggatcaggtgttgcaacactaggtttacctgattcaccaggcgtccctgaaggtattgctaaaaacactatcacggtgccatataatgatttagattcacttaaattagcgttcgaaaaatatggcgatgatattgctggtgttattgttgaaccggttgctggaaatatgggtgtagtgcctccagtgaatggatttctacaaggtttaagagatattactaatgaatatggagcattacttatatttgatgaagtgatgactggtttccgtgtaggttataattgtgcgcaaggatactttggtgtaacacctgatttaacttgcttaggaaaagtgataggtggaggtttacccgttggagcttttggtggtaaaaaagaaattatggattacattgctcctgttgggactatttatcaagctggcacactttcaggtaatcctttagcaatgactagtggttatgaaacattgagtcaacttactcctgaatcttatgagtattttaattctctaggagatatacttgaaaaaggattaaaagaggtatttgctaagcataatgttccaatcacagtaaatcgcgctggttcaatgattggttacttcttaaatgaggggcctgtaacaaattttgaggaagcaaataaaagtgatttaaaattatttagtaatatgtatagagaaatggctaaggaaggtgttttcctaccaccttcacaatttgaaggaacatttttatcaactgcacatactaaagatgatattgagaaaactatccaagcatttgataatgcattaagtcgtattgtgtga

SEQ ID NO: 4582 - DNA, 1974 bp, Staphylococcus epidermidis
atgagagaaaattattcgatacgtgtttttaataatttagccattaatacagaaaaggcactgagtgtaaaggtattttattgtttgaaagggaaatgtgaaatcactatcaatgttcagaaacatacattaaagaaagatgatatagcgtttgttgtaatgaatgatacgtattcactgttaagtaatacggataccatgtgttgtattatcgatataccaatacatcgatatattagtcagaaggatactcaatttttaataagtggtacaaagattgatgaacgtagtagagatagaataaaatactggatattaaaaatattagagttacattgtttatcttataatgatgtgtccgagatacaaagattgatacaatttttacttattgaattgagttatctaaagaaaccaaaacttgatgtcaataaagatttttatttatctgaagatatacatcaatatttagtggatcatcatgacagtaaaatcaacaaacatgaactagctgaagctgttaacctatcaaatcaagcacttacatctatgtttaaacaaacgccatttcaaacatttaatcaatatttaaatcaacttagattaaaattttgtcttatagatattttgacaacccataaacctatcgaagaaatagctatagatcatggttttcatcattattctcgatttatacaattattcaaaaatacatatggttacacacctaaattgattagaagagattatatagcgacgtctatcttcaaaaatactgctgaagaaattgatttagatagacattttcttatgaacattcacgaattacaagatttagattcaaaaataataagtaaaaaatatattgagatgtcagataaagggaaaaaatatcgttcttatgatatttatattgaagataaccgaagtactattcttgatcaggagcagataattcatataaagcgtaatttaagtttaagtcaaaaatcaatgcgctatgtaatagagcttaactacacttctatgattgaaaacaaagagttatgtcgttatgagatgttgaaaattttacgtttttgttccggtttgaatttaattccaacatttaaaatcattaccgatcgacatgatacttttacatcaaaggaaaaaatggctctgaagttaacatttcaaatgttattcatcatgctaagagaatttaatcaacttgagattgaatttattgtagaggacatgatgttaaaacaagtagtgcagttaaaaaagatgattagttcttattttgaatattataaattaaattatcgtattaaaaatgagaaaaatggaaatgttaattatcaaaatttagaaaaacaagtgactcaaattttcattcctattaatcaattacatttatatattaaagagatatcatttgaaaaagtcattttggaaactagctatttgaccgatttaaaaagtgagattgtggaatatccatggattcaacatattcatacattaattaaaatgtgtggagaagtgagaggtgttttaatacaaccttcctctgattacgctaccacagtaacatatcattcaaatttaaaaccgtatcatatcttgtcatatgtaataagaatgtttaaccaattaagggggacaatcgtctataaagatgatgcaatcattatgactcaatataagtatgaatatcaggccattgctatctctttaaaaaatacgattaaggaaaatgtaaaccatcaacaattaattttttcagatattcaatcactcaaccatgcagaatatgaatatatagaaatgataccacttttaatgaatgagaatgatgagctagatagtcatataccatacccacatcaatattggttagcaaagttgaagagtaaagaaagccaacaagcaatagttgatcttcctaaaatgagtattgctcatttaacatttctttgttcgtag

SEQ ID NO: 4583 - DNA, 729 bp, Staphylococcus epidermidis
atgcaacaacagaagattaaacaattcttagcccattttgtattagatcacgtcacaatagaatatttgaaatatggctaccagctgacaattgaacagcttaaattattaatatttatattacatttcactgaaaatcataaagaagaattaagtttaaatatgatcatcttttacaaaaattatcaaaaaaacaaattgttaaaaagtattacacatctatatgaatttaattggatttcaaaaaaacgacatccatacgaccaacgtagactagttattacgttaactcaaaatcaatgtagtaaaataactcaattaattgaagaactagaacacttcttagaggtgaaatctacattaataaacgaaatcaatcattcaactttattatcgtattatttaaaatgccatagtcaatttagagtgattgaacaatcttgtagccctcaacatttaacattagaagaattataccttcttgggttacttatcattagtgataacaagactacatttaaaagcataaaagtacatgctttaaagggaatcatttcattgggacctattattaagaccttacagtcaaaaggttatctcattaaaagtcgtagtagagatgatgaacgctatattgtattaacacttagaaaagaaaaaattaatgtgattcagtcagaaatcgaggaatgttacaataaattagaacagggaatacagcatgtgtaa

SEQ ID NO: 4584 - DNA, 324 bp, Staphylococcus epidermidis
atgattttagacaatgtgaatccagatgatttatttcctaccgagaaaaaaggcctctctgtattaggtgtaattgagtataacgtacagggccagactaaatttgaaggtgccttcatagcaacaaatgagcggttaattatgaatgttgatatgaatggacaattttattatcgaaatatacgttatgatgaaattaatcaaattcattgtgatggttcagatattatatttgagttcaatattggaacagttccaatgcgtgaaattaagactgaagatgtacaagcttttgttgattatataaaacaacaaattcaataa

SEQ ID NO: 4585 - DNA, 345 bp, Staphylococcus epidermidis
atgggaaaaattaaagacatcaatgatttggttaatgcgacatttcaagttaaaaaattttttagagatactaaaaagcaatataatttaaattatgaagaaatttatattcttaatcacattttgaaaagtgaatctaacgaaatatcttcaaaagaaattgctacatgttcagagtttaaaccgtattatttaactaaagcattacaaaaattaaaagatttaaatttattatctaaaaaaagaagcgtgcatgatgaaagaacagtaattgtatttgtatccgatgaacaacgagaaaaaataaaaaaattgattttagaattagaaaactatatcaaataa

SEQ ID NO: 4586 - DNA, 837 bp, Staphylococcus epidermidis
atgggtaatcagagttggactggccaattggatttaacagtttttaataatggccaaagctcaaaagcacggaatatatattttgaaaaagcgctcaaagtcctacgccctatatacttagaacaatctcctgtaccaactttctatattgtgaatgttggtggaggttatctagatggagatagataccgggtcaacgtcaacttagaagataaagcacaagtagtactcacttctcaaggtgcaactaaaatatataagacgcccaatgatcatgtagaacagtatcaaacatttcatttatcaaatcagtcatatatggaatttgtggcagatcctattattgcctacgaaaatgctaaattttaccagcataatacgttccatcttaaagaagatagtgctatgttttacactgatatattaacaccaggatattcatctaaagggcaagattttacgtataaatatatgcatcttattaatgaaatttacattgaaaatcaattagttgtttttgataatatgatgttaagtcctgagaaaagtaaactcgacggtattgggtatatggaaaactatacacatctaggttctgcttattttatccatccggacgtaaatcaaagtttcatagacggtatttacgtggcggttgctgattttcaaaaacaatacgactgtagaataggtatctcacaattacctactcatggattggctgttcgtattttgactaaaagaactcaaataatagaagaaattttgactcgtgttcaatcatatatcaatcaaacgatttatcatcgacaaattaactccttaagaaaatattaa

SEQ ID NO: 4587 - DNA, 615 bp, Staphylococcus epidermidis
atgtcaaatccaattaaaattggtatcgggggccctgttggtgcaggtaaaacccaattaatagaaaaagtggttaaacgtcttgctaaagaaatgagcattggcgttataacaaatgatatctatactaaagaagatgaaaaaatattagttaatactggtgttttaccagaagatagaatcattggtgtagaaactggaggttgtcctcatacagcgattcgtgaagacgcctcaatgaacttcgcagccatagatgagttattagaacgtaatgatgatattgaactcatttttattgaatcaggtggcgataacttagcggctacgtttagtccagaacttgttgacttttcaatttatatcattgatgttgcacaaggcgaaaagataccacgtaaaggtggtcaaggtatgattaaatctgatttcttcattattaataaaacagaccttgcaccatatgtgggcgcctcattagatcaaatggctaaagatactgaagtatttcgtggaaatcgtccatttgcttttacaaatttaaaaactgatgaaggtttagaaaaagttattgagtggattgagcaagacgtcttactcaaagggttagcttaa

SEQ ID NO: 4588 - DNA, 690 bp, Staphylococcus epidermidis
atgattgatcatcaacatttaagattatttcagttctgtgattctcagtttccaactggtgcatttagtcattcatttggacttgaaacatatattcaaagagaagctgttcatgatactgagacatttattgaatggttaacattgtttataaatgaacaattaacttattcagatgggttagctatgagaattgtgtacaacgcattaatacgcaatgataaagataaaattttagatattaaccaaaaactattcgtacaaaatttacctaaagaaacacgtattggcgctaagcaaatgggcacacgcatggtaaaattagctttagatctttatgaaagtgaatggattcaatggtactatgaccaaatgaaaagtcataaaatacagcttcatccagctgtgtgctttactatgctaggacatgatttaggcgtcaatgtagagtccatcattgattattacttatatcaaaatatctctagccttacccaaaatgcagttagagcgattcctttaggacaaacagctgggcagcaagtcgtaactgaaatgatatcccatatcgagaaggtacgtaatcacatactagaattagctgagagtgattttggtatgactgctcccggcttagaacttaatcaaatggaacatgaaaatgttcatgttagaatctttatttcatag

SEQ ID NO: 4589 - DNA, 453 bp, Staphylococcus epidermidis
atgattatagaagaaatacaaggaaatattgctaatttatcacaagatgaaaagcaaaaacatgttgaaaaagtttatcttgaaaactctgatttggttaaacgtatacaacgtgttaaaacagatcacggtaatgaaataggaatacgacttaaacaacccattgatttacagtatggtgatatcttatatcaagacgatacaaacatgattattgtcgatgtaaatagtgaagacttactagtaattaagcctagaagtttaaaagaaatgggagatattgctcatcaacttggtaatcgacatctgcctgcccaatttacagaaactgaaatgcttattcaatatgactatcttgttgaagatttattaaaagagttgggtatcccctactcacatgaagacagaaaggtcaatcaagcatttcgacatataggacattcgcatgattga

SEQ ID NO: 4590 - DNA, 1716 bp, Staphylococcus epidermidis
atgagttttaaaatgacacaatctcaatacactagtctttatggaccaactgtaggagactctgtgagattaggagatacgaacttatttgcacaagttgagaaagactatgcaaattatggcgatgaagctactttcggtggcggtaaatcaattcgtgatggtatggctcaaaatcctaatgtgacaagagatgataaaaatgtagctgatttagttttaactaacgcattaattattgattatgacaaaattgttaaagcagatatcggaattaaaaatggttatatttttaagatcggtaaagctggaaacccagatataatggataacgttgacatcatcattggtgcaacaactgatattattgctgctgaaggtaaaattgttactgccggcggtatcgatacacacgtgcacttcatcaatcctgaacaagctgaagttgcacttgagagtggtattacaacgcatatcggtggaggaactggtgcttctgaaggggctaaagcgactactgtaacaccaggaccttggcatattcatcgtatgttagaagcagcagaagagatgcctattaatgtaggatttactggtaaaggtcaagctgtcaatcatactgcacttattgaacaaattcatgcaggcgctataggtcttaaagtacatgaagattggggagctacaccttcagcattaagtcatgcattagacgttgcagatgagtttgatgttcaagtcgctttacatgcagatacattaaatgaagctggatttatggaagatactatggctgctgttaaagatcgtgtattgcatatgtatcatactgaaggagctggtggtggtcatgcacctgacttaatcaaatcagctgcatattcaaacatcttaccttcttcaacaaacccaacattaccttacactcataacactgtagatgaacatttagacatggttatgatcacacaccatcttaatgcttcaataccagaagacattgcatttgcagattctcgtatacgtaaggaaactatagcagcagaagacgtattacaagatatgggcgtatttagtatggtaagttcagattcacaagcaatgggacgtgtcggtgaagttgtaacacgtacttggcaagttgcacaccgtatgaaagaacaacgcggaccattagatggtgactttgaatatcacgataataatcgtattaaacgttacattgcaaaatatacaatcaatcctgccattacacatggtatttctgactatgttggatctgtagaagcgggtaaacttgccgatttagtaatgtgggaacctgagttcttcggtgccaaacccgatcttgttgttaaaggtggcatgattaactcagcagtaaatggtgatgctaatggctccataccaacttcagagcctttgaaatatcgcaaaatgtatggtcaatttggcggtaacattacacatactgctatgacttttgtttctaatactgcatacgaaaacggtatttatcgtcaacttaatttaaaacgtatggtacgtcctgttaaaaatattagaaatttaactaaagcagatatgaaaaataataatgctacacctaaaatagatgtggatccacaaacatatgaagtatttgttgatggtaataagattacgagtgaagcagcaagagaattacctttaacgcaaagatacttcttattctag

SEQ ID NO: 4591 - DNA, 402 bp, Staphylococcus epidermidis
atgattcctggtgaaattattgttaaaaatactgaaatagaaatcaataagcatcaccccgaaacggtgattgaagtaaaaaatacaggcgatagacctgtacaagtaggttcacatttccactttttcgaagcaaataaagcattagaatttgatcgtgagaaagcatatggtaaacatttggatattcctgcaggcgcagctgtgagatttgaacctggtgatgaaaaaaaagtacaacttgtcgaatattctggacgacgtaaaatttatggattccgtggtttagtcgatggcgatattgatgaagaacgcgtatttcgtccaaatgattcaaatcaaaacgccgctgctaaaaacgatgcaggcgaagacaatgcgaataaaaaaggtggtaaataa

SEQ ID NO: 4592 - DNA, 303 bp, Staphylococcus epidermidis
ttgcactttacacaacgtgaacaagacaaattaatgatagttgtagctgctgaagttgcacgtcgtagaaaagcaagaggacttaaacttaatcatcctgaagcacttgctttaatcagtgatgaattattagaaggcgcgcgtgatggtaaaacggtggctgaactcatgagttatggaaaaacaattttaaatgaggaagatgtcatggatggcgtagctaacatgattacagaacttgaaattgaagcaacttttccagatggtactaagttaataacagtccatcacccaatcgtttaa

SEQ ID NO: 4593 - DNA, 903 bp, Staphylococcus epidermidis
ttgaaattgataaaagtaattttaagtagtatctctcaagtggttttaataaataatccatacactggattatttattttaattggattgtttgcagtgaattggaaagtagcaatcagtgctataattgcaagtgtaatgacttggatattggcaccacatatgaattacacaaaagatgaaatcgaaagtggattagccgggtttaaccctgtattaacagcaattgcacttactttatttttggatagcaattggagcggtatattaatcacattcgtatccactattttaacgttaccgattggagcagcggtaagagaagtattgaaaccacataaaatagcatttttaactagcccgtttgttattatgacgtggattactttgttaatacctaatcaacttaaaacgttacatactcagattgatattattccggagcatatagaaaaggtatctttaaataatgaccacatccgtgttcatttttttcaatcagttttagatggatttggacaaatatttttaatgcccagcataataggtggtttattaattctaatagggatttttataggttctaaaaaagctggaattgtttctataattgcaaacatcattgggttcctaataattatattattgggtggagactatagtagtataaatgacggcatttttggctataatgtagttttatctgcgattgcgctaggtgtcacttttgagacagcaatccatagttatctcgcaatgattttaggaatagtgctcactgcattcatacatttaggtttgagtacattgctcgcacctctaggtttaccacctttaacatggccatttatttttgctacatggattatgttgtttgcaggaattaacaatcaatctgtataa

SEQ ID NO: 4594 - DNA, 1143 bp, Staphylococcus epidermidis
atggagtcttttttaattcacactgacattcaaaagaaatggattcgtaaatttaaaaagattgaaagtgaattcaaagcacgtgcagctgaaaatgatattcaatctagattcccatatgaaaatattgaatggctgataaaggaaggatatactaaactaactttgcctgtagagtatggaggtgaaggtgctactattgaagatatggtgattttacaaagttatttgggtgctattgatggagcgactgctttatctatagggtggcatttgagtgtaattggtcaattgtacgagcaacatatgtggacaccatcaatgttagattcctttgctaaagaagttgttcacggtgcactgatcaatagagcagtcagtgaagcggaaactggtagtcctactagaggtggtcgcccatctacacatgctgttaaagttgaaaatggttatgttataaacggtgttaaaacctttacatctatgagtaaagcattgacacattatattgttggcgcctatgttgaagaaactaaatcgatgggattctttttaattcctcggtcaactaaaggagtaagtattgctgacaattgggatatggttggtatgagagcgactgagagccatgatttaattcttgataatgttcatgttcctaatgaaaattttgtagaatcaaaacgtgaatcaagacctaatggttggcttcttcatataccgagctgttatctaggtattgcacaagcagctcgtgactatgcagtagattttgcaaaaaattatcgtcctaacagtattacaggtacgattgatagtttacctacagtgcaacaaaatttagggaaaatggaaagtttattactttctgcaagacattttctatggagtacagctagaggatatcaatcatatacagaggatgcacaaatatggaatgaaacctcagcaagtaaagtggtggtaatgaaccaaggtatagaaatcgttgatttagctatgagaatagttggagctaagagcctagaaatgaacagacctcttcagcggtactatagagatatacgtgctggattacataatccaccaatggaagatatggcttacactaatattgctaaaagtattacaaacaaactctaa

SEQ ID NO: 4595 - DNA, 942 bp, Staphylococcus epidermidis
atgaccaaagtatattttaatcatgatggtggcgttgatgatttagtgtcactatttttattattacaaatggaaaatatagaacttgttggtgtaagtacgattggtgcagactgctatttagaaccttcattaagtgcttcattaaagattataaatcgtttttcagacgttgaaattaatgtagcaccatcatatgaaagagggaaaaatccttttccaaaagaatggagaatgcatgctttctttatggatgccctaccagtgctaaatgagtcttgtatacccaaaagatgtaaggctagtgaggacgaggcgtatatagatattattcgtaaggtgaagcgttgtgatgagaaagttacattgttatttactggaccgcttacagatttagctaaagctataaactatgacaactcaattttaaaaaatatagagaaattagtttggatgggtggaacgtttttagacaaaggaaatgttgaagaaccagaacatgatggtacagctgaatggaatgcattttgggatcccgaggctgtaaaagttgtattagatagtgatatgattgtcgatattgttgctttagaaagtacaaatcaagtccctctaacaatggaagttcgtcaaatgtgggcagataaaagacaatatttaggcgttgattttctgggcacaagttacgcagcagtaccaccactcacacattttgtgaccaattcaacatactttttatgggatgtattaactactgcttatgtgggttctccaaatttagttgaatcaacgaaattgaaaattgatgtagtcagtcaaggacctagtcaagggagaacattccaatctgaaaatggacgtgaagttcaagtcattacggatgtaaataaacaagcattttttaaatacataacggatttagcaaagaaaattgagtcctaa

SEQ ID NO: 4596 - DNA, 549 bp, Staphylococcus epidermidis
gtgactacaaaacatttagtatatacagctttaatgactgctatcatttgtattttaggtttagtaccaagtgtacctctgccatttatgccagtacctattgtattacagaatataggaatctttttggcaggaattattttagggcgaaaacttggtactacaagtgttattgtctttttattattagtagctacaggtttaccagtgctttctggaggccgtgggggaattggcgtatttgcaggaccttcggcaggattcttattcttatatcctgttgtagcttactttataggtattattcgtgatgcatatttgcataaaatgaatttcttagtgatttttatagctacactagttatcggtgtattaggattagatatattaggtacaatcattatgggcttcattatacatatacctatctctaaggcatttatattatcatttacatttatgccaggtgatattattaaggctattattgcaagtttaataggtgcagcaattttaaatcattcacgtttcaagactcttattcaataa

SEQ ID NO: 4597 - DNA, 756 bp, Staphylococcus epidermidis
atgtcgaaaataacttttaaagatatttatattgatggaaataaaataactgaagattctagaaaggtgatttatctcttaccttctcaacctttaaaatatgcgagtaacacgtggatttataaaacgatgccaacaatgaatcaatggcttaaagacattgaggtacaaaagaaaacgcatctaaatcaatcatcctatcatctttcattttcatttccagctaatgaaaatatagatgaagtattgttggaaaaaatacgtgacctaggttttcagataggagtacttgagctttatgtcattgaagctaaagcgttaaaggaactttcacgcaaaagagacgtagatattcaacttgtaacaagtagtaatatcaatgattaccttcatgtctatgatgcgtttgcacggccttttggtgataactatgccaacatggttaaacaacatatttatagctcacacaacttggatgacattgaacgtttagttgcatatgttaaccaacaaccagtaggaatagttgatactataatgacggataaagcaatagaaatagatggttttggggttttaaaagaattccaacatcaaggtattggttctgaaatacaagcttacgttggacgtatggctaacgagcgacctgttattcttgttgcagatggagaagatactgctaaagatatgtatctaagacaaggatatgtataccaaggttttaagtatcatattttaaaagaaaatatttaa

SEQ ID NO: 4598 - DNA, 789 bp, Staphylococcus epidermidis
atgaaaaaagatgtgacgcaaaaacaaactataatcaaatttgagaatagacacttatatacagcatcggattcatgtgtaacagagatgccattaacaattaaagtcaacgatattgagtttgcaactattatttgtagtccaaaccatttagaagaattgactttaggttttcttgcatctgaaggtatattcttaaagaggaatgacttacaatccattcatattgacgaaagtaaaggattcgctcatgtaaaactaactcaatcagtaggtcaacaattcgaacatcctacaaaacgtgtgctggcttcctgttgtggtaaaagcagagcattttattttcaaaatgatgctgctattgccaaaacatcaatgacaaacattcaacttcaacccaaacaagttattaatttgatgacgcaattacaggatgcaagtattattttcaaaaaaacgggtggtcttcataatgctgccatcagtgatggaaaagacttttttgaacatcgccacgatatcggacgtcataacgctcttgataaattatacggttattgtattcaacgacatatatcggtgagagataaggttttgatttttagtggccgtatttcatcagaaattttaatcaaagcggctaaaatcggtgtaggaattatattatctaaatctgcccctacttcacttgcaatacaacttgcaagagatttaaacattaccgcaattgggtttattcgagaaaatcattttaatatctatagtcatccagaaagaatcataaattaa

SEQ ID NO: 4599 - DNA, 786 bp, Staphylococcus epidermidis
atgaaaataaaacatatttttattactattttaacattaagtatagtattagcaggttgtactaatgagagaggtctgaataaagaacagaatgaaaaacaatcgccaaaaggtgataaacaagaacttcaagtttctgctgcagcaagtttgactgaagtcagtaaatcattaggaaatgaatttaaaaaggaccatccaaatgtagagattaaatttaactatggcggatcaggtgcgttaagacagcaaatagaagcgggtgctccggcagatgtcatgatgtcagctaacactaaagatatagatctgttgaagaaaaaaaacaaagcacatgatacttataattatgcaaagaatcagcttgtattaattggtgataaaaataaaagttatacctctgtaaaagatttaaatcaaaacgacaaactcgcactaggacaaataaaaacagtgcctgcaggtaaatatgcaaaacaatatttagatgatcaacatttatatggtgatgttaaagataaaattatttttgctaaagacgtaaaacaagtattaaattatgtggaaaaaggaaacgcacaggaaggattcgtttataaaacagacttatatcaacaaaagaaaaaagcaaataaagttaaagtcatcgaagaaattaaattaagtaaaccaattacttataaagcaggtgcaacttcagataaaaaattagctaaagaatggataaacttcttaaaatctaataaagctaaacaaattcttaaagaatatcaattttctgtataa

SEQ ID NO: 4600 - DNA, 672 bp, Staphylococcus epidermidis
atgcctgatttaacgtccttttggatttcttttcgtgttgctttaattagtacaatgatagttactatttttggcatattgatttctaaatggctatacaataaaaatagatattgggtaaatctattagaaagttttatcattttaccaattgtgttaccacctactgttcttggttttatattattaattatattttcaacaagaagtcctgtaggagaattctttactaatatcttacacttaccagttgtatttactttgacaggtgcagtgattgcatctgtcattgttagttttccccttatgtatcaacatacagtgaatgggtttcgaagtatagattcaaagatgttaaatactgcaagaaccatgggagcaagtgaaacaaaaatattttttaaattggtgttaccattatctaaacgttctattcttgcaggtattatgatgagctttgcaagagcaataggtgaatttggtgctactttgatggttgctggctatattccagacaaaacaaacacattgcctttagaaatttattttttagtggagcaagggaaagaaaatgaagcttggttatgggtgcttgtattagttgcatttgcggtaactgtcatagcgactattaatctagttaatcgtgatacgtttagggaggttgattaa

SEQ ID NO: 4601 - DNA, 609 bp, Staphylococcus epidermidis
atgctcacaattaaattgaatggtgtgcttaatcagacgaaaattaatatcaacatagatgatcaactccctaagatatatgcgatacaaggaccgtctggaattggaaagacaacaattttaaatataattgccggtttgaaagctataaattattcatatataaaggttggtaaacgtgtattaactgattcacgacatcatttgaatgttaaggttcaacaacgtcgtataggatatttatttcaagattatcaacttttccctaatatgaatgtttataacaatataacgtttatgactaagccttctgaacatatcaatcaacttattcatactctaaaaatagagcatttacttgaaaagtatcctgtgaccttatcaggaggtgaagctcagcgcgtcgctttagctagggcgctaagtacgaaaccagatttaattttgcttgatgagcctttttcaagtttagatgataagacaaaaaaagaaggtgtcaaattaattttaaaaatattcgaagcatggaaaattcccattatatttgtaacgcattcaaattatgaagcgcagcaaatggcacataagattataacaattaaagattga

SEQ ID NO: 4602 - DNA, 1002 bp, Staphylococcus epidermidis
atgcaagaaagatactcgagacaagtgttgtttaagcaaattggtttaaaaggtcaaagtcaacttgagaaaaaacatgtacttatagtaggtatgggggcgttaggaacacacttagctgagggattagtgagagcaggaataaataagttaactattgttgatagagactacattgaatttagcaacttacaacgacaaacactctttacagagcgtgatgcagaagatgtactaccaaaagtaatcgctgcacagaaagttttaaaagagatacgtaaagatgtagagatagatgcttatattgagcatgtcaattacaatttcttagagcaacatggaatagatgtcgatattatattagatgcaactgataattttgatacgcgtcagttaattaatgactttgcttataaacatcagattccttggatatatggtggtgttgttcaaagtacatatgttcaggcaacgtttattcctgggcaaacaccgtgttttaattgcttaatgcctcaattaccatctattaatttaacatgtgatacggttggagttattcaaccagctgtaacaatgacaaccagtttacaactcagtgatgcattaaagttattgactggtaataaggttaacacacacttcacttacggggatatttgggaaggggatcattatacatttggttttagtcgtatgcaaaatgaagattgtaaaacatgtggtcatgctccaacatatccacaccttaatcaacatcaacaagattacgcgaccttatgtggaagagacactgttcaatataaaaatcctgatatttctcaggaaatattactatcatttctcgagcgaaatcatattctacatcgtacgaatttatatatgacaatgtttaggtttagagaatatcgaattgttgcattttctggtggtagatttttgatacatggaacgacagaacctaaaaaagcaattcaattaatgcatcaactatttggttaa

SEQ ID NO: 4603 - DNA, 531 bp, Staphylococcus epidermidis
atgcacaaacatcaacatcagaatattcatttaaacagaccgattcatgtagcaattttgactgtatcggatacgagagattatgattctgataaaggtggtcaactgattcaatctttgataaatcaacatgaaaatcatgttgatattaattattatcgaattgttaaagacgatatagaagctattacacaccaacttaagctttggttagcttcaccaaatcaactagatgtcattattacaacgggaggaacaggtatctcacaaagagatgtgacaatagaagctgttcgcccattattaactaaagaattagaaggttttggtgaattatttagatacttaagttataccgaagatgttggtacaagagcattattaactcgagctattgcaggtacctgtgataataccttgatttttgcacttcctggctcaacaggtgcaattaaacttgcaatagaaaaattaattaaacctgaattgagtcacttagtgtttgaattaaataaagacataaggaattaa

SEQ ID NO: 4604 - DNA, 492 bp, Staphylococcus epidermidis
atgactcatttcacacatattaataaacaaggtaatgctaaaatggttgatgtttctaataagaaaattacaaaacgtatagcagaagcacactcaagtataatagttaatgaaaaaatttatagacaaattactcaaaatactaatagtaaaggaaatgtacttaatactgcgcaaattgctggtatcatggcagctaaaaacacttctacaatcattcctatgtgtcatccattaccacttacaggtatagatgtatccttcaaatgggattcaaataatgatgattcatatcgtttaaatattacagcggtcgtgtctacaacaggtaaaactggtgttgaaatggaagcattgactgctgcttcagttacagcacttacaatctacgatatgacaaaagccatagacaaaggcatggtaattggagaaacgtacttagaatctaaatctggtggtaaatctggcgacttccacagaaaaaatatataa

SEQ ID NO: 4605 - DNA, 1260 bp, Staphylococcus epidermidis
atgtctgtagagaaaagaacgccaatatcagttaaagaagcaattaatcgtattatgaaacaacatgtagaagtgaagaatatcaatgttaatttagatgaaagtttaggacatattcttgctgaagatattgttgcgacttatgatataccaaggtttaataaatcaccttatgatggatttgcaattagaagtgaagattcacaaggtgcaagtggcgaaaaccgtattgaatttgaagtaatagatcatatcggtgcaggttcagtttcagaaaaaacaattgataaaaaccaagcaatacgaataatgactggtgctcagattccttctggagctgatgcagtagtaatgtttgaacaaactattgaatctgaaacaacttttacaattagaaaatcttttaaacatttagaaaatatttcactacaaggtgaagaaataaaagctggtgatatcgtactgcataaaggtatgcgtattaactctggtgtgatagcagtcttagcaacatacggttatactaaagtgcgagtggctcgaaaaccaactgttgcagtaattgctacaggtagtgaattgcttgaagtagaagatgagcttgaaccaggaaagatacgaaattcaaacggaccgatgattaaagcattagctaaacaatttggaatacaagttggaatgtataaagttcaacatgataatctagaaaagagtattgaggtcgtaaaaaaagctttatcagagcatgatttagtaattactactggaggtgtgtcggtaggagattttgattacttaccagaaatatacaagtccatccaagcgcagatactatttaacaaagtggctcaaagaccaggtagtgttactacggttgcatttgtagatggtaaatatttatttggcttatctggaaatccttcagcctgctatacaggatttgaattatatgttaaacccgctgtaaataagctcatgggagctaaagcttgttatccgcaaataatcaaagctacacttatggaagattttaataaagctaacccatttacacgattgattcgtgctaaggcaacattaacaaaagctggaatgacagtaataccatctggatttaataaatcaggtgcagttgtagctattgcgcacgctaatgctatgattatgcttcctggtggtacacgtggatttaaagcaggtaacattgttgatgtgattttgaccgaatctaatagttttgaagaggaattgatactatga

SEQ ID NO: 4606 - DNA, 477 bp, Staphylococcus epidermidis
atgattttacaaattgtaggtatgaaaaattcagggaaaactacattgatgaaccatgcgatatcatttttaaaagaacgaggttattcagtagcaacaattaaacatcacgggcatattggtgaagaaattgaattacagtcatctgatgttgaccacatgaaacattttgctgcgggcgcagatcaaagtattgttcaggggcatcatttacagcaaacagtgacacgtaataagaaacaatcgcttagagaaataattgaaaattctgttacaattgattgtagtatcattttagttgagggctttaaagaagaaaattatgataaaattatcgtttataaaaataatgatgaattaagaactctacaaagactttctcacgtcatagggaaaatagaaaccaatcatccacgagcaaataatcaacttgagcacttactcaacaaattaattaaggataagggaatgaattaa

SEQ ID NO: 4607 - DNA, 444 bp, Staphylococcus epidermidis
atgaagcaatttgaaatcgtgactcaacctattgaaacagaacaatatagggattttacgattaacgaacgtcaaggtgccgtagtcgtatttactggtcacgtaagagagtggactaaaggtattcgtacacaacacttagaatatgaggcttatataccaatggctgagaaaaaattagctcaaattggaaaagaaattgaagaaaagtggcctggaacaataacaacaattgtacatcgaattgggccgttacaaatatcagatatagcagttttaattgcagtatcttctcctcatagaaaagcggcatatgaagcaaatgaatacgccatagagcgcataaaagaaattgttccaatttggaaaaaggaaatttgggatgatggtgctgaatggcaaggccatcaaaagggaacatataatgaagcaaaaaaggggtaa

SEQ ID NO: 4608 - DNA, 234 bp, Staphylococcus epidermidis
atgaaaattttatattttgcagagttaaaagagttgctcaatcgatctactgaaacaatacatttagatacgacattaactgttcaagaattcgagtcatatttattaaaacgccatagagaacttaaatcaaaaaaatttcaaattgctgttaatgaagaattcgtcagacaagatgatatggtccaaccaggagatacaattgcgctcattccaccggtcagtgggggttga

SEQ ID NO: 4609 - DNA, 606 bp, Staphylococcus epidermidis
atgaaagcaattattttagcaggtggagaatctagcagatttggtaaagctaaagcttttgctaaaattgataatcaatatttttatcaaaaaattatagaaacgttaaaatctacaaatatgtttaatcgcattatcattagcactaattcacaattagcttctcagtttgaatatgaatatgtgattattgatgacgaacatcatcaaaataaagggccgctaacaggaatttactcagtgatgaagcaatacatggatgaagaattgtttttcattgtatctgttgatacaccaatgattactagtaaagcagtgaatgggttatatcatttcatggtatcaaacttaattgaatcacgtttagatattgtagcatttaaagaaggacaaatatgtataccgacgattggtttttatacactttcgacgtttccttttattgaaaaagctttaaattcaaatcatttaagtctaaagcatgtctttaaacaattatcaacagattggttagacgttactgaaattgactcgcctcattattggtataagaatattaattttcagcatgatttggactctttaaaaatgcagataaatgaataa

SEQ ID NO: 4610 - DNA, 1023 bp, Staphylococcus epidermidis
atgaaagcggtaatacaagataaattaggccgtccaatacgggatttaagaatatcggtcactgatcgatgtaatttcagatgtgattattgtatgccaaaggaaatctttggagatgattacactttcttacctaagaatgaattgcttacttttgaagaattaatacgaatttcaaagatttatgctcaattaggagttaaaaagataagaattacaggaggagagcctctcttacgacgcaatctttataaacttgtagagcaattaaatctcatagatggtatagaggatattggattgaccactaatggcttgttattaaaaaaacatggaaaaaatttatatcaagctggtttacgtcgtattaatgtaagtttagatgcgattgaggataacgtttttcaagaaattaacaatagaaatattaaagcgtctacaattttagaacaaattgattatgcagtatcaataggttttgaagttaaagtaaacgtagttattcaaaaaggggttaatgataatcaaattattccgatgattgattattttaaaaataaaaatattgaagtacgttttattgaatttatggatgtaggtaacgataatggatggaatttcaataaagttgtaactaaagaagaaatgcttaatatgatagaacaacattttgagataagtcctgtagcgcctaaatattatggggaagttgctaaatattttcgacataaagatagtgatgcacaatttggtctaattacgagtgtatctgaatcattttgttccacatgtacgcgtgctcgattgtcttcagatggtaaattttatggttgtttatttgcctcctcagaagggtttgatgtaaaagccttaatacgtaatggagctacagatgatgatttaaaagcacaatttaaacgattgtggagtattagaaacaatcagtactctgataagcgtacgatgcaaactattgagaataatagaaagaaaaaaattaatatgaattatataggtggatag

SEQ ID NO: 4611 - DNA, 351 bp, Staphylococcus epidermidis
atgagtaacaaagtacaacgttttattgaatcagagagagaattaagtcaattaaagcattggcttaaaacaacatatcgtatttctattgaagaatttgtagttctttacaaggtttatgcagacactaaaattagtggtaaagagttacgagacacattacatttcgagatgttatgggatactagtaaaattgatgtgattattcgtaaaatctataagaaagaactcatttctaaattacgctcagaaaccgatgaaagacaagttcactatttcttcgatgcaaagcaaaagaaattattggacaaaatgactggagaaattgaaacaattagtattgcaaattaa

SEQ ID NO: 4612 - DNA, 1194 bp, Staphylococcus epidermidis
atgaatcagtctacaataactaaagaccccatctttacaaagagttttaatattaactttgctattaacttttttgtttatctatgtatgtatttattaattgtcgttatcgcgagctacagtaaatcagaataccatgcttctgattctgttgctgggctcgtagtcggactttttatagtaggatcattaataggtcgatttgtaacaggtaaatacgtcaatcgatttggtccaaaaaaaattctcatttttggtttaatatgtttagtagtaacacagctactttattttatacctggttctgtttggttcttaatgatggtgcgtttactgaacggcttagcaacagcggttgctacaactgctacaggaacaatagcagcatatattacaccacctacacgcaaaagtgaaggtatcagtttattctcattaagtttggtgttgggaaccgctattggcccattttttggtatgttattgatgaattccttttctatcaatattttatttactatttgtgtaattttaggtgtcataagtggtctattatcactgttaattaaaattaatttcacaacagttaaagaaaacacaattacacataaacggtttaatttggctcattttgtagccaaagaagccattccggtagcattcgtcatgttattaatcggtgttacttacgctgctattttaacttatttacaggcttttgctattgaaagagatctagttacatcagcaagttactttttcattttttacgctattgcgtccctcataacaagacctattgctggaagattgatggatgataaaaacgaaaatgtagttgtttatccagcatttatcttcttagtattatcttttcttctactgatgcttagttttaacggatgggtattacttattgcaggtatcgcattaggaattggttatggtaacttgtcatcttctatgcaagctatcgcaataaaagtatctccatcaaataaatatggcttagctacatcaacttactttattggtttagatataggaattggatttggaccatccttactaggtcttttcacacatacgatttcttatagtcaattatatggaatcatgggtattttaggatttgcaactttagtcatctatattattgttcacggacgtaaggttcacagcactgtatattaa

SEQ ID NO: 4613 - DNA, 441 bp, Staphylococcus epidermidis
gtgttagatattttaaccaatgaatttttcaatagttttataggtatatatagaccctatattaaacttacacaacctatattagatcagcatcagattcatactggccaatggcttgtgctaagagatatcgccaattatcaacctactacacttgtaaaaatttctcatcgtcgttcaatagaaaaacctacaacacgaaagttgattaaagtattgttagacaatggttgggttatgacaaaaacaggagttgataagagagagaaattattaagtttaactgacaaaggtcaaagcctctttgaaactattaataaaaaggtcactgtcattcaacaagatattataaaaaaaactggattaactgatgagcaagtatttgatattacaaatgcgatgtctcaaattcatgaagcaatgataaaggaggaacagtaa

SEQ ID NO: 4614 - DNA, 684 bp, Staphylococcus epidermidis
ttgcaaaatggtggaagacatcatcatttgggcacctttaatcaaatagcaccgattaaaaatagttatatcgaattgctagatgttgaaaatgagtcaaaacttaacaatgtagctaaaactgaagaaggtcgtgtatcatttgctacaaaaatagtgcaggatcattttaaacaaggctttaaaggtatttgttttagaacaaaggatatagatcaagttagagatactttagaaaatagaggcgttgatgtaattggtcctattgacatggaaagagaaaataagaaggggcatcaattacgttggagattgctatatattgctaaccctgactatagagtcaaaccacctttctttatagaatgggataacagcagaaagcaaaacctatcacaaatacataatttcaacttgtcagaatttgaaattaaagaggtgattattactagtactcaacgtgaaacaacagtaagtctttggaaagaatggtataacatgaaaatagtaaatgaaacagctacatctactgatctcaaattagaaactgataaagttatttataaaatagaagacggcaaagattccggttttcatacattaataatgaccgatatcaatgctacagctccatactcaatatttatacgtggtgctaaatatcgttttgagccacccaactag

SEQ ID NO: 4615 - DNA, 1251 bp, Staphylococcus epidermidis
atggaaaagatgaacatcactaatcaacaacatgacgcatttgtgaaatctcatcccaatggtgatttattacaattatctaagtgggcagatacgaaaaaattaacaggatggtattcgagaagaattgctgtcggtgaaaatggtcaaattaaaggtgttggccagctactattcaaaaaaatacctaaactcccatacactttatgctatgtatctaggggatttgtagctgattataataataaagaagtgttagaagctctacttagctatgctaaagaagtagcaagagatgaaaagtcgtatgctatcaaaatagatcccgatgtcgaagttgataaaggtgcagaagcacttaaaaatttacgtgagcttgggtttaaacataaaggttttaaagaaggattatctaaagactatattcaaccaagaatgactatgattacgcctatcgataaaacagatgatgaattagttcaaagtttcgaacgtcgaaatcgttcaaaagtaagacttgcgcttaagcgtggaactaaagtagaacgatcaaatcgcgaggggcttaaagtctttgctaatttaatgaagataactggagagagagatggttttttaactagagatattagttattttgaaaatatatatgatgcacttcatgaagacggtgatgcagaactcttccttgttaaattagagcccaagccagtattagatatggttaatcaagaccttgaagcacaattagctgagaaagagaaattacaatcaaaaaagcaagataaaaagacactcaataaacttaatgatattgaaaataaaattaaaaaaacaaatgaattaaaatctgatttaacagaacttgaaaaaagcgagccagaaggtatttacttgtcaggtgcactcttaatgtttgcaggaaacaaatcgtactatctctatggtgcttcatcgaatgactatcgtgatttcttaccaaaccatcacatgcaatttgaaatgatgaaatatgcacgagagcatggtgcaacaacctatgactttggtggtacagataataatcctgataaagattcagaacattatgggctgtgggcatttaaacgagtttggggtacatatttaagtgaaaaaattggagaatttgattatgtattaaatcaaccgttatatcatttagttgagaaagtgaaacctcgtttaacgaaagccaaaattaaaatatcacgtaaacttaaaggtaaataa

SEQ ID NO: 4616 - DNA, 3156 bp, Staphylococcus epidermidis
atgattaaaaaattattacaattttcgttaggtaataaattcgctatttttttgatggtagttttaattatattaggtggtgtttattcaagcgccaaattaaaacttgaattattaccagatgttgaaaatccagttatttcagttcaaactacaatgtctggagcaaccccccagtcaacacaagatgaaataagtagcaagattgataatcaagtacgttcgttggcctacgtaaatagtgtgaagaccgaatctataccaaatgcttctatagtaactgtagaatatgataatggtacagatatggataaagctgaagaacaattaaaaaaagaaatcgataaaattaagtttaaagacggcgttggtgaacctgaattaacaaggaactctatggatgcttttccaattgtggcatattcttttacgagtaataatcaaaagttaaaagacgttactaaaaagttaaatcaacagctcgtaccaaaattgcaaatcattgatggtgtgcaaaatgcacaattaaacggtcaaactaatcgtgaagtatcgttaaagtttaaacaaaaaaatttagatgaaaaaggtttaactgcaaatgatgttgagaactatataaaaacggctacacgtgaaacgccattaggacttttccaatttaataagagtaataaatctattattgttgatggtcaatttaaatctgtagacgcttttaaaaatcttaaaatccctttatctatttctggacaatctgtacaaaatgatagcgattccgacagtgatagtctaatgccaagtgataatactcgctcgactaatagttcaactcatatggcacaaaaaggccaaatgccatctgtaccacttaaagatttagcagatattagtgtcggtgatgaacgtacttctatatccaagacaaatggaaaagatgctgttaacttacaaattatgaaatcacaagatgctaatactgtgcaagttgcgagagaagttcagaaaaaagtagatgaatttgtacgtaatgagagtggaatgaaatctattaaaactatggatactgctaaacctattgaagattctctttatactatggttgaaaaggccgctctcggtacgatcgttgctattattgttattcttctgtttttaagaaacataagaactacagctatttcaattgtatctataccaatgtcaatattaattgcgctcatagcattaaaattaagcaacgtatcattaaatattcttactttaggtgcattaacggttgcaatcgggcgagttatagatgattctatagttgtcgttgagaatatatttagaagattatctgatccgaatgagaagctcaaaggggaaaatttaattataagcgctactagagaagtatttaaacctattatgtcatcgacccttgttactattgtagtgtttttaccactagtgtttgtgtcaggttcagtaggtgaaatgtttagaccatttgcgctagctattacttttagtttattagcttcactacttgtttcgattaccctagtgccttctttaggtgcaacattttttaaaaatggcgttaaaaatagggaacaaaagggaggtctaggagcagttgggagagcctatcgaagcgctttgaattggtcacttaatcataaatggattgtgcttatagttagtatttttattttagttggaagtgtggtcataggcgcaagaaatctaggaacgagttatatttcaacaggagataataaatttttagctctaacatatactccaaaacctggagaaacacagaaatctataacacaacatgctgaaaaagtacaaaattatttagataaaaaagataaagtagaaactgttcaatattctataggtggtcctacaccacaagatcctaccggtagtactaacagcatggcaattatgattaaatatcaatctgacacgcctaattttgacgaagagcctgataaagtacttaaacatatcgagacatttaaacaacctggagaatggaaaaatcaagatttaggaacaggagcaggtaataattctgttgaagtaactgtcaaaggacctaatacaagtgcaatgaaagatacagtcaaccgtgtagagaaattgatgactgatattaaaggcataacgaatgttaaatctgatttatcacagacgtatgaccaatatgaaataaaagttgaccaaaataaagctgcagataatggtatttctgctgcacaacttgcgatgaatcttaatgaaaacttacctgagaaaacaatttctacagttaatgaaaagggtaaatctatcgatgtaaaggtcaaacaaaataagcaaacagattggtcttctcaaaaaattaaaaacattaaactaaataagcctacgggcggtacgattaaacttagtgaaatagcatctctcaaaaaatcatatacaccaagtaaactgactcaagaagatggcgattatgctacgactgttacaggtaaagtgactgataaagatgtgggtggtaaatctcaacaagtcatggctaaaatgaaagatcttgagaaacctagtcatattaaaattaatgtcggcggtgctactgatgacattgataaggctatttctcagcttgcaatggcgatgatagcagcaattatcatagtttatttaattttagttattacatttagaggtggtctggcaccatttacaatcttattctcattaccatttacggttatcggtgtagtactggcactcatcattactggagaaaccatttcagttccaagtttaataggtatgcttatgttaattggtatcgttgttacgaatgctatagtattaatcgatcgtgttattaataatgaaaaacaaggtatgcagatgaaaccggcattgatagaagcgggtggtacacggataagacctatattaatgacagcaattgcaacaataggtgcactagtgccgttgttatttggtcaagacagttcaatattaatttccaaaggtatggctgcaacagtaataggtggattaatttcttcaacgctactcacactctttgtagtaccggttatgtacgaaattttattcactttgaaaaataaacttactaaaaagtttaatatgtaa

SEQ ID NO: 4617 - DNA, 216 bp, Staphylococcus epidermidis
atgggcatattgttactatttgtagttgctttgacgacgttacagttccctaaagaaaattggtgggtatttgtcgttttattacttttagttggtaatgttgaagtgactggttttaaagaattaaaagatgataaaaaaggtgttagcatcttaaatatcttatcacttttattatttgttatatttattattttaatttttatattatattaa

SEQ ID NO: 4618 - DNA, 171 bp, Staphylococcus epidermidis
atggacttgaattcaaagttatcagaacttaaatatgattatacacgattacaaaacgatttagaaaaacgtgagtcgcttcatcaagatattgaccctctacttaaacaacttgaaaatattgaacaagaaatcgcctatgtacgttcaaaattaaatcaacaatcctaa

SEQ ID NO: 4619 - DNA, 909 bp, Staphylococcus epidermidis
gtgactgaacaatttgtcataattatattattaatagcacttggttattttcttaaacgtatgaattacttgaaagcaactgatagtcaagtactttcaactttagtgttaaatgttacattaccttcactcgttatagttaacttaaatagtgcgaaattagatgtatctttttcaatattgcctataatgatgattatttacggtatagtagctaaaattatcgtaatttggttttttagaaaatatgataaccatatgcgtggttctgttggtatgatgactggatctatgaatattggtttgtttgcatatccgttggttgaagcgatatggccatctaaaggtatgatatatttcggaatggttgatattggcggggccattatcatgtttggtattacttattttgtaggaagttattatagcgaaggtagtgaccaatttaacttcaaatttttagggaaaaaattagttcaatcagtcccattagtaacctatatgattatgtttggattgaatatgtctcatattcatatatggcaaccagctattgatttctttagtgtattatcaaaggcgaatatgcctttatccatgatattattaggtgtaatgcttaattttagtattgagagagaatacctccctgtaacaataaaatatctttgtttacattacgggttaggtgtgttagctggaacactagttcactttttattacctgtatctgatgatatgattaaaacaaccttgcttataacgtggttattaccagtaggagtagcaattataccgtattcgattcaattcaaatataagacattaccgtttgttggaatggtaactaatttaaccattattattagcattatcattttgtatatttatcaagctgtatttgtataa

SEQ ID NO: 4620 - DNA, 792 bp, Staphylococcus epidermidis
atgtttgaagaattagaaaataaagtggttcttgttaccggagctgccactggaattggcaaatctattgctgaaaactttggtaaagctaaggccaaggttgttataaattaccgttctgatcgacatcatgatgaaattgaggaaattaaacaaactgttgctaaatttggtggtcaaacattggtggttcaaggtgatgtttcaattgaagaagatattaaacgaatgatcgaaacaacaattaatcactttggaactttagacattataattaataatgctggattcgaaaattcaatcccaactcatgaaatgtcgattgacgactggcaaaaagttattgacataaacttaactggcgcctttgtaggttcaagagaagccatcaatcaatttttaaaggaaaacaaaaaaggtactattattaatatttcaagtgttcatgacactattccatggcctaattatgtacactatgccgcaagtaaaggtggcttaaaattaatgatggaaacaatgtcaatggaatatgctcagtatggtattcgtattaataatatatcccctggggcaattgttactgaacacactgaagaaaaattttctgacccaacgacgcgtgaagaaacaataaaaatgatacccgcacgtgaaattggaaatgctcaagatatagctaatgcagtactattcctatcttcagatcttgcaagttatatacacggtacaacattgtacgttgatggtggcatgatgaactatccagcatttatgggtggtaaaggctaa

SEQ ID NO: 4621 - DNA, 864 bp, Staphylococcus epidermidis
gtgcaaattgtagattttttgatagcacttttaccagccctgttttggggtagtgtagtcattataaatgtttttgtaggtggtggaccatataatcagattcgaggtacaactttagggacactttttatcggattttctctactagctactggacacgcagcgtttgataatctaacagtaattattgtcggtttagtatcaggagctctatgggcttttggtcaaggaaatcaattaaaatcagtgcatttaataggtgtatctaaaacgatgcctatttcaacgggtatgcaacttgtcggtaccactctatttagtgctattttcttaggtgaatggagcacgattgttcaagtagtgctgggacttatagcaatgattttattggttgtaggtatttctttaacatcacttaaagccaaaagtgaaggcaaatccgataacccggaatttaaaaaagcaatgggaatattacttctatcaacaatcggttacgtaggttatgtagttcttggagatatttttggagtaagcggtacagatgctctcttcttccaatcaattggtatggcaattggaggattagttctttcaatgaaccataatacttcaattaaatctactgctttaaatcttataccaggtgttatctggggtatcggtaacttatttatgttttattcacaacctaaagttggtgttgcaactagtttctcattatcacaactcctagttattgtttcaactttagggggtatctttattctaggggagaaaaaagatcgtcgccaaatgattggtatttggtcaggtattattgttatagttatagcttcaatcattttaggcaacttaaaatag

SEQ ID NO: 4622 - DNA, 2136 bp, Staphylococcus epidermidis
atgaaatctttaatcttagctgaaaaaccatcggttggaagagatatcgctaatgctttgaatcttcaacaaaaaagtaatggttatatagaagggaaacagtatattgtgacttgggcattggggcatcttgtgacaaatgcaacgcctgaacaatataacccttcatataaagaatggaatttagaagatttacctatcattcctaagaaaatgaaaacagtagtgattagtaaaacaaatagacaatttaaagttgtaaaatctttaattttagataaaaatgttaaagaaattattatagcaacagatgctggacgagaaggtgaacttgtagctcgtcttattttagataaagtaggtaataaaaaaccaatcaagcgtttgtggattagttcagttacaaaaaaagccatacaagaaggatttaaacagttgaaaaatggcaacgcgtatcaaaatttatataaagcagcacttgcacgaagtgaagcagattggatagtagggattaatgcaacacgtgcactaacgacaaaatatgatgcgcaattatcattaggtcgcgtacaaactccaacaatacagttagttaaatcaagacaagatgagattaactattttaaatctgaaaaatattacacgttatccattaatgttgatggttacgatttaaatcttaaccaacaaaagcgatataaagataaaaaagaattagaattgattgaacatgaaattaaacatcaagaaggaaaaatattagaagttaaaggaaaaaataagaaatcttacgcgcaacctttatttaatttaacagatttacaacaagaggcatataaacgttacaagatggggccaaaggagacactaaatacattacaacatttatatgagagacataagttagtaacctatccccgtacagattctaattatttaacagatgatatggtcgatacaattcaagaacggttaagagcaattttagctacagattataaatctcatgttcgagatttaatttctgagtccttttcttctaaaatgcatatttttaataatcaaaaagtttcagatcatcatgcgattattcccacagaggttagaccatctattgaacaattgagtcaacgagagtttaaaatttatatgctaatcgcagaaagatttttagaaaatttaatgaatccttatttatatgaagttttaacaatccatgcacaactgaaagattacaattttgttttaaaagagataatacctaaacaattaggatataaagctttaaaagatcaaacctcttcgcatactttaacgcattcttttaaagaaggtcagttatttaaagtacatcgtattgagattcatgaacatgaaacaaaggcaccggaatattttaacgaaggttcattacttaaagccatggagaatccacaaaatcatattgatttgaatgataaaaagtatgcaaaaacactcaaacattcgggggggattggaactgtagcaactagggctgatattatagaaaagttatttaacatgaatgctttagagtcgcgagatggcaaaattaaagttacatcaaaaggaaaacaaattttagaattgtctccaagtgaattaacctcacctatactaacagcccaatgggaagaaaaattaatgcttatcgaaaaggggaaatataattctcagaaattcatacaggaaatgaaaaactttacatttaaagtagtaaataaaattaaaagcagtgagcaaaaatataaacatgataatttaacaacaaccgagtgcccaacatgtggtaagtttatgataaaagtcaaaactaaaaatggacagatgcttgtatgtcaagatcccaaatgtaaaactaagaaaaatattcaacgcaagactaatgcacgttgccctaattgtaagaaaaaaatgactttattcggtaaagggaaagaagctgtttatagatgtgtatgtggccacacagaaactcaatcacaaatggacaaaagaatgagagataaaacgaatggtaaagtttcacgtaaagaaatgaaaaaatatataaataaaaaagaagaaatcgacaataatccattcaaagatgctctgaaaaatctcaaattgtag

SEQ ID NO: 4623 - DNA, 1335 bp, Staphylococcus epidermidis
gtgaaaaagtacttccagttcgataagcatgggacaagttataaaaatgaaattttaggtggaattacgacctttctatcaatggcatatattctagctgtaaacccgcaaattttaagtttagctggtgtaaaaggtgcaacaagtgatatgaagatggatcaaggtgccatctttgtagcgacagctttagcagcgtttgttggatcattatttatgggattaattgctaaatatccaattgctttagcacctggtatggggttaaatgcattttttgcttttacagtagtattaactatgggaattccttggcaagtaggattaacaggtgttctattctctggtatattttttgcattacttactgttactggtttaagagaagttattatcaatgctatccctcatcaaatgaagctagctgtttcggcagggattggtttatttatcacatttgtggggttacaaagttcagggataataattaaaagtgattcaactttagtaaaattaggacatttgactgaagcaccagtacttttagcgattttcggaatcattgttacggtcattttatatgctatgaaaattcctggttcaatttttataggaatgattgtaactgccgtagcgggtatgctaactggtcaaattcatccaccatcaggaataattggagaagttccaagtatcaagccaacctttggtgcggcatttgaatcatttaaagatcctggtcaactgtttactattcaattcctaattgttattttaacattcttgttcattgatttctttgatacagctggtacgttagtagctgttgccacgcaagcaggattgatgaaagataacaaattaccgagagctggaagagcgttattctctgactctttagcaactattgtaggttctgtgtttggtacaactaccacaacatcatatattgagtctacttctggcgtagctgtaggggctagaacaggatttgcaagtatagtcacgggtatttgtttcttattagcattattctttagtccgttaatagaagttgtaacaagtgcagtaactacacctgctttagttgtagtaggtgtattgatggcggctaattttgctgatataaattggaagcaatttgaagttacagtaccagcttttattacaatcattatgatgccattgtcttattctattgccactggtattgcatgtggatttattttttatccaataacaatgattatcactaaaaagtataaagaagttcatccaattatgtactttttaatggctttgtttatattatattttatattcgttcataaataa

SEQ ID NO: 4624 - DNA, 399 bp, Staphylococcus epidermidis
atgaaaaatggagtgaaaatatctttggcaatcataggagtctttcttattgtctgtgaatttttctatggtattccatttctaggtggcagtgtaattctaagttttggatggcaaccattgttgtttaacgctcttctatatcttgtgctcatcattatattattagtggattcacagaactcaattaaacctatgtttgtcattcctttcttaggattaataggatccttcgttgcgttcttaccagttataggtatggtaattcattggattttattcttcttaatgattttcttcgtatttattgtcttagctgcacccacttatatccctaataaaaatgcaagggtcgtttatactcaatataaaaaacgaattaaaggagataatgattaa

SEQ ID NO: 4625 - DNA, 309 bp, Staphylococcus epidermidis
atggcaaaacaaaaaatcagaatcagattaaaagcttatgatcatcgtgtgattgatcaatcagcagaaaaaattgttgaaactgcaaaacgttctggtgcagatgtttctggaccaattccattaccaacagaaaaatcagtttatacaattattcgtgctgtgcataaggacaaagattctcgtgaacaattcgaacaacgtactcataaacgtttaatcgacattgttaatccaacacctaaaacggtagatgctctaatgggcttaaacttaccatcaggtgtagacatcgaaattaaattataa

SEQ ID NO: 4626 - DNA, 663 bp, Staphylococcus epidermidis
atgaccaaaggaatcttaggaagaaaaattgggatgacacaagttttcggtgaaaatggtgaattaatccctgtaacagttgtagaagctagtcaaaacgttgtattacaaaagaaaactgaagaagttgatggttataatgctatccaagtaggttttgaagataaacaagcatataagaaaggttctaaatctaataaatatgctaataaaccagctgaaggtcatgctaaaaaagctgacacagcacctaagcgcttcattcgtgaattccgcaacgttaacgttgacgaatacgaagtaggtcaagaagtctcagttgatacattcgaaactggtgacatcattgatgttacaggcgtttcaaaaggtaaaggtttccaaggtgctattaaacgtcatggacaaggtcgtggaccaatggctcacggttctcatttccatagagcgccaggctctgtaggtatggcatcagacgcttcaaaagtgtttaaaggacaaaaaatgccaggacgtatgggtggaaacactgttactgttcaaaacttagaagtcgttcaagttgacactgaaaatagtgtgattttagtaaaaggcaatgtacctggacctaaaaaaggtttagtagaaatcacaacttcaataaaaaaaggtaataaataa

SEQ ID NO: 4627 - DNA, 624 bp, Staphylococcus epidermidis
atggctaattatgatgttttaaaagtagacggatcaaaatcaggttcagttgaattaaacgatgcagtatttgctatcgaacctaataatagcgttctatttgaagctattaacttacaacgtgcgtcattacgccaaggtactcacgctgttaagaatcgttcagcagtacgtggtggtggacgtaaaccatggagacaaaaaggtacaggtcgtgcacgtcaaggtacaatccgtgctccacaatggcgtggtggtggtgtagtattcggaccaacaccaagaagctatgcatataaaatgccaaagaaaatgcgtcgtttagcattacgttctgcattatcttttaaagttcaagaaaatagctttacaattgtagatacttttggttttgaagcaccaaaaacaaaagaattcaaaaatgtattaactactcttgaacaacctaagaaagtattagttgtaacagaaaacgaagatgtaaatgttgaattatcagcacgtaacattcctggtgttcaagttacaactgctcaaggattaaatgtacttgatctaacaagcgctgacagtgtaatcattacagaagcagctgcgaaaaaagttgaggaggtgctcgcataa

SEQ ID NO: 4628 - DNA, 276 bp, Staphylococcus epidermidis
atggaagcaagagatgttcttaagcgccccgtaatcactgaaaaatcttctgaagctatggcagaagataaatacactttcgatgtagatactcgtgcaaataaaacacaagttaaaattgctgttgaagaaatcttcgacgttaaagttgatagtgtaaatattatcaactacaaacctaagaaaaaacgtatgggccgttaccaaggctatacaaacaaaagaagaaaagcgattgttaaactaaaagagggttcaatcgatttatttaactaa

SEQ ID NO: 4629 - DNA, 834 bp, Staphylococcus epidermidis
atggctcttaaaaaatataagccaattacaaatggtcgtcgtaatatgactactttagatttcgctgaaatcacaaaaacaacacctgaaaagtcattattacaaccgctaccgaaaagagcgggacgcaataaccaaggtaaattgactgttcgccatcatggtggtggacacaaacgtcaataccgtgttatcgattttaaacgtaacaaagatggaatcattgctaaagttgattcaattcaatatgatccaaaccgttcagcaaacattgcattgctagtttatgctgatggtgaaaaaagatatatcatcgcacctaaaggattacaagtaggtcaaactgtcgaaagtggtgctgaggcagatatcaaagttggtaatgctttaccattacaaaatattccagttgggacagtaattcataacatcgagttaaaacctggtaaaggtggacaacttgctcgttctgctggtgctagctctcaagtattaggtaaagaaggtaaatatgtattaatcagattaagatctggtgaagtacgtatgattttatctacatgtcgtgcaacaattggtcaagttggcaacttacaacatgaattagtaaatgttggtaaagcaggacgctctagatggaaaggcgttcgcccaactgtacgtggttctgtaatgaaccctaatgatcacccacacggtggtggtgaaggtcgtgctccaatcggtagaccatctccaatgtcaccatggggtaaacctacgcttggtaagaaaactcgtcgtggtaaaaaatcttctgacaaacttatcgttcgtggacgtaagaaaaaataa

SEQ ID NO: 4630 - DNA, 279 bp, Staphylococcus epidermidis
atggctcgtagtattaaaaaaggacctttcgtcgatgatcacttaatgaaaaaagtagaagctcaagacggaagtgaaaagaaacaagtgattaaaacatggtctcgtcgttctacaattttcccaaatttcattggccatacttttgcagtatacgatggacgtaaacatgtacctgtatatgtcactgaagatatggtaggtcacaaattaggtgaatttgctcctacacgtacttttaaaggacatgcagcagacgacaagaaaacaagaagataa

SEQ ID NO: 4631 - DNA, 354 bp, Staphylococcus epidermidis
atggaagcaaaagcggttgctagaacaataagaatcgcacctcgtaaagtaagacttgttcttgatttaatcagaggtaaaaatgctggagaagctattgctattttaaaattaactaataaagcttcatcaccagtaatcgaaaaagtattaatgtccgctttggcaaatgctgagcacaactatgatatgaatacagatgaattagttgtaaaagaagcatatgctaatgaaggaccaactttaaaacgtttccgcccacgtgcacaaggacgtgcaagtgcaattaataaacgtacaagccacattacaatcgtcgtaagtgacggtaaagaagaagctaaagaagcttaa

SEQ ID NO: 4632 - DNA, 654 bp, Staphylococcus epidermidis
gtgggtcaaaaaattaatccaatcggacttcgtgtcggtgttatccgtgattgggaagcaaaatggtatgctgaaaaagactttgcttcacttttacatgaagacttaaaaatccgtaaatttattgataatgaattaaaagaagcgtcagtttctcacgtagatattgaacgtgcagcaaatcgcatcaatattgctatccatactggtaagccaggaatggttattggtaaaggcggttcagaaattgaaaaacttcgtaacaaattaaataccttaactgataaaaaagtacacatcaacgtaattgaaattaagaaaattgatattgatgcacgtttagttgcagaaaatattgcacgtcaattagaaaatcgtgcttcattccgtcgtgtacaaaaacaagctattacaagagctatgaaaaatggtgctaaaggtatcaaaactcaagtatcaggtcgtttaggcggagctgacatcgctcgtgctgaacaatactcagaaggaactgttccacttcatacattacgtgctgacattgattatgcacacgctgaagccgatacaacatatggtaaattaggcgttaaagtatggatatatcgtggagaagttcttcctactaagaacactagtgaaggaggaaaataa

SEQ ID NO: 4633 - DNA, 435 bp, Staphylococcus epidermidis
atgttactaccaaaacgtgtaaaatatcgtcgtcagcatcgtccaaaaacaactggtcgttctaaaggcggtaactacgtaacatttggtgagtatggattacaagctacaactacatcttggatcacatctcgtcaaatcgaatcagctcgtattgcaatgacacgttacatgaaacgtggcgggaaagtttggattaaaatcttccctcatacaccatatactaaaaaacctttagaagtacgtatgggtgctggtaaaggtgcggttgaaggctggatagcagttgttaaacctggtagaattttattcgaagtagctggtgtacctgaagaagttgctcgtgaagcattacgtttagcaagtcacaaacttccagtaaaatctaagtttgtaaaacgtgaagaattgggtggtgaaacaaatgaaagctaa

SEQ ID NO: 4634 - DNA, 210 bp, Staphylococcus epidermidis
atgaaagctaaggaaattagagacttaaccacttcagaaatcgaagaacaaatcaaatcttcaaaagaagagctttttaacctacgctttcagttagctacaggtcaattagaagaaacggcacgtattcgcacagtaagaaaaacgattgcacgtctaaaaactgttgctcgtgaaagagaaattgaacaaagcaaggctaatcaataa

SEQ ID NO: 4635 - DNA, 264 bp, Staphylococcus epidermidis
gtgagcgaaagaaacgatcgtaaagtttatgtaggtagagttgtttcagataaaatggacaaaacagtcactgttctagtggaaacttacaaaacgcacaaattatacggcaaacgagtaaaatactctaaaaaatataaaactcatgatgaaaacaattcagctaaattaggagacattgttaaaattcaagaaactcgtcctttatcagcaacaaaacgttttcgtttagtagaaattgttgaagagtcagtaattatttaa

SEQ ID NO: 4636 - DNA, 369 bp, Staphylococcus epidermidis
atgatccaacaagaaacacgcttaaaagtagcagacaattctggtgctcgtgaagttcttacaattaaagtattaggtggatctggtcgcaaaacagcgaacattggtgatattattgtatgtactgttaaaaatgcaacaccaggtggcgttgtcaaaaaaggtgacgttgtaaaagctgttgtagttcgtacaaaatcaggtgttcgtcgtgaagacggttcatatattaaatttgacgaaaatgcatgtgttatcatccgtgatgacaaaggcccacgtggtactcgtatctttggtcctgttgctcgtgaattacgtgaaggaaacttcatgaaaattgtatcactagctccagaagtactataa

SEQ ID NO: 4637 - DNA, 318 bp, Staphylococcus epidermidis
atgcatatcaaaaaaggtgacaacgtaaaagttatcgcaggtaaagacaaaggtaaagaaggtaaagtagtagctactgaaccaaaaaaagaccgtgtcgttgtggaaggtgttaacgttataaaaaaacaccaaaaaccaactcaattaaaccctgaaggtggaattttagaaacagaggcagcaatccatgtttctaacgtacaattattagatcctaaaacaaatgaacctacacgtgtaggatataaaacagttgatggtaaaaaagttcgtatcgctaaaaaatcaggcgaagaaattaaagctaataattaa

SEQ ID NO: 4638 - DNA, 540 bp, Staphylococcus epidermidis
ttgaaccgtttaaaagaaaaatttaatacagaagttactgaaaacttagtgaaaaaattcaattatagttcagtgatggaagtaccaaaaattgagaaaatcgttgtgaatatgggtgtaggtgacgcagttcaaaattctaaagttttagacaatgctgttgaagagttagaattaattactggtcaaaaaccattagtcacaaaagctaaaaaatcagttgcaacattccgtttacgtgaaggtatgccaatcggtgcgaaagtcactcttcgcggagaaagaatgtatgaattcttagacaaactcattgcagtttcattaccacgtgtacgtgacttccaaggtgtttctaaaacagcttttgatggtcgtggaaattacacacttggtgttaaagaacaattaattttcccagaaattgactacgataaagtaacaaaagttagaggaatggatattgttatcgtaacaactgctaacactgacgaggaagctcgtgaattgttaacaaacttcggtatgccatttcgtaaataa

SEQ ID NO: 4639 - DNA, 186 bp, Staphylococcus epidermidis
gtggctaaaacttcaatggttgctaagcaacaaaaaaaacaaaaattcgctgtacgtgaatatactcgttgtgaacgctgtggtcgtccacattctgtgtatcgtaaatttaaattatgccgtatttgtttccgtgaattagcttacaaaggtcagattcctggcgtacgtaaagctagctggtaa

SEQ ID NO: 4640 - DNA, 399 bp, Staphylococcus epidermidis
atgacaatgacagatccaatcgcagatatgcttactcgtgtaagaaacgctaacatggttcgccacgagaaattagaattacctgcgtctaatattaaaaaagaaattgctgaaatcttaaagagtgaaggtttcattaaaaatgttgaatatgtagaagacgataaacaaggtgttattcgtttattcttgaaatatggtcaaaacaatgaacgtgttatcacaggtttaaaacgtatttctaaaccaggtttacgtgtttacgctaaagcaaatgaagtgccaaaagtattaaatggcttaggtattgcattagtttcaacttctgaaggtgttatcactgataaagaagcaagaaaacgtaatgttggtggagaaattatcgcatacgtttggtaa

SEQ ID NO: 4641 - DNA, 537 bp, Staphylococcus epidermidis
atgagtcgtgttggtaagaaaattattgacattcctagtgacgtaacagtaacttttgacggaagtcatgtcactgtaaaaggtccaaaaggtgaattagaaagaactttaaatgaaagaatgacatttaaacaagaagaaaacactgttgaagttgtaagaccatctgattctaaagaagacagaacagatcatggtacaactcgtgctttattaaataatatggtactaggtgtttctcaaggttacgaaaaaacacttgagcttgttggtgtaggttaccgtgcacaaatgcaaggtaaagatttagtacttaatgttggatactctcacccagttgaaattaaagcagaagaaggcattactttcgctgttgagaaaaatacaactgttaaagtatctggtgtttctaaagaacaagttggtgcgattgcttctaacattcgttctgtaagacctccagaaccttataaaggtaaaggtattcgctaccaaggtgaatatgtacgccgtaaagaaggtaaaactggtaaataa

SEQ ID NO: 4642 - DNA, 363 bp, Staphylococcus epidermidis
atgatcagtaaaattgataaaaacaaagtacgtttgaaaagacatgctcgtgttcgtactaaattatcaggtacagctgaaaagccacgtttaaatgtgtatcgttcaaacaaacacatctatgcacaaattattgatgacgttaaaggcgtaacacttgctcaagcatcatcacaagataaagatattgcaaacacatcagcttcaaaagttgacttagcaactactgttggtcaagaaattgctaaaaaagctaacgataaaggtattaaagaaatcgtcttcgatcgcggaggatatttataccacggacgtgttaaagctttagctgatgctgcaagagaaaatggattagaattttaa

SEQ ID NO: 4643 - DNA, 501 bp, Staphylococcus epidermidis
atggctcgtagagaagaagaaactaaagaatttgaagaacgcgttgttacgattaaccgtgttgctaaagttgtaaaaggtggtcgtcgtttccgtttcactgcattagtggttgttggagataaaaatggtcgtgtaggtttcggtactggtaaagcgcaagaggtaccagaagctatcaaaaaagctgttgaagcagctaaaaaagatttagtagttgttccacgtgtagaaggtacgactcctcatactataactggtcaatatgggtcaggtagcgtatttatgaaaccagctgcacctggtacaggagttatcgctggtggaccagttcgtgccgtattagagttagcaggaattactgatatcttaagtaaatctttaggatcaaatactcctattaatatggttcgtgcgactatcaacggtttacaaaacttaaaaaatgcagaagatgttgctaaattacgtggcaaatctgtagaagaattatacaattaa

SEQ ID NO: 4644 - DNA, 183 bp, Staphylococcus epidermidis
atggctaaattacaaattaccctcactcgtagtgttattggtcgtcctgaaacacaacgtaaaactgttgaagctttaggtcttaaaaagactaatagttcagtagttgttgaagataaccctgcaattcgtgggcaaatcaacaaagttaagcatttattaacaattgaagaagaaaaataa

SEQ ID NO: 4645 - DNA, 441 bp, Staphylococcus epidermidis
atgaaattacatgagttaaaagcagctgaaggatcacgtcgtgtacgtaaccgtgtaggtcgtggtgctgcaactggtaacggtaaaacaagtggccgtggtcaaaaaggtcaaaaagcacgttcaggtggtaaactaagaccaggatttgaaggtggacaattacctttattccgtcgtttgcctaaacgtggtttcactaacattaaccgtaaagaatatgctattgttaacttagaccaactcaataaatttgaagatggtactgaagttactccagctttattagtagaatctggtgttgttaagaatgaaaaatctggtatcaaagtactaggtaacggttcactagacaagaaattaacagtgaaagctcataaattctcagcttcagcagcagaagctattgatgcaaaaggtggagcacacgaggtgatctaa

SEQ ID NO: 4646 - DNA, 1293 bp, Staphylococcus epidermidis
atgtttcaaacgtttgtacgtttctttacaactaaagaagtacgaaacaagattttcttcactctagcaatgttagttatttttaaaataggaacgtatattcctgctccaggagttaatcctgaagcctttaatcatccacagggatctcaaggtgccactgagttattaaatacttttggtggcggtgccttgaaacgtttctcaatatttgcgatgggaatcatgccttatatcactgcatccatcgtcatgcaattactgcaaatggatattgttcctaaatttacagagtgggcaaaacaaggtgaaatgggtagaagaaaaattaataacgtaactcgttattttgctataattttagcttttatccaatctataggtatggctttccaatttaataactatctcaaaggacaacttattatagaaaagtctgttatgagttatttattaattgcagttgtattaacagcgggaacagctttcttaatttggcttggtgaccaaatcacacagtttggtgttggtaacggtatttctcttatcatctttgcaggtatattatcaactttaccttcgagtctagaacaatttgcacaatcagtgtttgtaggtcaagacgatacttcacttgcttggctgaaaatactaggattgattgtagccttgattttactaacagtaggcgcaatatttgttcttgaagctaaacgtaaaatacctattcaatatgcaaagaaacaatctgctcaacgattaggttcacaagcaacttatctacctttgaaagttaactctgccggtgttattccagttatctttgcgatggcgtttttcttgttaccaagaacattgactttattcttcccgaaagcagaatgggcacagaatattgctgatactgccaacccatcaagtaatattggaatgattatttatgtagttttaattattgcatttgcatatttttatgcttttgtacaagttaatcctgaaaaaatggcagataaccttaaaaagcaaggtagttatgtcccaggaattagacctggtgaacaaacaaaaaaatatattactaaagtactttatagattgacttttgttggttcaattttcttagcagctatagctattttacctataattgcgactaaatttatgggcttaccacaatcaattcaaattggtggtacgagtcttttgatcgttattggtgtagctattgaaactatgaaaactttagaagcacaagtcactcaaaaagaatataaaggctttggtggtagataa

SEQ ID NO: 4647 - DNA, 648 bp, Staphylococcus epidermidis
atgaatatcattttaatgggcttacctggtgcaggtaaagggactcaggcgagtgaaattgttaagaaattcccaataccacatatttctactggtgacatgttcagaaaagcgattaaagatgaaacagatttaggaaaagaagctaaatcatatatggatcgtggagaattagttcctgatgaagttactgtaggtatcgttaaagaaagaatttctgaagacgatgcaaaaaaaggattcttgttagatggattcccaagaactatagatcaagctgagtcattaagtcaaattatgtctgagcttgatagagaaattgatgctgtcattaatatcgaagttcctgaggaagaattaatgaatcgtcttacaggtcgtcgtatctgtgagaaatgtggtacaacatatcatcttgtatttaatcctccaaaggttgatggtatatgtgatatcgatggtggaaagttatatcaacgtgaagatgacaatccagaaacagtatctaatcgtttgagcgttaatgttaaacaatctaagcctattttagaatattacaacaacaaaggtgtcttgaaaaacattgatggttcaaaagatattgacgaagtaaccaacgatgtcattgatatcttagatcatttataa

SEQ ID NO: 4648 - DNA, 219 bp, Staphylococcus epidermidis
atggctaaacaagatgtaattgaattagaaggtacagtactagatactttaccaaacgcaatgtttaaagtagaattagaaaatggtcatgagattttagctcacgtaagtggtaaaatcagaatgaattacattcgtattctacctggcgacaaagtaactgttgagatgtctccgtatgatttatcgcgcggtagaattacttatcgttataaataa

SEQ ID NO: 4649 - DNA, 114 bp, Staphylococcus epidermidis
atgaaagtaagaccatcagtaaaaccaatatgcgaaaaatgcaaagtcattaaacgtaaaggtaaagtaatggtaatttgtgataatccaaaacacaaacaaagacaaggttaa

SEQ ID NO: 4650 - DNA, 366 bp, Staphylococcus epidermidis
atggcacgtattgcaggagtggatattccacgtgaaaaacgcattgttatctcattaacatacgtatatggtattggtacttcaactgctaataaaattgtagaagaagctaacgtatcagcagatactcgcgttaaagatttaactgacgatgaattaggtcgtatccgtgaagttgtagatggctacaaagtagaaggtgacttacgccgtgaacaaaacttaaacattaaacgtttaatggaaatttcatcataccgcggaattcgtcatcgtcgtggcttaccagttcgtggacaaaaaactaaaaacaatgctcgtacacgtaaaggtccagttaaaacagtagctaataagaaaaaataa

SEQ ID NO: 4651 - DNA, 390 bp, Staphylococcus epidermidis
atggcacgtaaacaagtatctcgtaaacgtagagtgaaaaagaatattgaaaatggtgtagctcacatccgttcaacattcaataatactatcgtaactatcactgatgaattcggtaatgcattatcttggtcatcagctggtgcattaggattcaaaggatctaaaaaatcaactccatttgcagctcaaatggcttcagaaacagcttctaaaactgctatggaacatggtttgaaaacagtagaagtaacagtaaaaggacctggtccaggccgtgaatctgctatccgtgcactacaatctgcaggtttagaagtaactgcaatcagagacgttactccagtaccacacaacggttgtcgtccaccaaaacgtcgtcgcgtataa

SEQ ID NO: 4652 - DNA, 945 bp, Staphylococcus epidermidis
atgatagaaattgaaaaacctagaattgagacaattgaagttagtgaagatgctaaattcggtaaattcgttgttgaaccacttgaacgtggctatggtactacactaggaaactccttacgtcgtatcctactatcttcattaccaggtgcagccgttaagtacatcgagattgaaggagttttacacgaattttcagcagtagataatgtagtagaagatgtttcaacaatcattatgaacattaaaaaacttgcattaaaaatttactctgaagaagataaaactttagaaattgatgttaaagatgaaggcgaagtaactgcaagtgacattactcacgacagtgatgttgagattttaaatccagagcttaaaatcgcaacagtgtctaaaggtggacatcttaaagtgcgtcttgttgctaataagggtagaggttacgcattagctgaacaaaataatactagtgatttaccaattggtgtaattcctgttgattcactatattcacctgttgaacgtgtaaactatacagttgaaaatacacgcgtaggtcaaagtagtgattttgataaattaactttagatgtttggacaaatggttcaatcacaccacaagagtcagtatcattagcagctaaaataatgactgaacacttgaatatctttgtaagtctaactgatgaggctcaaaacgctgaaatcatgattgaaaaagaagaagatcaaaaagaaaaagtacttgaaatgtctattgaagaattagacttatctgtacgttcttataactgcttaaaacgcgcaggaatcaattctgtacaagagttagctgataaatctgaagctgacatgatgaaagtgcgtaatttaggtcgtaaatctctagaagaagtaaaatataaattagaagatttaggattaggattaagaaaagaagattga

SEQ ID NO: 4653 - DNA, 369 bp, Staphylococcus epidermidis
atgggttacagaaaattaggtcgtacttctgatcaacgtaaagcaatgttacgtgacttagcaacttcattaatcgttagtgaacgtatcgagacaactgaagctcgtgctaaagaagttcgtagtgtagtagagaaattgatcacacttggtaaaaaaggtgatttagcatctcgtcgtaatgctgctaaaactttacgtaatgttgaaattttaaatgaagatgactctacacaaactgctcttcaaaaattatttggtgaaatcgctgaacgttatagtgaacgtcaaggtggttacactcgtattcttaaagtaggccctcgtcgtggtgacggcgctgaatcagtaattattgaattagtttaa

SEQ ID NO: 4654 - DNA, 810 bp, Staphylococcus epidermidis
gtgaatgggtcaaatcctatcattgaatttaaagatgtatcatttcaatatcaaagtgacgctgctttcacattaaatcgcgtttcattctcaataccagctggacaatggacttctattgtaggtcacaatggttcaggaaaatctactattgctaaacttatggtaggtatagaagaaccaagtgaaggacaaattctatttcaaaatctaccagtagactctcaaaataagcgagaagtgaggaaacatatcggaattgtttttcaaaaccccgataatcaatttgtaggttctatagttaaatttgatgttgcttttggtcttgaaaaccaacttgttccttataaagaaatggtatctaaagttaatcaagtattaactgaagtagatatgataaataaagccgatgatgaaccccattcactttcaggagggcagaaacaacgtgttgccattgctggggtacttgcacttaatcctgatgtgctgattttagatgaagcgacaacgatgctagatcctcatggaaagtcatctttacttaaccttgtaaatgaagttaaagtaaataatcatgttacaattatttcaatcactcatgatttagatgaagcaatgcatgctgatcaaatcattgtattgaataaaggaactgtttttaaacaaggaacacctcaagatatttttaagtgcgaagaggcactaatatcggttggattggacttaccatttcctttgaaaatgaatcgacttttaggttttgattcaacttatgtaacttatgaagggttgattaaaaaattatga

SEQ ID NO: 4655 - DNA, 861 bp, Staphylococcus epidermidis
atgagtatacaatttaatcaagtgagttatatttatcaacaagggacaccttatgaatttgaagctattaaaaacgtttcactaactcttgaacagggcaagtattatgcaattattggtcaaactggaagtgggaaatccactctgattcaacatttgaatgctttattaaagcccactacaggttcagtcaacattaatggtttagaagttacaaataaaactaaagacaagcacttacgtcacataagaaaagaagtaggtatagtatttcaatttccagaatcccaattatttgaagatagcgttgaaaaagaaattgagtttggacctaaaaattttaatatgaacctaaaaaatgttaaagacaaagcttttcaacttcttcttgaattaggtttttcaagaaatgtgatgtcatcctctccatttcaaatgtcgggaggacaaatgagaaaaatagccattgtttccattttggctatggatccacaagtaattattctggatgaaccgactgctgggttagacccgaatagtaaacaccaagtcatgtctttaataaagaaaatacaaatagaagaaaataaaacgattattcttgtttcacatgatatggatgatgtagcacgttattcagatgaagttgtagtaatgaataaagggacgatagtagaaaaatcaaatcctagaaatttatttaatcaaaaaacgcaattattaaagtggcatatagagttgcctaaagtagtgaagttacagaaagatatcgaaaaaaaatataatatgttatttccaaagcttgccatgaatgaagaagagtttgtgaagttgtataaggagtggcatcatgaagaataa

SEQ ID NO: 4656 - DNA, 807 bp, Staphylococcus epidermidis
atgaagaataaattaatcattggacgatatcttcctatgcaatcaattattcatcagcttgatcctagagctaagttaatatttgtctttttctttattcttttaatttttttctgtcattcactaggtacatatgcatggttgtttctttttataatattatttattaagttagcacgtattcctttttggtttttaattaaaggattaacacctatctttttcttcttggttttcactttttctatgcatgtgttatttactaatggaggtatcgtattatttcaatggaagtttatcactattgaatcaaatggtgttatggaaggaatttacatatcactaagattgatttttatagttatgattgcaacaatcatgacactttcgactagtccgattgatttaacagatgcttttgaaaaattatttgtacctcttaaagtgattaaagtaccagtacatcaattaagtatgatgatgtctattgctctaaggtttataccaacattaatggacgaattagaaaaaattatacttgctcaaaaatctagaggatcagaaataagttcaggaagtttaataacacgaattagagcttttatacccatcatgattccattatttatttctgcctttcaaagagcagaagaactagctatagcaatggaagtcagaggttatgatattaacatcaaacgaacaagctataggttattacattggcaatataaagacacattaacagtcttacttttaatacctatcgctactatattatttattttaaaattttcaggagtgtaa

SEQ ID NO: 4657 - DNA, 804 bp, Staphylococcus epidermidis
ttgcgtatattagttgaaattgcttatcaaggtaaccaatttttaggttttcaaattcagcaacaaggacgaactgttcaacaacaatttgaaaagattcttaaacgaatgcataaacatcatgtacgaattcatccctcaagcagaacagacaggggtgtgcatgcgtatcagcaattctttcatttcgataccgaattgaatattgataacaaacaatggcaatatgcgatgaatcgagctttaccagatgatatttacgttaaaaatgtacgaaatgtcgacgagtattttcattgtcgttatgactgcgtaggcaaacgctatcgttacaaagtttatcaaggtaatcatcgaaatccttttaagagtggtactgaaacatttgttaatgaaacattagactatgataaaatgaacaaagctgctcaagaatttataggtacacatgattttaccggtttttgttcacagaaaacagaagttgaaagcaaagtaagaacactatatcagagtgaaattgttgctactaaagaagggtttgattatgtcgtaacaggttctggattcctttataatatggtccgtgtattggtagctttcttaattgaagtaggaaaaggaaagcgtgaacctaatgacgtccctaagctcttagaggacaaaaatagaaataatgtgcctctcacagctccacctgacggattatatttagaaaagatttatttaagcccagaagaattgatacaagaatatgggaaagatgtaaaaatacactacaaaaaatcgttggaaaaacactaa

SEQ ID NO: 4658 - DNA, 438 bp, Staphylococcus epidermidis
atgcgtcaaacatttatggcaaatgaatcaaacattgagcgcaaatggtatgttattgatgctgaaggccaaacattaggtcgtttatcatcagaagtagctgctatattacgcggtaaaaataaagtaacttatacaccacatgttgatactggtgattatgtaattatcattaatgcatctaaaattgaattcactggtaacaaagaacaagacaaaatgtactaccgtcattcaaatcacccaggcggtttaaaatcaatctctgctggtgaattaaaaagaacaaatcctgaacgtttattagaaacttcaattaaaggtatgttaccaagtacacgcttaggtgaaaaacaaggtaaaaaattatttgtatatggtggcgctgaacatccacacgctgcacaacaaccagaaaactacgagttacgtggttaa

SEQ ID NO: 4659 - DNA, 393 bp, Staphylococcus epidermidis
ttggcacaagttgaatataaaggcacaggccgtcgtaaaaactcagtagcacgtgtacgtttagtacctggcgaaggtaacattactgttaacgaacgtgatgtacgtgactacttaccattcgaatcattaattttagacttaaatcaaccatttgatgttacagaaactaaaggtaactatgatgttttagttaacgtacacggtggcggatttactggacaagctcaagcaatccgacatggaattgcacgtgctttattagaagcagatcctgaatacagaggttctttaaaacgtgctggattacttactcgtgacccacgtatgaaagaacgtaaaaaaccaggtcttaaaaaagcacgtcgttcaccacaattctcaaaacgttaa

SEQ ID NO: 4660 - DNA, 741 bp, Staphylococcus epidermidis
atgaaaaaaccagatattcaacagttaaaagatatcgtaaacaactctaatcaaattgttttctttacaggagctggtgtttcagttgcaagcggaattccagatttccgctcaatgggtggcttgtatgatgaaatatcaaaagatggacagtctccagagtatttgcttagcattgatcatttacatgataataaagaaagttttataaacttttatcatgaaagacttttaattgccgataaaaaacctaatattgttcatcaatggattgcacaactggaaaatcagcaaaaatcacttggcgtcatcactcaaaatatagatggtttacacgaagatgcaggtagtcacaatattgatgagctacatggtacacttaatcgcttttattgtattaactgttatgaggagtactcaaaatcatatgtcatgacacatcatctcaaatattgtgaaaaatgtggtaacgtcatcagacctgatattgttttatacggcgagatgttaaatcaaaaaacagtcttcaaggcattagataaaattcaacatgcagatacgctcatcgtattaggttcatcacttgttgtacaacctgctgctggttttgtatcagaatttaaaggtgacaacctagttatcattaatagagatgcaactccatatgatcatacagctagcttagttatacacgatgatatgactagtgttatagaagaaattgtaaatagtaatagttaa

SEQ ID NO: 4661 - DNA, 756 bp, Staphylococcus epidermidis
atgaacaaatatgataggttagatgaaatcacaaaattagtaaataaacgaggttctgtaagaacaaatgaaatcgtcgaagatctaaatgtgtcagatatgactgtgcgccgtgatctcgcagagcttgaagaaaaaggtgttctcactaaaatacatggtggtgctcgtagtaattcagctttccaatataaagaaatgtctcatcaagaaaaacatacacgttttattgaagaaaaacgatttatagcaaagaatgcagtagatttaattgaagatggagatactattttcttaggtccaggtactacagttcaaaaattagctgaagaaataaatcattattcattaacaattattactaattgtttaccagtatttaatatattaataaaaaaacaaacgttacatttcagagtctatttattaggtggggaaatgcgtgatttaactgaagcatttgtaggtgagatgacaaatcagttattaagtcaactaagatttagtaaaatgttttttagtagtaatggtgttaaagatggtctagctatgacatcctcaatagaagaggcttatacgcaacaaattgcacttagccattcgttggaaaaatatttactgattgactcttcaaaaattggtaaggatgatttttcatcattttgtgagcttcgtgaactcaatgcagttttaacagataataatgacttggaaaagaaagaaaaaatagaatcatatgttgaggttattagctaa

SEQ ID NO: 4662 - DNA, 429 bp, Staphylococcus epidermidis
atgacgattattattggttcagatgtagatggcaaacgcttaaaagaattaattaaagattatttggaagacaacgattatgatgttttagatgttacagaaggaaaagatctagactttgttgattcaacagtctctgtagctaaagaagttcaaaagtccgacgacaatctaggtattgctatagatgcctatggtgcaggtagttttattgtagcaactaaaattaagggaatgattgcggctgaggtttcagatgagcgttcagcttacatgacacgtagccataataatgcacgcatgattactatgggagctgaaattgttggagatacgcttgctaagaatgtcgcaaaagaatttgtcaatggtcattacgatggtggacgtcatcaaatccgcgtagatatgttaaataaaatgtgttaa

SEQ ID NO: 4663 - DNA, 516 bp, Staphylococcus epidermidis
atgaaaattgcaataggttgcgatcatattgttactgatacaaaaatggaagtttcacaacacttaaaatcacagggacatgaagtgatagatgttggaacttatgatttcacacgtacacattatccgatttatggaaaaaaggtaggagaaaaagttgcgagtggtgaagcagatttaggtgtatgtatttgtggtactggtgtaggaattagtaatgctgcaaacaaagtaccaggtgttagaactgctttagttagagatatgacatcagcgctttattctaaagaagagttaaacgccaatgttgtaagttttggcggtaaagtagcaggtgaattatttattttcgacatcgttgatgcattcattgaggcagagtacaaacctactgaagaaaataaaaaattaattgctaaaatcaatcatttagaagcacataacaatgaccaagctgatccacatttcttcgacgagttcttagaaaaatggaataaaggtgaatatcacgattaa

SEQ ID NO: 4664 - DNA, 933 bp, Staphylococcus epidermidis
atgattttaacattaactttaaatccctcagttgatatatcttatcctttagatcagtttaatttagatactgttaatagggtatctcaaacaagcaaaacagcaggcggtaaaggattaaatgttactagagtattgtctgaatttggtgaagacgtaatagcaagtggttttttaggtggagcattaggtcaatatattgaagaacaaatagaaactactcgtattaaacaagcatttttcaaaatcaaaggcgaaacacgaaattgtattgcaatactacatgaaggacaacaaactgaaatccttgaaaagggtcccacgattgaacttaaggaatcagaggaattcaagtcacatctattaaaacttttcaaagaaactgatgtggctgttatgtctggtagtctgcccaaaggacttaatactgattattatgcggatattgtgagattagcaaaagaacaaggaattttgaccattttagatagctctggtcaatcacttgaggaagttcttattagtaatgtgaaacctacagtaattaaacccaatatagatgaattatcacaacttttaaattacaaagtaaccaatgatattaaagaattgaaagcggcagtaagtcagccaatatttaatgatattgaatggattattgtttcattgggcagtgaaggtgcttttgcaaaacataatcaaaaattttataaggtgaatattcccaacattaaagtagttaatcctgttgggtcaggagattccactgtagcaggaattgcttctggactcattcatcaacaaaccgatgaagagttattaaaaaaagcaaatgcattcggaatgctaaatgcaatggaacaacaaacaggtcatattaatacagataaatttgacgaaatattcaaacaaatagaagttatagaggtgtaa

SEQ ID NO: 4665 - DNA, 978 bp, Staphylococcus epidermidis
atgacaaaatcacaacaaaaagtgtcatcaattgagaaattaagtaatcaagaaggtattatttcagctttagcatttgatcaacgtggtgcattaaaaagaatgatggcagaacatcaatctgaaacaccaacagttgaacaaatagaacaattaaaagtacttgtttctgaagaattaactcaatatgcgtcttcaattttattagatccagaatatggtttaccagcatcagatgctcgaaataatgactgcggactattacttgcatacgaaaaaactggatatgatgtgaatgcgaaaggtcgtttgccagattgcttggtagaatggtctgcgaaacgtttgaaagagcaaggggccaatgcagttaaatttttactttattatgatgtagatgacacagaagaaattaacatacaaaagaaagcatatattgaacgaattggttcagaatgtgttgccgaagatattcctttcttcttggaagttttaacatatgacgacaatattcctgacaataaaagtgcagaattcgctaaagttaagccacgtaaagttaatgaagcaatgaagttattctctgaagatcgttttaatgtggatgtacttaaagttgaagtacctgtgaatatgaattttgtggaaggattttcagaaggagaagttgtttatactaaagaagaagctgcacaacatttccgtgatcaagatgcagctactcacttaccatatatttatttaagtgcaggtgtatcagcagaattgttccaagatacattaaaatttgcgcatgattctggtgcgcaattcaatggtgttttatgtggacgtgccacatggtcaggagcagttaaggtatacattgaagaaggagagcaagctgccagagaatggttgcgtacggtaggatttaagaatattgatgatttgaatacagtattgaaaacaacagctacatcatggaaaaacaaataa

SEQ ID NO: 4666 - DNA, 315 bp, Staphylococcus epidermidis
atgaatagagatgaggtacaattactcggatttgaaattgttgcctatgctggggatgcacgttcaaaattattagaagctttaaatgctgctaaagatagtgaatttgataaagcagaacaacttgtagaggaagcgaatgaatgtattgctaatgcacataaagcacaaaccaatcttctagctcaagaggctaaaggcgaggatatcgcatatagtatcactatgattcatggtcaagaccatttaatgacaacattacttttaaaagatttaatgaagcatttaattgaattatacaaaaaagggagctga

SEQ ID NO: 4667 - DNA, 1728 bp, Staphylococcus epidermidis
atgaataaattaatagcatggatagaaaaaggaaagccattctttgaaaaaatatcacgaaatatttatttaagagcgattcgtgatggatttattgctgctattccaattatcttattctcaagtatatttattttaattacctatgtaccaaatgtgtttggttttacttggagtaaaactatggaaggtatattgatgaaaccctataactatacaatgggaatagttggtttgcttgtagcaggaaccacagctaaatctttaactgattcttacaatcgaaaactagataaaacgaatcagattaactttatttcgacaatgatggcagctatttgtggatttttattcttagctgctgatcctgttaaagatggtggattttcaagtgcatttatgggaacaaaaggtttattgacagcctttatttctgcgtttattaccgtgattgtttataatttctttgtcaaaagaaatattaccattaaaatgcctaaagaagtaccaccaaatatatctcaagtatttaaagatattttccctttatcagccgtaattttaattttgtatgctttagacttactttctagagcaatagtccacacgaatgtagcaaatgcagtattaaaagtatttgagccactatttactgcggcagatggttggattggggtaacactcatattcggtgcgtttgcgttcttctggtttgtaggtattcatggaccttctattgttgaaccagcgattgcagcaattacttatgcgaaccttgaaacaaatttacacttaatacaagctggagaacatgctgataaagtaattacaccgggtacacagatgttcgtagcaactatgggaggaaccggtgcaacattagttgttccatttatgtttatgtggttaacaaaatcaaaaagaaataaagcgataggtagagcatcagtcgtacctacattctttggtgtcaatgaacccatactttttggtgcaccactagtactaaatccggtattctttataccttttatttttgcacctatagtaaatatatggatttttaaatataatagttttagtatctttttaccttggactactcctggtccactcggtattgttatggggactggatttgcattttggtcatttgtgttagcaatattacttattgttgttgatgtgattatttactatccattcttaaaagtatacgatgaacaagtgcttgaagaagaattaggaaataaagaagcaaataatgaattaaaagaaaaagtatcagcaaactttgatacgaaaaaagccgatgctattttagcaactgcaggggcaagtgaagcggatactgatgatacatcttcagttgatgaaacaacttctacatcctctacagatactattagtgaacaaacaaatgttttagttttatgtgcaggtggaggtacaagtggtttactagctaatgctttaaataaagctgctgaagagtatgaagtaccagtaaaagcagcagcaggtggttatggtgcacatatggatattatgaaagattatcaattaattatcttagcaccacaagttgcttcgaattttgaagatattaaacaagatactgatcgcttaggaattaaattagccaaaactgaaggcgctcaatatatcaagttaacaagagacggtgaggcggctttagaatttgtaaaacaacaatttaacaattaa

SEQ ID NO: 4668 - DNA, 1413 bp, Staphylococcus epidermidis
atgactaagaaattacctgatgactttatttttggtggagcaaccgctgcttatcaagcagaaggagctactcagactgatggtaaagggcgtgtcgcttgggacacgtatttagaggagaattattggtacacagctgaaccagcaagtgatttttataacagatatcctgttgacttggaattaagtgaacgctttggtgtaaatggtatacgtatctcaattgcttggtctcgtatttttcctaaaggttacggtgaagtgaatcaaaaaggtgtcgagtattatcataatcttttcaaagaatgtcataaacgtcatgttgaaccttttgtaacattacatcactttgacacaccagaggtacttcacaaagatggagacttcttaaatcgtaaaacaatagactattttgtagattatgctgaattttgttttaaagaatttccagaagttaagtattggacaacattcaatgaaattgggccgattggtgatggtcaatatttagttggtaaattccctccaggtatcaaatatgactttgaaaaagtattccaatctcatcataatatgatggttgcacacgcacgtgctgttaaactttttaaagatgaaaattataagggagaaataggtgttgtccatgcattacctacaaaatatccatatgatccatctaatcctgaagatgtgagagcagccgaacttgaagacattattcataataaatttattttagatgcaacataccttggtaagtactcacgtgaaacgatggaaggagtacaacacatcttatctgtgaatggtggtcaattagagatttctgatgaagactacaaaattttagatgaagctaaggatttaaacgatttcttaggtattaattattatatgagtgactggatgcgtggttttgaaggcgaatctgaaataacacataatgccactggtgataaaggtggatctaagtatcaacttaaaggtgtaggacaacgtgaatttgatgttgatgttcctagaaccgattgggattggatgatttatccacaaggtttatatgaccaaattatgcgtgtagtaaaagattatccgaattatcataagatttatattactgaaaatggattaggatataaagatgtattcgacgaaaaagaaaaaacagtacatgacgatgcacgaattgactatattaaacagcatctaagtgtgatagcagatgcgattgcagatggtgccaatgttaagggatacttcttatggtctcttatggatgtattttcatggtcaaatggttatgaaaaaagatacggtttattctacgttgattttgaaacacaagaaagattccctaagaaaagtgcatattggtacaaagaacttgcagaaagtaaagaaattaaataa

SEQ ID NO: 4669 - DNA, 870 bp, Staphylococcus epidermidis
atgatgaagtcaaaattcacaattctattatttacaatcttttctacaacagtattagttttggttattatttataacaaaactcaatcccaatcatacatttcgactcactattctaataataaaataaaaacaacagcaacactttttttacatggttatggtggtagcgaacgctcagaaacgtttatggtcaaacaagcgttaaataaaaatgtaaccaatgaggtgataaccgctagagtgagtagtgaaggaaaagtatattttgataaaaaattaagtgaagatgcagcaaaccctattgtcaaagtagaatttaaagataataaaaatggaaattttaaagaaaatgcttattggattaaagaagttctatcacaactaaaaagtcaatttggaattcaacaatttaattttgtaggacattcaatggggaacatgtcatttgctttttacatgaaaaattatggggacgatcgacatttgccacaacttaaaaaggaagttaatatagcgggagtttataacgggattttgaatatgaatgagaacgtgaatgaaattatcgttgataaacaggggaaaccaagtagaatgaatgccgcatatcggcaattgttatcactgcataagatttattgtggtaaggaaatagaagttttaaatatctacggagatttagaagatggctcacattcagatggacgtgtgtcaaatagctcttctcaatcgcttcaatatttactaagaggtagcactaagtcttatcaagaaatgaaatttaaaggtgcaaaggcacaacatagtcaattacatgagaataaagatgttgcaaatgaaattatacaattcttatgggaaacttaa

SEQ ID NO: 4670 - DNA, 1026 bp, Staphylococcus epidermidis
atgagattaagtttacttgattatgtcccgttgttcgaagggcgtaccccaaatgacgccctaaagcatagtattaaattagcccaacacgctgagaaacttgggtacttacgatactgggttgcagaacatcatcaagtttattctgtcgtttctagtgcacctgaaataataatgatgtcgattttagaacacacacaacacatcagagttggtagtggaggtgtgatgttaccacattatagtccttataaagtagctgagcaatttaaaattatggaagcaagacacccccaacgtatcgatatggctatcggacgttcgccaagctttaaaaatgttaatgcagcactaaatgaaaacaaaaatgaaaaattaccattcaatactcagattactgatttgcttaaatacttcaataacgatacaactcaagaccatcgttttaaatcattattagctacacctatggttacttcatttcctcaactatatattttaggtatgagtaatagaagcgcaaaattagctgctcagcgcggactaccttttgttattgcacgaatgggacaatctgagacagaccttcatgaagctataagcacttatagaaaatattttaaagcttatcatggtgaaattaataatgcgaaaccatatgttattttagcaacttttgtggtaacagcttctaatttatctagagttaaacaattgctacatacgcttcaactttggttgatgcgtattaactatttaaatcaacctaagagttatccatcgattgaaacagcacagaacaagcattatagtcaacgagaattagaaaagcttgaaaagatgaaatcgaaaatcatatacggaatgccaaatgatgttgcggaacaacttaccttacttcatcaacaatttaaagtggatgaaatcatcatcttacctcatgtatttggtgaagacgctagaatggaattaattgagttaattgcgaatgaattgattccatcttgttcacgcgatgaattttag

SEQ ID NO: 4671 - DNA, 1005 bp, Staphylococcus epidermidis
atgaataatgaacaaatagtatttaataaagtaccagacggaatgccacaagacgatacatttaaatatgaagatatagatgttattgaaccttcagaaaatgaattgcaattgaaaacattatatatatcggttgatccatatatgagaggacgtatgacaaatgctgattcttatgtagatccgttcaaacaaggggaaccgttcaatggacatacggtatctaaagttttgaaatccaaggatagtaattttgatgaaggtgatatagtagtgggtatgctaccttggagaaaaataaatacagtaaatagtgagtatgttaacaaagtacctacttctgacgtaccattacatctttatcttagtgtgttggggatgcctggtcagactgcttatcatggattacttgatattggacaacctaaagaaggtgaaacagtagttatttcagcagcttcaggtgcagttggttcagttgtgggccaaattgcgaagcttaaaggttgcagagtcgttggtatagctggtggagataaaaaagtgaactatctaaaaaatgaacttcgttttgatgctggtatcgattacaaaaaagataatttccctgaagcgttaaaagaagcggtgcctaacggtatagatgtctacttcgaaaatgtaggtggatatattggcgatgaagtcttcaaacatctcaatacacatgcaagaattcctgtttgtggtgcgatttcatcctataatcatccagaaaaagatattggaccacgcattcagcaaacattgattaaaaatcaagcaatgatgagaggtttcatagtagcagaattcgctgatggttttaaagaagcgagcaaacaattagctcaatgggttcaagagaataaaattaaaacacaagtttcagtagaagatggttttgataaagtgccgcaagcctttagaaatctgctaactggtgataattttggtaaacaagttattaaagtggcaagtgaataa

SEQ ID NO: 4672 - DNA, 1011 bp, Staphylococcus epidermidis
atgaaagcgataggatttaagtcttcattccaattagatgaaggaaattgttttgaggaatttaactttgatatacctcatccatccggccatgaattattagtcaaggttcaaagtattagtgtgaatcctgttgatacaaaacagcgtacaatgccagttgacaaagcgccacgtgtacttggctttgatgctgttggtgtgattgaaaagataggagatcaagtgtcaatgtttcaagaaggggacgtcgttttttattcaggttctcctaaccaaaatggttcgaatgaagaataccaattaatagaggaatatttagtagctaaagcacctacaaatttgaaaagtgaacaagcagctagcctacctttaactgggctaacagcttatgaaacgcttttcgatgtttttggaatttcaaaagaaccatctgaaaataaaggtaaatcattgttaataattaatggagcaggtggtgtaggtagtattgcaacacagatagcgaaattttatgggttgaaggttattacaactgcttcgagagaggatactataaagtggtctgttaatatgggtgctgatgttgtactgaatcataagaaagatttaagtcaacaatttaaagataatcatattgagggtgttgactatatcttttgtacattcgatacagatatgtattatgaaatgatggttaacttagttaaacctagaggacatattgcgacaattgtcgcatttaattcgcaacaagatttaaatttattgaaatctaaaagtgtaacatttacgcatgaatttatgttttcaagaccattacaccatacagatgatgtaatcaaacatcatgaatatcttaaggatataacagaaaaggttgaacagggatattatcaaccaactaccacgaaagttatcgacggattagatgtagatagcctttatgaagcacatcaaattttagagtctcattctatgattggtaagcttgttatcaatcttaagtaa

SEQ ID NO: 4673 - DNA, 537 bp, Staphylococcus epidermidis
gtgaaaagacttaagaattttattctcggcttactcattgtggctatagttggcttcctattatttatgtatatagatgatagtcgcattcaaagttatcaagactacttcttacaatttaattggttccaaccactattgattgggcttgcaggattacttatattaatcggacttatattagtacttagtatttttaaacctacgcatcgcaaacctggactttataaaaactttgatgatggacatatttacgtatcacgtaaagctgttgaaaaaacaatttacgatacaatcgctaaatatgatcaagttagacaaccaaatgttgtaagtaagctttataacaaaaagaataaatcatttattgacatcaaagcagatttcttcgtaccaaaccatgttcaagttaagagtttaacagagagtatccgtgctgatatcaaaagtaatgttgaacactttactgaaattcctgttagaaaattagaagttaacgtacgtgatcagaaaacatctggtccacgtgtattgtaa

SEQ ID NO: 4674 - DNA, 240 bp, Staphylococcus epidermidis
atggctgataataacaatcaaaacggacaagacgctactcaacaatttataaatattttaaaatcgtttaaatggcgtattattggatttttagcatttttaattatagctatattattcctaactctcggattttggaagacaattttaattatagtgttatgtttaataggaatcggtatcgggtatattaaagaccgtacacaagatttcttaaacttcctaaatagatggagttag

SEQ ID NO: 4675 - DNA, 501 bp, Staphylococcus epidermidis
atggcagtagataacaataaagctaaacaagcatatgataatcaaacaggtgttaatgaacaagaaagaaaagagcaacaacaagctcaaaataatcaacctcaatttgaaaacaaattaactttctcagatgaagtagttgaaaaaattgcaggtattgcagcacgtgaagttaaaggaattttagacatgaaaggtggcttcacagatagctttactaacgctttctcaaacggtaacaatgtaactacaggcgtatctgtagaagttggagaaaaacaagctgctgtagatttaaaagttattttagaatatggtgaatctgcacctaaaattttccgtaaagtgacagacttagttaaagaacaagtaaaatatattactggtttagaagttgttgaagttaacatgcaagttgacgacgtaatgacaaaaaaagaatggcaacaaaaaaatgaaaaagataacaaagaaaacaatgaaagagaaggtttaaaataa

SEQ ID NO: 4676 - DNA, 1962 bp, Staphylococcus epidermidis
atgaatttcaatcaatttataaataaacaaaatataataatgactgaagatgaacataatgtatatgactttcttaaacatcataatcctaattggtcttctaattatattgatcatttattagatggacgtgataaagtaagtcaacgtttaattacatctttacatagggagaatttagtaaaaagtcgcgatcatagtcgtatacttaatcgacatcagtttgctggatacggagttaatgtgattgccattttagaaatctattttccaacatctaatatttatttgtatgcaccaataactggaatgcatgcattcgatcgcattgatgttgaaggacctttttattttaagaatctaagtaaagaagatgattttgaacgtgtactacatcctaatcaaatattagattggatattaattgaagatgaaaacttaaataacgaggctagcgtacaatttagaaatgatttaaataatagtgcagctaatatgacttttgctttaagtttccagcactatacgatgcgtaatgaaagagcgccattatataaccttattaaaaatgcaaatgatagttacttgcgttccgaacaatctgtcatcgaaggtcatccccttcatcctggtgctaagttaagaaaaggaatgaatgctgaggaaaactttatgtattcatcagaatttggtaatgttattcatctaagagccgtttttattcataaaagtataagtcgtattcaatcatcgaatgtagattacaatgttgccgtaaagcaaatgtttcccgacttaattaaaaccttagaaaaagaatttggcaaagattttaatttacaaaattatcatttaatgatggttcacccttggcaaataaaacatattttacaaagtgattatcgggatgaactaaatgaaaagttaatattgataagtaatcattcggtaccatattatgccggtctatcatttagaacgttagtacctaaacaacctgatttatccccgcacatcaagttatcgacgaatgtacatataaccggtgagattcgaacattgtctgaacaaacgacatataatggaccactagtgacgcaaattttaagagagattatgtcaaaagatgaagatttttcacattatcaatctacttatatcgatgaaaatgcagggattcacttttataatcgaaacgacaatgaggcaattcaaacagatagaagtgaacaattagggactttgtttagaaataatttatatcaatttatatctaatgaaacagtgccagtaattccatcaagtttggttgcgacctatccttataatactgaagcaccaatctgtacgttaatcaaaacgtatcaaaatacgtatcaatataaaaattatgaagaagcagcgaaacaatggattaaagactatagcaaagctcttcttggcttagttatccctctttattcaaaatatggaatttcgctagaggcacatttacaaaattcagtggcaacttttaataaagatggctcactaaatatgatttatatcagggactttgaaggattacgtattgataatgaacaattgaataatgctggatttaccactagacatttccatgaaaaatctagaatccttacaaattctaaaacatcagtatttaataaaatgttctattcaacagttcaaaatcatttaggtgaactcgttattacaatagctaaatattctaatagtaaagtccttgaacaagaaatatggcaaattatttcacaaacagtagaagacatttttaatcacatgactcacatttcaaaacaacatctcaacaacatcaagcgcactattttcgcatccgaaatcgattataagtgtgtcacaacaatgcgtttagaggatcaagcacatgaatatacgtatattaaagtgcataatccacttcatagaaagaatgatttataa

SEQ ID NO: 4677 - DNA, 1182 bp, Staphylococcus epidermidis
atggcaaaatatttcttttccagttcttttctgttatttttaggaaattggattggtcaagtgggtttaaattggttcgtactcacaacatatcataatgctgtatatttgggtttagttaatttctgtcgtcttatacctattttactattaagtgtttgggcaggatccatagctgataaatatgacaaagggcttctgttacggatcactattacttcatcattcataattacagcattattgtgtttacttacttatagtcttaacagtataccgattttcatcattcttttatatgcaacatttaggggcatactaagtgctgtagaaactccagtgagacaagcagttttacctgatttatctagtaaaatttctacaactcaagcagtttcttttcattcgttcattattaatatatgccgatcaataggaccagcaatagcaggtggattaatagctgtataccatacacccactacatttttagctcaagcagtgtgctattttatcgcagcagttttatgtatacctattcattttgaagtcatattaagtcaaaaagaaggaaaagcactaccacttaaagttgtactaaattattttaaaagtaatttagaaggtagtcagatattcattacgtctataattattatggcaacaggcttttcttacactacagttttaccagtattaacaaaccatatttttcctggtcaatcgcaagtgtttggtatagctatgactttttgtgcgattggaggaatagttgcaacaatagtcttaccatcaattttaaaacacttgagtacagtaaaaatgtattatctcagttcaatattatttggtatagctttactaggtattatcatacatcatttagtagttatgtttatctgtattacgttaataggcttgtttagtcaatgggctagaacaactaatagagtttattttcaacatagtgtaaaggactgtgatagagggaaagtattaagtattataatgatggatcgaggtatgattccgttaggtagtttaataatgagctttttcgcggatatgttcggtattttaactacatttactattatgggaattagcactatcagtatttcactcattttttatatcatacaacgtatttcgaatatggaggagagcaataatgaatcataa

SEQ ID NO: 4678 - DNA, 1758 bp, Staphylococcus epidermidis
atgaatcataaggaatggcttttagctgacaaaaacatccaatatcgaacgattaacgcaatgattaaggaacatattgtttctgaaggtatgcgtattaaagaaggtacgtgtaaagttgaaatttttctcaataatcaccttttatcgttaaaagtagcgcgaaaaagtgccttaaaaagatacgtttttactggtgacatagtattaaaaaataaaaaattgtctcaatcaattgaaagtttagaagaacttcttcaaatactaacggaaatatttcatatcaacatttcaaaacgattatacgatgaattaatacatagtagggatagtttgtatgaaacgtacaaacatttttataatagacaaacactcattcatcagagtatgaaatttagtaaattacccgattctataaattttattgcttggctgcaacatttacaagatagtggtattacagatgatttaagttactcggaaagtcttgtgatagaagggcatccaacacatcctttaacaaaaactaaattgcctctcagtactaatgaattgaaactttatgcaccagaatttgaaaaagttattccattaaatattatgcttattgaaaaaaatcatgtagtaacaacagcaataaatgatgatcaaaattttattctaaatcaagttattcctgaatatcgagatcgtttaaaatgctacctcgagccacttcgattaaatcttaacgattacagagtgatgttgatacatccttggcagtatgatcatactatcggcgaacaatttgaagaatggatagccaagaaaatcttactacctacaccatttactgttgagtccaaagctactttatcatttagaacaatggatttaattcatacaccatatcatgtgaaattgccagtaaatgttcaagctacaagtgctgttagaacagtttcatcagttacgactgtagatggtcctaagttaagccatgcattacaaggattgcttcaggaatttccagaacttcaagtcgcgatggaaccttatggagcttatgctcacacggcatctgatttatcaaaacaattagcgcttatcatacgtcaaaaacctacgatatatgattatggttgtacagttgtaacagctagtttagttaatcctaatccaattgataatcaggcagttgtagatagttatttaaaatggatagaaaatgaaatcacacttgatcatattaagcattttatagcaatttatacacaaaccttagttacaccgcttattgcgtatattcaaaattatggcatagcacttgaagcacatatgcaaaatacgattgttaatcttggacctaattataaaatgaaattcattgtacgtgatttaggtggttctcgtatagatttaaatacacttaaacagaaagttcctcaaatagatgttacaaatgaaagtcttattgcagatactattgaagaggttattgctaaatttcaacatgcagttattcaaaatcaactagcagaattgattcatcattttaatcagtatgatgaagtaatagaagaagaattatttgaaattgtgcgtgaagaaatcgaaatggcaatcgataatgacaagccacatgctgaaaaattgaaaaaaatattgtttgggtcaactatcacagtcaaagctttattaagtatgagaatggaaaataaagtgaaaaaatatttaaataccaagttagataatccaataaaaaaagaggtgtag

SEQ ID NO: 4679 - DNA, 1062 bp, Staphylococcus epidermidis
atggcgaatgttcgtgtcaatttatctaaaattaaatataatgccaaagtacttcaatcgttattagaacgtagacatatccatttcacaccagtaattaaatgtgtcgcaggggataaacgtattgtatcaagtattaagtctttaggaattactcattttgctgaatcaagactagataacattgaacaactcaaagatttagatattacatttacattgttacgacctactgttgaagcagatttggaaaagatgatttcaagagtagaaatgagtatccaaactgaattaaccacaatcaaaaaacttaatacgttagcaaaatcacttgatattaaacatcaaatcatgctaatggttgactggaaagatggtagagaaggggtcttgacctatgatgtggtgcgttatgttcaagaagtacttagattatctcacatacaacttgttggcttggcatttaattttatgtgctttaaatcagaagcacccaatgaaaaagatgttcgtatgataaacaaattcatacataatgtagaaaacgaaactcattttaagtttagaattatttcaggtggaaattcgagtatgttacctcaaacactgtacaatcatttagataaaatcaatgatcttcgtataggggaggcattattaaggggtatagatacgacgacaaatcattcaattaatagcttatatcaaaatgcgatagtattagaagcagaaattatagagataaaaccacgtctatatcaaaaaaataatcaatcttatttacaagctatagtagatatcggttatttagatacgtttattgaggggataaaacctcttgggaatgatataagaatattaggtgcatcaagtgatcatttgatgattgatttaaataaccaagatcattatcaaatcggtgataaacttcaatttagcttgaattatgaagcactgtctcagagcatgtatatgaaaaatttaactaagttatatagtagtgattcaaaaatagaatcccttgttcagaacttcgatatgcctatatattcccagtgctaa

SEQ ID NO: 4680 - DNA, 996 bp, Staphylococcus epidermidis
gtgagaggtttaaaaattttaagtgtaattggcttattgtttgttttaattgcaactgcagcatgtggaaataatagttcaagtaactcaagtaaagagtcatcaaaagatggagttgaaatcaagcacgaagaaggtactacgaaagtacctaaacaccctaaacgtgttgttgttcttgagtattcatttgttgatgcgttagttgctttagatgttaaacctgttgggatagcggatgataacaaaaaaaatcgtattattaaaccattaagagataaaattggaaaatacacttctgtaggaacacgtaagcaacctaacttagaagaaatcagtaaacttaaaccagatttaattattgctgataataatagacacaaaggtatttataaagacttaaataaaattgctcctacgattgaactgaaaagtttcgatggagattataatgaaaatattgatgcttttaaaacaatttcaaaagctttaggtaaagaagaagaaggtaaaaaacgcttagaagaacacgataagaaaattgaagaatataaaaaagaaataactatggataaaaatcaaaaggtattgcctgcagtagctgctaaatcaggtttgcttgctcatccaagcaactcttatgttggtcaattcctaagtcaactaggttttaaagaagcattaagtgatgatgttactaaaggtttaagtaagtatcttaaaggaccttacttacaaatgaacactgaaactttatctcaagtgaatcctgagcgtatgttcataatgacaaacaaagcaagttctaacgaaccttcactaaaagaactagaaaaagatcctgtatggaagaaattaaacgctgtgaaaaatcaacgtgttgatattttagaccgtgacttatgggcaagatcacgtggtttaatttcttcagaagaaatggcaaaagaacttgttgaattatctaagaaagatagtaaaaaagataataagtaa

SEQ ID NO: 4681 - DNA, 1032 bp, Staphylococcus epidermidis
atgactatggtgaataaagatagtcaatccgctattgaacaaaaaaagaaaaagcgcactacactcacttttattgtgggtgtgtgccttctttttatttcagtatatttgaatttagcgattggttcttcaaaaatacaatttaatgatattttaagttatgtaactggacacacgaatacaaaggcaactttcttaatacacaatgtacgtatgccaagaatgttagctggtttaattattggtggcgctttagcaattgcaggtttattgatgcaagcaattaccaaaaatcctttggcttcaccacagatttttggtgtgaatgcaggtgcttccttcgttattgtacttataactgtacttataccatcactaggctcttactctacaattttagcgataattggtgccttcttaggaggttttactgtttatacattgtctggctctactaagtcgattacaccgattaaattagcacttgcaggtatggctattcatctgttctttagtagtatgactcaaggtataattattttaaatgaagattctaatgatacagtgatgttctggttagttggttcattagccggtataaaatggcaacagattatattcatcttaccatttttactccttgctatttttgtgaccatatttatgggaagacaattaactatattagagttaggtgatgatattgccagaggattaggacaaagaacagaaatcgtcagaatgattgttggaatattggtcgttgttcttgctggtgtttctgtttctattgctgggcctataggatttgtaggtttgatagttccacacatagtgaaaagatatataaataaaaattatgtattgatgatacctttaacatttatattcggcgctactttattacttatttctgatgtattgtgtcgcttaattacttatccattcgaatcgccagtaggtattgttacatcatttgttggtgctttttacttcttattcataactgttagaggggtgaatcgcatatga

SEQ ID NO: 4682 - DNA, 876 bp, Staphylococcus epidermidis
atgattaatcctattcatgcagttacaggcttctttttacacaatgactttattttaaatgaatatcgaattcctagaacacttttaggattacttataggcagtagtttagctatttctggctcggtgatacaaggggttataagaaatccacttgcttcacctgatgttattggaataacaaaaggggcaagtttagcagcagtaatgatcataatgatatttccatcagcacctctatttgttcttcctttaggttcatttatcggtgctttgacaataagtattattctttcagttcttatttcaaaatttgatgtaaagggatcaaaattagcattgataggtttagcgataggtgcaatttgtacggccattgtccaattcttgcttatacgtaatcctcttgatgcaaataatgcgttattatggttgactggtagtttatacggtcataatatagtcaatttttatagtttattaccatggtttattatcactgtacctatagtattgttattagggtatcaacttgatattttaaatttaggtgatcatgtagccattgcactaggagcacgtgtaaaaatcttaaaaatgattttacttgtattagcagtaatgttagcaggtgcttccattgcggtagtagggggtattagttttttaggtcttatagcacctcatattgcacgtcaacttgtcggccataaaaatatacatgttataatcatgtcaggtttggtaggagcaatattattaacttttggtgatggtttagcaagaggtatacaacctcctcttgatattcctgtaggtgttgtaatagcaattataggcgcaccttatttcttatttttattacgtaagatgtag

SEQ ID NO: 4683 - DNA, 1374 bp, Staphylococcus epidermidis
atgaatggatttaaaaaagttgacatagtaagaggtagaattaaatttatcactatgtcattgttagggattatattatttttagttcctataccagtcgttcaagatggaaagcagcaaacgacacttcctatagcttttttagctggtttattaaaagattggcttggtggtatcatgccaattttaattgtaaccatcataactgtatcaggtattttaacaatattatgctctacaatttataaaaataaattaaatcctcaaggtttaatgagcagtgctttcaacgttaaaataggatggcttgttttgagagtattagctgtcttcttttcttggttaacatttttaaatattggacctgaaatgattaaatctgaagatacaggtggattagtattttcaagtttattacctactcttgtagcagtatttttatttgctgcaatctttttacctttattaatggagtatggtctattagaattacttggacccatctttagacctatcatgcgacctttgtttactttacctggtagatcgacagttgataatctagcttcatttataggtgatggtacagttggtgttttaattactagtagacaatatggtgaaggatattactctagaagagaagcaacagtaatatccacaacctttagtgttgtatctattacgttcgctattgtcattgccgaaacaattagaatgcaagatcaatttttctatttttatttaacagttgtcatttcatgcttaattgcagcaatgattatgccaagaatttggccacttaaaaatattcctgacgaatatgctaaagaagtaagtgaagaggctcgtaatgaacagctaccagaaggcaaaacagcattaaaatatggttttgatttagcaactgaagttggaattaaatcgccagggtttaaagaatttttaatttcaggttttaaaacagttgtagatatgtggtttgtaattttaccagttgttatgagtataggaacaatagctaccattattgctaactacacgcctgtttttgaaattataggaaaaccatttgttccagtactagaattgttacaaattccagaagcacatgaagcatcacaaacaattttaattgggtttgccgatatgttcttaccttcaattcttattgaaggggttcaaaatgatgtaacacgttttgtaattggagcattgagtatctcacaacttgtgtatttatctgaagtaggcggcgtgattcttggttctaaaattccagttagtataagtaaattatttatgatttttttaattcgtactatcattacgcttccaataattgctttattagcgcatttatttatcggataa

SEQ ID NO: 4684 - DNA, 315 bp, Staphylococcus epidermidis
atgttcgttgttacaaatagaatcactgtaaaaaaaggatatgcaaaacaaatggcgcctaattttactaaaggaggacctattgaatctttaaagggctttgaaggtattgaagtttggcaaattgataaagatgattatagcgaagatatgtatgtaaatagttggtgggaaactgaagaagattttaaaaattgggtgaatagtgatgtatttaaacaagcacataaaaatactggaaaatccgaagattcaccagtcattaaaagcgaaattgttaaatcaaatgttttatcttctttgaacagaagataa

SEQ ID NO: 4685 - DNA, 261 bp, Staphylococcus epidermidis
atggcaatgacagttaagaaaaacgataatgaagttcgtattcaatggagagtagcagatatcaaaattccaaataatgaaattaaaaatgttactcaagatcaagatattcatgccgtaccagaagagaatggtaaagaaatctctcgtattggttctactttcggaaaaacaaatcgcgtattaattgataccgatcaacacttatatattatttacactcaaaatgatcaaaaagtatataatgagttaacaaaataa

SEQ ID NO: 4686 - DNA, 510 bp, Staphylococcus epidermidis
atgacaggtaaaacacacgcatcatgtggctttttagtcggtgcaataaccacacaatattttcatacagatatatttacttctatatcagtgattgtactttcagtcatttcaagtatattgccagatatatgtcatacacaaagtaaaataggaagacgatttaggcttactagtttttttgtcagaattttatttggtcatagaacatttacgcattcacttttatttattataggaattagttttttactgtacttcatacaaactccgatgtattatatggttgcaattgttattggtatgttttcgcatgttatacttgatatattaaccccaagaggtgttaaactattatatcctttaccatttaatatcgtatcacccattcattttaaaactgggggactagtagatgtatctctagctactgcattaagtgttggtgcgatatatactttatttcaaccatatttaaatactatgatgcactattggttaatcaaataa

SEQ ID NO: 4687 - DNA, 1188 bp, Staphylococcus epidermidis
atgttagacaaaaatcaattggaaaagtataaccaagagcatttgtatgaatatgaaaaattaatgagtagtaatgaaaagaatgctttagatgaaaaagtagatcagttaaatcttgcagaaattcaagatttatatcaagatttatatgttaatagaaaaactattgatgatgtatcttctgtatctgaagtcaaatatgaagtgaaatcacgactcaatgaagaagaacgacatacatatgaacaaaaaggttatgaggcaatacgaaatggtgaatttgctgtattattgatggctggaggacaaggtacgcgtttaggatataaagggcctaaaggttcttttgaaatagagggtacgagtttatttgaacttcaggcgcgtcaactgattcgtttaaaagaagaaaccggccacacaattaattggtatattatgacaagtgacattaatcataaagatacaatagagtattttaaacaacataaatattttaactatgatgccaatcatattcatttctttaagcaagataacattgttgctttaagtgaagaaggaaagcttgttttaaatagagatggacatataatggaaacacctaatggtaatgggggtgtattcaagtctcttaagaaagcaggataccttgataagatgcaacaagatcacgtcaaatatatcttcttaaataacattgataatgtcttagttaaagttttagacccgttatttgccggttttacagtgacacaaagtaaagacatcacatcaaaaacaattcaacctaaagatagtgaaagtgtaggtcggcttgtaaatgttgattgtaaagacactgtgttagagtattctgaattagatacagacatagcaaatcaatttaacaatgctaatataggtatccatgcttttaaactaggtttcattaccagtgctgttgatagagaattaccgtatcatttggcaatcaagcaattaaagcaattagatgaaaattttggtgtggttgaacgtcctacattaaagtttgaattattttattttgatatatttaggtacggtacaagctttgtaacattacaagttccaagagaagaagaattttcacctttaaaaaataaagaaggtaaggatagtgtacatacagctacagaagatttaaaacgaatggatttgatttaa

SEQ ID NO: 4688 - DNA, 684 bp, Staphylococcus epidermidis
atgtctcaatcatctaagcgaaaaaacgattctgtggtagaaacttttaaggacatcattcctttaacatttggagaagagattggtaatgcagcatcacatggtgctgctgcattacttacattatttattcttccatatgcagcagtgcatagttttaacaatggtggcacattagagtcaattagtgtgtcagtttatgtgattagtatttttatgatgttcatatcatcaaccatttatcattcaatgcaaaataatacgtctcataaatatatattaaggattattgaccatagtatgatttatgtggctatttcaggaacatacacacctgttttgttaagtgttgtcggcggttggttaggttggctcgtgacaatattattatggggaacgacattatgggggattttgtataaatcaatagcaactaaagtcaatcatagattaagtctcattgtttatttggtgatgggatgggtaggtatcatatttttacctattattattatgcgaacatcatggtggtttattttctttatatttcttggtgggttatcttatactatcggagcatggttttatgcccaaaaaaataaaccttattttcatatgatttggcatatatttattgttcttgcttctttcttacatatgataggcattttttattttatgtga

SEQ ID NO: 4689 - DNA, 1338 bp, Staphylococcus epidermidis
atgaatcttaagtctatcattactgtaatggcactcatactaataatgtttatggcagctatagaaacatctattatttcattagcattaccaacaataaaaaatagtttgaatgccggtaatctagtttcattagtatttaccgtatattttattgctttagtcatagctaaccctatcgttggtgaacttatgtctagatttaaaattatttacattgctgttgtaggggtattattgtttgccttaggtagtttaatgtcgggattaagtcagacgtttacttttttaattatctctcgaacagtacaaggttttggagcaggagttatgatgtcactctcacaaatagttcctaagttggcttttgaaattcctttgagatataaaattatgggtatagttggaagtgtttggggaatttcgagtattattggcccattattaggtggtgcgattttagagtttgcttcatggcattggctattctatatcaatattcctattgctatagtggcaataatacttgtacttatgacttttcattttcctgatgagacacaagtacaacagagtcgttttgatataaaaggattgattatcttttatatctttatagctttattaatgtttggtttactcaaccaacatcatattatttttaacatattctcaattattttagctttagctgttttatggctactatttaaaatagaaaatagtatcgaacaaccatttcttccaacaaaagaatttaacatatcaatagttctagtttttataacggatttacttattgcgataacactgatgggatataatttatatataccagtatatttacaagaaaaacttagtttatcacctttacaaagtggatttgtaatattcccgttgtctgttgcttggattacgcttaatttcaatttagctaaaatagaagcgcattttactagaaaaacattatatatttgctcattttttgttttattagttagtagtctgatgataatgtttggcttaaaactcccattgcttattgcttttgcggttgtttttgcaggtttaagttttggttatatttatacaaaagatagtgttattgtccaagaggaaacttctacaaaaaatatgaaaaagatgatgtcattttatgcattgacaaaaaatttaggttcgtcagtcggatctacgattatgggctatatgtatgcactaaatgttggtttatttggttctaatttacacaatgtattaggattagtcttaataattgcagtatgtttaattgtaatgtggatgacattatataaaagcaatactattcaatcttag

SEQ ID NO: 4690 - DNA, 468 bp, Staphylococcus epidermidis
atgaaatttttaaaaaataaatcatatcatttattagtaacacttattgttctcactatatttgttatttccggagcaatttttttaacatttttaggctttggtttgtacggtttgagtcgcatccttatttatttacacttaggcgattttagttacaataaaggcttttatgataatttaatatactacggtagttatatcgttttaggctattttactttattttcaattgagcatttaatggattattttaaaaagaatcttccaaaaaatccatactttcaaggtattaactttcatctcatctcctatattgttactacaattatgttttattttatagttcacatacactatgtacatgttaatatacatttttgggtaattatgattattataggatttttatttgtatgtaaagaagttttttatcctgaaagtaaaaatttgaataataaaaagtaa

SEQ ID NO: 4691 - DNA, 1440 bp, Staphylococcus epidermidis
atggccagttatgaattgtctaagactaagcgaaatttaattgtatctgtaatgttaattagcgctttcgtggccattttaaatcaaacattacttaatacagccttgccacacattatgcgtgagttaaatattaatgagaatacatcgcagtggctgattacaggtttcatgttagtgaatggtgtcatgattccactcaccgcttatttaatggataaagtaaaaacaagaccgctatatttaggtgcaatgggatcatttctgatagggtctatcgttgctgctattgcacctaattttggcgtgctcatgattgcacgggtaattcaagctgtcggtgcaggtatactcatgccattaatgcaatttacattgtttacattgttctccaaagaacaccgtggatttgcaatgggacttgcaggattagttatacaatttgcacctgcaattggacctacatttactggtttaatcattgacaatgcaagttggagagtgccatttattgttattgtcggtatagcattagttacatttatatttggttttgtatcgatttcaagttataacacgacgaaagaaacaaaactggataaaagatccgttatatactctacattaggttttggcttaatgctttatgctttcagtagtgctggtaacctaggtttttctaacccaattgttctttgttcagttttaataagtttaatcatcattggcatttttgttaaacgacaaattacaatttctaatccattattaaatttgaaaatatttaataacaaaatattttgtttttctacaattacttctatgatcattatgttatctatggtaggacctgctttacttattccattgtatgttcaaaatgctttaggattatctgcgttgctatcaggattagtaattatgcctggcgcgattatcaatggtattatgtctgtgtttacaggaaagttttacgataaatatgggcctagaccgttaatatttactgggtttatcttattgatttcttgtacatttctattatgctttcttaaagtagatacatcctatacgtatttgatagtaatctatgcgattcgtatgtttgcagtgtctttactaatgatgcctatcaatacgaccgggataaatgcattgaaaactgaagacatttcccacggaacggcaattatgaactttggtcgtgttatggcgggatctctaggaactgctctaatggtcacttttatgagtataggtgctcaatgggttgtatcatcaagtgaacacgctagtaaagaaatgatccagcgacaaagtgttgctgtgggagttgatgtatcgttcgccttagtcactgtttttgtgattattgcttttgttctagcgttatttataaaggagcctaatcatttaactcacaatagtaggaaagtataa

SEQ ID NO: 4692 - DNA, 1068 bp, Staphylococcus epidermidis
ttgttaacggtaaatcaagttaaagaaattgtaggggcattaaaggatccgattattgatgtgccattgagagaatctgaaggtattgttgatgtctctattaaggataatattaaccatgtgagtgttaaagtggcaatggcgcaattagggggacagccacaattagatcttcaaatggctatagtcaaagccttaaaagaaaatggtgcaaatactgtgggaattcgttttgaagaacttcctagcgaagtagtcgaaagatatataggaaaaggtagtgaaaagcccaaaaccattgaagaactattatcacaaaataatccagttgaattcatttctatagcttcaggtaaaggtggggttggtaaatcgacagttgctgtcaatctagccgtagcattagcaagagaaggtaagaaagtaggattagtagacgctgatatatacggttttagtgtgcctgatatgatgggaatagatgaaagaccaggtatagatggtaaggagattatacctgtagagagacatggagtaaaagttatttcaatggcattttttgttgaagaaaatgcaccggttatttggagaggtccaatgcttggtaagatgcttacgaatttctttacagaagtacagtggggagaacttgattacttacttcttgatttaccacctggcacaggagatgtagctttagatgtacattcaatgttaccatcaagtaaggaaattatagtaactacaccgcatccaaccgcggcgtttgtagcggcacgagcaggtgcaatggctaaacatacagaacatacaattcttggtgttatagaaaatatgagctattttgaaagtaaagaaacaggtaaaaaagagtatgttttcggaaaaggaggaggcaaaaagctttctgatgaacttgagacgcaattatttgctgaacttcctttagaacaacctacatggaatcccaatgacttttcgccttcgatatatcaatcggatgatcgtctaggagaattgtatactttaatcgcaagaaaagttatagcaagcacccaaaaacaataa

SEQ ID NO: 4693 - DNA, 1338 bp, Staphylococcus epidermidis
atgaaagtcaaaagtatttcacggttcttttcaatgaagaaagtgacgctaagtttcgttactttatttattggagtagggacaataggttcatacaatcagtttgctgatgcaagtacgaaaacgcaacaaacacatgtaactaagacatctccaactcaaaagacgacgtccaattttaaacgttcagttaaagatacgtctgttaaatctagagctacatcaacaaaaagagctacatcaaccaaacgagctatatcacccaaaacatcatcaactaaaaaaactacaatagcaaaaaaatctaccacagtaaataaaacgcgcacaacaaccaggactcagcctaccattcgtaagagttcaacaacttcaacacgttcaaaaacaatacctacttctgtgaaacgcacaacttctcataaagcaactactgtgtcgccaacttctaaagctaaaatatcaacaaagacacaacaatcaactaaaagtcatacaacttcagttaagaaaaacactacacaactaagtaaaacaaaatctccgtcaacgtcaacaaaatctaaaacagttcaatcctctacgacaaaggcacaacctactttatcgactcaagttagtacaactactaaagcaaagcaactttcaacgccaactacttctaaaactgatagcagtaaagctttagtaagtttagcatctacagaacgtaaaatagataaataccaatcgatgactcagttagaaaaagaaacaactgaaggtgtagattggagaaaagatacaaaaaacacagggaatcaagtactcattgtggctccacatggcggaagtattgaacaaggtacaacagaattaactaaagcattagcagataaaggtaattatgattattattcatttgaaggtattcgacctaaaaataactctgaattacatgtgacgtctacacattatgatgatccgacattaaatcaaatgattaaaaaccgtactgcaactatttcgattcatggcgcatcaggtactgaggagattatctatcttggtgggccccgttcagatttaagaaatgctatagagaagcaacttgtaggacgtggatttacagttaaagttccaccagagtatctaggtggtcaaaataataaaaacttcattaataaagaagacaataacactggcgttcagttagaattaacgactgctttaagaaaagcattctttaaaaatggagatactagtacaaaaaatcgtaccaataaagaaaattggacaccaacaatggaagcatttattaatgcattatatgaaggtatcaatcaaacgtattcataa

SEQ ID NO: 4694 - DNA, 141 bp, Staphylococcus epidermidis
ttgttcaagaaccgcatctttgaaaggagtgttattaagatgaaaaaattagcagttattttagcattagctggtgcagcgttctatggtttcaaaaaataccaaaatcatgtaaaccaagctccaaacattgaatattaa

SEQ ID NO: 4695 - DNA, 2334 bp, Staphylococcus epidermidis
atgaagattaacatatttggatataatatcttcgccaagggcggaacatcaagaagtaatattaacttagtgaaaagcttattagaaattggacatgaggtacactactttaattatcaggactataataaaagtgatatcacaaaactaattatttacgaaggtttgagcacaaagcatcttcatattcatcaatttaatagtggaaaagaacttgctcatggagacctacttataattactagagaaaccttttttaatcatgcatatctagttaaaaaattaaatagcaagattaagattgttggtgaaatacatggtccattggaatatattaatgagaatatagatttagcattagactgtattgattgtgttcgagtgagtacagctagaattaaaaatgaatttatagctaaatatgactatcatcgggtttttaatcaatacgtaaatgcacaacatatcgatttaaaatcagagccgataaatactaaacgaaattttttaattaaagcacgttttgaggatgaagttaaagatatttcatatattattaaattgtttaattacatcattaaaaaccaaattgttgatgatgctcaactttatttaataggatatggtccttcagaaatgctttacaaaaatttgataaattactatcatcttaatgattatattcatattaatgaaaaagaaccacagagttatatttatgtatctagttcgccatatgaaacgctcggctattctatattagaaacgattgcacagggtaataaagctctagtttactatggtgatgataacgtgttaaaggatatctatgcaccatatgaagcgatacgttttttaaccaaagatatgattaaagatagtaaaataattaaagactttctaaactataaatatagtcactgtgatcgacaaaaagattatcgacagttgaaaagtacgtttaaatgcattaattatggacaggaatttttaaataatgttgaaactttctcttcatctcaacatgtaaaagtgaagaaaattcatcgacatctcggtagtgaaaaacaaatagatatagcaagtcgtttaaaagagagtcgttggatgaatttaattagaaaaaataaatatttatttaataaatgtaaaacgtactatgaaaaaagaacgcatatgagctatatcaaaaatttaaatcaaatacctgtagacgacgattcaatatttatagagtctttccatggcaagaattttagtggagatcctaaatatattgctcttgctattaagagacagtatgatcataaaaaaatatatgtgagttcaaccaattcacttgttgatatggaaatcaaacgttacggttttacacctgttcgatttggaagcgagaaatatattaaaacgtttagaaagtgtaagtatgtttttatcaatggtaactcgtgggataaagtgtacaagtcttcagatcagatatttattcaaacatggcacggttttccattaaagaaaatggttaatgatttaaatgaacaacatgaaagacaacaacaactagaggcattcataccacgcatgaaaaaatgggattacattttgacatcatcagatattaatacgacgttgttggaatctgcttttatgctaaataaaaatccaaatcttaaagttctagaatacggcgcacctaagaatgaatatttaataaataataataatttacaagagcgccagcagttacagcttaaatatatgtataagatagatgatgataaaaaatatatattatattgtcccacttggagggaaaatcaaagaaaagaagtcactcagattaatttaaaagatttacttaaatatttaccagagaattatgagattattgtgaaacttcatcctaatgaaagtcatttaagaaccagatataatcaaatagataatcgaattcactgttatttcaatgaacttgttgatattcaagaactgtatattctgagtgaatgtatgattacagattactcgtcgaccatttttgactatatacatttaaacaagccagtctttattcttcaagaagacgagcaacaatataaacaaagtgttggtttttattttgatttgtttgaagtgggtgattttcttaaagcctctttaaatgaacgcatgttagctaaacaaatttgtagcactgattatataaattattcaaaagtggttcatcgtttgatgaaacaagatagttcgaaaagcagtgaaaagttaatggccgaaattcttggggaaccagaatatccaagttcatcaaactgcaaacaacagatttcttaa

SEQ ID NO: 4696 - DNA, 1545 bp, Staphylococcus epidermidis
atgtctaaaattttactaactggtgcatcaggttatattggtagccatctcaagaataaattaaaaaaagatcatgaagtgatagctatatccagaaatactcataataaaacggatgaagaaaatgtcacgtggaagtcagcagacttatttgatttggacgaaattacaaaagtaatgaaagatgtagatacagcgatatatttagtacactctatgatgccatcagcaaaattaacgcaggctagctttgaagatatggatgcattgttagcagataattttgcgcgtgcggcgcaaaagcagggtgttaagcatattgtctacatgagtggtttaataccagaaaatgatgagctatctgcacatttaagaagtcgacttgaatgtgaaaaaattcttggtgattacggtataccagttagcacattacgtgcaggtttaattattggtgcaaaaggaagttcttatccaattcttaaacgactagttaagagattgccagcaatggttttgcctagttgggcttacaataaaattgcacctgttgccattgacgatgtgatagatggtttagcagcattggtgaatcgaacacccaaagataacgaagcaattgatatcacaggtcctgaagtgatgaattataaaacgctgatacagcgcacagctaacgtacttgataagcgactgcctatgcttgatttacctattatacccattatcataagtcggtattgggtacaactgatttcaaatgtaccgaaagaaatggtatatccattaatgaatagtttaactcacgatatggtaccacatcgaaaacgcgttgtgtctaacttgtccgtaggaaatatcacctttgaagatagtgtgaaaagagcactaagagaagaacaaaagacttctaagaaaaagtcggattcgaaaaattctcaatcatttgggcgtatgcatcaagaaattaaagatgtacgagccattacacggtttaaaattccggaaggttattcgattaaagatgtgactaaagaatatgcaaaattcatcaataatatcacactacatctcgttaaaggtacgataaatgaacgagaatttaatatgaatttgcccttcattaataaatttattttaaaaatggaacgtgatgaagctgactctacagaagatatggtggtatataatattgtgggtggcgatttagcacattcaaatgatggtggaaatgcacgctttgaattccgaagaataagaaacaccaatgagggtattattgctttacaagaatatgaacctacattaccttgggtagtatataaactaactcaagctaaagcacacaagactgttatgaatatttttaaaaataaaatggcacgtttatcgcaacaaaaaaatgtgaaagatgaaacatatatgtctaatcgtgtaactattggagtaacagtagcatcagcgttcgttattggaagcgcagtagggttccaactttttaaaaagcatcaaatcaaaaagaacacaatgtcgaatgcagaattataa

SEQ ID NO: 4697 - DNA, 1470 bp, Staphylococcus epidermidis
atgaaatttatgaacaaaatgggtaagacgacgcttgcttcatcaatcgtagcagcatccgttttaagtacggtaaacgtatcatatgcttcaggtagctcagaacaaagtgctcaaactaagcaaacacaaaacgatgccattgctttcggcaacacaaaaaatccaaaaaatgtcatcttcatggttggcgatggtatgggaccttcttttaacactgcatatcgttattataaaaataagcctggtgctaagaaaatgactccaactgcattcgataaatatctaaaaggaacaaatcgtacttattctaatgatcctaaagaaaatgttacagactctgctgctggaggaacagcttttagtaccggtcacaaaacatataacggtgcgattagtgttgatacaaataaaaaaccaattaaatctgtgctagaacaagctaaagaacaaggaaaatcaactggtttagtaactactgctgaacttactgatgcaacacctgctgtatatgctgctcatgtagattcacgcgacaaaaaagatgaaattgcacagcaattttataatgataaaataaatggtaaacataaagtcgatgtgatgttaggtggcggtgcaaaatacttcggtaaagaaaataaaaatttagcgaaaaaattcaaaaaagatggttatgatatcgtttctaataaagatgaattaaatcaatcacaaagcaagcaagttttaggtactttctcagaaaaagatatgccattacaaatagatgcacctcaatctaatccgttgctagtagacatgcaaaacagtgcactaaataaattaagtaaaaataataaaggattctttttaatggttgagggtgcttcaattgataaagctgcccaccctaatgatatcactggtgtgatgtctgaaatgtctggtttcgaaactgcttttgataatgctattaattatgcaaagacacataaagatacacttgttgtagcaactgcagaccactcaactggcggtctatcaaccgcaaaaggtaaagattataaatggaatccagaggctattcacaagatgaaacattctggaatgtatatgacaaaacaaatcgctgatggaaaagatcctgaaaaagtaattaaagatggatacggtattgatttcccaaataaacaactcgataaagtcaaaaaagcagcagacgagcttcacaaattacaaaaagaaggtaaagatgacaaagacgaaaaagttgtagaacaaacaacaaaattacaaaatgcaattcaaaaaccaattaacgatgcttcacacacaggttggacaaccaatggccatacaggtgtagatgttaacacatatgcatatgggccaggttctaacaaattcaaagggaatatggaaaatacccaaagcgctaaaaacttatttgactttttcggaaacaatgtaacatcaaatcaaaattaa

SEQ ID NO: 4698 - DNA, 180 bp, Staphylococcus epidermidis
atgatatttgtaatgttatctccaatattaattattttgtttattgtactaagcgtattagaagaaaaacgtagaaagaaaaattcaaaagaacaaaattcgaatcatgtagatcagcaacaacatgattatatcgacaaagaacaacaacaaaataaaaattcaaatgatgataaataa

SEQ ID NO: 4699 - DNA, 666 bp, Staphylococcus epidermidis
atgaagattttcattgtagaagacgatttagtgattgctgaaagtttagctaatgagctatctaaatggaattatgaggtgcatgtggttgataattttgaaaagataatggaagattttcgccgagtagaaccacaactcgtattattagatatcaatctaccaacacttaatggcttccattggtgccaagaaatgcgaaaagtatctcatgtgcctattatgtttattagttcaagaacagataatatggatcaaattctggctatccaaatgggtggcgatgattttatcgagaaaccatttaacttgtctttaacagtagctaaaattcaggcactattgcgtcgcacttatgatttatcaatagctcgtgatgaaatagctgttaaaggttgtaaactaattgttgatgaggccaagcttagcaaggataatgaacatgttcaactttccttaacagagctacagatattaaaattgttatttcaaaatgaaaataaatatgtaagtcgtacagctttaattgagaagtgttgggagtctgagaattttattgatgataatacgctcgcagtaaatatgacacgattacgaaaaaaattactttctatcggtgtcgatgatttaattgagacaaagaaaaatgtaggatacagggtttga

SEQ ID NO: 4700 - DNA, 897 bp, Staphylococcus epidermidis
atgaagtttgcatatattcaatcgattcgtaatgagatttcaattattttaataattctattattttttgcacttatattttatgtgttttctttaccttttgatgcatacgtactagcaatcagtataatattactattgatgtgtgtacgttggtggataaagtatttaagttttaaaaagaatgaacatcttaaagataaagtagcatatttagaacatgagttagcacatgttaagaatcagcaaattgaatatcgtaacgatgttgaaagttattttttaacatgggtacatcaaattaaaacacctatcactgcctcacaattacttttggagagaaacgaggagaatgtagttaatcgtgttcgacaagaaattgtgcacattgataattatacaagtctcgcattaagttatttaaaattattaaatgaagagtcagatatgacaattaccaaagtgacagttgatgatttgattcgcccgttgattttaaaatatagaattcagtttattgaacaaaagacgcaaatccattatgaaaaaagtgaggacattattttaaccgatgcacaatgggcttctataatgatagagcaacttttaaataatgctttaaaatatgctaaaggtaaagatatttggatagattttgatgttgccaatcaaactctacagattaaagataatggtattgggattagtaaagcagatattcctaaaatttttgataaaggatactcaggatttaacggtagattgaatgaacaatcaactggtataggtctatttatagtgcaacacattgcaaatcatttaaatatacaagtaactgtacaatcagagttgaatcatgggacagtattttttatacattttactaaagaaaaataa

SEQ ID NO: 4701 - DNA, 750 bp, Staphylococcus epidermidis
gtgttattagaggttaaaaatgtaaaaaaagtctatggcagaggtatgaacacgacaatggctttaaatcaaatgaaccttgaaattgatgaaaatgaatttgtagcaatcatgggcgagtcaggttcaggtaaatctacattactcaatttaattgctacttttgatcgtacaactgaaggattaataaagttagacgagttgccgcttaatcaattgaagaataaagacattgcacgctttcgcagagaaatgatgggatttgtgtttcaagattttaatgtgttgaatacgatgtcgaacaaagataatattttgatgcctcttgtacttgcaaatgaacgtccgaaaataatgcaaaaacgcttaatggaaataagtgaacaattaggaattgaagacttgcttgaaaaatatccgtctgaaatatctgggggacaaaaacaacggatagctatagcccgtgcgttgatagcacgacctaaattattattagctgatgaacccactggtgcacttgattcaaaaacctctaaaaaccttatgtgtttatttcgaaaaattaatcaaaagcatcaaactatattaatggtgacacattcaaatattgacgcgtcatatgcgaaccgtgtcatcttcatcaaagatggtcgtttgtatcatgagatttatcgtggtgaagaatcgcaaacagattatcaaaagcgtattgccgatagtttggccatattgaatggagtaggtgactaa

SEQ ID NO: 4702 - DNA, 2013 bp, Staphylococcus epidermidis
atgactttcaagattttgtggaaaatgattaaacaaaattttgttaatcaacgtcatatcattgttccatttattagcgtaataagtattttattcggtattgaatacatattgttatcgttaacaaccaacatttactttaatgagcatcatcctgaattaaaaatatctgcgattattggaatagtgtttatgacgatgttattattcatatttttaatttatgcaaatcactttgttatgaatcataggaaaaaggaatttgccttaaatatggctcttggtatggagaaaaaacatctaagactcatcatcttgattgaacttttcattcaatttattatatctgcaatcttgagcattgttggaggttacttatttggtgagctcttttttatgttatttaataaaatagttaatacgcatcaacctcagttgtcagattatccatttgatgttttgtcaatgaaaatcacattaaccatgctactcagtttgatgatcatattgtttgttattaacaattttaaaatatcatttaaaaactccttacagttattgattaaaaataaaagtaagacgcatgaaaagtcacgtgtacggttaataatatttttaattttaggattaatttttatagggattggctattatttagctataaaacctaacacggctatcggttccttggggattatattttttgcgattttgtcaacgcttatcggtacctatttgctctttgttagcttaggatcaatagttttagaaatgttacaaaaattagatcattattattataaacccaatcattttttctttattgcaggactcaaatcacgcgtaaaatctagtgcgattggtttagctacgatttcatttatgtgtacatttctgattgttacgttaagtatgacagtctcaacttatagaaatatggatcataggtttgaatttgcatttaaaaatgattacgcaggttattatattggtgattttcataaagatagcaaaattcaacgtaagatagaaaatttaaaaaaagatattcgccaagaagttccaactggtcaatttaaaatctatgcacgaggtatggttggagcggaattgcagggaggcttaaaacataaaaagctaaaaagacaaactgtatcgagtggtttatttaattttggaaataagcaaaaattcaactcttttatttctatatataataaaagtgattataataaaaacaataaaaaaataaaattagatgatgatgaaattgcaataagtacaagtgtgtcattatttaaaaaaatgaaaacgctcaatatattcgggaaaacatacagagttaaatatattgagtcgacaaatatagataacttactctatgcagatggtataactttaattgtgaatcaacaacaactgatggatcgtattgttaatgaatatcgtaatcacaatgatgaaaatttaatcatcactcctaatcaagtccaaactgcggttgaatttaatgtattaaaagaaaaggataagttgaatcatcgtattaagaaaataggtgttcaacacgatattgaatttcaagtgaaaaaacaaaacctattgatgtggaaacaagtcaactcaagtttaatttttgtaggaagtgttgtatctctagttttattaataggtatatttcttatgatgtattataaacaagtttcagaaggacatgaagatagagatgcatatataacgatgaaacaactaggattagatgaaattttaatcaaaaaaacaattaataaacaagtaatatgggtatttcttattcctgtaattgttgcaattatacatacgctagctgcttttcgtatcatatactctgtattaggaatcgttggtcaatatgatttgggactgtatgctactagttacgtaggtgtgatagttgtatttattattttttattcaatgatgtactggattacttctagaatttattatacgatgataaatgataagcattaa

SEQ ID NO: 4703 - DNA, 591 bp, Staphylococcus epidermidis
atgatacaacgtaaaggtgaattaatactttcatggattggcaatggattacatctgttgtatgtatttttaataggcatatttttcataatgacacaaacaagtgattttaaaaatgggatgattcaaggatttatagaagaaaatccgggggaatatgatttagcataccaaacttataacttgatgttaggtttaggtgttgtcctcattattatacttctcattttattaattgtatcaatagttgccgctattttaattggcaaaaatgccaaagtatcaggaatattacttgttattacaggaatcattggtctctttttaagttttattgctggtgccttatggttaatagcaggtatcatgcttttagtacgtaaaccacaaacacaaaatgaccaaatcaattctcaatatagtaatgacatacattcacatgttgtgccagaagaaaagaaacgtgaacaacaacaatataatatgaatgaaccacatattggtcaaacatcaacatctcatcatgatcacgcattgaatgatcaaaataaacgagaaaaccataatcatgataatcaaccatacaaatag

SEQ ID NO: 4704 - DNA, 1593 bp, Staphylococcus epidermidis
atgaattggatatcgattattttatttattatggtcgtatgtggcatttctttttatgcctatttgcaatcaagaaaaattaaaacgaatagttcagatggttattttatgggaggaaatagccttactggatttacagttgcctctacaattatcatgaccaatttgtcgacagaacaaattgttgggcaaaatggtcaaagctatgcacaaggaatggaagtaatggcttgggaggttacggctgccgtagcagttgtattgttggcctgggtctttcttcctaaatatctaaaatacggtgttaatacaatttctgagtttttggaattacgttatgatacatttactaaacgttttgtctccattttatttatctttacctatgtcgtatctttcttgcctgtagtattgtattctggttccctagtgttcaataaaatgtttaaagttgatgaatacttaggtgtaagtagttcaactgctgtcattattatttcatctattattggtataattggcattatttacttatttataggtggtttatcgttaagtgcttttagtgattcgatttatggcatggctttaattatagctggacttgcgattacaatattaggtctaggtcaattaggagatggcaacttcctacatggtttcgacaaaatcgtgcaagacacgcctgagaaattgaatggttttggtaaggtggactcggatgttgtaccttggccaaccctattcttcggtatgttctttaacaatttattcttctggtgcgcaaaccagatgatagttcaaaaagcactcgcagctaaaaatttaaaagaatctcaaaaaggtgcaatatatttaagcttatttaaagtgttcggacctttatttacagtcttaccaggcgtagtagcatttaactattttaatggtagtcttgataaatcagataacgcttaccctgcacttgtaacttcagtattaccagaatgggcattcggcttatttggtgcggttatttttggtgcaatattgagctcatttgttggctcattgaatagtacaactacactattaacactcgatttctataaacctatttttggaaaaaataaatcagataaacatattgctcgagtaggccatattgctactgtagtcattggagttattgttgtagcacttgcaccagtcatctcattattccctagtggtctttatgcagtagttcaacagtttaatggtgtgtatagtatgccagtgctagctttaattttaatcgctttcttttctaaacgcacatctaaattgggcgctaaagtgacactcttcacacatataattttatacgctataatcagctttgtatttacagaaattaattatctatacacatttagtgtattattctttgtagatttaattattattttgatttttaacaaagttaaactatctagtgagtttgatttaagcacgcaccaaccgaaagtagatatgacgccatggaaatatcgttacgttgcaggtattattgttcttgctttagtagtagtaagttatattatcttctcaccactcgtgttggcaaaataa

SEQ ID NO: 4705 - DNA, 1185 bp, Staphylococcus epidermidis
atgcaaacagtcggaattataccttcgccaggtatagcacatcaacatgcaaaaaaaataattccaaatgttaaacagttattgtcaaagcgtactaaacatagtcaatggaatttcgacatcaaagtcgatctcatgataggatctgcagaggatgtacatgaaagtgttgaaaaagcagcacaaattaaagaggaacatcagtgggattacgttgtttgtctgacagatttgcctagtatttcagataataaagtggttgtcagcgactttaatagtgacaaacatgttgcaatgctatcattaccgtcactaggttttattgatttgaagcgcaagctagttaaaacgatgacttcattgattgaacaattatattataatcaaccgaaagacaaaaatgcgccacatccttttgtacgcgtgaaggctgtagaacctgacgaagacgccacatcaaaacaacgatatattaatattttatttatcataagttggattcagttaattggtggactgacacgagcaaatcagccttggaaaaacatctttaattttaagaaaatcatttcagttgcctttgcaacaggaacttatgtctcaatattttcaatgccatgggaattaagcgtgatttattcaccgcttcgacttatcatattgatggtgattgctatacttgggatggctggatggctattctatgcgcatcaattgattgaaaagaaaactgctaaatctcagcgtgtatatcgatatatttataattcaaccacacttgttacactaagtttgattacactcataaattatgtcattttatatttattgttaatcatcagtattacactctttgtccctgtggaattatttaatagttggacgagtgcccaatcacaatttacgttctcaaattatatgagattgatttggtttgtatcatcattaggacttttagctggagctatgggatcaactgttgaaaatgaagagaaaatacgtcgtattacttattcttatagacaatatcatcgttataaagaagctgagcaagaacaaaaagaacaagaaacttctcgtgatgtatcacaacaaaatgtcgaacaacaaacttcaagtaaagatgaaaataatgaacaatatgaaggtaaaaaacaaggacatagagaggaggatgacgcatga

SEQ ID NO: 4706 - DNA, 1110 bp, Staphylococcus epidermidis
atgacaaatcaaaaaactgtgggtctagtcgtcgctccaggtgttactgaacgccttgcagaaaatctcatacaagaaatgcctaaaatgttatctacgcattatgatcatcagcaagaatggatttttgatttagttactgatccgcttactggttttgctgaatctgtagatgaaatttttgagaaagtagccgattatcacgataagagacaatgggattatgtgatagcaattacagatttaccgatgtttgctgacaaacaagtgatggcattagatattaatatggaaaatggtgcagctatattctcatatccggcatttggctggcgtccagtaaaaaaacgtttcaagcatgcgatttataatattattcaagaattaaatgaagctgaacaagaaagtcgtaattatgataataataatcaaatagaaaattcagtaaaaaaacaatttccgctctctaaaatagacaaagaaacaatatatatgaaagaaacagactcttatcacttaagatatttatcaagttcacgttctagaggcatgtttcgccttgttagtggaatgacatttgcgaataatccattaaatatgatggcaagtttaagtaatatagtagctattgcatttactacaggtgcatttggacttgtatttacaacgatgtggcaaatggcttataacttttcaatgtggcgtttatttggaatttcaattattgcgattattggaatgctaatatggataatgatgtcacatgatttatgggaaccagttaataaaagcaaccataagcgtattacttggttatacaatcttacaacaataatgacattgatttttgccattataatttattatattattctttatttactattcttaattgctgaaatcgtattattgccatcaggatttttaggtcagcaagttggattaaaaggtcctgcaggcattgatttatatttaagtattccatggtttgcagcttcaatttcgacagttgcaggtgcaataggtgctggtttacttaatgatgaactcattaaagaaagcacatatggatatcgtcagcgtgtaagatacgaagaacaacgtcgataa

SEQ ID NO: 4707 - DNA, 1326 bp, Staphylococcus epidermidis
ttgatttgttctaattgtggggcacatttagagaaggatgataaattttatgttaattgtgggcagagtgtgttcgataatccaaagacaaaaactgaacataattttaatagtcaagatagacaatgtccaaagtgtcacaaagtagtaaatgtcgatgataagttttgtatcaattgtggtcattctcttcagcaaacattatcaaattcaaatgacaacatagcatcacatacatattcaaatacaaaacctgaaattgaaaatgaaactgcagatcatattcgattgacagaagaagccaagcatctatttaataacacaacgaaatcaataggtaggctagcagggaatgatgaaagtttaaaattaaatttgcgtgacatgttttctgaggtgtttaaatctcacaccaaagatgaagcggatgatgtatttattgctggaacaaaacgtacgacgccacatattaatgaagtttccgaggagtggggaagaccttgggtgttctcacgtgtatttttagctttaggtatcactttcctagcgttatggatattaacaaatatatttggtaatgccaatgccataccaggtatgatatttattggcgcactattagttcctatttcaggattaatcttcttcttcgaatctaatgcatttaaaaacattagtatctttgatgtaatgaggatgttctttattggtggtgtattatcactcattagtacaatgattttatatcaatttgttacatttagtactgaatcgcaatattatggaattatgactataacagatgcgttcatagtaggatttgttgaagagcttggaaaagcaactgttgttattttatttattaattatttaaaaacaaataaaatactcaatggattacttatcggtgctgctgttggtgcagggttcgcggtgtttgaatcagctggttatatctttaggtttggatttaatttatttgatggagttaataatattactgaaatcactatacaaagaggttggacagctttaggtagtcacctcgtttgggcagctattgttggtgctgcggcagtaatagtgaaagaaacaaagcatttcgaatgggcgaatatcatcgataaacgttttatatttttcttttttgtggcagtgacattacacggaatatgggatacggaaataacacttttaagtagtggttatttaaaatatatcttattaattatgattgcatggctatttatatttatacttatgaaagcagggctaactcaggtgaatcagttgcgtgatgaatacaatcgtttagaggaaaggtga

SEQ ID NO: 4708 - DNA, 750 bp, Staphylococcus epidermidis
atgaaattctgccctcattgtggaaatccgataaaaaaggaacagtcattttgtaataaatgtggaaaacatttaaagacatcgacacaaagaaaaagtgaaaatcaaattgaacatatgcgtgaacagcaatcgtatatttcttgtgaggaaagacaacatcatgattcaacattttataaagaacaaaaacatactggttggctaattgtattatcaattatatttgtcttgttgatagcagcgctattgtatggtgcgtactatacttacaatcattatattagtgatgagcaaagtcatcaaacaacacagtctcagcaatcaaatgaaagtggtcaaaataaggatcaatccactggtccaagcattgatgtttttagtgatgactttgatcaaggttatatgaagtcagcttcaacaagtggatatagaggtgtttataatggaatgacacgtgaagaagttgaagataaatttggaacatccaatggttctgtagaaagtttgaagtggagttacgaaaaatatggtgatttagctgtagcctacgatgataatgaagttgttagcgtaggtgtagcacctaatcatatttcagaagatcaatttttaagtatgtataatgaaccggatgatagaaattcaagccaactcatttatgatagtaacaaagataatgacttctctgtgttagctaatgttaaaaatggatatgttactgtcattgaaaatgtaaatcaaatttaa

SEQ ID NO: 4709 - DNA, 441 bp, Staphylococcus epidermidis
gtgaaacaagaacaaatgaggttagcgaatcagctttgtttttcagcatataatgtaagtcgtttatttgctcaattttatgagaaaaagttaaaacagtttggtataacttattctcagtatttagtattactgacgttatgggaagagaatcctcaaacattaaattcaattggtagacatttggatttatctagtaatactttaacccccttactaaaaagacttgagcaatctggctgggttaaaagagaacgtcaacaatctgataaacgacagttgataattacgttaactgacaatgggcaacaacaacaagaagctgtttttgaagcaatttcaagttgcttaccacaagaatttgatacgactgagtatgatgaaacgaaatatgtgtttgaagaactagagcaaacattaaaacatctcatagaaaaataa

SEQ ID NO: 4710 - DNA, 1344 bp, Staphylococcus epidermidis
atgaaacaatatgatgtagtatttttaggaagtggtcatgcagcttggcatgctgcgttaacattaaagcaaagtggtaagcaagtagctgtagttgaaaaagataccatcgccggtacatgtactaactatggttgtaatgcgaaaattttattagagggaccttatgaagtgcttgaagaagccaaacaatatcctaatattattgatagtcacaatttagaagtgaattggaagaatttaatgcattacaaagaacaagtcattaatcctatgtctgaaaccctcacatcgatgtttgaacaacagggaattgatgtaatcatggggaaaggtaaacttgtagatgctcatacaatagaggtaaataatacaactttacaatcagattatattgttatagcaactggacaacatagtcatcaattagatattgagggtaaagaatatacgcatgatagtcgggaatttttatcaatgcaatctttaccggatagtatcacttttattggagcaggtattatcagtattgaattcgcttctatcatgatcaaatcaggtgtagaggttaatgtggttcatcatacaaatcatgcacttgaagggtttaacgaatcacacgtcaataaattaattcaaaagttaaaagatgaaggtgttaaattttactttagtgagaataccaagtcagttaaaccgaatgcacaacgttttatagtagaaactgagtctggaaagatgattgaaacagattatgtactggatgcaaccggtagaaagcctaatgttcagcaaataggtttggaaaaagtgggtatactatttagtgatagaggtattgaggttgacgattatttaagaacaaatgtgaaaaatatatacgcaagtggggacgttatcaataaaatgattcctaaacttactcctacagctacatttgagtctaattatatcgctgcccatatccttggattgaatacagatgccattcagtatccaccaataccttcagtgctttattcattgcctcgtttatctcaaataggtgtcacagttagcgaggctaagaaagatgatacgtatatgattaaagatataccattcggaagacaaatggtatttgagtatcaaaacgaaacagaggctgaaatgtcaattgtattagatagtcacaaacgtttagtaggagcagagatttatggtaatgacgctggtgatttggttaatctcctagtctttatcattaatcaaaaacttactgcacaagacttaaataaaaatatttttgcatttcctggagcttctagtggcgttatagatttattgaaattggcaatgatgtag

SEQ ID NO: 4711 - DNA, 477 bp, Staphylococcus epidermidis
atgagtatttatgatattgcggtaaagaattatgatggctctacctatttactaaaaagatataaagggaaagtgctcattatcgtaaatactgcaacgaattgtactctgaatgatcaatttaataaattagaaatgctttataaaaaatatcataagtatggtcttgaaattttgagcttcccttgcaatgattttaataatcaggagccagaattaatcaaagatatttatcgagtatataaatataagtttggtattactttccccatccatgctaagattaatgttaatggagagcatgaacaccctttgtacacattattaaaatgtaaacaaccaggattatttggttcgcaaattaaatggaattttactaaatttgtagtagatcaacagggaaatattgttaaacgatttttaccttgtgataatcctaaccaaatggaaaaattaataagacaattattaaaataa

SEQ ID NO: 4712 - DNA, 120 bp, Staphylococcus epidermidis
atggcagactctttaataatttcttttacattcgtttatagtgacttcattcaaaatattacaaatggaacaagattattttattctttaatccaagaagaatataggcatttattttaa

SEQ ID NO: 4713 - DNA, 732 bp, Staphylococcus epidermidis
atgtctatagaaagaattacttatgacaattttcaaaacgatccatttataaatgaattagatattaatgatgagacaaaaggtgcttatgagattttaaaatgggcatatcaaacttatgaaaatgatattgtttattcttgcagttttggtgctgagagtatggttttgattgacttgatttctcaaattaaacccgacgcacaaattgtatttttagacactgatttacattttcaagaaacatatgacttaatagatagggtgaaagataaatatccgcaattacgcattaaaatgaaaaaaccggaacttacgttagaggaacaaggtgagaaatataatcctgctttatggaagaatgatcctaaccaatgttgctacatacgcaagattaaaccactagaagacgtattatctggtgctgtagcttggatatcaggtcttagacgagcacaatcaccaacacgagcacatacaaatttcattaacaaagatgaaagatttaagtcaattaaagtgtgtcccttaatctattggacagaagaagaagtatggtcttatatacgtgataaggatttaccatataatgaattacatgatcaaaattatccaagtattggttgtattccatgtacatcacccgtatttgattctaatgattcacgtgctggtcgttggtccaattctagtaagactgaatgtggattacatgtagctgataaaccataa

SEQ ID NO: 4714 - DNA, 1845 bp, Staphylococcus epidermidis
ttgaacttaagtgttaccaatagtccttttacggaagggcaagctaaacaaatcaatgaattgcttcacactttatcatctaaccaacaagtatggttaagtggctatctgatggcaaatcaacaatcaaatacatctacagattctgtagaacaacataactcagatgacaatacagaagcgatgctacatgaaaaggaaccttcagttgagccggaagctagatcgataacaattttatatggatctgagtctggtaatgcgcaaggacttgcagaaatatttgaacaacgtttatctgatattggaaatgacgttacgctcaaatcaatggatgactttaaacctaagaatttgaagaaagtagaagatttatttattatcacatctacacatggcgaaggagatccaccagataacgctgttgaattacatgaatacatccacggacgtaaagcgccaaaattggatggggtgagattttcagtattagcattaggagatcaaacctatgaattcttctgtcaaactggtaaagattttgataaccgtttggctgaattaggggcagaaagactttatcatcgtactgattgcgatgttgattatgaagaagacgctgaaaagtggatggccaatgttattaatacgattgattcaacaccggctggtactgaaagtgaacaagttgttagcgaatctataaaatcagcaaaagaaaagaaatatagtaagtctaatccttacgatgctgaagtattgaccaatattaatttgaatggtagaggttcagacaaagagacgagacatattgagttattacttgataattttggtgaggaatatgaaccgggagattgtgtagttgtcttgcctcaaaatgatccagctatcgtagacttacttattagcacattaggttggagtccagaaacacaagttttaattaacgaggatggagatactttaaatcttgaagaggcattaacatcgcattttgaaattactaaattaacaaaaccgttaatagaaaatgctgcgatattttttgataatgaagagctttctgaaaaaattcaagataaagaatggattcaaaactacgttgagggaagggatttgattgacttattaaatgacttcgcaacgacagaactacaacctgaaaatttacatcaattattaagaaagttaccacctagagagtactcaatatctagtagttataaagcaacaccagatgaagttcacattactgttggagcagttagatatcaagcacacggtcgggaacgttcaggtgtttgttcagtacaatttgcagagagaatacaagagggcgatacaattcctatctatttaaaacgaaatccgaattttaagtttccgcaagatgaatcaacacctgtgattatgataggtcctgggacaggtgttgcaccgtttagatcctatatgcaagaacgagaggaactaggttttgaaggaaatacatggttattctttggagatcaacacttcactacagattttctgtatcaaacggaatggcaagaatggcttgaagatggaactttatcaaaattagatgttgctttttctagagatactgataaaaaagtgtatgtgcaacataaaattgcagaaaatagtgaacaatttaatcgatggattgaaaatggcgctactatttatgtatgtggtgatgaaagtaaaatggcaaaggatgttcatcaagcgattaaaaatgtgttaatcaaagagcaaaacctatctgaaacagatgcagaagaatacttaaaacaaatgaaaagagataaaagatatcaaagagacgtgtattaa

SEQ ID NO: 4715 - DNA, 1719 bp, Staphylococcus epidermidis
atggttaatacaaataatcatatttcggaagaattagataaaaatcttgatgaaatggaatttttaaaagcaaatagtgactttttgcgtggaactattgaacaaagtttagctaatccaatcactggatccattacacaagatgatgcaaaactgctaaagtttcacggaagttatatgcaagatgacagggatttaagagatgagcgtcgtaaacaaaaacttgagcctgcatatagttttatgattcgagttcgtgtacctggggggaaagcgactcctgaacagtggattgctatggatgatatctctaatcaatatgcaaatcatacgattaaattaacaacacgccaagcatttcaatttcatggaattcttaaacgtaatttgaaacaatcaatgaaaaatattaatcatgcagtacttgattctattgctgcatgtggagatgttaatcgtaatacgatgtgcaatcctaatccttatcaatctcaagtacataaggagattaatgattatgcaacgcgtataagtaatcacttacttccaagaacaaatgcatatcatgaaatttggcttgatggtgaaaaggttttagattcgagtgaggaaaaggaacctatttatgggaatacgtatttaccacgtaaattcaaaataggtattgcagtaccaccatctaatgatattgacgtctattctcaagatattggtttaatcgctatcgttgaacaagatgagttaattggatttaatgtgactatcggtggcggtatgggtatgactcatggtaatactgaaacatatcctcaacttggacgtctcataggttttatacctaaggaaaaggttgtagatgtatgtgagaaaatacttacaatacaacgtgattatggtaatcgtgaaaatcgaaaaaatgcacgttttaaatatacagtggaccgtctaggagaaacttgggtgactgaagaattaaaccgacgattaggttgggaaattaaagcgccacgtgatttcgaatttgaacataatggtgatcgattaggttggattgaaggtattaataattggaatttcactttatttatacaaaatgggcgtgtgaaagatactgaagactatttgttaaaaacagccttaagagaaatcgcagaaatccatactggagatttcagattatcacctaatcagaacttagttattgcaaatgtttctcctgagaaaaaggaagaaatacaagctattattgataaatataaattaacagatggcaaaaattatacaggacttagaagaaattctatggcttgtgttgctttcccaacgtgtggtttagctatggcagaatctgaaagatatcttccttcactaattacaaaaattgaagatttattagatgagtctggtttaaaagaggaagaaataacgattcgtatgacaggttgtcccaatggatgtgcgagaccagcgctagcagaaatagcctttatcggtaaagcacctggtaaatataatatgtacttaggtggtagttttaaaggcgaacgtctaaataaaatatataaagagaatatcgacgaaaatgagatattagaaagtctacgtccattgttgttgcgttatagtaaagagcgtcttgacggagaacactttggggactttgtaattcgtgacggtgtgatagccaaagttcatgatggtcgcgattttcatagttaa

SEQ ID NO: 4716 - DNA, 780 bp, Staphylococcus epidermidis
atggggaaagtatatttagttggagctggacctggtgatccagaattaataacgttaaaaggtttaaaagccattaaagaagccgatgtcatcctttatgaccgacttgtaaataaagaaatacttaattatgcttctccttctactaagttcttctattgcggtaaggatcctcacaggcactccttaccgcaggaagaaacaaataaaatgatggtaaccttagccaaaaaagggcacatagttacacgtttaaagggtggcgatccatttgtttttggacgtggcggagaagaagcagaggaattagcatgtcataatatccactttgaaattatacctggaattacatcgggaattgcagcaccagcatatgctggaattccagtaacacatcgtgattatagttcttctgtagcatttgtaactgcagtgaataaacctggtatggataaaggcaaatactggcaacatttggccaatggtcctgaaactttatgtatttatatgggggttaagagactcagtgaaatttgtgagttgttaatacaatatggtcgttcgtcagaaacaccagtagctctcgtgcatatgggaacgtcaaaacagcaaatgacagtgactgggacactcgatacaattcaagaacgagcacatcatattcagaatccagcaatgattattgtaggcgaagtggttaagatgagagaaaaaattaattggtttgtagaacaggcaactgttcaaaatgaaacgttaacggaaatgtcatcaacttag

SEQ ID NO: 4717 - DNA, 612 bp, Staphylococcus epidermidis
atgaatatgcccttaatgattgatttaagtaacaagaaagtcgtcattgtaggtggaggtaaagtggcaacacgtcgtgctaaaactttattagcttatacaaaacatattcatgttgtaagtccaacaattaccgatacattacaaaaatatctagaaacgaagcaaatcacttatgaaaagaaacacttcgaaccacaagatgttgagaatgctgatgtggtcatcgcggctactaatcaatctgatgttaacaacgatgtgggggcagctttgtctaagaacgtattatttaatcatgcaggacaagcagacctaggtaatgtaacgttccctaatttcttaaaaagagataaattaacaataagtgtatcaactgatggtgcaagtcctaaattaggtcaacgaattattaaagatttaaaagatacatacaatgaagactattcaatgtatattcagtttttatatgaaagtagacaatatattaaatcacttaaaattgagccatctgataaacaagcgttactcgagcaaattttgtcagacaaatatttagatgagaagaagcaacaagatttcatccgatggctaaaatcacaagtcaaatga

SEQ ID NO: 4718 - DNA, 900 bp, Staphylococcus epidermidis
atgcgcaaagtattaattttcgcaattgcgggatttttagcacaacttgttgatgggtcattaggcatgggatttggcgcttcatcgtcatcaatattattaacttacggtatagcaccggcagtagtgtcagcaaccgttcatttttctgaaattgcaacaacagctgcatctgggacatcacattggagatttgataatgttcataaaccaacaatgttgaagttagctatacctgggtcaataagcgcctttatcggtgcaggtgttttgacatttattcatggtgattatattaaaccattcattgctttattcttgttaagtatgggattttatattttgtatcaatttctatttaaacgtgcacatgaacatcatcatcatgtgggaaatttgagtagttttaaagtaattccacaaggttttgtggcaggatttttagacgcaatcggtggtggtggttggggaccggttaatacgccgctcctgctttcaagtaaaaaaattcaaccacgatatgcgattggaacagtctcagcaagtgaattttttgttacgtcatctgccgctttaagtttcattatctttttaggagtcactcaaattaattggtttgctgtaattgctttaagtctcggtggaatggtagcagcacctatttcagcgtatttagttaaagtgttacccattaacattcttgcaatttgtgtcggtggtttaattatttttacaaatagtaatgcattattaagctattttgtaaaagataacactatttcaaatacagttcgattcattattattcttgcaattattattttgcttgtttttcaagtcgttcgaaacaagaaattgtctttttcttataagaaaagccgagtaaacaaatataattaa

SEQ ID NO: 4719 - DNA, 1179 bp, Staphylococcus epidermidis
atgtctaacaatgaaacaataaccaattatacaattaaacctcatggaggagaactcatcaatcgtgttgttgaaggaaacgaacgtgaacgtttgattgaggaagcattaaattttaaaccgattactttaaatccttggggaatatcggatctagagctcataggtattggcggatttagtccccttacaggatttatgaacaaggaagactacactaaggttatagaggaaacacatttaagcaatggcttagtttggagtattcctatcactttacctgtaacagaatccgaagcagataaacttgaaataggtgatgatattgctttatatggtgaagatggtcagttatatggaacgcttaaattagaagaaaagtacacatatgataaagaaaaagaagcgcgtttggtgtacggaactactgaagaagctcatcctggagttaaaaaggtttatgaaaaaggtaatatatatttaggtggtcctattaaactattaaatcgtccaaaacatgacgcgttttcaaattatcatctggatccttcagagacgagacaattatttcatgatttaggttggaaaactgtcgtaggttttcaaacgagaaatccagtgcatcgagcacatgaatatattcaaaaatcagcactagaaattgttgatggtctacttttaaatccactagttggtgaaacaaagtcagacgatattccagcggatgtacgtatggaaagttatgaagtgatattaaaaaactattatcctgaagatagagcacgtctagtcatttatcctgctgcaatgcgctatgccggaccacgtgaagcgatacttcatgcaactgtccgtaaaaattatggttgtacacattttattgtgggaagagatcacgctggggtaggcgattattatggtacttatgaagcacaagagctgattactcaatttgaagatgagttaggtattcaaattttaaaatttgaacatgccttttattgcgaagcttgtggtaatatggcaactgctaaaacatgtccgcatgacgcttctcaacatttacatttaagtggtactaaagtaagagaaaaactgcgtaatggcgaatcattgccaactaaattttcaagaccagaagttgccgaagttctaattaaaggtttgcgagaaaaataa

SEQ ID NO: 4720 - DNA, 600 bp, Staphylococcus epidermidis
atgagtgaatcaaatcatattacatggcatgactcagaagttacgaagaaacaaagacagcataaaaatggacacaaaagtgctgttatatggtttacagggctatctgggtcagggaaatcaacggtctctgttgccttagaaaaagaattatttaatgaaggaaaacaaacataccgtttagatggtgataatgtgcgtcatggtcttaataaaaatttagggtttagtcctgaagatcgttcagaaaatattcgacgcattggagaagtagcaaaattaatggtagacgctggagccttaacagttactgcttttatctccccatataaagaagacagagaaggtgttagagcattactagaggataatgagtttatagaagtatatacaaaatgtagtgttgaggaatgtgaaaagagagatcctaaaggattgtataaaaaagcacgatctggggaaatacctgaatttacaggtataagtgcaccttatcaagcacctgaaaaccctgaaattactatagatactgaacacgacactattgaacaatcagtggtacaaattatacgttatcttaaagaacacgaatatatttaa

SEQ ID NO: 4721 - DNA, 306 bp, Staphylococcus epidermidis
atgtcatttaatatttggatgtggattttacttgtattatttattgtggggacaatagctgtaattctcattttaacagttggctcagtgttagaagagcgctcatatgaccgtcgatcagaagatgaaaagcgcaaaaatttagaaaaaaatcttgagatgtcaaagggacatacagatgtatcgcaagagtcgagcaatggggaagaacaagtaacacaagagcattctcaacatgtcgttcaagatcatcaacaaacacatcaaaatataaatcaatcaacacaagataatagaaataattag

SEQ ID NO: 4722 - DNA, 1851 bp, Staphylococcus epidermidis
atgactactctagaaacatcattaactcgattaatcacaaaagatccaactatattaaatgaaaatgcaaataaagatagtaatacattctcaacaatgcgagatttaacagctggaacggtatcaaagtcttatgcactcgatcatttacttccaaagcatgttgctcatgcacatcaatcgggagatattcattttcacgacttagattaccatccatttcaaccattaaccaattgttgtctcatagatgcaaaagatatgttagagaatggctttgagataggcaatgctaatgttacaacacctcaatcaatacaaaccgcttcagcacaacttgtacaaatcattgcaaacgtttcaagcagtcaatatggaggttgtactgtcgatcgtgttgacgaattactaagtaaatatgcacaaatgaatgcacaacatcacagggaagtagcgaatgatttcgttcaacctgacaaaattgagaattatgtggatacacaagtaactaaggatattggtgatgcaattgaaagtttagagtatgagattaacacactctatacttccaatggacaaacgccattcgttactttgggatttggtttaggaacagatcaattaagtcgaaaaattcaacaagcaattttacatacccgtattaaaggtctcggtaaagatagggttactgcaattttccctaaacttgtattttcgataaaaaagggggttaactttagtccagaagatcctaactatgatattaaacaacttgcattggaatgttcaacaaagcgcatgtatcccgatattttaaattacgataaacttgtggaactgcttggtgattttaaagcaccgatgggatgtcgttcatttttaccaagttggaagaatgatgaaggtcaattggaaaataatggacgatgtaacttaggtgtagtgacgttgaacgtaccgagaattgcaatcgaagcagatggtgacatgcagcagttttgggatatctttgaaaaacgcatgcaattattacatgatgcacttgtgtatcgaattcaaagactacaagatgctattccagataacgcgcctattttatataaaagtggtgcatttaaaaataaactcacttcagaagatactgtcgattcattatttacaaaacaacgcgcaacgatttcaatggggtatatcggtttatacgaagcggcaacattattttatggaccgaattgggaacacaatcctgaagctaaaacattcacactagacatattaagagaaatgaaacgttatcaagtagagtggacgaaacaatatgatatttggttcagtatatacagtacacctagtgaatcactaacagatagattttgccgattggacaaagaaaaatttggatttattccagatgttactgataaaggatattaccaaaattcattccactatgatgtgcgtaaagatgtaacgccgtttgaaaaattagattttgaaaaagactatccttactatgcaagtggtggattcattcattattgtgaatatccaaagttaaatcataatctgaaagctttagaagcagtatgggattatgcttatgataaggtaggttatttaggtacgaatattcctattgatcactgttatcgttgtggctatgatggagattttgaaactactgctaacggatatagatgcccacattgtggtaacactgatcctaaaacggttgacgttgtaaaaagaacatgtggttatttaggaaatccagttcaaagacctgttattgaaggtcgacaaaaagagatatgtgcaagagtgaaacacatgaaggaacctcgttcatga

SEQ ID NO: 4723 - DNA, 537 bp, Staphylococcus epidermidis
atgaatattttaaacattaaagaaggtcaacactatatagctaaaatagaaagtcatagctttgtagatggtgaaggtgttcgatgcagtgtatatgtttccggatgtccttttcaatgtaaaggttgttataacgttaaagcccaaaattttaaatacggagaacctttcgaacttgaaatgcttgaagagattttagattattgtgcgccttcttatatcgaaggcttaagcatacttggtggagaaccattttgtaatttgtttatcacactccaacttgttgaagcttttagacaacgattcggtcatacaaaaacaatttgggtatggactggctttttatttgaatatttgaaacagcaagacgatgcgcgcaagtcattactcgaacatattgatgtattagttgatggtatgtttattcaacatttatatcgtccgaatcttccatataaaggatcacttaatcaacgtgtgattgatgttcaatcttccttacaaaaagaacaggtcattgaatatctaactaaatag

SEQ ID NO: 4724 - DNA, 1299 bp, Staphylococcus epidermidis
atgttattgtttatcatagaaatcataatcatgattctagcgatattattaggattaagaactgctggtgcactgggatgtggcatctttgctatagtagcgcaacttattatgatatttggattccagttacctccaggttcagcaccagtgacggcagtcttgatcatattatctattggtatagcaggtggtacgttacaagctactggtggtattgactatttagtttacattgcttcacgtgtgattgaacgctttccaaaatcaattatatttatagcaccaatgattgtttttgtctttgtttttggaattggtactgcaaatatagctctttcacttgaacctatcatagctaaaactgcacaaaaagcacgaattcagcctaaacgcgcattaactgcttcggtactaaccgccaatttagccctactttgtagcccggcagcttctgctacagcttatattatctcagtattagcagggtatgaaatatcgatgggcaagtatttaagtattgttttacctacagctttaattagtatgttaatgcttagtacattttgtacatttgtaggacgaaaagaacacgtgcgtgatgagtcagaacgtttagttcagatgccagaagtcgaaatcaaaaatgacttttcattaaaagtaaaaataggtgttatctcattcctattatgtgtcatgggtatattaacgtttggcatatttcctaatctcatgccacaattcaatgtgaatggagatgtagttaaagttgagatgactgaaattgttcagttctttatgtatctcagcgctacaattaatttattattaataaaaatcaatacttctgatattctgtcatcgaatattactcagtctgcaatgggagcactctttgcagttcttggcccaggttggttaggtgcaacaatatttaatgctccacataacttaaaaatattgaaaaatgatattgggtcaattattagtgaagtaccttggcttgttatcatacttgtttctgtagttgcaatgattgtcatttctcaaacagctacagcatcaattatggtaccgatagttatgagtttaggtataccccctatctattttgttgcgatggtacaaacattaaatgtgaatttcgttattccagctcaaccgacactattatttgctgtagaactagatgaaactggtagaacaagacctacgagctttatgataccaggattttttgttataacagtatccgtcattacaggatttgttattaaaaccattttaggatattaa

SEQ ID NO: 4725 - DNA, 1623 bp, Staphylococcus epidermidis
ttgaaaaaggaaaaagttatggactggacgaccttcataggcgtagtcattgtgttactttttgctgttatacctatgatggtttttccgaaagcaagtgaaataatcattaccgatatcaatagtgccatttctaattcaattggatcggtatatctctttatgggattggctatattttgttttgttttatacatagcatttggtaagtacgggaatgtcacgttaggaaaagcgactgacaaacctgaatttaataatttcacatgggcagccatgttattctgtgccggtattggttcggatattttatattggggtgttattgagtgggcattttattatcaagtacctcctaacggtgcaaaatcaatgtctgatcaagctcttcaatatgcaactcagtatggtatgtttcactggggacctatagcctgggcaatatatgtgctaccagcattgccaattggttatttagttttcgttaagaagaaacccgtctataaaattagtcaagcttgtcgaccaattttaaaaggacatacggataaattattaggaaaaatcgtagatattttatttattttcggtttgctcggtggtgctgcaacatcactcgctctaggcgtgccaatgatttcagctggtattgaacgattgactggtttagatggatctaatatgattttacgttcaatcatcttactaactattacagttattttcgcaatcagttcttacacaggtttgaaaaaaggtattcaaaaattaagtgatgttaacgtttggttatcatttttattattagcatttgtattcattgtaggtccaactgtgtttattatggaaactacagttacagggttcggtaatatgataaaagatttcttccatatggcgacatggatggaaccatttggtggcataaaaggtcgtaaagagacgaatttccctcaagattggacaatattctactggtcatggtggctcgtttatgcaccgtttattggattatttatcgcgcgtatctcaaaaggacgtacacttaaagaagttgtattaggaacaatatgctatggaacattaggttgtgtattatttttcggtatttttggtaactatgctgtatatctacaaatttctgagcaatttaatgtaataagctatttaaacaatcatggtacagaggcaacaatcatagaagtaatgcatcaactaccattctcgacaattactattatcttattcttaatatcagctttcttattcttagcaacaacattcgattctggttcatatattttagcagcagcgtcacagaaaaaagtgataggagaaccgttacgtgctaatcgtttattctgggcgtttgcgttatgtttactaccgttctctttaatgctagttggaggagaacgtgcattagaagtattgaaaacagcatcattacttgctagtgtacctttaattgttatatttacgcttatgatgatttcgttcttaattatactcggacgagatcgtatcaagttagaaagacgtgcagataagcataaagaaattgaaagacgttctctaaggatagttcaggtcaaagataaacctgaagatgataacttataa

SEQ ID NO: 4726 - DNA, 561 bp, Staphylococcus epidermidis
atggattataataacaatgacagtcaacatatcgaagaagctaaagatttagttatcaactcaattggtgaaaccatggatttgtatggtatcaaccgtagtgtaggcaacttgtatggcattatggtttttgaaggaagtatgacacttgatgaaatgcgacagcaactgcaaatgagtaaacctagtatgagtacaggtgtaaaaaaactacaagaatacgatatcgtcaaacaacaattcacgcgtggtagtcgaaagcaacattttattgcagagaaagatttcttcactttcttccgcaactttttcactaaaaaatgggaacgtgaaattgacactaatatggaagctattaaagaggcagaaaatatcatttacccaattcttgaaaagaatgatatagacgaggaagttaaaaaccaagcaataaatgtaaaagcgcagttagaccactctaaaatttattacaagtggctcgctcaattaagtgaagctttagagtcaggagaaatctttaactattttccaattccagatgaacaacatcatcatgattaa

SEQ ID NO: 4727 - DNA, 1491 bp, Staphylococcus epidermidis
atggaacttgtagataaattatcaaatcgtcaatatattgatggagaatgggttgaaagttcaaataaaaacacaagagatattataaatccttacaatcaagaaacaatcttcactgtagctgaaggaactaaagaagatgttgaaagagcaattttagctgctagaagatctttcgaagacggtgaatggtcacttgaaacaagtgaagtcagaggtaaaaaagtgagagccgttgctgataaaattaaagaaaatagagaagagttagctaaattagaaacattagacactggtaaaactttagaagaatcctatgctgatatggatgatattcataacgtgtttatgtattttgctggtttagctgataaagatggtggtgaaatgatcaattcacctattcctaatacagaaagtaaaatagttaaagaacctgtaggtgtcgttactcaaattacaccttggaactatccattacttcaagcatcttggaaaattgcgccagctttagcaacaggttgctcattagttatgaaaccaagtgaaattactccgttaacaacaattcgtgtatttgaattgatggaggaagttggtttccctaaaggaacaattaatttagtacttggtgctggatcagaagtgggcgacgtgatgtcaggtcatgaagaagtcgatttagtttcatttacaggtggtattgaaacaggaaaacacatcatgaaacaagcagctaatcacgtaaccgacgttgcattagaattaggcggcaaaaatcctaatattatttttgatgacgctgatttcgaattagctgtagaccaagcacttaatggtggatatttccacgctggtcaagtgtgttctgctggttctagaatcttagttcacaatgatattaaagataaatttgaaaaagctcttatcgatcgtgtaagcaaaatcaaattaggtaacggttttgatcaagatactgaaatgggaccagttatctcaacagcacaccgcgataaaattgaaggttatatggaagttgcgaaaaaagatggagcaacaattgctattggtggtaaacgtcctgaacgtgaagacttacaagcgggattattctttgaacctactgtaattacagattgtgatacatcaatgcgtattgttcaagaggaagtctttggaccagttgtgactgtagaaggatttgctgatgaagaagaagctattcgcttagcaaatgattcaatttacggtttagcaggtgctgtatttactaaagatattggtaaagcacaacgtgttgcgaataaattgaaacttggtacggtttggattaacgatttccatccatactttgcgcaagcgccatggggcggttacaaacaatcaggtattggtagagaattaggtaaagaaggattagaggaatatttagtaagtaaacatattcttacaaatactaatccagaactagtggattggtttagtaaataa

SEQ ID NO: 4728 - DNA, 1719 bp, Staphylococcus epidermidis
atgagaagaaaacgcgattcatacgattatgtcattattggtggtggtagtgcaggttcagttcttggtgcacgcctttcagaagataaagataaaaatgttttggtattagaagctggacgtagtgactatttctgggatttatttattcaaatgccagcagcattgatgttcccatcaggtaatcgtttttatgactgggaatatcaaactgatgaagaaccacatatgggacgtagagtagatcatgcgagaggtaaagtattaggtggctcaagttctattaacggtatgatttatcaacgaggtaacccaatggactatgaaggatgggcagaacctgaaggaatggacacatgggactttgcgcattgtctaccatacttcaaaaagttagaaacaacatatggtgcagcgccatatgataaagttagaggtcatgatggtccgatcaaattaaaacgtggaccagctactaatccattatttaaatcattctttaacgcaggtgttgaagcgggctatcataaaactgcagacgttaatggttacagacaagaaggatttggcccatttgatagccaagtacatcatggacgtcgtatgtctgcttcaagagcgtatctacgcccagcattaagacgtagaaacttagatgttgaaacacgtgcgttcgtaacaaaattaatatttgatgaaaataatagtaaaaaagtaacaggcgtgactttcaagaaaaatggtaaagaacatactgttcatgcaaacgaagtcattttatctggcggtgctttcaatacgccacaactattacaattatcaggtattggtgactcagaattcttaaaatcaaaaggtattgaaccacgtatgcatttaccaggtgttggtgagaacttcgaagatcacttagaagtatatattcaacataaatgtaaacaaccggtttcactacaacctagccttgatgttaaacgtatgccgttcatcggtttacaatggatttttgcacgtaaaggtgcagcggcgtctaaccactttgaaggtggcggcttcgtaagatcaaatgatgatgttgattatccaaacctcatgttccacttcttaccaattgctgtaagatatgatggtcaaaaagcaccagtagcacatggttatcaagtacatgtcggcccaatgtactccaactcaagaggtagtttgaaaatcaaatctaaggatccatttgaaaaaccaagtatcgtgtttaattacttatctacgaaagaagacgaaagagaatgggttgaagcaattagagtagcaagaaatatattaaaacaaaaagctatggatccgtttaatggtggcgaaatttcaccaggaccacaagttcaaacggatgaagaaattttagattgggtacgaaaagatggagaaactgcattacatccatcttgtagcgcgaaaatgggacctgcatctgacccaatggcagtagtcgatccattaactatgaaagtacatggtatggaaaatttacgtgtcgttgatgcttcagcaatgcctagaacaacaaatggtaatattcatgcacctgtattgatgttagctgagaaagcagcggatattattcgtggtagaaaaccgctcgaacctcaatatgttgactattataaacatggtattgatgatgaaaaagcaggtgcaatggaagatgatccattctatcaatattaa

SEQ ID NO: 4729 - DNA, 1176 bp, Staphylococcus epidermidis
atgaatcagactttagttcaacatctacgtgaaaaagaacaaagaatgaaagaaataagacgttacttacatgaaaacccagaattatcattcgaagaaaatgaaacatctaaatatattgcaaacttttataaagataaagattgtttagttgagacgaatgtggggcctaacggaattaaagttaccatcgcaggtaaacatccaggcaaaactatcgccattcgtgctgactttgatgcgctaccgataaaagaagaaacagacttaccttatgcttctaaaaatgagggagtcatgcatgcttgtggtcatgatgcacatactgcatacatgctaatacttggagaaacattaattgaaatgaaagatcaattgagaggtaatgtcgtaattatacatcaacctgcagaagaaatgccaccgggtggtgcgaaaggtatgatagacgacggcgtattagaaggggtggaccatgttttaggtgcacatgtgatgagcatgatggaagcaggtaaaatatactatcgtgaaggttttgttcaaacaggacgcgcttattttagacttgttgttaaaggtcagggtggtcacggctcatccccacatacatcgaatgacgctattgtagcaggtgcgcattttgtaacgaccgcacagaccattgtttcaagacgtttaaatccgtttgaaacgggtgtagtcacaataggttccttcgacgggaaagggcaattcaatgtgattaaagatacaataataatcgaaggtgatgtacgtgcattgactgatgatacaagagacaatattcagaatgagatgacacgactagtcagaggattagaagagacgttcggagtggtttgcgattttgaatttaaaaaggattatccagcactttataataatcctgaatttacttcttatgtagcaacaactttaaaaaatgctcagttggatgacataaaagcaatagatgtttgtgagccacagccaccctcagaagatttcgcgttttatgcgttagaaagaccttcaacatttatttattcgggtgcagcaccagaagaaggacctatgtaccctcaccatcatcctaagtttaatatcaatgaaacatctatgcttgtggctgcagaggcagtgggtacaattgtattagattatttgaaataa

SEQ ID NO: 4730 - DNA, 219 bp, Staphylococcus epidermidis
gtgagtttttatcattttatacaaaatttcgttggtgatgaaacacctttaggtaaactagccgcatggattaaccaagatgaagatttccctatagaagaaaccacagcgcataatatattaaactattttaatcagttaaattattttgatgacgattgtattgaaactgtaaaacgttcgctatcactatatgaacaaagtaaagtagccctataa

SEQ ID NO: 4731 - DNA, 444 bp, Staphylococcus epidermidis
atgttaattagcgatacaaataaaacttatataatagaaactcgtaattcattcacaattgaaaggaataatgatcaacaacattacgaagtattagaatcaattaacagcttatctaatgattcattttgtgtgttaaatcacttattcgtcaatgaaggtaatgaagaggtttttgagtcacggtttttaaagagaaatcaacatttgcaagatgtgtctggatttaaagcgctaagatttcttagaccggtagtcaaagggagacattacattatcatcacgctatggaacagtagacaagctttctatgattggcaaaattcaaaagcatatgcgcaaactcataaaaaacgtggaactcaaaaaggtgtcgatcatcgtatagtcaatagagatttatcctataatataagaatagagttagaaagtcttaataactaa

SEQ ID NO: 4732 - DNA, 1581 bp, Staphylococcus epidermidis
atgaataaatcaaatttactagcacctgagaaatataatattgtttcagaaatagaaaaatatgcttcagaagatcataaaaaagccattatttacaaggataacgagcatgaaaatatttctgtaagttataaagaacttatcagtaatgctaataaagtagggaatgtattcctcaatcatgggctgaaaaagggagataaagttctcatcatgatgccacgtgcaatcgttacatatgaattatatattgcagcattgaaactggggatagcgattgttccaagttcagaaatgttacgaacaaaagatttacaatatcgaattactcacggtgagattgatgcagttatttcatttgattctctaactaaagaattcgaaaacgttaaagaatatgaccaattaaagaaatttatagtagctggtcacaaagaagattgggtttcaatagaagatgaaaaagaaaaagtaagtgatgaccttaaaggcgcagatacaacacgagatgatttggcgattctttcttatacatcaggtacaacaggtaatccaaaagcagtaacgcattcacatggatgggggtatgcccatttgcaaatggcaccaaaacattggttatgcatacaagagaatgatcttgtatgggcaactgcagcaccagggtggcaaaagtgggtgtggagtccattcttatctgttttagggatgggagcaacagcatttgtctataacggtcgtttccaccctgaaacatatctcgagttacttcaaaattatcaaatcaatgttctatgttgtacaccaacagaatatcgtatgatggctaaacttagtcatttagaacagtataatttagaacatttacacagtgcggtgtctgcgggtgaacctttaaatcgagaagttgttgaacaatttaaacgtcattttaatattactgttcgagatggatatggacaaacggaaagtacattgttgattggatttctaaaagatactgaaccacgtatgggttcaatgggtaaaggtatacctggtagttttgttactgtcattgatgatgatggtaaagaggttggcccaaatgtaaaaggtaatattgccgtgcctttagacttaccagccttatttaaaggttattttaaagatgaagcacgcacaaaagcagcttcaacaggtgattattatgttactggagaccaagctcatattgataatgatggttatttctggttcgaaggtcgccgtgacgatattattattagttcaggatataccattggaccttttgaagtagaagatgcattaacaaatcatgcagctgttaaagaatgtgctgttgtagcaagtccgcatgacattcgtggaaatattgttaaagcatttatcatcttgcaagatgattatgaagcaagtgatgagttaatccaagaattacaagtattctgtaaaaatgaagtagcaccgtataaatatccaagagcaattgaatttgttgaaaatctaccaaaaacaaattcaggtaagatacgtcgcgttgaattacgtgatgcagaaattaaaaaatataaacaatag

SEQ ID NO: 4733 - DNA, 2628 bp, Staphylococcus epidermidis
atgacacaattcgtttatgcatttaatgaaggaaatatagctatgaaagacttacttggtggtaaaggtgccaatctttcagagatgaagagactcggactaccagtacctgatggttttacaattacgactgaagcttgtattacctatttaaaacaaaatgaagaactacctacagaagtaaagacacaattaattgatcatttagcagctttttctaaacgaacaggaaagtccttttcttctgatgacaacttgttattagtatcagtacgtagtggtgcaaaaatttccatgccaggaatgatggatacatttcttaacttgggacttaatgatgataatgtgaaaaaacttgctgacaaaactaatgatgcacgttttgcatatgattgttaccgtcgtttactacaaatgtttggtgaagttgtttatggcattccaatgactgcttttgatacatactttaatgattttaaaacgaagcatcgttatcaaaatgatgctgaaattccggcagaaggactacaaactatatgtgaaagatataaagaaatttatgtagaagaggcatataaaccttttccacaagaaccgttaaagcaattagaagaagcaattgaagcagtatttaaatcttgggacaatgatcgtgcacgtgtatatagagatttaaatgatattccacatgatattggtacagctgtaaatattcaagaaatggtatttggtaatagtggtgcaaatagtggtacgggcgtagcatttacaagaaatccagttaccggagaaaatcatttattcggggagtacttacttaatgctcaaggtgaagatgttgttgcaggtattcgtacccctaaggatattgacactttaaaacaacaaatgccagacgtgcatcaagagttcgttgatgtaaccaaacaacttgaaaaacattacaaagatatgcaagatatagaatttacaattgaaaatgggaaactttatttattacaaacacgtaacggaaagcgtactgctaaagcagcaataaaaattgctgtggatttagttcacgagcaattaattacacgtgaagaagcagtatcaaaagtagaagtaaaatcaatagaccaattattacatcctaattttaatgaagagtcattaaagcaagcgacagtggtttctaaaatgggcttaccagctagtcccggtgcagcaacaggaaaagtagtcttctctgctgaggaagcaaaacttcaagctgaaaatggtaataaagtagtgttaatgcgaccggaaacatcacctgaagatattgaggggatgatagcaagtgaagcaatcgtaacaactcatggtggtatgacatcacacgctgctgttgtagcaagaggaatgggtaaatgttgtgtgacaggatgttcgaatgtagagatagatacagtgaacaaaacagtatattatcctgaaggtgaattacatgaaggggatatcgtttctgtagatggttcagctggtgatttatatttaggagcaattgaaacagtcaatgctgaacatagtgaagagttcgatcaatttatgacttggtctgaagagattgcaagactgcaagttagaatgaatgctgaaacaccacaagatataaaagctggatataattttggctctaaaggaataggtttagttcgtactgagcacatgttctttggccctgaacgtttaatagaaatgcgccgttttatcttagcttcaaatcatgacgaacgtgtacaagctttagaaaaaattaaaacataccaaatagaagattttgaaacaatttttagattatctcaagatagacctacgattgttcgtttacttgatccaccgttacatgagttcttaccatcatctgaagaagatataaacaatgtttctcaacagctgaatgtatcttctgagttcttacgcaagcgaatcgttgacttaaatgaggtcaatccaatgcttggtcatcgtggttgtcgtttggctgtgacttatccagagttatatgagatgcaagttgaagctatcattgaaagtgttattaagcttcaaaaagaggggataacgtgcctgccggaaattatgattcctctcgtgtcaacagtagaagaatttacaactttaaaagaacgattagttaatacaattacacatttagaaaaagaatctcaacaagatatacaatatatgataggtactatgattgaaacgcctagagcatgcttgattgcgaatgaccttgcgaaacattgtgatttcttcagttttggtactaatgatttaacacaattgacatttggtttctctagagatgatgcaggaaaattcataaatgtgtatactgaaaataacattttacagcttgacccattccaaactttagatagagaaggtgtaggacgactaattcaattagccgttgaacaagctaaaaataccaatccagagattaaaattggtgtatgtggtgagcttggtggcgatgcaaaatcaattcgtcaatttaaccaatggggaattgattatgtttcatgttcaccatttagagttccgggtgcaattttagctacagctcagagtcaagcggaggaaagcgagcgataa

SEQ ID NO: 4734 - DNA, 819 bp, Staphylococcus epidermidis
gtgaaggataataatgaagtattaaagttatttatagtttcagattcaataggagaaacagcgcaacggatgattcatgcaacgttgacacagtttccagatttaactcaagtagaaattaagaaatttccgtatattaaggacgaacaagaatttttaaatgtcttacaattagctaaagaacagaatgcaattgttgcaacaacattagtgagtgagtcatttaatgcattaggtcatcagtttgcaaatgaacatcaaattccctatgtagattacatgtctgagttaattagtataattaaaaaacatacacacgctaaaccattaatggaaagtggtgcgttgcgtaagcttaatgatgagtattttaagcgtatagaagcaattgagtattcagtgaaatatgatgatggtaagcattttacagatattggagaagcggatgctttaatagtaggtgtatcacgtacctctaaaacgccattaagtatgtacttagctaataaaggatataagattgcaaatattcctttggtccctgaagtggctattccagataatgtatttcaacaaaagaatttaaaggtatttggattaacagcaagtcccaattatatcgcaaatatacgacgtaatcgtgcagaaacattaggactatcttcagaatctaattacaatagtttagagcgtatcaaaaaagaattatcttatgctgaagaagtttttagaaaattaaatgcaacggtaattaatacagaatataaatcgatagaggaatcggcattttatattgaaaagtttttagctaaacgttaa

SEQ ID NO: 4735 - DNA, 1500 bp, Staphylococcus epidermidis
atggctatgtctgacaaaaaagacgtcgtgttaatcggtgccggtgtactaagtactacatttggttctatgttgaaaacgattgcacctgattgggacattcatttatatgaacgtctagatcgtcctggtattgaaagttcaaatgaacgtaacaatgcaggaacagggcatgcagctttatgtgaattgaactatactgtacaacaacctgatggttcaattgatattgaaaaagctaaagaaattaatgaacaatttgaaatttctaaacaattctgggggcatttagttaaatcaggagaaattcaaaatcctaaagaatttattaatccattacctcatattagttttgttcgtggtaaaaataacgttaaattcttaaaagatcgttatgaagcgatgaagcaattccctatgttcgataatatcgaatatactgaagatattgaagaaatgagaaaatggattccattaatgatgaaaggccgtgaagataagggctacatggcagcgagtaaaatagacgaaggcactgacgtaaactacggtgaattaactcgtaaaatggctcaaaatcttaaaaactcaccaaacgttgaagtgcaatacaaacatgaagttgttgattttgaacgtttgtctaatggtaaatggtcagttaaaattaaaaatctaaataatggacaagtattcgaacatcaaactgattatgtgtttatcggtgctggtggtggcgcaattccactattacaaaaaactggcattccagaaagtaaacatttaggtggattcccaatcagtggacaatttattgcttgtacaaatccacaagttattgaacaacacgatgctaaagtttatggtaaagaaccacctggtacaccaccaatgacggtacctcacttagatacacgttacattgatggtgaaagaacattattatttgggccatttgcaaacgtggggcctaaattcctaaaacatggttctaacttggatttattcaaatcaattaaaccatataacattacgactttacttgcttctgcagttaaaaacttaccattaattaagtattcatttgaccaagtcattatgacaaaagaaggttgtatgaaccatttacgtacgttctatcctgaagcacgtgatgaagattggcaagtttacacagctggtaaacgtgtacaagttattaaagatactgaagagaatggtaaaggatttatccaatttggtactgaagtggttaattctgaagaccactcagttattgcattactaggcgaatcaccaggagcatcaacttcagtatcagtagcactagaagttttagagaaaaacttccctgaatacgcgaaagactgggaacctaaaatcaagaaaatgattccttcatatggtgaatcacttattgatgatgttcaattaatgagaaaaatacgtaaacaaacatctaaagatcttgaattaggattctataataaagcaaaataa

SEQ ID NO: 4736 - DNA, 924 bp, Staphylococcus epidermidis
atgaaaaaatttttgggaattttattaattgtgatgtcaattgctcttgtgggatgttcaaatagcaatgattcagatcaatcttctaatgaaaagtcatcatcaaaaagctctgagaaaaaaacggacgtggcgactgaatatacaaaagaggatgaatataaagaactagaaaaagaagctaaggatcttaaacaaaagccagttcttaatgaaattgatgcacttattacagaaaaaggttttacaaataaaacgggattgcaaggctgggaagactataaaaaattaatggataaggtaacacttgcagattataaatacacaaaagaatctaaaggatcatccattgaagaagttaataagttctttaaagataaaaaaggtgtagagattaaacgaatgaaaagtaaggaaaaaataattaagcatattaattatatgtatgtagatccagatggtaaaaaaacaggtaaaaataagcaacctatgtcctacgctcaaatacttgcaacatttaaagaaggtaaattagtagctacaaatattcaacctggattttttgctttagataaaaagaaaatggttaaagctaaagacttagaagaagttaagacattggaagatttaacgcgtttgaaaaatcctaaagcgacatcatatggtattttacagacgaaatataaagggaaaccatacactcaagtttcaatattaggcagtgattctgatgaagagaatgatatttcctcagccatattagcttattatctattttcaccaacggaattagatagtgatgataatcataaatacgttgaagttgcatcagcgccattcttaagtgctcaaaacgatttttcatcttatcaacttggtgtatttaaaaaaattatcgaaagtagtatgtcgttcgatgaataa

SEQ ID NO: 4737 - DNA, 891 bp, Staphylococcus epidermidis
atgaataaagaacaattagaaaaaatgactcatggtaaaggattcattgctgcattagaccaaagtggtggtagtacacctaaagcacttaaagaatatggtgtgaatgaagaccaatacagtaatgaagacgaaatgttccaacttgttcacgatatgcgtacacgcgttgtaacttcaccttcattttcacctgataaaattttaggtgcgattttattcgaacaaactatggatcgcgaagttgaaggtaaatacactggagactatttagcggataaaggcgttgttcctttcttaaaagtcgacaaaggtcttgctgaagagaaaaatggcgtgcaattaatgaaaccaattgatgatttagatgaaactttagatcgtgcaaatgaacgtcatatcttcggtactaaaatgcgttctaacatccttgaacttaatgaacaaggaatcaaagatgttgttgaacaacaatttgaattcgctaaaaaaatcatcgctaaaggtttagtacctattatcgaaccagaagttaatattaacgctaaagataaatctgaaattgagaaagttttaaaagctgaaatcaaaaaaggtttagattcattaaacgatgatcaattagttatgttaaaattaactattcctactgaagctaacttatataaagaattagctgaccaccctaatgttgtacgtgtagtagtattatcaggtggttacagccgagatgaagctaacaaattgttaaaagataacgatgaattaattgcaagcttctcacgtgcattagcaagtgacttacgtgctagccaatcacaagaagaattcgataaagcattaggcgatgctgtagattcaatctatgatgcgtcagtaaataaaaactaa

SEQ ID NO: 4738 - DNA, 1362 bp, Staphylococcus epidermidis
atgaaatatattgtggtaggtacatctcattcaggatatgaagtaatccaaacattgcttaaagaagatgaaaatgctgatattcaagtttttgaaagtgcagatcaaccgtcctttttatcttgtggtattcaaagttatcttgaagacatctcatcatcactagatgatttacattacgcatccgttgactcttataaggcacaaggtgtaaacattcatacgaatagcacagtcacagatttagatactgacaataagactgttacagttgaacaccaaggtcaaacatcaacttattcttatgataaattgttcctaagtcccggcggtaaacctgttacacctccagtcgatggaattgaaaaatataaacatgtattatttatgcgtggacgcgattgggcaaatcaaattaaagaacgcatgaaagatgccaaaaaggctgttgtagtcggaggtggctatataggtattgaagctgctgaagcttttgctaaagcaggcatagatactacaatcgtagatgtcgctgattgtatattaaacacttacttagataaagagtttacagacgtattagaaacaaatgcacagcaacacggtcttcattttaaaggtggcgaaacagtacaatcactttcaggaaatcaaaatggcgaagtaactactgtagttaccgacaaaaatgaatatgacgcagatactgtcttatttgctgtaggtgtcgaaccggctaccgagtggctaaaagataaaatagatttaggtaaaaaaggaattataaacattaatcaccaacaacaaacatctgctaaagatgtctatgcaggtggcgatgcgacattagttccttttgcaccagtatctgaggatcgttatattgcattagcaacaaattcaagacgtcaaggcgttgtcgcagcaaaaaacatgttgggtaaagaaatgacaatgccacgcgtttctggtacttcaggtttacaattatttgattataaatttggacagactggcattcatggtacagaaatcgataattatgatggcaatttaggtcaaacatacgtagaagaattgattcgtcctcaatttatgcaagatgatacgaaaattcatatgaaaattatttatgataaagacactcaccgtatacttggtggtcaagtcatgtcagaagaagatattactgcttctattaatacaatttcagtagtaatatctgctggtttcacacttgaacaactcgctgtccaagatttcttcttccaacctgattatgatagaccatggcattaccttaatgttttagctcaacaagcattgggtgatacatttggtagcgataagatgttgttctaa

SEQ ID NO: 4739 - DNA, 153 bp, Staphylococcus epidermidis
atgactcaacttactttaccaaaggatacttcagttcttatccccacaaatgattttgtagaaacaattcctaagactgaattcagacatcatcgtggtgcaacatcataccatcccaaaatgatattcaaagaactatgtcattttacgtaa

SEQ ID NO: 4740 - DNA, 591 bp, Staphylococcus epidermidis
gtgaaaaagatttctctaattgcaacgactgtattaacaggattattattatttccaagtgtcaatgacacaacgacacatgcagccgaagtaacatctcatgatgcacaagctgtagcaattcaagctatgaaaaatagtggtggcaatccggacttacaaaatttcaaaaaagttaaggataaaggggattatttcacaattgatataaataataaatctggtgctggtgtcggtacttataaagtatacaaaaatggtgtggtgctatataaaagtggatattatggagaatatagtcaactcaattcaccacaatgctatgttgcacaagatattgctacaacatcttcacaagtaaaacaacactctactcgacagacacaagcagtggatagcacacgtgaactcaattcatattacgtaggtcaagttcaatcttctgacttaccacaacaaagctcatctgatacgctaccgaatactggtatgaaagataaaaatttcaatacaaatggtataataagtctatttttactcactgctggtttcattgcactttaccatcaacctttacgtaaaatgacatag

SEQ ID NO: 4741 - DNA, 879 bp, Staphylococcus epidermidis
ttgaagaaattagcagtgatatgtgcgtttacagtattaatattagccggttgtggtcttggagatagtgataataaaggaagctcaacgataaatgatgatcaacaatcaggggataaaaataacagagattcaaaatcaagtacaagtagaaatcaaataggaggtaatcagcaagacacacaacaagatacccattcgaataaatactatgctcaagtttggttaactgctttagatagctatagaggtgatagtgaccttccttttgacgatttagaaattgtacatcaaaatatttctaataaagttttagatccctatcacccagacgaatcagctaaactacctgaaggaacagaattgttaacagcaagtgttactgcagcaggttcagtttattataaaaataatggagatggcacaattacaatatataatgtaccatcacattttcaagggagttggcgtgacgctgattactctaaaagagaatctcagcgcattatagatgatgcacgtacagttaagttatacaacgcaagtgaaagtgaaatcaataagataagtcagatgatgaggactgaattttcagttggtgataatttaaaagatgaagacgatacttctgaatcggaaaatcaatcaagcagttctgatgaagtaacggtgacacgaagtaatgttatcgatatagttgaagactacgaagggcatcaattagatacagacacatatatttacaaagaaccagaaaaagatagtgatggtagttgggggttctcatttacagataaagaaggtcatttagaaggatcttatattatcgataaagatggagaagtaacgaagtatgatgaagatggagagccagaataa

SEQ ID NO: 4742 - DNA, 429 bp, Staphylococcus epidermidis
atgaatgggttaaaaatattttatcatttattatacgcaaccacgattagcgtgctattacttattttaactataatggatgtgttactacaaaacacacacttaactcagttattactcaatattgattttttaatcaaccctgatgaagtgccaacaattatcgaagtactgattcatttaagtatcggaatattgatttatatcacctttttaattatctatcattattcaaaattcttgtatcgtctagcatacttacctttagtattaatatttgctttgatgtatccacttctcgtttttcttgcgcaactctcaatttttttctttagttggaacgaatttgcatggtggttagttgcacatctttttttcattattttaatggcgagttgtctacctatcatttcgaaaaaaactttatga

SEQ ID NO: 4743 - DNA, 117 bp, Staphylococcus epidermidis
ttgattactatcctattagtattgatttattttaaaacgatagcagttgatagttttatagcttcaaatgtagatagctatattaaaaagagtcattattgggagggaactcaatga

SEQ ID NO: 4744 - DNA, 1338 bp, Staphylococcus epidermidis
atgagtaaagttagtcatttgatagatgaagatgaacgttattttgcacattctggacggattaaatattatcctctagttattgatcatggttatggagccacgttaatcgatatagagggtaagtcttatattgatttattagcaagtgcaagttcacaaaatgtgggtcacgctccgaagccagtagttgaagcaattaagaaccaaactgagaaattcattcattatacaccggcatatatgtatcatgaaccgttagtgcgattatcaaaaaaattatgtgacattgctcctggaaattatgagaagagagttactttcggattaagtggctctgatgctaatgatgggattataaagtttgcacgtgcgtatacaggacgtccatacatcataagttttaccaatgcataccatggttcaacatttggttcattatcaatgtcttcaattagtttgaatatgcgtaagcattatggaccattacttaatggattttaccatataccttttcccgataagtatagggggatgtttgatcaagctaaacctaacacggttgaggaatatttagcgcctttaaaagaaatgtttgcaaaatacgtccctgcggaggaagtggcatgtattgtggttgaaacaattcaaggtgacggtggcttacttgaacccgtaccaggttattttgaagcattacaagagctttgccaagctcacaatattcttattgcagttgatgatatccaacaaggattaggtcgtacgggaaagtggagttccgtagatcattatcattttactccagatttaatgacatttggaaagtcattagctggaggtttaccaatgtctgcgattgtaggtcgtaaagaaatcatggaaagtcttgaagcacctgcacatttatttacaactggtgcaaatcctgtaagttgtgaggcagccttagcaacgataaagatgattgaagatgaagatttactaaacgcttcatggaaaaaagggagttacgttagaaaaagaatagactcatggatagaacgttaccaatatgtaggtgatgttcgaggtattggattatcaattggaatagacatagtatcaaataaaattgagaaaactagagattctgaagcagcattaaagatatgtaattactgctttgaaaatggtgtgattatcatagcagttgcgggtaatgttttaagatttcaaccaccacttgtgattacctataagcaacttgataaagcattagatacaatagaacaggcgcttgaaaagttggaaagaggagaattaaatcaatatgacattagtggtcaaggttggtaa

SEQ ID NO: 4745 - DNA, 1452 bp, Staphylococcus epidermidis
atgggaagtttttttaatcggatgactcggaaagagaatcctactatttatcaaaataaagatgggcatcttaaacgcacgctacgtgtacgcgactttcttgcactaggtgttggtacaattgtttctacatctatcttcactttaccaggtgttgtcgcggctgagcatgccggacctgctgtttcgttgtcattcttattagctgctattgtggcaggtcttgtagcctttacttatgcagaaatggcatctacaatgccttttgcaggatcagcttattcatggattaatgtactttttggtgaattattcggatgggttgccggttgggcgcttttagcagaatactttattgctgttgctttcgttgcttccggcttttctgctaacttaagaggtcttattgcaccattaggtatttctttacctaaatcattatctaatccatttggaagtaacggtggtgtcattgatatcattgctgctgtagtgattattttaactgcattactattatcacgcggaatgaacgaagctgctcgtatggaaaatatattggttattctaaaggtgttagccatcattttatttgtgattgtagggctcactgcgataaatttcagtaactatataccatttattccagaacataaggttactgatactggtgactttggaggttggcaaggtatttatgctggagtttcaatgattttcttagcttatattggttttgactctattgctgctaattcagctgaagcgattaatccacagaagacaatgcctagaggaatcttaggatcactcatagtagctattgtattgtttgttgccgtagcacttgttcttgttggcatgttccactactctcaatatgctgataatgcagagccagtaggttgggcattacgagaaagtggtcatggtattattgctgcaattgttcaagcaatttctgttatcggtatgttcactgcattaattggtatgatgcttgcaggttcacgtctattatattcatttggacgagatggtttactcccttcttggttaagtcaattaaatcacaaacatttacctaatcgagcacttgtcttacttacaatcattggtgtagttatcggatcaatgttcccgtttgctttcttagcacaattgatttccgcaggtacccttgttgcattcatgtttgtgtcactagccatgtatcgattaagaaaacgcgaagggaaagatttacctaagccagaatttaaattacctttatatcctattttgcctgcaattacatttatattagtattgctagtattttggggattaagttttgaagctaaattgtatacactgatatggtttattgtaggtataattatttatttaatttatggaattagacattccaaaaagaatgatgaagaagcgtatcaagtacctagagaataa

SEQ ID NO: 4746 - DNA, 882 bp, Staphylococcus epidermidis
atggaaattaaacaaattaaatatttcgtagaagttgtacgacaaggtggtatgacgcaagcatctgaacacttatacattgcgcagtcaacaatcagcaaagcgattaaaaatattgaaaatgaatatgatattacattgtttgaccggtcacaaaaacaaataaaactaacagatataggtcaaacattttatgataatagtttagaatttttagctttattcgagaaattatctttagaaatgaatgacattgtgaacgttcaaaaaggtcatattaaaataggattatcaccaatgatgaatgttcaaatgtttacaaatgcattgaatcagtttcacagactctatcctaatgtgacatatgaagtgattgagggtggtggtaaaattgttgagaacttaacatctaatgatgatgtggatattggtattactacactacctgtagatcacactgaatttcattcaacttctttgtataacgaggaattactattagtagtaagtaatgaccaccacttagcacatttaaataaagtagacatggcagatttgaaagatgaagagtttgttttatttcatgatgattattatttaaaagatcaaattatagagaattgtaaaaggttaggctattaccctaaaactgttgctaatatttctcaaattagctttatcgctaacatgattcaacaaggaattggaataagtatcgttccagaaagtttagttaatttaatggggaataacgtaacgtccattcaattagagaatgttgaattatcatggcatcttggagtgatatggcgaaaagatgcttatctcaatcatgtaactcgcaaatggatcgaatttatttctgagatgaaaccaacatag

SEQ ID NO: 4747 - DNA, 117 bp, Staphylococcus epidermidis
ttggaatttgatggcttagttttaaaatgtgccgatgttaaacctttatattataaattcttgaaaaagtatgggacggtagatattttaatcaattacgattttttgatgctttga

SEQ ID NO: 4748 - DNA, 951 bp, Staphylococcus epidermidis
atgaaaaaatttgggaaaaaagttgttctagtaggagacggttccgtaggttcaagttatgcatttgctatggtgactcaaggaattgcagatgaatttgtaattattgatattgcaaaagataaagtggaagcagacgttaaagatttaaaccatggtgcactttacagttcttcaccagtgactgtaaaagctggagaatatgaagattgtaaagatgcagatttagttgttattacagcaggtgcacctcaaaaaccgggtgaaactcgtttacaacttgttgagaaaaatactaaaatcatgaaaagtatcgtaactagtgtcatggatagtggctttgatggtttcttcttaattgctgcaaacccagttgatattttaacacgttatgttaaagaagttacaggtttaccagctgaacgtgttattggttctggtacagtgcttgatagtgcaagattcagatatttaataagtaaagaattaggtgttactgcaagtagtgttcacgctagcattataggtgaacatggtgactctgaacttgcagtttggtctcaagcaaacgttggaggtatttcagtgtatgatacattgaaagaagaaactggtagcgatgctaaagcgaatgaaatttatattaatacaagagatgctgcttacgatatcattcaagctaaaggatctacgtattatggtatagctctagcacttttacgtatttctaaagctttattaaataatgaaaatagtattttgacagtttctagtcaacttaatggtcaatatggatttaaagatgtttatcttggcttaccaacacttatcaatcaaaatggtgcagttaaaatttatgaaacaccattaaatgataacgaactacaattactagaaaaatcagtgaaaactttagaagacacttatgattctataaaacatttagtttaa

SEQ ID NO: 4749 - DNA, 1665 bp, Staphylococcus epidermidis
atggcggaaaaacaatattctgcagcacaaatggtaattgatactttaaaaaataatggagttgagtatgtatttggtattccaggtgcaaaaatcgactacttatttaatgcactagaggatgacgatcttgaattagtcgttacgcgtcatgaacaaaatgcagcgatgattgcacaaggtattggtcgtttaacaggaaaaccaggtgtggctattactacaagtggcccaggggtaagtaacttaactactggtttattaactgcaacttctgaaggtgaccctgtattagctatcggtggtcaagttaaaagaaatgacttattacgtttaacacatcaaagtattgataatgcatcattacttagatcctcaactaaatatagtgcagaagtacaagatccagaatcactatcagaggttattacgaatgcaatgcgtacagccacttcaggtaaaaatggagcgagctttatcagtattccacaagatgttatttcatcacctgtcaaagctgatgcaatttcattatgtcaaaaaccacatcttggtgtaccttcagaacaagaaatcaatgaagtgattgaggctattaaaaattctaaattcccagtattattagctggaatgagaagttcaagccaagctgaaacagaagctattcgccgtttagttcaaaaaacaaacttacctgttgttgaaacattccaaggtgccggtgtaattagtcgcgaattagaaaatcacttcttcggtcgtgttggtttatttagaaaccaagtcggtgacgaattacttagaaaaagtgatttagttatcacaatcggttatgaccctattgaatatgaagcaagtaactggaataaagaattagatactaaaatcatcaatgtcgacgaagaacatgctgaaatcacaaattacatgcaaccagttaaagagttaatcggaaacattgcaggtacaattgatatgatttctgaacatgtaaatgaaccatttattaatcaaaatcatttagatgaacttgaaaaattaagaggcgaaatcatagaagcaactggaattaaagcaactcacaaagaaggtgtgatgcacccagttgaaatcattgaaacaatgcaaaaagttttaactgatgatactactgtaactgtagatgtgggaagccattacatttggatggctcgtaaatacagaagttacaatcctagacatttactattcagtaacggtatgcaaactttaggtgttgcacttccatgggctatttcagctgcacttgtacgtccaaatacacaagttgtttctgtagctggagatggtggtttcctattctcaggacaagaattagaaactgcagtacgtaaaaacttaaatatcattcaattaatttggaatgatggtcgttataacatggttgaattccaagaagaaatgaaatataaacgctctgcaggtgtagaatttggaccagttgattatgtaaaatatgcagaatcatttggcgctaaaggattacgtgtcactaatcaagaagaattagaggcggcacttaaagagggttacgaaactgatggtccagtattaattgatatcccagttaattatgcagataatgttaaattatctacaaacatgttaccaaatgctttaaattaa

SEQ ID NO: 4750 - DNA, 705 bp, Staphylococcus epidermidis
atgactaatgtattgtatcaacacggaacattaggaactttaatggcaggtttattagaaggaactgcttcaattaatgacttattagaacatggtgatttaggtattgctacgcttacaggttctgatggagaagtaatttttgttgatggtaaagcttatcatgcaaatgaacataaagagtttatagaattgacaggcgacgaaatgacaccatatgcaacagttacaaaattcaaagcagactcaagttttaaaacttctaataaaaatcaagaagaagtatttgatgaagttaaaaaacaaatgacaagtgaaaatatgttctcagcagttaaaatttcaggaacgtttaaaaaaatgcatgtacgtatgatgcctggtcaagaacctccatacacacgtttaattgattcagctcgtagacaacctgaagaaacacgtgaaaatatcaaaggttcaatcgtaggtttcttcactccagaattattccatggtattggttctgctggtttccatattcactttgcaaatgatgatcgtgatttcggtggtcatattttagactttgaagtggatgatgtgactgttgaaatacaaaactttgaaacatttgaacaacacttcccagtagatgctaaatcatttactgatgcagatattgactataaagatatagctgatgaaatcagagaagctgaataa

SEQ ID NO: 4751 - DNA, 870 bp, Staphylococcus epidermidis
atgacaattgccattataggttcaggtgcagtgggtacaacgttagctgttgaattaaaaaaagttctaccagatacggaactcatcggccggcaaaataaattaatgacctatttcccagaaaatacttcaaatggatgtcatattaaagtgacttcatttaatcatattaatcatacttttgatgtcattatcatagctgttaaaacacatcaattggatgacgtcattaaacaattacctaaaatcactcatgataattcgctcattatcttagcacaaaatggctatggacagcttaataaacttccatatcaacatgtctttcaagcagtcgtctatattagcgggcaaaaagtcaacaacaaggttcaacatttcagagattaccaactatgtattcaagatagcacactaactcgtcaattcaagcaaatggttcgtccttccaaaatagaggtggttttacaagaaaatattgaaaaaagcatttggtataaattattagtgaatttaggtataaataccatcactgctattggacatcaaccagctaaaattttaaaatctcctcatattgagtcgatatgtcgtcgtatattagttgatggtcttaaagttgctagagctgaacaaattaactttgaagatcatatcattgatgatattttaaatatctataatggttatccagacgaaatgggaacaagtatgtattacgatgtcattaacaagcatcctcttgaagtcgaggccatacagggttatatatataaatgtgcaaaaaaacatcatttagaaacaccctatctagatatggcttatacatttttatacgcttatcacctcgaatacacccaaccagattga

SEQ ID NO: 4752 - DNA, 819 bp, Staphylococcus epidermidis
ttgaaaactttaaatcatttaaacaaaatgaaggcatcacagcaaaagatttctatggttacagcttatgattatcctagtgctaagcaagcacaacaagctgaaattgacatgattttagtaggagattctttaggaatgacagtgttaggatatgatagtactgttcaagtaacattgaacgatatgattcatcatggtaaggctgttaaaagaggtgctccggatacatttatagttgttgatatgcctatagggactgttggtttaagtgatgaagaagatttaaaaaatgcacttaagctttatcaaaacacgaatgctaacgctgtcaaagtagaaggggctcatcttacatcatttattcaaaaagcaactaaaatgggtatacctgttgtttctcacttaggtcttacacctcaaagtgtaggtgtaatggggtataaacttcaaggggatacaaaggcagccgctatgcaacttatcaaagatgctaaagctatggaaactgctggtgcagtagtactggttttagaagccatacctagtgatttagctcgagagattagtcagcaactcactattccagttataggtataggggcaggtaaagatactgacggacaagtattagtttatcatgatatgttaaattatggtgttgatcgacacgctaagtttgttaaacaatttgcagacttttcaagcggtattgatggattaaggcaatataatgaagaggttaaagacggggcgtttccttctgaaaagcatacttataaaaaacgtattatggatgaggtagagcaacatgactaa

SEQ ID NO: 4753 - DNA, 861 bp, Staphylococcus epidermidis
atgactaaagttattacaaaaattaatgaaatgcaatctattgttaaacaatatcaacgtgaaggtaaaacaataggattcgttccgactatgggagctttacatgatggtcatttaaccatgatgaagcaatctgtaaacgaaaatgatctcacggttattagtatatttgtgaatcccttgcagtttggaccaaatgaggattttgatgcttatccacgtcaactcgatgatgatgtggatgcagtaaaaaagttaaacgtggactatgttttccatccaagtgtagatgaaatgtatccagaagaattaggtgttcatctcaaagttggacacttggcacaagtattagagggagcacaaagacctggacacttcgaaggtgttgtgaccgtggtcaacaaattatttaatattgtacaaccagattatgcctatttcgggaaaaaggatgcgcaacaattagctattgttgaaaaaatggttaaagactttaatcttcctgtacacgttattggcattgatatcgtaagagaaaaagatggtttagccaaaagctctagaaatatttacttgacctctgaagaacgaagagaggcaaaacatttatatcaaagtttacgcttagcaaagaatttgtatgaagcgggtgaacgagatagcaatgagattataagtcaaatcgctgcgtatttaaacaaaaatataagtggacatattgatgatttgggtatttatagttatccaaatcttatacaacaatcagagattcatggacgaatattcatatcattggcagttaaattttctaaagcaagattgatagataatataattattggagatgactatattgattag

SEQ ID NO: 4754 - DNA, 387 bp, Staphylococcus epidermidis
ttgattagaacatttatgaactcaaaaatccatagggctagagttacagaatctaatttaaattacgttggaagtataacaatagatgccaatatattagatgcggttgatattttacccaatgaaaaggttgctattgttaataataataatggtgctcgatttgaaacatatgtcattgctggagaacgtggtagtggaaagatgtgtttaaatggcgcggcttcaagactagttgaagttggagacgtcattattattatgacatatgcacaattaaatgaagatgaaatggtaaatcactcaccaaaagtagctgtgttaaatgaaaataatgaaattatagaaatgataaatgagaaagaaaatacgatatcaaatgtataa

SEQ ID NO: 4755 - DNA, 1011 bp, Staphylococcus epidermidis
atgcattgtccgaattgcggtaatccaatagaagatgatgatttattctgtggtgaatgtgggcataaaataagtcgacatccacagtcagtcagaaatgcagaaagtgaaataacaaaagctgaaaagaatgatgaagaacaaaacataacatcaaataataaagaaaacaacgtagcgactcatcaaaatgttgattcaacatctcatgatgagactagatcaaatgaaaatgacgtagcagattcaacattacaatctaagcagtcacataatgatatccaacaatcaaatctctctacataccaccaaagacctcaacatcgagaaattcctcaaaatcaacacaatcacaatcaacaacaaagtcaaataggtcaacaagctaaacaagtaacaaatgaaagtaaaggtttctttaaaagtgcatttactgcacctgataaaatcattcaaactaatcatgttttcagttttaaattattattatcattattaataatcggttttattgtattagcaattttactcgcttccgtaataccagttgagattggtattttcggtactacaagaggtagtttggtaacgagtatcattttcggtattattctatttttggttgtcatagtaggtgcaatatttggacttacacgtttagtagttagacaacctattagctttaaaaaagtattatcagactatgtgttaattaatagtgtttcgttagcaattttaattatttctgtaattttaacattagcagaatcatacagctttggcggaagtatagcattattgtcattattattatttattgcttctggtatttatctaattgcgaagtatagcacaggtaatcaaacaagaatatccagcttttatggtgtgattatttatatcattattttgttcttatttattcgtatttttggtgaggcatttttccatcaaatatttggtgattttatagaagaactaggggatttatttgaaggaggaacttattaa

SEQ ID NO: 4756 - DNA, 1335 bp, Staphylococcus epidermidis
atgaaatattgcagtcattgtggtcaacctcttcgagaaggtgtaaaggtatgtacaaattgtggtacatctgtgagaaatgatggaactaattataaatattcagaacaacgctattctcatcatcaaccacgttccaataagagtaataaaaaaacttggttgattattactatagtgttagctattatcattgctttggtagtaatctttactatagctaaaaatcaaatgtcaccagaaaaacaagcgactcacattgcacatgctatcaaaaaagacgatgctaaatcgttatctaagcaattaacatcaaacaatcatcgtttaagtgaagaagaagcacgtgcgtacttaaagtatattaaagcagaaaatgatttaaagcatgttgctgacaaagttgaagaaaacaccaaagatattaaaaataatcactataacaatttatctgtagatgcaaatggtaataatattttaaatatatctaaagacggaaaaaaatatgttttttttgataactatcaatttaatgttcctcaaaaaacaattacgctcgtttcaagtgatagtggtgaaattacttatgaatttaacggggataaacatcatatttctgtagaagaagatgacgataaagaattaggaacatttcctatcggtgattataatttaaaagcatcaaaagacatggaaggtaaaaattttaaaggcgctattacaattgatatgagtgaaagtgatagtattgcatatgaatcgtttaaacaaaaacgttttaatgttgatactgaaggcggatatatattagataatgtaaaaatatatgctaatggtaaagaaataggagatggtttttcatccgaaacatatggtccttatgatccggatgaagaagttatcgttcacgctgaaggttcatacgaaggaaaaacttttaaatcaaattcggtcaatgtagcaagtgcaagcgaaaaagatggtggtgtgacagatgtcacagtcaaattcgatgaagaagctattgatcagtatgtcgataaaaaatcagatgaaaaatacgatgatgattcagatgacgagtcagataacgattcaagtagtggtgaagtaacgcgtgaaaatgtaattgataaagtagagtcgtatgaaggacatacactagatactgatacgtatacgtataaagaacctgaaaaaaccggtgatggtaaatggggcttttcattcttagataaagatggagatttagctggatcgtacacggtagacattgacgacggttatgttatagaatatgacgaagatggtgaagaagttggatctggttactaa

SEQ ID NO: 4757 - DNA, 717 bp, Staphylococcus epidermidis
gtgattgaagcaaatcaaattttagctaaaatgaaaaatcaaaaaatcaactatgataaagtattaagaaagataatttctcaatgggaacgtgatggagaacgtcctaaaatcttacttcatagttgttgtgcaccttgtagtacatatacgttagagtttttaacacaatatgcggatatagcgatttattttgcgaatcctaatatacatcccaaaagtgaatatttaagacgtgctaaagttcaagaacaatttgtaaatgattttaataataaaacaggtgcaaatgtaaagtatattgaagccgaatatgaaccgcataaatttatgaaaatggcaaaagataaaggtctaactgaagagccggaaggtggactaaggtgtacggcttgtttcgagatgcgattagaaattgttgcaaaagctgctttagaacatggttacgattattttggtagtgcaatcacactctctccaaagaaaaatgcccaattaatcaatgaactaggtatggatgtacaaaatatatataatgtaaaatatttaccaagtgattttaaaaagaataaagggtatgaacgttctatcgaaatgtgtaatgattataatatttttagacaatgttattgtggctgtgtatttgcagcgatgaagcaaggtatagattttaaacaaataaataaagatgctcaagcatttttacaacaattttaa

SEQ ID NO: 4758 - DNA, 270 bp, Staphylococcus epidermidis
atggataaaataaacaaagaagataccgatactaaaaaagatagtaataacaattataaacatcaaaatgaccatatagatagacaaggtttaaatggttatcaaaaaactgatttggatcttgagatagaacgagaactacaggaaatggtggaaaatggagaatctgataaagaaacaaaaagtaagcatttcaaaatcttatctttcgtttcaatgattgtcattgcagtgatagccatcatacgattcatacaaaaaacgatataa

SEQ ID NO: 4759 - DNA, 1065 bp, Staphylococcus epidermidis
atgtacaaattagttaagcctttattattcaaattagatcctgaacgagcacatggtttgaccatcaatgcgttgaagtgtgttcaaaaatgttcacccattttacctatcgttaataagttatttacttataacaatccaatattaacgcaacacattcacggtatttcttttgataatcctatcgggttagctgcaggttttgataaatcttgtgaagttccaaaagcacttgaaaacattggcttcggtgcaattgaactcggcggtataacacctaagcctcaaccaggtaatccaaaaccacgcatgtatcgtttactagaagatgatgcactcatcaatcgtatgggattcaataataagggtatgaataaagcattaagtaatttacgtaatcattcatgctcaataccagtaggattaaatgttggtgtgaataaaacaacttcctatgaaaatcgctatcaagattacattaaagtgattgatacatttaaaaatgatgtctcattctttacagtgaatattagctccccaaatacagaaaatctccaaaactttcacgacgaaaatgaattttcgatgttatgtgatgctttaaatacatttaaagctaagaacaatattaatgtacctatctttttaaagttaacgtctgatatggaattagatggttttaaaaaaatcttgccttcaattacagatacattcgatggggttatgttggcaaatacgacacggcaacgtgatggattaaattcaaaaaataaaatacaagaaggtggtttgagtggcagaccattattcgaaagaaacttacaactagttaaatatgcctatcaacaaacacaaggtaatttcttaattattggaactggtggtatattcagttctgaagatgctatcaaaatgttaagaaacggtgcgtcattactgcaaatatactcttcattagtcattgaaggaccaggtttgactaagaaaatgaataaagaaatcgcgcattatttaactcgacatggttatgcaaatgtaagtgatattattggtttagatgcataa

SEQ ID NO: 4760 - DNA, 858 bp, Staphylococcus epidermidis
atgaatgaacaatggatgagcgcattgccgcttgacaatgtgaaagacatttctccagtaagtggtggagatgtaaatgaagcatttaaagtcactacagttgaagaagatactttttttctactcgttcaacgtcaacgatcagaagccttttatgccgcagaaattgcaggactaaatgaatttgaaaatgcaggtataacagctccaagagtaattgcaagtggagagataaatggagatgcatatttattattaagttttcttgaagaaggtagtcaagggagtcaaagagaacttgctcgattggttgctagaatgcatagccaataccaacaagataataaatttggattccgtttaccgcatgaaggcgcagatatttcatttgataattcatggactgagacatggaaagagatttttatagatcgtagaatggatcacttacaagatgagttattacgtgtaggattgtggaaacaagaagataaaaagatgtatgaacgtgtaagaaaagttattgttgacgagctatcaaatcatactagtaaaccttctctgttacatggtgatttatggggaggtaactatatgttcttaacaaatggccaacctgctttgtttgatcctgcaccactctacggcgatagagagtttgatataggaatcactacagtgtttggtggatttacacaagagttttatgaagaatataatcaacagctaccattagccaaaggatcacaaaaacgtatagaattttatagattatatttacttatgatacatttacttaaatttggaggtatgtatgctgatagtgtacaacgctctatgaaagtcattttagaataa

SEQ ID NO: 4761 - DNA, 1380 bp, Staphylococcus epidermidis
atggcagataaactgcaaagagaattaagcaatagacatatacaattaattgcgattggcggggctattggaacaggtttatttcttggtgctggccaatctattcatttagcaggaccatctatcttattaacatacataatagtaggttttgttctctttatgttcatgagagctatgggagaattactgttatccaatttaggatttaaatcgtttggagatattgcccatcatcatattggttctatggcaggttttatggtgggctggacatattggctaacatggattatttcaggaatggcagaagtgactgctgttgccaagtatgtttccttctggtatccaacaattccaaactggttaacagctgcagcgacgattttagttttagttgctttaaatctatttagtgctaaattatttggagaattagaattttggctttctattattaaagttttgactattttagctttgatagctgttggtgttgttatgattgtatttggaatgaagacaagctatggccctgcaactgtgacgaatatatggaaagacggaggctttttccctaatggtgcacaaggtttcttcatgtcattccaaatggcaattttctcatttattggtattgagttgattggaataactgcaggggagactaaagatcctcacaaaacaattcctcaagcaattaataatgtaccgtttagaatattattattttatgtaggatcattggcagttatcatgtctgttgtaccatggcaacaattaaatcctgctgacagtccatacgttaaaatgtttggattagttggaatcccttttgcagcaggtattattaactttgttgtactcacagctgcagcgtcttcttgtaatagtggtatatttgctaatagccgtacgatgtttggattagctggaagaaagcagggtccagcattcttacataaaaccaataagcacggcgtaccacattatgctattttagtgacatgtggcttattaagtatttcagtcgtgttaaatgcaatttttaaagatgcgactaaagtgtttgtacaaattacaacattttcaactgttttaaatattatgatttggacaattattatgattgcgtatctaggttatttaagacatgaaccgaaacagcataaagagagtaactataaaatgtggggcggaaaatacatggcttactgtattttagggttctttgcatttatttttattatattattgattaatagtgcaacgcgttatgccgtactttctgcacccgtatggtttgttatcatgttagtgatgtatcaaaaatataaaaaagaatctcgcaaagctaaaattgaaactgaggaagagtaa

SEQ ID NO: 4762 - DNA, 1059 bp, Staphylococcus epidermidis
atgtcgacgataaaaaacatcgatggaccaaaggattttatttttagagtgttatcaggggtagcaattggaatagtagccggactcgttccaaatgcgattttgggagaaatttttaaatactttatgcaatatcatcctattttcaaaactttattaggggtcgttcaagccatccaatttacagtgccagcgcttattggagcattgatagctatgaagttcaatatgacaccattagcaatagctgtagtagcaagtgcctcatatgttggtagtggtgcagctcaatttaaacaaggtacatgggtaattgcgggaattggtgatttaattaatacgatgctaactgcatccatagccgtgttacttattttattaatagaagaacgtgttggtagtatggctttaattgtttttccgacagttgttggtggtttagcagctacaattggcgtatttactttaccatatgtaaggttaattacaacgggaattggtaacatgattaatagctttactaaactacaaccagtgcttatgagtatgttaatctctatggtgtttagttttataatcatatcaccattgtcaactgttgccatagctattgctattggattatcaggtattgctgcaggatctgcttcaataggtatagcagcaacagaagctgtattattgattggtaccagcaaagttaatcatgtaggtattcctttatcaatatttttcggtggggtgaaaatgatgatgccaaatatggttaaataccctgtcattatgattccgattttcttgacagcggcaatatctggtattgcttctggaattattggtatttcaggaacaaaagaatcagccggatttggttttatcggaatggttggacctattaatgcctttaaatttatgcatgttgattctgcatggctaagtttattacttattgtcatagccttttttgttgtgccgtttctagttgcatggattttagatttaatacttagaagatttattcatttgtatgaaaatgatatttttaaatttatgggataa

SEQ ID NO: 4763 - DNA, 1425 bp, Staphylococcus epidermidis
atgtcagggaaactagaagaattacaattgaaagtagctcgattaagtcgacgtactcatgaattaggtattccaattatggtattatttgaggggattcctgcttcagggaagacacgtttatcaaatgaattactattgcacctagatgccaaatattcgcaatttatagctactaaatcgccagagtcaaatgatttacgttaccaatttttacaaaaatattggaatacgttaccacaaaagggtaatataaatatttattttagaagttggtattcacactttttagattataaagaaaacaaaattaagcatgatcaatataaaaattatgatgttttagtcaatcaaatttatcattttgaatcgatgttaaagaatgataactatgaaattataaagtttttcatagaaataaatgaagaaaaacgcaatgaacatattcaacagacaaaagataaccccttaactagatggaaagttcaagaatatgaaaatgttatacctcaagaaagttatctaaatcaaatgcatcaattcatcaacaaggataaagattggaaagtcatcgattacacagagcgcgagcatgcttttgaaaaaatgtacttacatttaatagatagacttgagcaagctataaaaaaagttgaacaacaaacaactaaagtcaacggtaagttcacaccaagcttcacgacttctttatttgataatcatcttgaaaaagtagacaaaaaaacgtataaaaatctcattgttgaattgcaacagagaatgagagaaatccaatttgctttatatgaaagaaagattcctcttgttttagttttcgaaggtatggatgctgccggtaaaggtggcaatattaaacgtattagagaaaaattagatccaacaggatatgaagtaaatggtattagtgcgcctacggatgtcgaacttaatcatcattatttgtggagatttgctaaaaagatgccaaaatcaggtcatatagaaatatttgatcgtagttggtatggtcgtgtactagttgaacgtgtagaaggttttgcgagccagaatgaatggcaacgtgcatctgatgaaattaatcaatttgaaaagatgtggacagatgaaggtacaatcattttaaaattcttcttgagcttagataaggatgagcagcttaaacgttttaaagaccgtgaaaataatcctgataaacaatggaagattactgaagaagattggcgtaatagagaaaaatgggatgaatatttagaagcaagtcatgatatgattgaatctacaaacacttcatacgccccttggtatattgttccggcagatcataaaaaaacgggtcggattgaagtacttaaaacaattattaggaaatgtgaagaagtactatggggagttaaaacgtattaa

SEQ ID NO: 4764 - DNA, 708 bp, Staphylococcus epidermidis
atgaaaaaaacagttatcgcttctacattagcagtatctttaggaattgcaggttatggtttatcaggacatgaagcacacgcttcagaaactacaaacgttgataaagcacacttagtagatttagcacaacataaccctgaagaattaaatgctaaaccagttcaagctggtgcttacgatattcatttcgtagacaatggataccaatacaacttcacttcaaatggttcagaatggtcatggagctacactgtagctggttcagatgctgattacacagaatcatcatctaaccaagaagtaagtgcaaatacacaatctagtaacacaaatgtacaagctgtttcagctccaacttcttcagaaagtcgtagctacagcacatcaactacttcatactcagcaccaagccataactacagctctcacagtagttcagtaagattatcaaatggtaatactgctggttcagtaggttcatatgctgctgctcaaatggctgcacgtactggtgtatctgcttcaacatgggaacacattattgctagagaatcaaatggtcaattacatgcacgtaatgcttcaggtgcagctggattattccaaactatgccaggttggggttcaactggttcagtaaatgatcaaatcaatgcagcttataaagcatataaagcacaaggtttatctgcttggggtatgtaa

SEQ ID NO: 4765 - DNA, 1809 bp, Staphylococcus epidermidis
atgaatgagaacaattatagacgtctcaacaaaacttataaaccgcactatttacctggtttagatggtttgagagctatagcagtcattgggataatcatttatcatttaaacacgaaatggttatctggtggattccttggagtagatactttttttgtcatttctggttatctcataactagtttattattaagtgagtactatagaaataattctattaatttagttaatttttggcttagaagatttaaacgattaataccagcaatgatgtttgttgtcacggttgttttaatatatacattactatttaaacctgaattaattattagtataaaacatgatgctatagcagcacttttctatgtttcgaactggtggtatatcatacaagacgtagactattttaatcaatttgctgtagcgccattaaagcatttatggtcattagctattgaagaacaattctatctattctttccatttatacttttagggttattaaagtttttcaaaaagagaactacaatgattattctattaatcatctctttattatcattaactgcaatgataacgatacatatgtatacaggtaacaattctagagtttatttcggaactgacacacgtttacaaacgttgttattaggatgcttactagcatttatttggccaccgttttcttttagaaaggatatatctaaaggtgctaaagcaagtataagtgcaataggcatagtcggaatggcagtgctcatttatttgtttgtagtggttagtgatcaagataaatggatatatagtggaggattttatgccatctcgttcttgacactgtttgtcattgcaagcgttgtgcatccatcaagtgtcttaaagaaaatactaagtttcaagttatttatttatataggcaagagatcgtatagtttatatttatggcactatcctatcattatttttatgaatagttatttcgtacaaggtcagattccttggtttgtatatatttgtgaagtgatacttatgtttgtcatggctgaagtatcttataaatttattgaaacgcctattagaaaaaatggattcaaagcattcacagtgataccgaaaaatttaacaagattttcaagaacgatcattgtattaattttgcttgttccttctgcattcatagtatttggtgcctatgatagtttgggtaaagagcatgataaacaacaagctgcgaaacaaaaatcttttaaaacgaaccagaaagcaaaacctaaaaagccagatgaaaataatcaagataagtcttcacaacaacattttaatcctaaagaagcgtctccattattgctgggagattcagtaatggtagatatcggtcaagtctttagtgaaaaagtgccacatgctaatattgatggaaaagttggacgacagttaattgagggtaaagatttaatcaatcaaaagtaccaagattatactaaaaaaggtcagagtgttgtgatagaacttggtacgaacggtgagtttacgaaagatcaaatgaatgaattaattgattctttaggtgaagcagatatttacttaattaaggtaagagtaccgagagactacgagtcgactaataataaaattatggaacaagtagccaagaaacataaaaatgttcatattgttgattggtataaagcatctgagggtcattctgagtattttgcatatgatggtattcacttggaatatagtggtgttaaggcattatctaatgaaatcattaagaaaatgaaagaagttaatgaaaaataa

SEQ ID NO: 4766 - DNA, 363 bp, Staphylococcus epidermidis; identical to SEQ ID NO: 2456

SEQ ID NO: 4767 - DNA, 171 bp, Staphylococcus epidermidis
atgttatcttttaatcaaaatagaaaccacagtcttgaacaatctttaaaagaaggttatgcacaaatggccgatttaaacctctccctagcaacagaagctttcccgatagagtgtgaagcttgtgattgcaatgaatcacatttaatatctaattcaaagaatgaatga

SEQ ID NO: 4768 - DNA, 1149 bp, Staphylococcus epidermidis
atgtcagagaagttttatagagcaacatatttaaatgtgaatttagatgcaattttagcaaattatcaaaatttcaatcaattacacgctaataagactgtcatttcagttattaaagcaaatggatatggattaggaagtgtgaaaatagcacaacatttaatgcgtcatggtgcaacattttttgcggtggctacacttgatgaagcaatagagttaagaatgcatggagttgatgctaaattattagttttaggcgttgttccaacagaagacattgagaaggctatacagcatcgtgttgcattaacagtaccttctaaagcatggttgaaggaaactatcaagcaaattcctgatgataaccaaaaaaatttatggctacatgtaaaattagatactggtatgggccgaattggaatgaaagatatagatgaatataaagaagtggttgatttaattaataaaagagatcatttagtttttgaaggggttttcacacattttgcgagtgctgatgaacctggaagttctatgaatgaacaatatactttgttcaaagagatggttaatcaagttgagaaaccaatttatattcattgtcaaaattctgctggatcactactcatggatggtcaattttgtaatgcaataagattaggaatctctctttatggatactatccttcagaatatgttaaagataatgtgaaagttcatttaagaccgagtgcgcagttagtatcagaaaccgttcaagtcaaaacgcttaaagttggtgaaactgttagttatggacgtacatttattgctgatgaagaaatgacaattgcaattttacctattgggtatgccgacggatatctaagatcgatgcaaggtgcattcgtcaatgttaacgggagtcaatgtgaagtcattggacgcatttgtatggaccaaatgatagttaaggttccttctcatgtaaaaacgggtgaaaaagtaatacttatggataatcacgttgattcaccacaatcagctgaagccgtagcaaataaacaaggtacaattaactacgaagtattatgtaatttatcaagacgtcttccaagaatatattattatgataataatgaagaggttactaacgaattgttaaaatag

SEQ ID NO: 4769 - DNA, 354 bp, Staphylococcus epidermidis
gtgatttatggaataggtatagatttaatagaaattgaacgaattaaaaatcttcagaatcaaacaaaatttattgaaagaatacttactatagaggaaagggacaaattaaatcaatatacacacgagcaacgtagattagaatttttagctggacgctttacagtgaaagaagcatttagtaaggccttaggtacagggttagggaaatcagtatcgtttcaggacattaactgttacaacgactctctaggtaaaccatgtattgactatcctggtttttatacacatgtgagtattacacatacggagaattatgctatgagtcaagttattcttgaaaaaaacgaatga

SEQ ID NO: 4770 - DNA, 510 bp, Staphylococcus epidermidis
atgaagtcttataaatatatgcaccaaaatggtattaaagtaatgagaattagtggtgctttttggacgtttttactagtgatagcattgtctattttaatattgcttaatgaattaaaattccattttattaatactaaaaatttaataattggagcaataattttaactacaatagtttgtattttatttatgattatagtgccttggtttaagtttaaacatcttagatattttttagatgataaagaaatacatattagagaaggtatcatttttatagatgttcacgtcatcccttactttagaatacaaaatatagatatagttgagggatttatcatgagaaagttccaactcgcttcgctgtcattatcaactgctgggggaaattctgaaatagcattgatagatattcaagaagcacaaagattgaaaaaacaaattaaacaacaaaaatcaataacgacaaatgtaacttcattagaaaaattaaacgatgatatataa

SEQ ID NO: 4771 - DNA, 1506 bp, Staphylococcus epidermidis
atgtatagtccgcaaaagctacatccaatttcttatattgatggcttgattagtgtgattaaatcaaatttcattgtaattatcatctttttatttaatataaaagattttaaatatgatgatttttcgtcttatattattccaggtataatgactttgatattttctatcggtttcattcataatattattaaggtttataatacacgatattggattgaagaggatcattttatattaactactggtgtttttaataaggaacgaaaagaactaaatattagtcgcatacaatctgcagatacgtctcaaggattgattaatcagattgttggcggcgttgaactcattattaaaacaccaagtgatggcatagaattagggacaatttcaaaaaagcaaagtgaagttattgaacaagaattgcgatctattcaagaacgcatgaataaccaggtaaatcaagaagctaaagagttaaatgatgagaatcatactcagacatatcaacaacatgccaaaccccaatatgcaatatttaaaatgccttttaaacaactattatttatgtctatgacaagtggagctatagcacttgcttttgtgacactatctcctattattggcagtctctcaagtgttattccatgggataaatttggtgaagaaatatcttctgtatttaaaacgatatatttcattgtcatttttattgtcatactagtgttattattaagttatataatcggaactatcatgtacttaataaagttttatggatatcaagttattcaagataatcatcaacttaaaattcaatatggattatttacgaagaaaaatatcactgtaccaactgaccgactgcaaggtgtacttgaacatcaatcttttatacgaaaattatttggttatacatctatacatttctatattacaagtgatatagatactactgaaggggaacccactgataatgatggaagaattatgattttaccgtttattccaagaaaagaggcatataaagtgattagacctttggttcctgagatgacatttaatcatgctaaaattggcatgcctttaaaaggatttcatcgtcactttctaattccttccatatgtattattggtataggcattattggatggtatatgtggtctttatggtctttaatcatagctttattaccaatcttattattttttgtttacgctatactttatacacgttttagtggttttgcttttagcgaatcagagcttgttgtccaaaaagcgtctatattaaatattaagagattttatgttaaaaaagaaaaagttttaggaatgactattagccaacatccctttcttgaaagaagtcaactcgcaaattttcaatttgttattgctaagggtagtagtcagcaaaacattggtttgaagtttagtgaagtagataatgttcttaaactcaaaaattggtacatgaaaggtgatactcatgaagtcttataa

SEQ ID NO: 4772 - DNA, 480 bp, Staphylococcus epidermidis
atgaaaaatgatagtacgtttcatagaagcccaatccaagcgctaaagtactattacataactagttgcataggtttatttattttgcttgttatacttagtttacttttgtattttagctatttaaatcattggtggccttttacatcctacatctttcttgggctaggtttgttatctattttaaacacttgtatatctccactaattaaatatagatatcattattataaaattcacgaagattttgtcatattaaaaagattatttatttttaagaaagaagaattaagtaaaatagagagaatacaatttatcgatattggaactaatccattatcaaaaaaattaaatcttaattccataactttatttactgcaggtcatacaatctcatttccaataatatctgagaaagaagcacaaaatattcaacaacaaatactattgagattgagaggtgcaaatgacgatgtatag

SEQ ID NO: 4773 - DNA, 1530 bp, Staphylococcus epidermidis
ttgcaaaattttaaagaactagggatttcggataaaacggttcaaacactagaagcaatgggatttaaagaaccgacacctatccaaaaagatagcatcccttatgcgttagaaggagatgacatccttggacaagcccaaactggtactgggaaaacaggggcgtttggtatacctttaattgagaaagttgtaggccaacagggtgttcaatcattaattcttgcgccaacgagagagcttgctatgcaagtagctgagcaattaagagagttcagtaaaggtcaaaaagtacaagttgttacagtctttggtggtatgcctattgaaagacagattaaagcattaaaaagaggccctcaaattgtagtaggtacgccgggaagagttattgatcatcttaatcgtcgtacacttaaaactcaaggaattcacacgcttattttagatgaagcagatgaaatgatgaatatgggattcatcgatgatatgagatttattatggataaaattccagctgaacaacgtcaaactatgctattttcagctacgatgccaaaagcaatccaagaattggtacagcagtttatgaaagctcctaaaataattaagacaatgaataatgaaatgtcagatcctcaaattgatgaatattatacaatagttaaagaattagagaaatttgatacatttacaaactttttagatgttcatcagcctgaattggcgattgtctttggtcgtactaagcgtcgcgtagatgaattaacaagcgcgctattatctaaaggatacaaagcagaaggtttacatggtgatattacccaagcaaaacgtttagaagtattgaagaaatttaagaacgatcaaatagatattttagttgctacagatgtggctgcacgtggtcttgatatttctggtgtgagtcatgtttataattttgatatccctcaagatacagaaagttatactcaccgtattggacgtactggtcgagcaggaaaagaaggtattgcagttacttttgtaaatccaattgagatggattatattcgacaaattgaagatgtcaataatcgtcgaatgaaagcattaagacctccacatcgtaaagaggtgcttaaagcgcgtgaagatgatattaaagatagagttcaaaactggatgtcaagagaaaatgagccgcgtttacaaagaatatcaagtgaattacttaaagaatatgatagtacagaattagtagcctctttacttcaagaacttgtagaagctaatgatgaagtggaagtacaattaacttttgaaaaaccattagcacgtaaaaatcgcagtagtaaaggcggttctagaagaagtaatcataaacgtggtaatggtaagtttgataataaaaatagacgatcaaaagggtctaaaggtcaatcaagcaaaaagaaaaaccaaaagaaatttgaccgtagagataagcaacaaaaaagtggtaatcaatcactaaaaggtcgcacatttgcagatcatcaaaaataa

SEQ ID NO: 4774 - DNA, 1356 bp, Staphylococcus epidermidis
atgataaacgtaacattagagcaaattaaaaactggatagattgtgaaattgatgaaaaacatttaaaaaaaacaataaatggcgtttcaattgattcacgaaaaatcaatgaaggggcgttatttataccttttaaaggtgagaatgttgatggccatcgttttatcacacaagctttgaacgatggtgctggagctgtttttagtgaaaaagagaataaacattctgaagggaaccaaggtcctattatttgggtagaagatactttaatagccttacagcaattggcaaaagcatatctaaatcatgtaaatcctaaggtgatagcggttactggttctaatggaaaaacaacaacaaaagacatgattgaaagtgtattatcaactgaatttaaagttaagaaaacacaaggaaattataataatgaaattggaatgccgttgactttactagaacttgatgaagacacagaaatttctattctagaaatggggatgtcaggttttcatcaaatagagttgttatctcatatcgcacaacctgatatagcggtcatcacaaacattggcgaatcacatatgcaagatttaggatcgcgagaaggcattgcaaaagctaaatttgaaataacaactggtctcaaaacaaatggtatatttatttatgacggagatgaacctttattaaaacctcatgttaatcaagttaaaaatgcgaaattaataagcattgggttaaattcagacagtacatatacttgtcatatgaacgatgtaaaaaacgaaggtattcattttactatcaatcaaaaagaacattatcatttaccaattttgggcacgcataatatgaaaaatgctgctattgcaattgctattggacatgaattaggcctaaatgaaacaataattcaaaataatattcacaacgtgcaattaaccgctatgagaatggaaagacatgaatcatcaaacaatgtaacagtaattaatgacgcatataatgcaagtccaacgagtatgaaagcagccattgatacattaagtgttatgaaaggtcgaaaaattttaatattagcagatgtacttgaattaggacctaatagtcaattgatgcacaaacaagttggtgaatatttgaaagataaaaatattgatgttttatatacatttggtaaagaagctagttatatctatgatagtggtaaagtttttgttaaagaagcaaaatactttgataataaagaccagttaattcagacgttaatatctcaagttaaacctgaggataaagtcttagttaaaggttcacgaggtatgaagcttgaggaagttgttgacgcattgttgtaa

SEQ ID NO: 4775 - DNA, 1074 bp, Staphylococcus epidermidis
atgacaaaagaaaatatttgtatcgtttttggaggtaaaagtgcagaacacgatgtttcaattttaactgcacaaaatgttttaaacgcaattgataaagaacgatatcaagttgatatcatttatataacaaacgatggtgaatggaagaaaaaagataatattacacaagaaataaaaaatactgatgaactcgtcattaacgatgtagagactggagaaatctcacagttactcagtaaaggtagtttaggaaaatcatatgatgcagtattcccattattgcatggtccaaatggagaagatggaactatccaaggtctttttgaagtacttgatataccatatgtaggtaatggtgtgttagctgcttcaagctcaatggataaacttgtgatgaaacaattatttgagcatagaggtttacctcaattaccttatattagctttttaagaagtgagtatgaaaaatatgaaaataatatcattaaattagttaatgataagttaacatatccggtatttgtaaaacctgctaatctcggttcaagtgttggtataagtaaatgtaacaatgaagaagaattaaaatctgggataactgaagcattccaatttgatcgtaaacttgtcattgaacaagggattaatgctagagagatcgaagtagctgtcttaggtaacgattatcctgaaacgacatggcctggtgaggttgttaaggatgtagcgttttatgattataaatcaaagtataaagacggtaagattagattagatattccagcagatttagatcaagatgttcaaatgacattaagaaacatggcattagaggcctttaaagctactgattgttcgggattagttcgtgcagatttctttgttactgatgataatcaaatttatatcaatgaaacaaatgccatgccaggatttactgcatatagtatgtatccaaacttatggaaaaatatgggcttatcttaccctgatttaattgctaaattgattgatttggctaaagaacgttatgaagataaaaagaaaaataaatataaaattgattattag

SEQ ID NO: 4776 - DNA, 1212 bp, Staphylococcus epidermidis
atgaattattcttctcgtcaacaacctaaacgtaactggttacgtaaagtagactggatactcgtactagttatatcactattagcactaacaagtgttattttaatcagttccgctatgggtggcggacaatatagtgcaaatttcagtattagacaaattatttattatattttcggagctattattgcatttttaattatgataatttcaccgaaaaaaattaaaaataatacttatattttatacagtatattttgcgttctattaatagggttacttattttacctgaaacttcaatcaccccaattattaatggtgctaaaagttggtacagtttcggtcctataagcatccaaccttccgaattcatgaaaattatacttatacttgctttggctaaaacgatatctaaacataaccaatttacatttaataagtcttttcagtctgatttaatgttattttttaaaattttaggtgtatccattatacctatggcattaattctattgcaaaatgacctaggtactactttggtgttatgtgcaattatagctggcgtcatgttagtaagtggaataacatggaggatattagcccctctttttattgttgcatttgtaagtggttctagtattatattagctatcatttataaaccatccttaatagaaaacctattaggaataaaaatgtatcaaatgggacgtatcaattcttggttagatccctattcatacagtagtggagatggatatcacttaacagaatctttaaaagctattggttcaggtcaattattaggtaaaggttataaccatggcgaagtttatattcctgagaatcataccgactttattttttcagtgattggagaagaaatgggctttataggttcagtattattgatattacttttcttattcttaatatttcaccttatacggttagctagtaaaattgatagtcagtttaacaaagtatttatcataggatatgtatcgttgattgtttttcacgtgttacaaaatatcggcatgacggttcaattattaccgattacaggtataccacttccgtttattagttacggtggaagttctttatggagtttaatgactggtataggagtagttctttcaatttattatcatgaaccccaaagatatgaaataaccacattatctaaaaaatctaatacaatttaa

SEQ ID NO: 4777 - DNA, 138 bp, Staphylococcus epidermidis; identical to SEQ ID NO: 2445

SEQ ID NO: 4778 - DNA, 210 bp, Staphylococcus epidermidis
atgaaattgaaaaaaggattgataaatgtttcaggtattaaaacaactgaacaagctaaacagctcaaagatcatttatctaagatgataggcatcaatagtgtggatatcgattaccaaatgaatgagattcgagtagaatttgacactcctgcaaatttaaataacattgaaaaagaaatttacgattacggatttcgtattttataa

SEQ ID NO: 4779 - DNA, 294 bp, Staphylococcus epidermidis; identical to SEQ ID NO: 2443

SEQ ID NO: 4780 - DNA, 1485 bp, Staphylococcus epidermidis
atgatagaagtctttactatggcacttcatcaatctaatattataattaatattttattagttagtgcctttttattaaatttagtttttgcattcattattattttcatggagaggcgtacagcaaattctatatgggcgtggttattggttttagtttttctacctttagtaggattcatattgtatttattattaggtcgccaaatacagagagaacatatatttaaactcgccaaagaggataaagttggtcttgaaatgattgttgacgagcaattagaggcattgaaaaagcaagacttttctaagggtaatcatcaaattgttaaatttaaagaaatggtacaaatgttactttataataatgctgcttttttaacaactgataatgatctaacaatttatacagatggtcatcagaagttcgatgatttaattaatgatattagacacgcacaatcatatattcacatccaatactacattattcatagtgataatctcggaaagcaattgttacatgaattagaaaaaaaagctgaagaaggtatagaagttaaaatgctatacgatgatatgggctcaagagatttacgaaagaaagatctaaaaaagtttcgtcaaaaaggcggtcacgctgaatctttctttccatcaaaattaccacttattaatttaagaatgaataatagaaaccacagaaaaatagtagtcattgacggtacgtttggatatgttggtggttttaatgtaggagatgaatatataggtaaatctaagaaatttggttattggagggacacacacttacgtattaaaggtgacgcggtaaatgcccttcaacttagattcatcttagattggaactcacaatcaactcgtgacaatttaacttatgaatctcgatattttcctgatgttgactctggtggtacgataggcatacaaattgcttcaagtgggcctgatgaagattgggaacaaattaaatatggttatttaaaaatgatttcatcagccaaagaatctatatatattcaatcaccatacttcattcccgatcaagcttttttagattcgattaaaattgcagcgcttggtggtgtggatgttaacatcatggttcctaacaaacgtgatcatccctttgtttattgggctacgcttaaaaacgtagcgtctttacttgaagctggcgttaatgtctatcattatgataatggttttctacattcaaaaacacttgtcattgatgatgaggtagcaagtgtaggaactgccaatatggataatcgaagctttacattaaactttgaggtcaatgcttttatttatgatgaaggcgtagcacgatcattaaaacaagctttcattaatgatatgaaattatctaacaagctcacttctgaagaatatgctaaacgaaatctgctagttaaattcaaagaagggatttcacaactactttctccaattttataa

SEQ ID NO: 4781 - DNA, 654 bp, Staphylococcus epidermidis; identical to SEQ ID NO: 2441

SEQ ID NO: 4782 - DNA, 873 bp, Staphylococcus epidermidis; identical to SEQ ID NO: 2440

SEQ ID NO: 4783 - DNA, 642 bp, Staphylococcus epidermidis; identical to SEQ ID NO: 2439

SEQ ID NO: 4784 - DNA, 789 bp, Staphylococcus epidermidis; identical to SEQ ID NO: 2438

SEQ ID NO: 4785 - DNA, 822 bp, Staphylococcus epidermidis; identical to SEQ ID NO: 2437

SEQ ID NO: 4786 - DNA, 690 bp, Staphylococcus epidermidis; identical to SEQ ID NO: 2436

SEQ ID NO: 4787 - DNA, 660 bp, Staphylococcus epidermidis; identical to SEQ ID NO: 2435

SEQ ID NO: 4788 - DNA, 396 bp, Staphylococcus epidermidis; identical to SEQ ID NO: 2434

SEQ ID NO: 4789 - DNA, 441 bp, Staphylococcus epidermidis; identical to SEQ ID NO: 2433

SEQ ID NO: 4790 - DNA, 438 bp, Staphylococcus epidermidis; identical to SEQ ID NO: 2432

SEQ ID NO: 4791 - DNA, 1266 bp, Staphylococcus epidermidis
atggataaaatagtaataaatggtggaaatcgtttaacaggtgaagttaatgttgaaggagctaaaaatgctgtattacctgtacttacagcgtcattacttgcttctgaaggacacagtaaactagttaatgtcccagagttaagcgatgttgaaacaatcaataatgtattatctacactcaatgcaaatgtagagtatgataaagataaaaatgcagttaaagttgatgcaactaaaactttaaatgaagaagccccttatgaatatgtgagtaaaatgcgagcaagcatcttggttatgggaccactacttgctcgactagggcatgctattgttgctttgccaggaggatgtgcgattggaacacgtcctatcgagcagcacattaaaggatttgaagctttaggtgcagacattcatttagaaaatggaaatatttatgcaaatgctaaagatggattaaagggagcacatattcatttagattttccgagtgtaggtgcaactcaaaatattattatggcagcgtccttggcatcaggaaaatctatcattgagaatgtcgctaaagaacctgaaattgttgatttagctaattatattaatgaaatgggcggtaaaattacaggtgcaggtactgataccattacgatacatggtgttgaaaaactttacggtgttgaacatgcaattataccagatagaattgaagctggaacgttacttatcgcaggtgcaataactcgtggtgacatatttgtacgtggtgcaattaaagaacatatggctagtttaatatataagcttgaagagatgggggtagatcttgaatattatgaagaaggtataagagttacagcaaatggagatttaaatccagtagatgtaaaaactttaccacacccaggtttcccaactgatatgcaatctcaaatgatggctttattattaacagcaaatggacacaaagtgattactgagactgtttttgaaaatagatttatgcacgttgcagaatttagaagaatgaatgcgaatataagtgttgaaggaagaagtgctaaaattgaaggaaaaagccatttacaaggtgctcaagttaaagcaacagatttaagagctgctgcagccttaatcttagctggtttagttgcagagggaactacgcaagtgactgagttaaagcatctagatagaggatacgtcaatttacatggaaaactaaaaagtctaggtgcaaacatagaacgtgtaaatcgataa

SEQ ID NO: 4792 - DNA, 405 bp, Staphylococcus epidermidis
atgaatacacttagactaaatattgtcactcctaatggttctgtctatgaacgtgaagacgttgagatggctgtcttacaaacaacagctggtgaaatggggattatgtatggtcacattccaactgttgctgcattaaaaacaagtcatgtgaaagttaattttcacaacggaaatgaatttattgcagtaagtgatggctttattgaagcaagacaacatcaattatcaattatcgtccaaacggccgaacctgctagtgaaatcgatgttgaaagagctaaattagctaagtcgagagcagaatcacatttagaagaagatgatgataatacagacataaatagagctaaaagagcacttgaacgagcaaataatcgtttacgtgttgcagaattacaataa

SEQ ID NO: 4793 - DNA, 1413 bp, Staphylococcus epidermidis
atgggaattggccgtgtaactcaagttatgggtccagtaatagatgttcgttttgaacataacgaagtacctgagataaataatgcattacacatcgaagttcctaaagaagatggagcgcttcaattaacattagaagttgcacttcaactaggtgacgatgtagttcgtacaattgcaatggactcaactgacggcgttcaaagaggaatggaagttaaagatacaggtagagacataagtgtacctgtcggtgatgtaactctaggaagagtgtttaacgtactaggagaaactattgacttagatgaaaaaattgatgattcagtacgacgtgaccctatccatagacaagctccaggattcgacgaattatcaacaaaagtagaaatcttagaaactggtattaaagtagtagacttattagcaccttacataaaaggtggtaaaattggattatttggtggtgccggtgtaggtaaaaccgtactaatccaagaacttattaataacatcgctcaagaacacggtggtatctcagtattcgctggtgttggtgaacgtacacgtgaaggtaatgatctttactatgaaatgagtgacagtggtgttatcaagaaaactgcaatggtctttggtcaaatgaatgagccacctggtgcacgtatgcgtgtagcattatccggattaacaatggccgaatatttccgagatgaagaaggccaagatgtgttattattcattgataacattttcagattcactcaagctggttcagaagtttctgcgttattaggtcgtatgccatcagctgttggttatcaacctacacttgctacagaaatgggtcaattacaagaacgtataagttcaacaaataaaggttcagttacatcaattcaagctgttttcgtaccagccgatgactatactgaccctgcgccagcaacaacgttcgcacacttagattcaacaacaaacttagagcgtaaattaacagaaatgggtatttatccagctgtagacccgcttgcttctacatctagagctttggaaccttcagtagtaggtcaagagcattatgatgtggcacgtgaagttcaatctactttacaaaaatatagagagttacaagatattattgcgattcttggtatggatgaattatcagatgaagataaacaaactgtggaacgagcacgtagaattcaattcttcttatcacaaaacttccacgttgcagaacaatttactggacaaaaaggttcatatgtacctgttaaaacaacagttgcagacttcagagatattttagatggtaagtatgaccatattcctgaagacgcattccgtttagtaggtagcatggaagacgtaattgagaaagcaaaagatatgggtgttgaagtctaa

SEQ ID NO: 4794 - DNA, 867 bp, Staphylococcus epidermidis; identical to SEQ ID NO: 2428

SEQ ID NO: 4795 - DNA, 1512 bp, Staphylococcus epidermidis
atggccataaaagctgaagaaatcagtgcattgcttcgctcacaaattgaaaattatgagtcagaaatgtccgttacagatgttggtacagtactccaaattggtgacggtatcgcattaattcacggacttaacgacgttatggctggtgagctagtagaattccataacggtgttcttggtttagcacaaaaccttgaagaatctaatgtgggtgtggttattttaggaccatatgaagaaattagtgaaggtgacgaagttaaacgtactggccgaattatggaagtaccagtcggagaggaaatgataggaagagttgttaatcctcttggacaacccattgacggacaaggtccaatcaatgcgactaaaactcgtcctgtagagaaaaaagcaactggcgtaatggatcgtaaatctgtagatgaaccattacaaacaggtatcaaagcaattgatgctttagtaccaattggccgtggtcaacgtgaattaatcattggtgaccgtcaaactggtaaaacaactgttgcaattgattcaatcttaaaccaaaaagatcaagatacaatttgtatttatgttgcaataggtcaaaaagattcaacagttcgtgcaaatgttgaaaaattaagacaagcaggtgctttagactatacaatcgttgtatctgcatccgcagctgatccagcaccattactttatattgcaccttattctggtgtaactatgggtgaagagttcatgtttaatggaaaacatgttcttatcgtttacgatgatttaactaaacaagcggcagcataccgtgagctatcattattattacgtagaccaccaggtcgtgaagcatatcctggggacgtgttctacttacacagtagattattagaaagagctgcaaaacttaacgatgatcttggaggcggttcaattactgctttaccaatcattgaaactcaagctggcgatatctcagcatacgttccaacaaatgttatctcaattactgacggacaaatattcttacaatctgatttattcttctcaggtgttagaccagcgattaatgctgggcaatcagtatctcgtgttggtggttcagctcaaattaaagcgatgaaaaaagttgcaggaacattacgtttagacttagcttcatatcgtgagttagaatcatttgcgcaatttggttctgatttagatgaatttacagctaaaaaattagcgcgtggtgaacgtactgttgaagtattaaaacaaggtcaaaataacccactgcctgtagaacatcaagtacttattatttttgctttaactaaaggttacttagatgatattcctgtccaagatatcaatcgttttgaagaggaatttaaccactgggctgagtcaaatgcaactgaattattaaatgaaattagagaaactggtgctttaccagatgctgataaatttgattctgctatcacagaatttaaaaaaggatttaataaatcagaagaataa

SEQ ID NO: 4796 - DNA, 540 bp, Staphylococcus epidermidis
atggcaaaggtagcaaaaaaatatgccaaagcattatttgatgtcgctctagatacaaatcaactagatgttgtctatgaagatttagaaacaattagccattcatcgtttgatttcatcaaacaacttaaagcaattgatagtaatccaagcttaactgcaaatcaacgtaaagaatttgtagaaagagtttacaacgaagcaaatccatatgtggtaaatactttaaaagtattagcagataaccgacatatttcaattgtagagaatgtttttaaatcattccaaaatttatataacaaatactacaaacaagattttgcaattattgaatcgacttacgagttaagcgaagatgaaatatcaagaattgtagaacttatcaaaaagcaaactgaattatcaaatgtaattgttaacactaaaatcaatcaagatttaattggtggatttagagttaaggttggaactacagttatggatggtagtgttagaaatgaccttgttcaattacaaagaaaatttgaaagagctaactaa

SEQ ID NO: 4797 - DNA, 516 bp, Staphylococcus epidermidis
gtgactgcaacagctaatacatttattctcggtgcaggagttgaatgggggacaacaattgtaacactcgtaacatttgtaatcctcatcatacttttgaagaaatttgcttggggtccattaaaagaggtaatggacaaacgtgaacgtgatatcaataaagatattgacgacgcagaacaagctaagataaatgctcaaaaacttgaagaagaaaatagaaagacacttaaagaaactcaagatgaagttcaaaaaatcttagacgatgctaagattcaagcacgtaagcaacatgaagaaattattcatgaagctaacgaaaaagctaatggtatgattgaaactgctcaaagtgaaattaatagtcaaaaagaacgtgcaatttctgatattaataatcaagtttctgaactatcagtacttattgcatctaaagttcttagaaaagaaatttcagagcaagatcaaaaagaattagttgaaaagtatttaaaagaggcaggggataaataa

SEQ ID NO: 4798 - DNA, 213 bp, Staphylococcus epidermidis; identical to SEQ ID NO: 2424

SEQ ID NO: 4799 - DNA, 729 bp, Staphylococcus epidermidis
atggatcacaaatccccactcgttagttggaacgtctttggtttcgatattgtttttaatttggccagtgttttaatggtagtgattacagcaattttagtttttattttagctatagtttgcactcgaaacttaaagaaacgaccaactggaaaacaaaacttcattgaatgggtatttgattttgttagaggtattattgaaagtaatatggcctggaaaaaaggtgggaatttccacttcttagcagtgacattaattcttttcatttttgtagccaacatgcttggtttaccgttcgcaattgtcactcatgaccatacgctatggtggaaatcaccaacagcagacgctacggtaactctaacgttatctacaactatgattttgttaacgcactattacggtattaaaatgcgtggaacaaaagcttatgcagctggatattttaaacctttctggccattagctattattaatgtattcgaagaattcacttctacattaactttaggtctacgtttgtacggtaatatttttgcaggtgaattattactcggtttacttgcatcattgttctttgaacaacctgcatggggttggataattagtattcctggattaattgtttggcaagcgttctctatattcgtgggaacgattcaagcatatatctttgtaatgctttcaatggtttacatgtcacataaagtggcagacggacattaa

SEQ ID NO: 4800 - DNA, 240 bp, Staphylococcus epidermidis
atgataggtacatgtggttctttagtaaatacatacatctttgagatttatttagttaaatcaatgcataaagaaactacacaaatgtctactggtagtacttggaggtatttagtggcagttattgcatgtgtattatggttattctttaaagaacacattaatattatcggagttttaattgggttaatgatttcttatattgtaatcatattgcgccctctactacaaagggagtaa

SEQ ID NO: 4801 - DNA, 1146 bp, Staphylococcus epidermidis
atgaaaaaagttatgaccatatttggaactaggcctgaagctataaaaatggctccgttgattaaaacgttagagaaagattctgacctggaacccgttgttgtagtcaccgcccaacatagagagatgcttgattcagtgttgaatacttttaacataagtgcagattatgatttgaatattatgaaagctggtcaaacattgtctgaagtaacatctgaagcaatgaaaaagttagaagatatcatacaaaaggaagtgcctgatatggtacttgttcatggtgacacagtgacaaccttttctggagcattagccgcattttatagtcaaacacctataggacatgttgaagctggattaaggagttataataaatattcaccttatcctgaagaaataaatagacaaatggttggggtaatggcagatttgcactttgccccaacctataatgctgcacagaatttagtaaaagagggtaaattagccaaacatatagctatcactggtaatacagctattgacgcaatgaattatacaatcgatcaccaatattcatcatctatcatacaaaaacataaaaataaaaactttattttactcacagcacatagacgtgaaaatataggtaaacctatgataaacgtgtttaaagcgattagaaagttgattgatgaatatcaggatttagcgttggtctatcctatgcatatgaatcccaaagtaagagatattgcgcaaaaatatttaggaaatcatcctaggattgaattgatagaaccacttgatgtggttgattttcataattttgctaaacaagcatatctcattatgactgactctggtggaatacaagaggaggcaccatcattacacaaaccagttttagtattgagagatagtactgaaagaccggagggagtagatgctggaactttgagagtcattggtacgaatgaagaagatgtctataatgaaactaaaaaattaatagaaaacctagacctttatcaaaaaatgagtcaagctgttaatccatatggcgatggacaagctagtgagagaattgtgcaacatataaaatattattttaatttgacaaatgacagacccaatcattttgaatttacaaaagatttataa

SEQ ID NO: 4802 - DNA, 630 bp, Staphylococcus epidermidis
atgagtaaagtacatgtttttgatcacccattaatacaacacaaactaagttatattagagatgctcgcactggaacaaaagagtttagggaacttgtagatgaagtcggtatgttaatggcttatgaagtaactagagatttagaactgcaagatgttgaaatacaaacgcctgtgactaaaatgacagctaaacgtttggcgggtaaaaagttagcaattgtacctattttaagagctggtttaggcatgacagatggtgtgttaagtcttgttcctgccgctagggtaggacatataggactatatagagatccagagactcttgaagcggtagagtactttgcgaaaatgcctcaagacatcgatgaacgtcaaattattgtggttgatcctatgcttgctactggtgcttcagctattgaagcaatttcttcattaaaaaaacgtggagctaaaagtatacgttttatgtgtttaatagctgcccctgaaggcgttgaaaaaatgcaagaagcacacccagatgtagatatatatattgcggcattagatgaaaaattaaatgacaaagcgtatattacaccaggtttaggtgatgcaggggatagattattcggtactaaataa

SEQ ID NO: 4803 - DNA, 1239 bp, Staphylococcus epidermidis
atgtcttatatcgaaaataaggataaagttgtttacgatgctattcaaaaggagtttcaacgacaaaatagtaatattgaactcattgcatcagaaaatttcgtgtcacaagcagttatggaagcccaaggttcagtattaacgaataaatatgctgagggttatcctgggcgccgttattatggagggtgtgagcatgtagatgtaactgagtccattgccattgaaagagcaaaagctttatttggagcagaacatgttaatgttcaaccccattcaggttctcaagctaatatggctgtgtatttggttgctttagaaatgggcgatactgtgttaggtatgaatttgagtcatggtggtcatttaacacatggggcaactgtcaattttagtggtaaattttatcattttgttgaatatggtgtggaccaagaaaatgaattaataaactatgatgaagtgagacgtttagcaattgagcatcaacctaaattaattgtagctggtgcttcagcatattcaagaactattgactttaaaaaatttaaagaaattgctgatgaagtaggagctaaattgatggtagatatggcacatattgctggtttagtagctgctggtttacatcctaatcctgtagaatatgctgattttgtgactactacaactcataaaactttacgcggtccacgtggtggtatgattttatgtaaagaagaatataaaaaagatatagataaaacaatcttcccaggtattcaaggcggtccattagaacatgtcatcgccgcaaaagctgttgcatttggagaagctttgaacgacgattttaaagattatcaaaatcaagtcattaaaaatgcacaagctttagctcaaacattaattgaagaaggcttcagagttgtatctggcggaacagacaatcatttagttgcagttgatgttaaaggttctatcaatatgactggtaaattagctgaagagacacttgataaagtaggaattacatgtaataagaatactattccatttgataaagaaaaaccgtttgtaacaagtggtgttagactaggaacaccagcagctacaactcgtggttttgatgaatctgcatttgtggaagtagcaaaaattattagtttagcattaaataactatgataatgatactaaactaaatgaagctaaagagagagttcacgcactcacatctaaatatccattatataattaa

SEQ ID NO: 4804 - DNA, 525 bp, Staphylococcus epidermidis
atgcgtgatttacaacaactgcttgatgaattgaaagatatgtcattctttaatccaggcgaaatgtgtatcattggttgttcaacttccgaagttataggtaaacgtattggttctgttggatcaatggacgtagctaaagaaatttacgaaaatttgaaacaactagagattgatacaggcgtgacatttgcttttcaaggatgtgaacatattaacagggcagtaacgatagaaagagcaaatttcaacccattgactatggaagaagttactgtcgttccagacgttcatgcaggtggtagtttatccacttacgcttatcaacaaatggaagatcctattgttgttgagcatattactgtttcaaaaggtatagatataggtcagaccttaattggaatgcatattaaacatgtgtgtgttcctgtaagaacaagtgttaaacaaattggagaagctatcgttaccatagcgacatctagacctaagaaaattggtggcgaacgagctaaatatcaataa

SEQ ID NO: 4805 - DNA, 420 bp, Staphylococcus epidermidis
atgaaaataatttttgtatgtagtggcaacacttgtcgaagcccactggctgaaagtatagccaagtcccttttaccacacgatagtatagcttcaagagggctattcgcagttgagggacaggccatatctaaggaatcgttagaattaattcataagtacgatttacctgaaccatcacgagcacaagcatttcatatagatgatcttgatgctgatattatacttaccatgacgcaagctcataaagatttaatattttctatgtatggacgacaatctaatgtctttacattaaatgagtatgtaggtgacacacaagaaattgatgacccatttggtggctcgtttgatgtttatgaacaaacttataccaaaatttatgatttagtcgacaaaataaaatttaaacacgagtaa

SEQ ID NO: 4806 - DNA, 1044 bp, Staphylococcus epidermidis
atgcacacacaaatatgggatttaagaatgtataaaaataatgttagtcaatatccacatatagatgagataaaacaaactttcctagatggaggtttagtagcgatacctactgaaacagtatatggtcttggtgcgaatgctagaaacgaagaagcagtcgaaaacatctatgttgcaaaaggacgtccgtcagataatccgttaatcgttcatattcacagtattgaacaactcgatgattttgtagagtatattgatgataaggttaaagtattaatggatgaattttggccgggacctatttcttttatattaccacttaaacagggatatctttgcagtaaagtgactggtggattagaatctatcgctgttagaatgcctagtcataaaatagggagagcattacttcaaattgtagatgaacccatagcagctcctagtgctaatattagtggtcgaccgtcaccaacaacttttgaacatgtgaatagagatttaaatggtaaagtcaacggtatagttaatggtgatcaatgtgaagaaggacttgaaagtactgtgattgattgcacacagtttccgtttcgtatcgcgcgaccaggttcaattacgcaagatatgatagaaactaaactacctcattcgataaatcgtcaaatatatgaggaaaatgaaaagcctatcgcacctggtatgaaatataaacattattccccagagaccccattaacaattgttaaagatttaaataaaaaaattgctaatgatgataaatggtcaaaagtagcatttgtattcccagagagtcaaagaagtttgattcccgaaaatagcatttttatatctttatgtgaaaataagggagattttaaatcagcaggccataatttatatgaaattttacatgaacttgaccagaatgaagaaatagaagaggcatatatttatggatttgaagataatcatcacactgaagctatcatgaaccgaatgttaaaagcagcaagttataaactaattaaaggtgaaaagctatga

SEQ ID NO: 4807 - DNA, 834 bp, Staphylococcus epidermidis
gtgaattataaagagaagttagcagaagccaagacaattgccgtaaatgaggggtttgaatcaactcgtgccgaatggttgtttttagatgtttttggttggtcgaaaacagattatttaattcataaagatgagcaaatgtctttaacatcaattaacaaattggataaagcgttggatagaatggtcacaggagaacccattcaatacattgttggatttcagtctttttatggttatcaatataaagtgaatcaacactgtcttataccaaggcctgaaaccgaggaagttatgttgcattttttagaattgtgtaaaaagactgataccatagcagatattggaactggaagtggtgctatagcaattacgcttaagttactgcaacctgaattaaatgttattgcaacagatttgtatgaagatgctttaaatgtagctaagcaaaatgctagtcattatcaccaaaatattcagtttttgcgtggaaatgctttaaaaccgctaattgaaaatgatataaaattggatggactgatatctaatccaccatacataggccatagtgaaataatagatatggagtcaacagtactaaattatgagccacatcatgctctatttgctgagaaaaacggatttgctatttatgagtcaatattagaagatttaccatttgtaatgaaacaaggtggacatgttgtttttgaaataggttatagtcaaggagatatcttaaaaagaatgattcaaaatttatatcctgaaaaagaagtagagattttcaaagatatcaatggaaatcagcgtattatatctattatttggtag

SEQ ID NO: 4808 - DNA, 1077 bp, Staphylococcus epidermidis
gtgtttgatcaattagatatagtagaagaacgatatgaacaattaaatgaattactgagtgatcctgatgtcgtgaatgacgctgataaattaagaaaatattcaaaagaacaagctgacttacaaaagactgttgatgtgtacagaagttataaaaccaaaaaagaagaattacaagatattgaagatatgctaaatgaaacatctgataaagaagaagttgaaatgctaaaagaagaaagtagcgctttaaaaacagaattacctgatatggaagaagaattaaaaatcttacttatacctaaagatcctaatgatgataaagatgttatagttgaaatccgtgcagctgcagggggagatgaagctgcaatatttgctggtgacttaatgagaatgtattcaaaatacgctgaggcaaacggatttaaaacagaaatagttgaagcttcagaaagtgatcatggtggatataaagaagtgagtttctcagtatctggtacaggtgcttacagtaaattaaaatttgaaaatggtgcacatagggtccaacgtgtgcctgaaacagaatcaggagggcgaattcacacttctaccgcaactgttgctgtattacctgaagccgaagatgtcgaaattgagatacgtaatgaagatttaaaaattgatacttatcgctctagtggtgctggtggtcaacacgttaacacgactgactctgcagtgcgtattacacacttgccgactggtgttatagcaacttcttctgaaaagtctcaaattcaaaaccgagaaaaagctatgaaagttttaaaagcacgattgtatgatatgaaattgcaagaagaacaacaaaaatatgcttcccaaagaaaatcagctgttggtacaggtgatcgttctgaaagaataagaacttataattatcctcaaagtcgtgtgacagatcatcgaattggtttaacgcttcaaaagttaaatcaaatcatggaaggaaatttagacgagattgtggaggcactcacactttcagaacaaactgagaaactgaaagaattaaacaatggtgaattataa

SEQ ID NO: 4809 - DNA, 600 bp, Staphylococcus epidermidis; identical to SEQ ID NO: 2413

SEQ ID NO: 4810 - DNA, 258 bp, Staphylococcus epidermidis; identical to SEQ ID NO: 2412

SEQ ID NO: 4811 - DNA, 1317 bp, Staphylococcus epidermidis
atgcctggtagagaacgaacatctccgcagtatgaatctttccacgaattatataaaaacaatactactaaagagctcactcaaaaagccaaatctttaaaattaactaattacagtaaattaaataaaaaagaattggtacttgccattatggaagcacaaatggaaaaagatggtaattactatatggaaggaatattagatgatattcaacaagatggatatggtttcttaagaaccgttaactactctaaaggtgagaaggatatttatatttctgcaagccaaattcgacgttttgaaataaaacgtggtgataaagtaacgggtaaagttcgtaaaccaaaagataatgaaaaatattatggtctacttcaagttgattttgtaaacgaccataatgcagaagaagtcaaaaaacgtcctcacttccaagctttaacacctctttatccggaagaaagaatcctattagaaacgcaatctacaaattattccactcgtattatggatttagtcacaccaataggtcttggtcaacgtggtcttatagttgcaccacctaaagctggtaagacaagtttattaaaagaaatcgctaacgcaatagcgagtaataaaccggaagcgaatttatttatattactagtaggtgagcgtccagaagaagtgacggatattgaaagatcggttgaatctgcagaagtcgttcattcgactttcgatgaaccaccagaacaccatgttaaagttgctgaattattattagagcgtgcaaaacgattagttgaaattggagaagatgtaattatacttatggactccataacacgtttggcacgagcatataatctagtcataccacctagtggacgtacattgtcaggtgggcttgatcccgcttcattacacaaacctaaagcgtttttcggtgcagcacgtaacattgaagctgggggaagtttgacaattttagctactgctttagttgagacaggatctcgtatggatgatatgatctatgaagagttcaagggtacaggtaatatggaattacatcttgatcgtaagttatcagaacgtagaatattcccagcgatagacataggtcgtagttcaacacgaaaagaagagctattaatcactaaagcggaattagattcattatggcaattacgaaatttatttactgattcaacagactttacagaacgttttattagaaaacttaagcgttcgaaaaataatgaagaattctttaagcaattgcaaaaagcagctgaagagagtactaaaactggaagaccaattatttaa

SEQ ID NO: 4812 - DNA, 1428 bp, Staphylococcus epidermidis; identical to SEQ ID NO: 2410

SEQ ID NO: 4813 - DNA, 1260 bp, Staphylococcus epidermidis
atggctcaagaggtaataaaaattagaggtggacaaacactaaaaggagaagtagaaattagtggagcaaaaaatagtgcagttgctattatccccgcaactttattagctcaaggacaagtaaagttggaaggccttcctcaaatctctgatgtcgaaactctagtaagtttgttagaagatttaaatattgaagcaagattaaatggtaaacaattagaagtagatactacacaaatagagaatgcacctctacctaataataaagttgagtctttacgtgcttcttattatatgatgggcgcaatgcttggtcgttttaaaaaatgtgtaattggattgccaggtggatgtccactcgggccaagacctattgatcaacatattaagggattcaaagcattaggagcagaaattgacgaatctagcaatacatccatgaaattagtagcaaaagaacttagaggcgctcatatatttttagatatggtaagtgttggagcgacgattaatattatgcttgcggcagtccatgccaaaggtcaaactgttattgataatgcagccaaagaacctgaagtcgtagatgttgcaaactttttaataagtatgggtgctgatattagaggagcaggtacaacatcaataaaaatcaatggtgttgaggaactaaaaggttcagagtatcaaattattccggacagaattgaagctggttcttatatgtgtatggccgcagcaatgggtgaggaggtcattttacataatattgttcctaaacatgttgaagctttaactgttaagttgcaagagttaggtgtagatattgaaattgaagatgaaaaaataatcattcgtaaacaaacaccgtataaaaatgtagatataaaaacgcttgtttatccaggttttgcaactgatttacaacaacctattacaccattattattcatgacagaaggaccttcgtttgtgactgatactatttatccagcgcgttttaaacatgtagaagaattacagcgtatgggcgctaatattaaatcggatgagggaacagctgtgattaaaccttcgacacttaatggagctgaagtatatgcaagtgatttacgcgcaggcgcttgcttaattactgcaggtttaatagctgaaggtgtgacaacaatatttaatgtaaaacatatttatagaggatatactaacatcgttgaacatcttaaagcacttggtgctgatatttggacggaaacggtataa

SEQ ID NO: 4814 - DNA, 861 bp, Staphylococcus epidermidis; identical to SEQ ID NO: 2408

SEQ ID NO: 4815 - DNA, 522 bp, Staphylococcus epidermidis
atgtcaaaaatcttaaacacacaattaactggtatttttaatcggcttgaaaaacaagagttggatattcaaatggcagctcaatgtctcattcaagcaattggtggagaaggacatgtctatatcaaaggctacgatgatttaaaattctatgagtcattcatattacaaagccatgaaaaattagcgtctagcttaccacttgaagatttacaaaattttaacgatatagatacaacagatagggtactgttattttcaccatactacacttcggaagttgaaagtgatgtacttcaacttattgatttagatgtcgatttagtgcttatttgtaataaccctaaacgagataattttccaaatcatttaattcattatgttaatttatcaacacctaggcccattgtttacacagaagattatgataaaatcattcaaccacatccgatggccttaaattatatttattatgatatttatactcaaatgattgaaatgactagagatctagatttatag

SEQ ID NO: 4816 - DNA, 1608 bp, Staphylococcus epidermidis
atgacaaagtttatttttgtaacaggcggggttgtgtcatcattaggaaaaggaataacagccgcttctctaggaagattacttaaagatagaggacttaaagttacaatacaaaaattcgatccatatttaaatgtagacccaggcacaatgagtccgtatcaacatggtgaagtgttcgttacagacgatggtgctgagactgatttagacttaggacattatgaacgttttatagatattaatttaaataaatattcaaatgttactgccggaaaagtatattcacatgtgttgaaaaaagaacgccgtggtgattacttgggtggtactgtacaagttattccccatattacaaacgaaattaaagaaagattgctattagctggtgagagtactaatgcggatgttgtaattactgaaattggtggaacaacaggtgatatagagtctttacctttcttggaagccattcgtcaaattagaagcgacttaggtcgtgaaaatgtaatgtatgtacattgtactttgctaccatatattaaagctgctggggaaatgaaaacaaaacctacacagcacagtgttaaagaattacgaggtctaggtattcaacctgatttaatagtagtacgtacagaatacgaaatgacacaagatttgaaagacaaaatcgccctattttgtgatatcaaaaaggaaagtgttatagaatgtagagatgcagattctctttatgaaattccgttacaacttagtaagcaaaatatggacgacattgttattcaacgtttacaattaaatgccaagtatgaaacgcaactggatgagtggaaacatctattaaataccgttaataatttagatggtaaaattacaatcggtttagttggtaaatatgtgagcttacaagatgcttatctatcagttgttgaatcacttaagcatgctggttatccatttaaaaaagacgttgtggtaaaatggattgattcaagtgaggtcaatgatgataatgttgaggcttatttatccgacgttgatggtattttagttcctggtggatttggattcagagcaagtgaaggtaaaattgcagctatacgttatgcccgtgagaataacataccattctttggcatttgtctaggaatgcaattggcaactgttgaatttgcgcgtcatgttttaggctatgaaggtgcgcattcagcagaattagatccaagtacaccatatccaattatagatttattaccagaacaaaaggatattgaagatttaggtggaaccttaagacttggtctttatccttgccacattaaagaaggtacattggcagagaaaatttataataaaaacgatattgaagaacgtcatcgtcatagatatgaattcaataacgagtttagggaacaattagaaaataacggtatggtattttcagggacaagtccagatggtcgtttagtagaaattattgaaatacctaaaaatgatttctttattgcatgtcaattccatcctgaattcttatcaagacctaatcgtccacagcctatatttaaatcatttgtagaagcggcgttgaattaccaacaaaaataa

SEQ ID NO: 4817 - DNA, 537 bp, Staphylococcus epidermidis; identical to SEQ ID NO: 2405

SEQ ID NO: 4818 - DNA, 861 bp, Staphylococcus epidermidis
atgtttataaaaaaggattttgatgatattacagttcaagtatttgaagaaaaatatagagatgcacttaaccaatttgaattaagtgaacgacaacaaatatattcttcattgcctcaaactgttttagatgatgcattaaaagatgaaaatcgaattgctaatgtagctttaaataaagaaggaaaagtagtggggttcttcgttttgcatcgttattatcaacatgaaggttatgatacaccaaacaatgttgtttatgtacgttcattgtcagttaatgaaaagtttcaaggccatggatatgggacaaaaatgatgatgtttttaccagagtatgttcaagcattatttcctgattttacacatttatacttagtagtagacgctgaaaaccaaagtgcttggaacgtttatgaacgtgcaggttttatgcatacagctacaaaagaagaaggacctattgggaaagaaagactttattatttagatttagattcaaaacatgtatcttctttaaggctaaaagagggggaagtcacatataatgatgatattcacgtgattaatttgcttaaagatgatgtaaaggtaggctttattgcactagaacaaaatgataataaaatgaatatttctgcaatcgaagttaataagaaaaataggaatgagggaattgcagaaagtgctttacgccaattaccaacgtatatacgtaaacagtttgaagacattgaagttttatcaattactttatatggcgaacgtaatgaattaaaaccattgtgcttgaatagtaattttgtagcaatagaggaaactgaggattatacacgttttgaaaaatatattaattattaa

SEQ ID NO: 4819 - DNA, 798 bp, Staphylococcus epidermidis
atgaagattggaattgatgccggagggactttaattaaaattgtacaagagcatgacaatcgtagatattacagaactgaattaacaactaatatccaaaaagtcatagattggcttaacaatgaagaaatcgaaacattaaagcttacaggtggaaatgctggagtaatagcagatcaaattcatcattcccctgaaatatttgtagagttcgatgcatcatcaaaaggtttagaaattttattggatgaacaaggtcatcaaattgaacattacatttttgctaatgtaggtacaggtacttctttccactattttgatggaaaagaccagcaacgtgttggaggtgtaggtaccggaggcgggatgatacaaggtttaggctatttattgtccaatataacagattataaagaattaactaatttagctcaaaatggagatcgtgatgccattgatttaaaagtaaaacatatttataaagatactgaaccaccaattcctggagatttaacagcagcaaattttggaaatgtattacatcacttagataatcagtttacatcagctaacaaacttgcctctgcaattggagtcgttggtgaagttataacaactatggctattactttagcacgtgaatataagactaatcacgttgtatatatcggttcatcatttaataacaatcaattactacgtgaagttgttgaaaattacactgttctaagaggatttaaaccgtactatattgagaatggtgctttttcgggcgctttaggagcactttacctctaa

SEQ ID NO: 4820 - DNA, 666 bp, Staphylococcus epidermidis
atgtcatacaaatatgaagcattttttaaagatattttgattaatgaatatatttattttgcttcaaaaaataaaaaattaattagaatacaacatgagaatttgccatatattgctatgtggacagacgaaaatgttgctgagtcttatttgttacatcattcaattgattacgacaaaatcattagagcagatattgaccgttttgtaacatatgaaatggatgaaatctttgatccaggtgacaaagttttagttaatgtgaataatggtgaagaaggaaacattgtagatatagttaaaatgactgatgagttgatgtctgaattagatgatataagaatgagagagtttattaaagatgtcgcaaaatatgacgaagtatacggattgacaaacaaaggtgaaaagaattttattatgatttcagatgatgaccataacaaaccacacatcatgcctgtttggagtattaagagtagagcgcgtaaagtacgtgatcaagattttgaagaatgtgatttaatcgaaattgaaggtgaagtctttagtgaatggttagacaagttacgcgatgataataaagcagtggcgattgatttgaaatcaggtgttgttggtactgttgtatcagcgcaaaaactgtcaaatgaagcaacattttaa

SEQ ID NO: 4821 - DNA, 1191 bp, Staphylococcus epidermidis
atgaataataaagtaaatggtccgtttctcacacttagtgatttgtataatgatgacattgtttacacatctcgaccttcatatgtgtcgaacccatggttgaaaccagatgaacaccaatcaaatttcttaactggaagagaattacttatagctaatcgttttcctgtcattgttcatgaggcaagtgttacaaacaaattagaacaactttttaatatagtgggtagggaaattccaccacatacttataaatttaaagatcaagaaacatatgaaagcttgataaggaatttagctcttcatcaaggtaaaaaaatctactttcaatatattcatgatgaagatattttacctaaagaatattatgcacttgataaagatgtttttgttgctcttaataataaagcacgaattccagaatggactaataacaaatatctaccacaaagagaaattgtctcaattaaagattttgaatctcatattcaagcatggtcgtatccatttgtcataaaaccaggcgatgatttacctacagcaggaggatatggtgttatgatttgttataatgatacagatttagataaagctatcacacgcatcaacaatgcatcagcagagactgaaaatttaatcattgaacaaaaaattaatgcagtgaataactattgtgtacaatttgcttattcagatgatattggtatcaaatacttaggaacagcgcaacagttaactaatgactatggattttacaacggaaatgaaaatgttaatgatgtgcctcagaatgtaatagacgctggtagagagattatggaaataggcgtaagcaaaggtttttttggtgtagcaggttttgacttactagtagatgataataatgatgtttatgcgattgatttaaactttaggcaaaacggatcaacgagtatgctacttttagcaaaagatttaactcatggatatcataaattttacagttacttttctaatggagataatacaaaattctataatgctattttaaaatacgtagaattaggtgtactttatccactttcctattacgatggagattggtatggaaagaatcaagttaattctagatttggctgcatttggcatggggaaaataaagaattaattaatcgatatgaacaacaatttatattggaagctggattataa

SEQ ID NO: 4822 - DNA, 1185 bp, Staphylococcus epidermidis
atgcataataaacaaaagatattagattttatagaaaataataaatatgattatgttgaaataagtcatcgtattcatgaacgccctgaattaggcaatgaagaaatttttgcatcgagaacattaattgaccaattaagagcaaatcgattcgaaatcgaaacggatattgcaggacatgcaacaggatttatagcaacgtatgattctgatatgactggaccggttataggatttctagctgaatatgatgctttacctggtcttggtcacgcatgcgggcataatattattggtactgctagcgtacttgctgcagtagcactaaaagaagtcgtcgatgaaattggtggtaaagtagtcgttttgggatgtcctgctgaagaaggtggggaaaatggctccgcaaaagcttcttatgttaaagcaggtgtcattgatgaaattgatgtagcattgatgattcatcctggaaatgaaacttatcgtacaattaatactttagctgtggatgttctagatattaaattctatggacgtagtgcgcatgcatctgaaaatgcagatgaagcattaaacgctttagatgcaatgatttcatattttaatggtatagcacagttaaggcaacacattaaaaaaggacaacgagttcacggggttattttagacggtggtaaagcggctaatattatacctgattttacacatgcgagattttacactcgagctacttcgcggagagaacttgatgttttaactgaaaaagtaaaccaaattgcaagaggtgctgctattcaaactgggtgtgattttgaatttggtcctatccagaatggtgtaaacgaatttatcaaagcacctaaacttgatgatttatttgaaaaatatgcaactgaattaggagaagaagtgattgatgatgattttggctatggatctacagatacaggtaatgtaagtcatgttgtaccaacaatacatccacatattaaaattggttctcgaaatcttgtaggacatacccaccgctttagagaagcggctgcaagtttacaaggtgatcaggcactcattcgaggtgcaaaaattttagcattaatgggactagaattaatcgaaaataaaccgttgttagacgaaataattgaagagcatacgcatataaaggggcatgttaagtaa

SEQ ID NO: 4823 - DNA, 471 bp, Staphylococcus epidermidis
atgactaaaatgaatgtagaaagctttaatttagaccatactaaggttgttgcaccttttattcgtctagccgggactatggaaggtcttaatggtgatgtcatacacaaatatgacattcgtttcaaacagcccaataaggagcatatggatatgcctggtctacattccttagagcatttaatggcagaaaacattagaaatcatactgataaagtagtagatttaagtcctatgggttgtcaaactggattctatgtttcatttattaatcatgacgactacgatgacgtattaaatattatcgatcaaacattgcatgatgtgttaaatgctagcgaagtcccagcttgtaatgaggttcaatgtggttgggctgcaagtcattctttagaaggtgctaaaacaattgctcaagcatttttagataaaagagagcaatggaatgacatctacggagaaggtaaataa

SEQ ID NO: 4824 - DNA, 351 bp, Staphylococcus epidermidis
atgaaagttttaagattcttattaggactagcatttggaacagctggtgttttacattttactagagagagacaatttagaaatattgttccagattatttacctttacaaaaaactgctgtattggtaacaggtgttatagaaatcttttttggtatcatgttgcttattaaaagaccagcatcatggttgaaaaagggtattaatttattcttgttagcagtgttcccagcaaatatttatatggctcgtaaaggattgccattaggtgacaaagaactacctaaatgggcactttattcgagattaccattgcaatttgtgcttattaaagccattaaaaaattataa

SEQ ID NO: 4825 - DNA, 1194 bp, Staphylococcus epidermidis; identical to SEQ ID NO: 2397

SEQ ID NO: 4826 - DNA, 1302 bp, Staphylococcus epidermidis
atgagaatgattgacatcatagaaaagaaacgagacggtaagtcattaaccaaagaagaaatagaattttttgtaaacggatacactcatggggaggttccagattaccaagcttcaagtttagctatggcgatattctttcaagatatgaatgatgaagaaagagccgcattgacaatgtcaatggttaactcaggagagaaaatcgacttaagcgatatcaatggtattaaggtagacaagcattctacagggggcgtcggtgatacaacgacactcgttcttgccccattagtagcggcagtaggtgttccagttgcaaagatgagtggtcgtggtctaggacatacggggggtacgatagataaattagaatcagttaagggatttaacgttgaaatcagtgaaaaagattttataaaacttgtaaatgataatcaagtagcagtaataggacaatcaggcaatctgaccccagctgataaaaaattatatgcactacgggatgtaacagggacagttaattctattcctctaatcgcttcgtccataatgagtaagaaaattgctgctggcgcagacgcaattgttctagatgtcaaaactggcagtggtgcgtttatgaagacgctagatgatgccgaagcgcttgcgcatgcgatggtaagaattggtaataatgtaggtcgtaatacgatggctattatttcagatatgagtcaacctttaggaaatgcaattggtaatgcgctcgaattaaaagaagctatcgcaacattaaaaggaattgggccgaaagacctaacagagcttgtgttaacacttggttctcaaatggttgtcttagctgaacaagcaacatctttagatgaagcgcgtcagatgctaatcgatgctataaaaacaggcaaagctttaaacaaattcaaaacatttctatcgaatcaaggaggagatgactctattgtggattctcctgaaaagttacctagcgcgaaatatcaagttgaatttaaagctaaaaaagatggttatataactgaaataatagctaatgagataggcgttgcttcaatgatgttaggcgctggtcgtcaaacaaaagaagacgttattgatttaggtgtaggtatcgtgttaaataaaaaagtaggagaacatgttgagaaaggtgaaaatattttaactattcataccaacaccaaagagatcgatgatattttatataaactagacaatagtattactattgagagtaagggcgaagctccaaccttaattcataaaataataaccgagtag

SEQ ID NO: 4827 - DNA, 666 bp, Staphylococcus epidermidis
atgatgaataaagcaaaattgatagaccatacattattaaaacctgattcaacaaaggaacaaatagatactattataaatgaagcaaaagcatatcagtttaagtctgtatgtgtgaaccctacacatgtacaatatgcatctgaacaacttaaaggaacagacgttttagtgtgtactgttattggatttccactaggtgcaacaactacagcggttaaatcttatgaaacaaaagatgcgattaacaatggtgcccaagagattgatatggtgataaatattggagcacttaaggatggcagttttgatgaagtgcaaaatgatatcgaagccgtcgttcaagcagccaatggtaaaacagttaaggtaattattgagactgttttattaactgagaaagagaagattaaagcatgtcaattatctgaagcggcaggtgcacattttgttaaaacatccacaggttttgctggtgggggtgcaacagttgaagatgtaaaattaatgaaagatactgttggtgatcgtttagaagtaaaagcgtcaggtggcgtgagaaatctagaggattttaataatatgattgaagcgggtgctacacgtattggtgctagtgccggtgtgcaaattattcaaggacttgaatcaaatactgattactaa

SEQ ID NO: 4828 - DNA, 114 bp, Staphylococcus epidermidis
ttgtactatataattgaaggtaaatatgttttgttttttaacgatatattaaagttatatgaagatttattatttggagatagtaataaactaaaaaacatggaggaaaaatga

SEQ ID NO: 4829 - DNA, 711 bp, Staphylococcus epidermidis
atgacagaaagtacacctcacattaacccaaatggagttaaaatagctaaaactgtattaatgccaggcgatccattacgtgctcaatatattgctgaaaattttttagaaaatgttgaacaattcaatacagtacgtaatatgtttggttacacaggaacttataaaggcaaagaagtttctgtgatgggctctgggatgggaattccaagtattggtatttattcttatgaactttaccatttctttgatgtggatacaatcattcgcgtaggttcatgtggcgctcttcaagaagatgtcaatttatatgatgtgattattgcacaagccgcttccacaaactcaaattatgttgatcaatttaatataccgggtcactttgcgcctattgctgattttaatctagtagctaaagctaagaaagctgctgatgaaattggtgccatatcacatgtaggtaacgttttgtcatctgatacattttataatgctgattcaacttttaatgattcatggaaaaagatgggtatcttaggtatcgaaatggaatctgcaggtctatatttaaatgccatccatgcaaataaaaaggctttaggtatttttacagtaagtgatcatattctaagagatgaagccactagtgcagaagagagacaaacatcatttactcaaatgatggaaatagcgctcgaaatagctgaatag

SEQ ID NO: 4830 - DNA, 447 bp, Staphylococcus epidermidis
atgagtcaacaacaagatgtagtcaaagaattaaatcaacaagtcgcaaactggacggtagcttatacaaagttgcataatttccattggtacgttaaaggtcctaatttcttttctttacacacaaaattcgaagaattatacaatgaagctagtcaatatgttgatgatttagcagaaagaattttggcaataggtggtaatccaattggaacactttccgagtgtttagataaatcaatagtaaatgaagcaggaaaacattattcagctgaagaaatggtagaagaattgtctaaagatttttctaaaatctctaaacaattagaacaagcaattgaagtggcgggaagtgctagtgatgacgtttcagaagatatgtttatcggcatgcaaacttcagttgataagcataattggatgttacaatcttatttaggtcattaa

SEQ ID NO: 4831 - DNA, 411 bp, Staphylococcus epidermidis
atgccaataatttattatgatggaaattgtgtttattgttataactatgcaatttggttaattcaaaacggactttcacataaatatgagtttgcaacaattaaaggtcaaataggtaaacaattttttgaaaattatcctgatgctcaaaataagaatagtgttattcttcaaaaaggaaatcatttagaatttgaatcacaggctgttgcaacattgatatcgtcactacctaatcactctaaatttcttggaataggattaagattaattcctaaaccactaagagatttaggatatcgattatttgcaaataatcgagataaaatgtggaaaacacattggcacaagccaactgattatgaaaaatcattttttcttgatgataatgaaaaaatcaaactaacctaa

SEQ ID NO: 4832 - DNA, 1377 bp, Staphylococcus epidermidis
atgactgaggaaattaactatttttggcttaattgtggttacaatagatggaatcataatgaaccattagtgggacagacagcgttatttgaatctggcgcacattttaatcctacacaaggatatagagcatttaaaaaagctaaagctggagatcaagtgattttctatcaagtacaaacagattctggacttttaggtataggtgaaattataagtgtgcaatccggtgctcaaaataaaataagagtagaatttaaatttaaagaaacgctaaaaccacttacaacggattatcttaaaagaagtgaaacactcgattttcgtatgagtaacatgagggaaacacttttcaaccaaatcagagagtcagaatttgagttaatagttagtttaggtaaaggaaaatcgaaaattcctcgatattttttattagcagaaacagaagcgtttgaacctggtaaaaactatactatatttactcatacatttaatggaatcaaaaggaatggttatcatttttacactcaactagaggtgggtgataacattattatatataataaatatcaaaaccaatcggttatcggtattggcgaagtatcaaagcatatacatgagaaaccacctataccaggtcgaacgaatagtacagctattgaaattttttatgagaaagatatcaagcccatttcattaggtcatttaaataaacatcctaaattgaagaatctgtactttttacaagaaaatgcgaaacagtcaataacaagtatgtcacaagctcaatacgatgccattttggacatgagtatgaataatggtattaaacatccttttgaaacagtaaaaaaagcagaactatcaactcaaaatgctgaagatgatagtttaaaaccttttgtattattagttgttgaacaaaaaggagaaggcttaaaggcagctgaagaattactccaaaaaacaaatgcaaaccctgtgattactagcggacatccagattttactgaagatatgctttatggtaaatatttacctaatgagtcaggagcgctatattatcgtgaaggattcatcacacatctaatgcctaagaaagataaaagttatttagtcattgataacttcaatcgcatcgatgtagatattttccaaacatatattaatgtacttgaaggctatgaagtgacattaccgagatataataaagatggaagcatgattaagtggtcaaaaaataaagattctttttatcattttaatcctaattggcatattgttggtattacatatgactctatagaaaaaattaagcaaaaatattcgtcacagtttttaaaatatacgcgtatcgtcaaagtgaatcatgactaa

SEQ ID NO: 4833 - DNA, 126 bp, Staphylococcus epidermidis
atgggtttcatcagtaatcactttaatgtgatcatcattattattaaatattttcatttattttatcataatatcatccactattctaaacaacacttatcattaaaagttgattttaaaaattaa

SEQ ID NO: 4834 - DNA, 228 bp, Staphylococcus epidermidis
gtgaagcaatttttatatatttctctagtttgtggcattatttccggagcagggatatttttacaattaccacattatccatctatgatgattccaagatttgtggcgattcttggaataattagcgctgcaatcacaataagagataaggaaataagtggtatgcttaaacttggtgggataatgattaatataatgccgttacttgggagtgtcattgctaaataa

SEQ ID NO: 4835 - DNA, 939 bp, Staphylococcus epidermidis
atgccgttatttttaaaacccatttttctggataaagtatggggcagtgataatcttcgtcaatttgggtatcaactacctaataatcacataggtgaatgttggggaatttcagcacatccacacggaaaaagtgtgattgaaaatggtatatttgctggtcaaacattggatcaagtatggaacaatcatagagaaatatttggagattttccaagtaaagattttccattaatggctaaaattgtagatgctgctgcgccattgtctattcatgtacatcccgacgattcttatgcatatgaacacgaagaaggtcaatatggaaaatctgaatgttggtacatcattgaagctgatgaaggtgcaaagattactataggtacgtatgcgaaatctcgtgatgaatttgaagagcaattggagcaaggtacatttgaaaattatttgagaacaatacaagtgcaaccaggtgatttttactttataccagctggaacgatacattctataggtgcaggcattatggcgtatgaagtcatgcaatcatcagatatttcatacagaatttatgattatcatagaaaaactgataatagcgaggaacgtgaattaaatatagataaggcattagatgttattaattattcaaatgaactacctaatatcactcctcaaaatgaagtgatagaaaatcacaattgtacacatattgtatctagtgatttttttactatggttaagtgggatatttctggaactctaaattatatgaagcctagagaattttgtcttgtttctgttttagatggacaaggtaaacttattgtagatggtgatatatatgaaatatctaaaggttcaaactttgtgttaacttccgaagatttagatagtgttttcgaaggagattttaaactaatcattagttacatttaa

SEQ ID NO: 4836 - DNA, 657 bp, Staphylococcus epidermidis
atgagtattttagttattggagcaaatggaggcgtaggttctaaactagtaagtcaattaaatgaagaacacgttgattttacagctggtgtacgtaaggaagatcaagttaaagaattagaaaataaagggattaaagctacattaatagatgtagaaaaaaatagtattaatgatttaaaaaatatctttacagattatgataaagttatcttttcagttggatctggtggaagcactggagcggataaaacaatcattgttgatttagatggtgctgtaaaaacaattaaagctagtaaagaagcgggtatcaaacattatgttatggtatcaacatacgattctagacgtgaagcattcgatgcgagtggagatttaaaaccgtatacaattgcaaagcattatgctgatgattacttaagaacatcagatcttaattatacaattgtacatccaggttcacttacagatgatgctggaactggaaaaatagaagctgatttatatttcgacaaagcaggatcaattccacgtgaagatgttgctacagttttaaaagaagtagtaacttctgatggttttaataatcaagaattccaaattttaagtggcaatcatggtgttaaagatgcattgaaaaactatgaatcttaa

SEQ ID NO: 4837 - DNA, 342 bp, Staphylococcus epidermidis; identical to SEQ ID NO: 2387

SEQ ID NO: 4838 - DNA, 954 bp, Staphylococcus epidermidis; identical to SEQ ID NO: 2386

SEQ ID NO: 4839 - DNA, 732 bp, Staphylococcus epidermidis; identical to SEQ ID NO: 2385

SEQ ID NO: 4840 - DNA, 1152 bp, Staphylococcus epidermidis
ttgtttaattattataaatccggatttcaaaaagcaaaaccacataatctaaagttaatactactctcattaataacttttgtcatttgctatattacttctaatattgcattctcattagttatattaagagctcaaaggttaccaatgttagctcaactcggtgaatctactacaaaacctataatatctattatttttattttactcattttagctttattatttatttttgtaggttacccattgataactggtacagtatatgcaattcaaaaagctattaataaagagaaagttctttttagtgatttattttttgcttttaaaaaaggcaaatatgctaaatcagtaattttagctttaataactttagttttattcattgtaatcgtacttattctagtgctattaaataaattatatagtttagctcttagcccaatattaatcggcttacaacaatcaataagcggctacgacaatccaatgggaattttaattacaatacaaattgtgttgttactcataacaggtttcatctcatcaattttctattggtttgtaattatattcattattaattatactaccgcttatacagaagattcatctcgtaaagtaatgagtaatttaaaagaaggatttaaaggtattaaaaacggtaagaaaacttggtttaaatttttcattggcgtattacttattagtttacttgcaagtattattaacaaaccgctattattcggtgtacaatacttaacaagcagtatgtctcaaacggtggctcaaactattattataatagctagaatcgtatctatagtattacgcctatgtctttattacattttgatttttggaattattaattatttcgttagacgtggtgacaaaccagtcaaaagcaaaagacgtcataaaaataaagatattaacaaaggtaatgtaaacgacaaagtagatactaaattaaatgcttccaactccaaagatacagaagcagataaaatgaaagatcaacaaacacatatacaacaagacaaaactgatagtcaagaaaataacatatatgattccatcaaagaaaaagtaaatgaaaataaagaaaatgttacagaacaatctaaaaatctatttgataagaaatag

SEQ ID NO: 4841 - DNA, 858 bp, Staphylococcus epidermidis; identical to SEQ ID NO: 2383

SEQ ID NO: 4842 - DNA, 1806 bp, Staphylococcus epidermidis
atgtgtggaattgttggttatattggctacgataatgccaaagaattactattaaaagggttagaaaaattagaatatcgtggttatgactcagcaggtattgctgtagttaatgatgatggtacaaaactttttaaagaaaaaggaagaattgctgaattacgtaaagttgcagataatagtgatgaggatggtacgttaggaattggtcatacacgttgggcaacacatggtgttccaaattatgaaaattcacatccacaccagtcaacatctggacgttttacattagttcataatggtgtaattgaaaattatgaagaattaaaagctgaatatttatctgatgtcactttttcatcagaaactgatacggaagttattgtacaattagtagattatttttctagacaaggattagctacagaagatgcatttacaaaagtagttaaattattacatgggtcatatgctttaggattattagatgataatgataaagatactatttatgtggctaaaaacaagtctccgcttttagtaggtgtaggtgaaggtttcaatgttattgcttctgatgctctagcaatgttacaaactacaaaccaatacaaagagatacatgaccatgaaatagttattgttaaacgagacacagtagaaattaaagatcttgaggggcacactcaacaacgtgatacgtatacggcagaaatagatgctgctgatgcagaaaaaggcgtatatgatcattacatgttaaaagaaattcatgaacagcctgcagtgatgcgtcgcataattcaagaatatcaagatgaaaaaggtaatttaaaaatcgattcagagattattaatgatgtagcagatgctgatcgtatttacatcgttgcagctggtactagttatcatgctggattggttggtaaagaatttattgaaaaatgggcaggtgtacctactgaggttcatctagcttctgaatttgtatataatatgccacttctttctgaaaaaccactatttatttatatttcacaatctggtgaaacagctgatagtcgtgctgtattagttgaaacaaataagttaggtcacaaatcattaacaattactaatgttgctggttcaacattatcacgtgaagcggatcatacattacttttacatgctggacctgagattgcagtcgcatctacaaaagcatatacagcgcaaattgctgttttatctatcttatctcaaattgttgctaaaaatcatggtcgtgaaaccgatgttgatttattaagagaactagctaaggttactacagctattgaaacaattgttgacgatgcacctaagatggagcaaattgcaacggatttcttaaaaactactcgtaatgcattctttattggacgaacaattgattataatgttagtttagaaggtgcattaaaattaaaagaaatttcttatattcaagctgaaggatttgcaggtggggaattaaagcacggaacaatcgctttgattgaagatggcacacctgttataggtttagctacacaagaaaacgttaatctatcaattcgtggaaatatgaaagaagtagtagcacgtggtgcatatccttgtatgatttcaatggaaggtttgaataaagaaggagacacatacgtgattccacaagtacatgaattattaactcctttagtatctgtagtgacaatgcaattaatctcatattatgctgcgttacaacgagatttagatgttgacaaacctcgtaacttagccaaatcggttacagtagagtaa

SEQ ID NO: 4843 - DNA, 156 bp, Staphylococcus epidermidis; identical to SEQ ID NO: 2381

SEQ ID NO: 4844 - DNA, 1356 bp, Staphylococcus epidermidis
atgggaaaatattttggtactgatggtgttcgtggtgtcgctaaccaagaactcacacctgaattggcttttaaactaggtagatacggaggatatgttctcgcacataataagggtgaaaagcatcctcgagttttagtaggaagagatacaagagtatcaggagaaatgctagaatctgcattaattgctggtttaatttcaattggcgcagaagtgatgcgcttaggtgttatttcaacaccgggtgtggcttatttgactaaagaaatggaagcagcattaggtgttatgatttctgcgtcacataatccggttgctgataatggaattaaattttttggttcagatggctttaaattgtcagatgatcaagaaaatgaaattgagcaattattagatcaaaccaatcctgatttaccacgtccagtaggagaggatattgtacattattcagattattttgaaggtgcacaaaagtatctaagttatcttaaatcaactgttgatgttaattttgagggtcttaaaattgtattagatggtgcaaacgggtcaacttcttctttagccccattcttgtttggcgatttagaagcggatactgagacaattggatgtaatccagatggttataatattaatgaacaatgtggctctactcatccagaaaaattagctgaagcggtgttagaaactgaaagtgactttggtttagcttttgatggagatggcgatcgtattattgcggtagatgaaaatggacaaattgtagatggagatcaaattatgttcattattggtcaagaaatgtataaaaaccaagaactcaatggaaatatgatagtttcgacagtaatgagtaaccttggtttctacaaagctctagaaaaagaaggtattcagtcaaacaaaactaaagttggagatcgctatgttgtcgaggaaatgagaagaggaaattataatcttggtggtgaacaatccggtcatatcgtattaatggattacaatactactggtgatggattattaacgggtgttcagttggcttccgttattaaaatgagtggtaaaactctaagcgagttagcttctcaaatgaaaaagtatccacaatctttaattaatgtgagagtgactgacaaatatcgtgttgaagagaatattcatgttcaagagataatgacgaaagttgaaacagagatgaatggtgaaggaagaattcttgttcgtccttctggaactgaacctttagtacgtgtaatggttgaggctgcaactgacgcggatgctgaaagatatgctcaaagtatcgctgacgttgttgaagacaaaatgggtttagataaataa

SEQ ID NO: 4845 - DNA, 936 bp, Staphylococcus epidermidis
atgcttgaaagtaaatggggattaagatttgtcgctctcatattagcagtttttttctttttatcagtaaataatgtgttcggaaatatttttaatacagatgatttatctcaaaaatcatccaaaactattcaagatgtgcccgttgatgttatctataatagtaaagacctacatgtaactaaaattcctgaaaacgtcgatgttaatttaacaggaccacaatcaaaattaatcaaaattgaaaaccctgaagatttgaaagtagttgttgatctttctggaaaaaaagcagggaaatatcaaaaaaaatatcaagttagaggcatagatagtggtatcaactatcaaattaaacctgaagttgcacacattaaccttgaaaataaaataacacgagttatgcatgtgcaaccagacattagtagtaacagtttagatccaaaatataaaataagtaaacaaagtatttcaccagaaactgtaaaagtgactggtggagagcaacaattaaaaaatatagcttatttaaaagcaacttttaaaaattctagtaaagtgaacaaagacaccaatgatgttgcagatgttagtgcatttgataaacaattgaataaattaaatgtatcaattaatccaaatgaagttaatttaaaagtaacagttgaaccattcagtaaaatggttaaggtacgtacaaaaacaacgggtaagcttaatgaaaataaagaattagatagtgttaaactggaagataaagaagtagaaatctttggtaatagagatgaattacaaaatattaatgaaattactgctgaagtagatattgatggaatttcagaatctacagaaaaaacagtatcatttaacttacctaaagatgtgactaaagtgaatccaaaggaaacaaaagcgtatataaatgttaaaaattga

SEQ ID NO: 4846 - DNA, 810 bp, Staphylococcus epidermidis; identical to SEQ ID NO: 2378

SEQ ID NO: 4847 - DNA, 1137 bp, Staphylococcus epidermidis
atgtttcaattattagcagtatgtccaatgggattagaagcagttgtagctaaagaaatacaagaattaggttacgatacacaagtggaaaacggtcgtatcttttttgaaggtgatgaaagtgctattgttagatgtaacttatggttacgtaccgcagaccgaataaaaattgtaatgggtcgattcaatgctactactttcgacgaattatttgagcaaacaaagtcattaccatgggagacggtgattgacaaagaaggtaatttccctgttcaagggcggagtgtaaaatcaacattatacagtgtacccgacagccaagcaattactaaaaaagctatagtagaacgacttaagcatgctcatcaagaaaaaggatggctaagtgaaacaggagccaaatatcctgtagaagtatcaatattaaaagataatgtattattaactattgatactgctggttctggtctcaacaagcgaggttatcgcattgctcaaggtgaagcacctattaaagaaacattggcagcaagccttattcgtttagcaaattggaatggtaacacacctttaattgatcctttctgtggttcaggcaccattgctattgaagcatgtcttattgctcaaaatattgctcctggttttaatagagattttgtatctgaacaatggaatatgatgccacctaatatttatgacaaatttcgagatgaagctgatcaattggctgattatgataaagatatacaagtatatgcttctgatattgatccagaaatgattgaaattgcaaaacgtaatgcagaagaagttggtctcggagatattatacagttcaatgttaaagatgtgaatactttgtctattgataccgacatgcctgtagcacttgttggcaatccaccgtatggtgaaagaattggagatcgtgaagaagttgaagaaatgtatcgttatataggtacacttttgaaacaacatcctcatttatcggcctacatattaacaagtaacaaagaatttgaatacttagttaatcgaaaagcgactaaaagacgtaagttgttcaacgggtatattgaatgtacgtactatcagtattggggtaaaaagcaaagtaataaaaattaa

SEQ ID NO: 4848 - DNA, 639 bp, Staphylococcus epidermidis
atgaagactgttttgattgtaggcgcaaatggtagagtatctatcgaagcgacaaaaattttcctagagaactcaagatttaatgttgatttatttttgagaaatgcgcatcgtatacctgattacgcctctaatagaattaaagtttatgagggagacgctaaaaatattgaggatttagaaagtgctttaaacaatgttgatgttgtttttgcaagtttatcgggatcacttgataaacaagctgaaactatcgtaaaagccatggataacaaaaatgttaagagactgatttttgtagcagctcctggtatttatgatgaactaccagaaccattcaatcaatggaataaagaacaatttggcgaaaaattgaatcgctaccgcaaagcatctgatattatagaaaattcagatttagattacacaataatacgtccaggctggcttacagataaaaatgaaaatgtatatgagatcacagcaaagaacgaaacatttaaaggtactgaagtatcacgtaaaagtgtagcatctttagcagtacaaattgccaaaaacccagaactacactctaaagaaaatattggtgtgaataaacctaatacagaaggtaataaacctgcttggttcaattag

SEQ ID NO: 4849 - DNA, 3438 bp, Staphylococcus epidermidis
atggcaataaatgaacaattagatactttatataaattaaaaaaagaattggaaaaatctaataacagacctttaattaataccattaatcaagtaataaaaaaagtttatttaaatcaatacaccgcaacatttgtaggacatttctcagctggaaaatcaacgttaattaatttgttattagaacaagatatactaccaagttctccagtaccaacaacgagcaatacagctatcgtttcagtagccaaggaagacgaaatcattgccaatcttacgcaacaacaatatacaaaattaaaaacgtacaacgatgttaaacaaatgaatcgacaaaatgtcgatgtagaatcgatagaaattaattttccatcaaacaaatttaatctagggtttacatttcaagatacaccgggtgttgactctaacgttgcaacgcatcagtcgagtacagagcaatttatgtatacaagtaacttgttgttttatacagtagactataatcatgtccaatcagcgttgaactttaaatttatgaaacgtattaatgaagttggtataccaattatttttgtgattaatcagattgataaacataatgaagaagaaattacatttgaaacttttaaatcaagagtcgaaaaatcaatcaaagactgggatatcaaacttcaagatacttattacgtttcaaagtttgatcatccacagaatgaaattgacaaactttcaaattttctagtatttatggatcaacatcgtgaatcaacagaagactatgttaatagaacaattcaattcattaccgacgcacaatacatatacattcaaaatgaaatgcaatctattcttgacacccttcaaattaatgaagaacaattcgaggaagcatatattcaatttcaacaaaatcaagaagtcagcgcagaagcacaattgctcaatgactctaatcaattatttaattatttaaaacagaagcgtaaagatatattagataatgcttatatcatgacgtacgatatgcgtgaatctttacggaattatttagaaagcatggcaactgattttaaagtgaatggattttttaataaaaggaagaaaaaagaagaagaacaaatcaaacgacttaatgaggcgaccactcaattgcaagagaaagttaatcaacaagtacgacaaccacttcgtgaagatatgtcatttttaactagattcataaataaacatgctgtgaatgaaaaaatactaaatcaagaatatgacgtcgttccgtcacttatatcagagctatatcaaactcaaacgagcattagcaacacatacgttttaacattttcagatgaagttataaaagctttgaataaaaaaatagaaaatgagtcaacaccactatttgaagaagctgtcaatcatgtacaagttaatgaattatcgagtgatgaaaatgaagataggtatgaatatgatagatacattgaacttaacacattaaaggattcgcttacatcccacaactacaaacattactatatccatttagacgattctttagataaattaattggaagaacagagactcattttgaacttaaacaagaaaattcaactgcttatcatcgtaaacatgagacacaacatcgtaacgagtttgttacatctaatcaagatattaagcgtgcattagatatcgttaaagatgtaccattatttgatcgcactaaacaagatatcaccgataccattctgagactcgataatcaaataacaaaagtaggtgtttttggtacatttagcgcaggtaaaagcagcttaatcaacgctctactaggtgataactatttagttagttctcctaatccaacaacagcggcaacgacggaattatcatatggtaaagagagtcaaatcacattaaaatctaaagagcaattactagaggaagttaatcatgtactagaattttatgaaatatcgtttaacaccttagacaactttattaagagcgatttagagaagttaaaatcgaaactagaaaagaaccaacttgcatttattagtgcaattgagaaacattatgaaatgtacacgtcaatgctagaacattcacttatacacacagtatcgcttgaagaaattaaaaagtggagtgccgaggatgagtatgccactttcgtgaaaactgtacaccttaagctacctttagattggcttaagggtaaaatcattattgattcactgggtttacattccaataatcaaagacacacgaatgaaactgaacaaattctcacttcttctgaccttattttgtatgtaacttacttcaatcattcatttacagataacgacaaagcctttatcgaacatatgaaagatatgaatcaattaaatgaaaatcaagcttttaaaatgataattaatgcggttgacctagctgaagataaaaaggatatacaagccgttgaggattatgttgcagatgcactggggcaagttaacttacactctgatatatatagtgtttcaagtcgtcaaagtttaaatgggaataacattggcataaatgaattaagagaaagtatacaatactttgcaaaggttgaatctagaacaattttagagcagcagatgacttatcaattgcaacaaatgaataactcctttaaaaaaatgattaaagattttcacgatgacaacgcaaaattatcagctagacaacataaattaaatcactataaaaaccaaaccctattaaatcaagagttgattgatacaactgcacaacgtactttcaatgaagtagaagaacaagtatatcatctaaatgaacggttaaaactacaacttttagatgaggttaaatctgtgtttaatagtcagatgacacaaaataacgactttaatgaggaaaagaaaatttcaactaaaatatatttagatcaaattcatcaacgcttattcttagagcaatcacttatcacagaaaggattaaaaaatattttaattcacaactagaagaacaaatcctaccagtcatgaaaaagttaaatcagattcatgttattataaatgcaaaatttaatgttgagccatcactggttgatacggcgttacttcaaattgaacttaattcaatgttgcaatcactaccaaaacagttaactaaacgtaaaatagttaatccaaagtcacaaaaggatatacaagtacacatagctaatcaaactcttgaattattacaagatgatttgaactcattgcgccgacaattaaatgattatatccacgagatgactcaacttgccgaacatcaatttcaaatgttggagacatccatccaacaacaaattgatgagttactttcattcactatcgatgatacattaatacaacaactagaattgaaaaccacacaattagataatattttatag

SEQ ID NO: 4850 - DNA, 879 bp, Staphylococcus epidermidis
atgcctcaaagagtattgctcgttgatggaatggctttattatttagacatttttatgcaacaagcttacacaatcaatttatgtacaattctaaaggaattcctacaaacggcattcaaggttttgtaagacatatttttagcgctatcaaagaaatcgaacccactcacgtagcagtttgttgggatatggggcaagaaacattcagaaatgaaatgtatgatggttacaaacaaaatcgcccagcaccacctgatgaacttatacctcaatttgattatgttaaagaaatatcgcatcagtttggttttgtaaatgttggtaagcgtaattatgaagctgatgatattattggtagtttagcggaaacatattcacaagaacatgaagtttatatcattaccggagaccgagacttactccaatgcattaatcataatgtagaagtttggcttattaaaaaaggttttacaatatatcaacgttacacgcttgatcgttttattgatgaatatggactaaatcctcaacaattaatagatgtcaaagcttttatgggtgatactgcagatggctattctggtgtaaaagggataggtgaaaaaacagcaattaaattaattcaaaatcatggaactgtcgaaaatgtagtgaacaatttatcatcattaactcccgctcaacagaaaaaaataacaaataatttaaatcatctgcatttatcaaaatcactcgcagaaatatataccaaagttccaattgaaacagacaaactttttaaagagatgacatatgctcatacactaaatgagattttatccatttgtaatgaacatgaactatacgtttcaagtaaatatattgcaactcacctctaa

SEQ ID NO: 4851 - DNA, 30450 bp, Staphylococcus epidermidis
ttgaataatcgtgataaattacaaaaatttagtattcgaaaatacgcaattggaacattttctactgtgattgcaacacttgtgttcatgggtatcaatacaaaccatgcaagtgccgacgagttgaatcaaaatcaaaagttaattaaacaattaaatcaaacagatgatgatgattcgaatacgcatagtcaagaaatcgaaaataacaaacaaaattctagtgggcagactgaatcattacgttcatcaactagtcaaaatcaagcaaatgcacgactgtcggatcaattcaaagacactaatgaaacatcgcaacaattacctacaaatgtttcggatgatagtatcaatcaatcgcatagtgaagcaaatatgaataacgaaccattgaaagttgataatagtactatgcaagcacatagtaaaatagtaagcgatagcgatgggaatgcttctgaaaataaacatcataaactaacagaaaatgtacttgcagaaagccgagcaagtaaaaatgacaaagagaaagagaatctacaagagaaagataaatcgcagcaagtgcagccaccattagataaaaatgcattacaagctttttttgacgcatcatatcacaattacagaatgattgatagagatcgtgcggatgcaacagaatatcaacaagtcaaatctacttttgactacgtcaatgacttactaggtaataatcaaaatattccttcagaacagcttgtttcggcatatcaacaattagagaaagcattagaacttgcacgtacgttaccacaacgatctactacagaaaaacgtggtagaagaagtacgagaagtgttgttgagaatcgttcatcaagaagcgactacttagatgctagaactgaatattatgtttcaaaagacgatgatgattccggtttccctcctggtactttcttccatgcttcaaatagaagatggccttataatttaccaagatctaggaacatcttacgtgcttctgatgtacaaggtaatgcttatatcactacaaaacgacttaaagatggatatcaatgggatattttatttaatagtaatcataaagggcatgaatatatgtactattggtttggacttccaagtgatcaaacaccaactggtccagtaactttcactattatcaaccgtgatggttcaagtacatctactggtggcgttggatttggatcaggtgcaccactacctcaattttggagatcagcaggtgctattaattctagcgtagcgaatgattttaaacatggctccgctacaaattatgcattttatgatggtgttaataatttttctgactttgctagagggggagaattatacttcgacagagaaggcgctacacaaactaataaatattatggcgatgaaaacttcgcattgctaaatagtgagaaaccagatcaaataagaggattagatacaatatatagttttaaaggtagtggtgatgtaagttatcgtatttcatttaaaactcaaggagctccaactgcaagattgtattatgctgctggcgcgcgttctggtgaatataaacaagcaacgaactataaccaactctatgtcgaaccttataagaattatcgaaatcgagtacagtcaaatgtccaagttaaaaatcgtacacttcatttaaaaagaacaatcagacaattcgatcctacattacagagaactactgatgttcctattttggatagtgacggttccggaagtattgattcggtatacgacccattaagttatgtaaagaatgtgactggtacagtcctaggtatttatccatcttatcttccgtataatcaggaaagatggcagggagctaatgcaatgaatgcctatcaaattgaagaacttttttcacaagaaaatcttcaaaatgcagcacgttcaggtcgtccaattcaatttcttgtaggttttgatgttgaagatagccatcataaccctgaaactcttttaccagtaaatttatatgtaaaacctgagttaaaacatacaattgagttatatcacgataatgaaaaacaaaatagaaaggaattttcagtatcgaaacgagcgggccatggtgttttccaaataatgagtggaacgcttcataacactgtaggatcaggaatattaccttatcaacaagagattcgtatcaaacttactagtaatgaaccaattaaagatagtgaatggtctattacaggatatcctaacacgcttacattacaaaacgctgtgggtagaacaaataatgctactgaaaaaaacttagctcttgttggtcatattgatccaggaaattatttcatcactgttaagtttggtgataaagtagaacaatttgaaattagatcaaaaccaactccaccaagaatcattacaactgctaatgaattacgtggaaatcctaaccacaagcctgaaataagagtaacagatataccaaatgatactactgctaaaatcaaacttgtgatgggcggaaccgatggtgatcatgatccagaaataaatccatatactgtccctgaaaactacacagtagttgcagaagcataccatgataatgatccaagtaaaaatggggtcttaacattccgtttatcagactaccttaaagatctaccattaagcggtgaattaaaggcaattgtttattacaatcaatatgtacaatcaaactttagtaatagcgttccgtttagtagtgatacaacaccacctacaattaatgaaccggcaggactagttcataagtattacaggggagatcatgtagaaattactcttccagtcactgataatactggcggttcaggtttaagagatgtaaacgtcaatttacctcaaggttggacaaaaacctttacaatcaatcctaataataatactgagggtacgcttaagttaattggtaatatacctagtaatgaagcatataatacgacatatcatttcaatattactgcaaccgataattctggaaatacaacaaatccagctaaaacttttattttaaatgttggtaagttggctgatgatttaaatccagtcggattatctagagatcaactacaattagtgacagacccttcttcattatctaattccgaacgagaagaggtaaaaagaaaaataagtgatgcaaatgctaatataagatcatatttattacaaaataacccaatactcgctggagtaaacggcgatgttacattttattatagagatggttctgtagatgttattgatgctgaaaatgtaatcacatatgagcccgaaagaaaatccattttcagtgaaaatggtaatacaaataaaaaagaagcagtaatcactattgctagaggacaaaactataccattggtccaaacttaagaaaatatttctcattaagtaatggttcggatttacctaatagagatttcacctctatatcagctattggatctttaccttcatcgagtgaaattagtcgactcaatgttggaaattataactatagagttaatgctaaaaatgcttatcataagactcaacaagaacttaatttaaaacttaaaatagtagaggttaatgcacctactggtaataatcgtgtatatagagttagtacttataatttaactaatgatgaaatcaataaaatcaaacaagcatttaaagcagctaattctggacttaatttaaacgataacgatatcactgtttcgaataactttgaccatagaaatgttagtagtgtgacagtaactatacgtaagggcgatttgataaaagagttttcatcaaatctcaataatatgaatttcttacgttgggttaatataagggatgattataccatttcgtggacttctagtaagattcaaggtagaaatacagatggtggattagaatggtcaccagatcataaatcacttatttataaatatgatgcaacattaggtagacaaataaatactaatgacgtgttaactttacttcaaacaacagctaaaaactcaaatttacgttcaaatatcaatagtaatgaaaaacagttagcagaacgagggtctaatgggtattctaaatctataattagagatgatggcgagaaatcttatttacttaactcaaatcctattcaagtattagacttagtagaaccagataatggttacggtggacgtcaagtcagtcattctaacgttatatataatgaaaaaaattcttctatcgtaaatggtcaagttccagaagctaatggggcatccgcttttaatattgataaagttgttaaagctaatgcggcaaataatggtattatgggtgttatctataaggcacaattatacttagcaccatacagtccaaaaggttacattgaaaaattaggccaaaatttaagcaataccaataacgtgattaatgtttattttgtgccttctgataaagtaaatcctagtataactgtaggtaattacgaccatcatacggtatattctggtgaaacatttaaaaatactatcaatgtaaatgataattatggattaaatacagtagcttctacaagtgatagtgcaattactatgaccagaaacaacaacgagttagtaggtcaggctcctaatgttactaatagcacaaataaaattgtaaaagttaaagccacagataaaagtggaaatgaaagtattgtttctttcacagtaaatataaaaccattaaacgagaaatatagaataacaacttcatcaagtaatcaaacaccagtgagaattagtaatattcaaaacaatgctaacctttcaattgaagatcaaaatagagtaaaatcttcactcagcatgactaaaattttaggtacaagaaattatgtcaatgagtcaaataatgacgttcgtagtcaagttgtaagtaaagtaaatagaagtgggaacaatgctacagttaatgttacaactacattttctgatggtacaactaatacaataaccgttccagttaaacatgtgttattagaagttgtacctactactagaacaacagtaagaggacaacaatttccaaccggcaaaggaacttccccaaatgatttctttagtttaagaacgggaggtccagttgatgcgagaatagtttgggttaataatcagggacccgatataaacagtaatcaaattggtagagatttaacattacacgctgaaatattctttgatggtgaaacaacaccaattagaaaagatacgacttacaaacttagtcaatctattccaaagcaagtatatgaaacaactatcaatggtcgatttaattcatcaggcgatgcatatccaggaaattttgttcaagcagtaaatcaatattggccagaacatatggacttcagatgggcccaaggatcaggtacaccaagttctcgtaatgcaggttcatttactaaaacagttacggtagcttatcaaaacggccaaactgaaaacgttaatgtactattcaaagtcaaaccaaataaacctgttattgatagtaatagtgtgatttcaaaaggacaattaaatggtcaacaaattttagttcgaaatgttcctcaaaatgcacaagtcactctatatcaatcaaatggaactgttattcctaatacaaatacaactatagattctaacggtatagctactgtaacaattcaaggcactctaccaaccggaaatattactgctaaaacttcaatgacaaataatgtaacgttcactaaacaaaatagtagtggaattgcttcaaatacaactgaagatataagtgttttttcagaaaacagtgatcaagtaaatgttaccgctggcatgcaagctaaaaatgatggtattaaaataattaaaggtacaaactataattttaatgacttcaatagtttcataagtaatataccagcgcattctactcttacatggaacgaggatcctaatagttggaaaaacaacatcggtactataacaaaatctgttacggttactctacctaatcatcaaggtacgagaactgtagatattccaataacaatctatccaacagttacagctaagaatccagtaagagatcaaaaaggacgaaacttaaccaatggtactgacgtttataattatattatttttgaaaataataaccgtcttggaggaacagcttcttggaaagacaatcgtcaacctgataaaaacatagccggtgtacaaaatttaattgcacttgttaattatcctggcatatctacaccgttagaagttcctgttaaagtgtgggtatataattttgatttcactcaacctatctacaaaattcaagtaggagatacattccctaaaggaacatgggcaggctattacaaacatcttgaaaatggagagggattaccaatagatggttggaaattttattggaaccagcaaagtacaggaactactagtgatcaatggcaatcattagcatatactagaactccttttgttaaaactggtacttatgatgtcgttaatcctagcaactggggtgtttggcaaacatcacaatcagctaaatttatagttacaaatgctaaacctaatcaaccaaccataactcagtctaaaactggtgatgtaacagtaacacctggtgctgtgcgtaatatactaataagtgggacaaatgattatatccaagcatctgcagataagattgttattaataaaaatggaaataaattaactacatttgttaaaaataatgatggccgttggactgttgaaactgggtcacctgacataaatggtatcggaccaacaaataacggaactgctatatctttaagtcgattagcagttagacctggggattcaatagaagcaatagcgactgaaggttccggagaaactataagtacttcagcaactagtgaaatttatattgtcaaagctccacaacctgagcaagtagcaactcatacttatgataatggaacattcgatatattacctgacaattcacgtaattctttaaatccaactgaacgtgtcgaaattaattacactgaaaaattaaatggcaatgaaacacaaaaatcattcactattactaaaaataacaacggcaaatggacgataaataataaaccaaattatgtcgagttcaatcaggataacggtaaagttgtattttcagccaatacaattaaacctaattctcaaattacaataactcctaaagcaggtcagagtaacactgaaaacacaaatcctactgtaattcaagcacctgcgcaacatactttaacaatcaatgaaattgttaaagaacagggtcaaaatgtaactaatgatgatattaataatgcggttcaagtgccaaataaaaatagagttacgattaaacaaggaaacgctcttccaacaaatttagctggtggtagtacatcacatattccagtagttatttattacagtgatggaagttctgaagaagctactgagactgttagaactaaagttaataaaaccgaattaatcaatgcacgtcgtcgcctagatgaagaaattagtaaagagaataaaacaccatcaagtatcagaaactttgatcaagctctgaatcgtgctgaatcacaaattaataccgctaaaagtgaagctgaccaagttataggcacagaatttgcaacacctcaacaagtaaattcagctttatccaaagttcaagcggcacaaaataaaataaatgaagctaaagcattattacaaaacaaggctgataatagtcaactcgtgagagcaaaagaacaattacaacaaacgattcaaccagccgcttcaactgatggtgtgactcaagatagcacaaggaactacaacaataaacgccaagcagctgaacaagcaatacaacatgcaaatagcgttataaataatggagacgcaacatcccaacaaattaatgatgctaaaaatacagttgaacaggcacagagagattatgttgaagctaaaagcaacttacgtgctgataagtcacagttacaaagcgcttatgatacgttaaatagagatgttttaacaaatgataaaaagccagcatctgtaagacgctataatgaagccatttcaaatattagaagagaattagatacagctaaaggggatgcaagtagtactttgcgaaacaccaatccttccgttgaacaagttagagacgctttaaataaaataaatactgttcaacctaaagtgaatcaagcaattgctttacttcaaccaaaagaaaataattcagaacttgtacaagctaaaaaacgtttacaagacgctgtaaatgacatacctcaaacacaaggtatgacacaacaaacaattaataattataatgacaaacaacgtgaagctgaaagagcacttacatctgcacaaagagtgattgataatggggatgctacaactcaagaaattacttctgaaaaatctaaagtagagcaagcaatgcaagctttaactaatgctaaaagtaatctgagagctgataagaatgagttacagactgcatataacaaattaattgagaacgtatctaccaatggtaaaaaaccggcgagtatacgtcaatacgaaacagccaaagccagaatacaaaatcaaattaatgatgctaaaaatgaagcggaacgaattttaggtaatgataatccacaagtatcacaagtaactcaagcattgaacaaaatcaaagctattcaaccaaaattaacagaagctatcaacatgcttcaaaacaaagaaaataatacagaattagtcaatgctaaaaacagacttgaaaatgcagtaaatgatacagatccaacacacggtatgactcaagaaacaattaataattactacgctaaaaagcgagaagctcaaaatgaaatacaaaaagcgaacatgattattaataatggagatgctactgctcaagatatttcttctgaaaaatctaaagtaaggcaagtattacaagcattacaaaatgctaagaatgacttaagagctgataaaagagaattacagactgcatacaataaacttatacaaaatgttaataccaatggtaaaaaaccatctagtattcaaaactataagtctgcaagacgaaatatcgaaaaccaatataataccgctaaagatgaagcacaaaatgttcttgaaaatacaaaccctactgtaaatgcagtagaagatgctttacgtaagataaatgcaattcaaccagaggttacaaaagctattaatatacttcaagataaagaagataatagcgaacttgttagagcaaaagaaaaattagatcaagcgattaatagtcaaccatcactaaatggtatgactcaagaatctattaataattacacaacaaaacgtagagaagcacaaaatatagcaagttctgctgacactattattaataatggggatgcatctattgaacaaataacagaaaataaaattcgagttgaagaggcaactaatgcacttaacgaagcaaaacaacatttaacggcagatacaacttctttaaaaactgaagtacggaaattaagtaggagaggcgacacaaacaacaaaaagcctagcagtgttagtgcttataacaatactattcattcgctacaatctgaaattacacagactgaaaatagagcaaatactatcatcaataagcctattcgttctgttgaagaagtaaataatgcattgtatgaagtaaaccaattgaaccaacgcttaacagatacaattaacttattacaacctttagcgaataaagaaagcttaaaagaagctcgtaatcgacttgaaagtaaaattaatgaaaccgttcaaacagacggtatgactcaacaatctgttgagaattataagcaagctaaaataaaagctcaaaatgaatctagtattgcacaaactcttattaataatggtgatgcatctgatcaagaagtttctacagaaatagaaaaattaaatcaaaagctgtctgaattaacaaattcaatcaatcacttaacagttaataaagaacctttagaaactgccaaaaatcagttacaagcaaatattgaccaaaaacctaacactgatggtatgacgcaacaatctgtacaaagctatgaacgtaaactacaagaagccaaagataaaataaactcaattaataatgtcttagctaacaatccagatgttaatgctatcagaacaaacaaagttgagacggaacaaatcaataatgaattaacacaggcgaaacaaggtcttactgttgataaacaaccattgattaatgcaaaaactgctttgcaacaaagtctagataatcaaccaagtactactggtatgactgaagcaacaattcaaaattataacgctaaacgtcaaaaagcagagcaagttatacaaaatgcaaataaaattattgaaaacgctcaacctagtgtacaacaagtgtctgatgagaaatctaaggtagagcaagcactcagtgaattgaacaacgccaaatcagcgcttagagctgataaacaagaattacagcaagcatataatcagttgattcaaccaacggatttaaataataagaaaccagcttctatcactgcgtacaatcaaagatatcaacaatttagtaacgaattgaacagcactaaaacaaatacagatcgcattttaaaagagcaaaatccaagtgtagctgatgtcaacaatgcactaaataaagtaagagaagtacaacaaaaattaaacgaagccagagcacttttacaaaataaagaagataatagtgcactagttcgagccaaagaacaacttcaacaggcagttgaccaagtcccttcaacagaaggtgtgacgcaacaaactaaagatgattacaattcaaaacaacaagctgctcaacaagaaatatcaaaagcacaacaagttatcgataatggcgatgcgactacacaacaaatttctaacgccaaaacaaatgttgaatgcgctttagaagcattaaataatgcaaaaactggtttaagagcagataaagaggaacttcaaaatgcatataatcaattaactcaaaatattgatacgagcggtaaaacgcctgcaagtatcaggaaatacaatgaagctaagtcacgtattcaaactcaaattgattcagctaaaaatgaagcaaacagtattttaacaaatgacaatcctcaagtatcacaagtgactgctgcgttaaacaaaataaaagctgttcaacctgaattagataaagcgatagcaatgcttaaaaataaagagaataataatgcattggttcaagcgaaacaacaacttcaacaaattgttaatgaagtagatccaacacaaggcatgacaacagatactgctaataactataaatcaaaaaaacgtgaagctgaagatgaaatacaaaaagctcaacaaatcattaacaatggcgatgccactgagcaacaaattactaacgaaacaaatagagtaaatcaagcgattaatgcattaaataaagctaaaaacgatttacgtgctgataagtctcaattagaacacgcttataaccaactaatacaaaatgttgatacaaatgataaaaaacctgcaagtattcaacaataccaagctgctcgacaagccattgagacacaatacaataaagctaaatcagaagcacatcaaattcttgaaaatggtaacccctcagttaatgaagtagcacaagcattacaaaaagttgaagctgtacaacttaaagttaatgacgcgattcatatgcttcaagataaagaagataacagtgcacttgtcacagcaaaaaatcaacttcaacaagcagttaatgatcaaccattaacaacaggtatgactcaagcttctattaataactatgaagctaagagaaatgaggctcaaagtgctatcagaaatgcagaatctgtcatcaacaatggcgatgcatcagcaaaacaaatttcagacgagaaatctaaagttgaacaagcactagcacatttgaatgaggctaaacaacaattgactgcagacacgagtcaattacaaacagctgttcaacaattaaaccgaagaggcgatataaataataaaaagccaagaagtatcagtgcatataataaagcaattcaatcattagaaacacaaattacgtctgctaaagataatgccaacgctgtgatacaaaaacctatacgaactgttcaagaagtaaataatgcattacatcaagtgaatcagttgaatcaacaattaactgaagcaattagtcaacttcagccactatcaaataatgatgcattaaaagctgcaagattagagttagaaaataaaataaatcaaacagtacaaactgacggtatgacgcaacaatctatagacgcttatcaaaacgctaaacgtgaagcccaaaatgagtctaacactgctttagcattaattaataatggtgatgccactgaacaacaaattacaactgaaacagaccgagttaatcagcaaactacaaatttaactcaagcaatcaatgggttaacagttaataaagaaccattagaaaccgcaaaaacagcgttacaaaataacatcgaccaagtacctagtacagatggtatgactcagcaatcagttgctaattataatcaaaaactacaaatagctaaaaacgaaattaacacaattaataacgttttagctaacaatcctgatgttaatgcaattagaacaaataaagcagaagcggaacgaatcagtaatgatttaacacaagctaagaataacttacaagttgatactcaacctttagaaaaaataaaaagacaactacaagatgaaattgatcaaggtactaacacagatggaatgactcaagattcagtggataactataatgatagcttaagtgcagcaattatagaaaaaggcaaagtaaataaattacttaaacgtaatccgacagtagcacaagttaaagaaagcgttgctaatgcacaacaagttatacaagatttacaaaatgctcgtaattcacttgttccagacaaaactcaacttcaagaagctaaaaatagattagaaaatagtattaaccaacaaacagatactgacggtatgactgaagattcacttaataattacaatgataaattaactaaagctagacaaaatcttgaaaaaatcactcaagttttaaacggccaacctactgtagctgaaataagacagaacactagcgaagctaatagtcatacacaagcgttagacactgctcgttctcaacttacattaaatagagagccatatatcaatcatataaataatgaaagtcatttaaataacgcgcaaaaagataattttaaagctcaagttaactcagcacctaatcataatactttagaaatgattaaaaataaggctgatactataaatcaatctatgacagcattaagtgaaagtattgctgattacgaaaatcaaaaacaacaagaaaattatttagatgcatctaacaataaacgtcgagactatgacaatgcagttaatgcggctaaaggtattttaaaccaaactcaaagtccgacaatgagtgctgatgtgattaatcaaaaagctgaagatgttaaacgtacgaaaactgcgttagatggaaatcaaagattagaagctgctaaacaacaagcacttaatcatttaaataccttaaatgatttaaacgatgctcagcgacaagctttaactgatactataaatcactctccaaacatcaattcagtgaatcaagctaaagaaaaagctaatactgttaacacagcaatgactcaactgaaacaaactattgctaactatgacaatgaattgcatgacggcaattacattaatgcagataaagacaaaaaagatgcttataataacgctgttaacaatgctaaacaactgattaatcaatctgatgctaatcaagcacaacttgatccagctgaaattaataaagttacacaaagagtcaatacgactaaaaatgatctaaatggtaatgacaaattggctgaagctaaaagagatgctaatacaaccattgatggtttaacttatctaaatgaagctcaacgtaacaaagctaaggaaaatgtaggcaaagcttctacaaaaacaaatatttcgagtcagttacaagattacaatcaattgaatactgctatgcaagcattacgtaacagtgtgaacgacgttaacaatgttaaagcaaatagcaattatataaatgaagataatggtccaaaagaagcttacaatcaagccgttactcatgctcaaacattgataaatgcacaatctaaccctgaaatgagccgtgacgtagtaaatcaaaaaacacaagcagtaaatactgcccatcagaatttacatggacaacaaaagttagaacaagcacaaagtagtgctaatacagaaatcggtaacttaccaaacttaactaatactcaaaaagctaaagaaaaggaactggtaaatagtaaacaaactcgtacggaagtacaagaacaacttaaccaagctaagtcactagatagttctatgggcacgttaaaatcattagttgctaaacaacctacagtacaaaaaacaagtgcttatattaacgaagatcaacctgagcaatctgcctacaatgattccattacaatgggacaaactataattaataaaacagctgatccagtacttgataaaactttagttgataacgcaattagtaacatttcaactaaagagaatgcactacatggtgaacaaaaattaataactgctaaaacggaagcaattaatgcacttaatacattagctgatttaaatacacctcagaaagaggctattaaaacagctattaacactgctcatacaagaactgatgtaactgcagagcaaagtaaggctaatcaaataaatagtgcaatgcacacgttgagacaaaacatttctgacaacgaatcagtaacaaacgaaagtaattatattaacgctgaacccgaaaaacaacatgcctttactgaggctctaaataatgctaaagaaatagttaatgaacaacaagccactcttgatgccaattcaattaaccaaaaagcacaagcgattcttactactaaaaatgctttagatggtgaagaacaattacgtcgtgctaaagaaaatgccgatcaagaaatcaatacgttaaatcaattgactgatgcgcaaagaaatagtgaaaaaggtttagtcaacagttctcaaactagaacagaagttgcttctcaattagcaaaagctaaagaactaaataaggtgatggaacaactgaatcaccttatcaatggtaaaaaccaaatgataaatagcagtaaatttatcaatgaagatgcgaaccaacaacaagcatattcaaatgcgattgcaagtgcagaagcgcttaaaaacaaatcacaaaaccctgaattagataaagtaacaattgaacaagcaattaataatattaattctgcaattaacaatctaaacggtgaagctaaactgactaaagctaaagaagatgctgttgcttcaataaacaacctaagcggattaacaaacgagcaaaaaacaaaagaaaatcaagccgttaatggcgctcaaactagagaccaagttgctaataaattacgtgatgctgaagcattaaatcaatcaatgcaaacattacgtgacttagttaacaatcaaaatgcaatacattcaacaagtaattattttaacgaggattcaactcaaaagaatacttatgataatgcaattgataatggctcgacatatataactggtcaacacaatccagaattaaataaatctactattgatcaaacgattagccaaattaacacagctaaaaatgatttacatggtgcagaaaagttacaaagagataagggaactgctaatcaagaaattggacaattaggttatttaaatgaccctcaaaaatctggtgaggaatccttagtcaacggttcaaatacacgttctgaagtagaagagcatcttaatgaagctaaatcattaaataatgcaatgaaacaattaagagataaagtagctgaaaagactaatgtcaaacaaagtagcgattacattaatgattcaactgaacatcaacgtgggtatgatcaagcacttcaagaagcagaaaatattattaatgaaatcggtaatccaacattaaataaatcggaaattgaacaaaagttacaacaattgactgacgctcaaaatgcgttacaaggttcacatctattagaagaagctaaaaataatgcgattactgaaatcaataaacttacagcattaaatgatgcacaacgtcaaaaagcaattgaaaatgttcaagtacagcagacaatcccagcagttaatcaacaattaactttggatagagaaataaattctgcaatgcaagctttacgagataaagtaggccaacaaaataacgttcaccaacaaagtaattatttcaatgaagatgaacaaccaaaacataactatgataattctgtacaagccggtcaaactattattgataaacttcaagatccaatcatgaacaaaaatgaaattgagcaggctattaatcaaatcaatacgactcaaacagcgttaagtggagaaaataaattacacactgaccaagaaagcacaaatagacaaatagaaggtttatctagtttgaacacagctcaaatcaacgccgaaaaagatttagtcaatcaagctaaaacaagaacagatgttgctcaaaagttagctgcagctaaagaaataaattctgctatgagtaatttaagagatggcattcaaaataaagaggacatcaaacgtagcagtgcatatatcaacgcagatccgactaaagttacagcttacgatcaagcactacagaacgcagaaaatatcatcaatgccacaccaaacgtagagcttaataaagctacaattgaacaagcgctatcacgcgttcaacaagcacaacaagatcttgatggtgttcaacaattagctaatgctaaacaacaagctacacaaactgtcaatgggttaaatagcttaaatgacggtcaaaagcgtgaattaaatctattaattaattcagctaatacccgtacaaaagtacaagaagaattaaacaaagcaactgaattgaaccatgcgatggaagctttaagaaacggtgttcaaaacgttgatcaagtaaaacaaagtaacaattatgtcaatgaagatcaacctgaacagcacaattatgataatgctgtcaatgaagctcaagctacaatcagcaacaatgctcaacctgttctagacaaattagctatagaacgtttaactcaaactgttaacactacaaaagatgcattacatggtactcaaaaactgacacaagaccaacaagctgctgaaactggaatacgtggtttaacgagtctcaatgaacctcagaaaaatgctgaagtagctaaagtaactgcagcaacaacacgtgatgaagtgagaaatattcgtcaagaagcaacaacattagatactgcaatgcttggtttacgtaaaagcattaaagataaaaacgatactaaaaatagtagtaaatatattaatgaagatcatgaccaacaacaagcttatgacaatgctgtaaataatactcaacacgttatcgatgaaactcaagcaacgttaagctcagatacaatcaatcaattggcaaatgccgtaactcaagctaaatctaatcttcatggagatactaaactacaacacgataaagatagtgctaaacaaacgattgctcaattacagaatttgaattcagctcaaaaacatatggaagattctttaattgataatgaatctacacgtacgcaagtccaacacgatttaacagaagctcaagctttagatggtttaatgggtgccttaaaagaaagtattaaagataatactaatattgtttcaaacggtaattacatcaatgcggaaccatctaagaaacaagcatatgatgccgctgtacaaaatgctcaaaatataataaatggaacaaatcaaccaaccattaataaaggtaatgtcactacagcaactcaagccgtgaaaaatactaaagatgccttagatggtgatcatagattagaggaagctaaaaataatgctaatcaaacaatcagaaatctatctaatttgaacaatgcccaaaaagatgcagagaaaaatctagttaatagcgcatcaacattagaacaagttcaacaaaacttacaaaccgctcaacaattagataatgctatgggtgagttacgacaaagtattgctaataaagatcaagtgaaagcagatagtaaatatctaaatgaagatcctcaaattaagcaaaactatgatgaggcagttcaacgtgctgaaactattattaacgaaactcaaaaccctgaattacttaaagcaaacattgaccaagcaactcaatccgttcaaaatgcaaaacaagctttacatggtgctgaaaaattaaatcaagacaaacaaacgtcttcgacagaactagatggattaacagatttaacagatgcacaacgtgaaaaactcagagaacaaattaacacttctaatagtagagatgatattaagcaaaaaattgagcaagcaaaagcactaaatgacgcaatgaaaaaacttaaagaacaagttgcgcaaaaagatggtgttcatgctaacagtgattatacaaatgaagattctgcacaaaaagatgcgtataataatgcacttaaacaagcggaagacattattaataacagctcaaatcctaacttaaatgcacaagacattactaatgctttaaataatattaaacaagcacaagataaccttcatggagctcaaaaattacagcaagacaaaaatacaactaatcaagccattggtaacttaaatcatcttaatcaacctcaaaaagatgcgcttatacaagctattaatggagctacatctagggaccaagttgcagaaaaacttaaagaggccgaagcgcttgatgaagctatgaaacaacttgaagatcaagtgaatcaagatgatcaaatttcaaatagcagcccattcataaatgaagactcagacaaacaaaaaacttataatgataaaatccaagctgcaaaagaaataattaatcaaacatctaatccaaccttagataaacaaaaaattgctgatacacttcaaaatattaaagatgcagtgaataatttacatggtgatcaaaaattagctcaatctaaacaagacgctaataatcaattaaatcatttagatgacttaaccgaagaacaaaaaaaccattttaaaccgttaattaataatgctgatactcgagatgaggtaaataaacaactagagattgctaaacaattaaatggtgatatgagtacacttcataaagtcataaatgataaagatcaaattcaacatttaagcaattacattaatgctgataatgataaaaaacaaaattatgataatgctattaaagaagctgaggatttaattcataatcatccagatacattagatcataaagcattacaagatttattaaacaagatagaccaagcgcataacgaattaaatggagaatccagatttaaacaggctttagacaatgctttaaacgacatagatagcttaaacagtctcaatgttccacaacgtcaaactgttaaggataacatcaaccatgtgacaactctagaaagtttagctcaagaattgcagaaagcaaaagagcttaatgatgctatgaaagcaatgagagatagcattatgaatcaagagcaaattcgtaaaaatagcaattatactaatgaagacttagctcaacaaaatgcctataatcatgcagtagataatataaataacattattggtgaagacaatgcgacgatggatcctcaaataatcaaacaagcaactcaagatataaatacagctataaatggattaaatggagatcaaaaacttcaagatgcaaagacagatgctaaacaacaaattactaactttactggtttaactgaaccacaaaaacaagcattggaaaacatcattaaccaacaaacaagcagagcaaatgttgctaaacagttaagtcatgctaaattcttaaatggaaaaatggaagaattaaaagttgcagtagccaaagcgtcattagtaagacaaaatagtaactatattaatgaagatgtctctgaaaaagaagcatatgaacaagctattgcaaaaggtcaggaaataattaattcagaaaataatccaacaataagtagtactgatatcaatcgtaccattcaagaaattaatgatgctgaacaaaatcttcatggtgaaaataaattaagacaagcacaggaaattgcaaagaatgaaatacaaaatctagacggattaaattcagctcaaataacaaaattaatccaagatataggcacaacaacaactaaacctgcagtaactcagaaactagaagaagcaaaagcaataaaccaagctatgcaacaacttaaacaaagtatagccgataaggatgctactctaaattctaataactatctcaatgaagattctgagaaaaagttagcgtacgataatgctgtaagccaagctgaacaactcataaatcaacttaacgacccaactatggatataagtaatattcaagctattactcaaaaggtcattcaagcaaaagattcattgcacggtgcgaataaacttgcacaaaatcaagcagattcaaatttaataataaatcaatcaacaaatttaaatgataaacaaaagcaagcattaaatgacttaattaatcatgctcaaactaaacagcaagtggcagaaataattgcacaatctaataagttaaataacgaaatgggcacactaaaaacactcgtagaagaacagacaaacgttcatcaacaaagtaaatatattaatgaagattcgcaagttcaaaatatttataatgactccattcaaaaaggtcgagaaatattaaacggcattacagatgatgttttaaacaacaataaaatagcagatgccattcaaaacattcatttaactaaaaacaatttacatggtgatcaaaaattacaaaaagcacaacaagatgcaactaatgaattaaactatttaacaaatctaaacaattctcaaagacaaagcgagcatgatgagattaactctgctccttcaagaactgaagtttctaatgatttaaatcatgctaaagcacttaatgaagctatgcgtcaacttgagaatgaagttgctcttgaaaacagtgttaaaaaattaagcgactttatcaatgaagatgaagcggcacaaaatgaatatagtaatgcacttcaaaaagctaaagacattatcaacggcgttccaagtagcactttagataaagctacaattgaagatgctttattagaattgcaaaatgctagagaaagtttacatggtgagcaaaaacttcaagaggctaaaaatcaagctgttgctgaaattgataatttacaagcattaaatcctggacaggttcttgctgaaaaaacattagttaaccaagcatcaaccaaaccagaagttcaagaagccttacaaaaagcaaaagaacttaatgaagctatgaaagcactgaaaactgaaataaataaaaaagaacaaatcaaggctgatagtagatatgtaaatgctgacagtggtcttcaagcaaattacaattctgcgttaaattatggttctcaaattattgcaactacccaaccaccagagcttaataaagatgtaataaatagagcaactcaaacgattaaaactgctgaaaataatttaaatgggcaatctaaattagcagaggctaagtcagacggaaatcaaagcatcgaacatttgcaaggattaacacaatcacaaaaagataaacaacatgatttaattaatcaagctcaaactaaacaacaggtagatgatatcgtaaataactctaaacaattagataactctatgaatcaactacaacaaattgttaacaatgacaatacagtaaaacaaaatagtgatttcattaatgaagattccagccaacaggatgcttataatcatgcaattcaagcagcaaaagatttgataactgctcatcctactatcatggataaaaatcaaatagatcaagctattgaaaatatcaaacaagcacttaatgatttacacggtagtaataaactatcagaagataaaaaagaagcttcagaacaactacaaaaccttaatagcttgacgaacgggcaaaaaaatacgattttaaatcatattttcagtgcaccaacaagaagccaagtaggagaaaaaattgcaagtgctaaacaattaaataatacaatgaaagcacttagagattctattgctgataataatgaaattttacaaagtagtaagtacttcaatgaagattctgaacaacaaaatgcttataatcaagccgtaaataaagctaaaaatataattaatgatcaaccaacaccagtaatggcaaatgatgagattcaaagtgtcctaaatgaagttaaacaaactaaagataatttacatggtgatcaaaaacttgctaacgacaagacagctgctcaagcaacattaaatacgttaaatcacttaaatcaagcgcaaagaggtaatcttgaaactaaagttcaaaactctaattctagaccagaagtacaaaaagtagttcaattagcaaatcaacttaatgatgcgatgaaaaaattagatgatgctttaactggtaatgacgcaataaaacaaacgagtaattatattaatgaagatacttctcaacaagttaactttgatgagtatacagatagaggtaaaaacatagttgctgaacaaacaaatccaaatatgtctccaactaatattaacactattgctgataaaattactgaagctaaaaatgatttacatggcgtacaaaaactagaacaagctcaacaacagtccatcaatactattaatcaaatgactggtctaaaccaagctcaaaaagaacaattaaatcaagaaattcaacaaactcaaacccgttctgaagtacatcaagtaattaataaagcacaagctttaaatgattcaatgaatactttacgtcaaagtatcactgatgagaatgaagttaaacaaacaagtaactacatcaatgaaactgttggtaatcaaactgcatataacaatgccgttgatcgtgtaaaacaaataatcaatcaaacatctaatccaactatgaatcctttagaggtggaacgtgcaacatcaaatgtaaaaacttctaaagatgcacttcatggtgaacgtgaattgaatgacaataaaaattcaaaaacttttgcagtcaatcacttagataacctcaatcaagctcaaaaagaagcattaactcatgaaattgaacaagcaactatagtttcacaagtaaataatatctataacaaagcgaaagctttaaataatgttatgaaaaaacttaaagatatcgttgctcaacaagataatgtgagacaatcaaacaattatataaacgaggatagtacacctcaaaatatgtacaacgatacaattaatcatgcacaatcaatcattgatcaagtagcaaaccctacgatgtctcatgacgaaatagataatgcaatcaataacataaagcatgccatcaatgcactcgatggagaacataaattacaacaagcaaaagaaaatgcaaacttattgattaatagtttaaacgatttaaatgcaccacaaagagatgccataaatagattggttaatgaagctcaaacaagagaaaaagtagctgaacaacttcaaagtgctcaagctctaaatgatgctatgaagcatttaagaaacagcattcaaaatcaatcatccgtaagacaagagagcaaatatattaatgcaagtgatgataaaaaagagcaatataatcacgcagttagagaagtcgaaaatattatcaatgaacaacatccaacattggataaagaaataattaagcaactaacggatgctgtaaatcaagcgaataatgacttaaatggcgttgaattattagatgctgataagcaaaacgcacatcaatcgatacctacattgatgcacttaaatcaagcacaacaaaacgcattaaatgaaaaaattaataacgcagttaccagagctgaagttgcggctattattggccaagcaaaaatactcgatcatgctatggagaatttagaagaaagtatcaaagataaagagcaagtcaaacagtcaagtaactatattaatgaagaccctgatgttcaagaaacatacaataacgccgttgatcatgtgacagaaatacttaatcaaacagtaaatccaactttatctattgaagatatagagcatgctatcaacgaagttaatcaagcgaaaaaacaactcagaggtaaacaaaaactttatcaaactatcgatttagctgataaagaattaagtaaattggatgatttaacatcacaacaaagcagttcaatatctaatcaaatatatactgctaaaacgagaacagaagttgcccaagcaattgaaaaagcaaaatcattaaatcatgcaatgaaagcacttaacaaagtatataaaaatgcagataaagtgttagatagtagtcgattcattaacgaagatcaacctgaaaaaaaggcgtatcaacaagctataaatcatgttgattcaatcattcatagacaaacaaatcctgaaatggatccaacagtaatcaatagcataactcatgaactcgaaacagctcaaaataacttacatggtgatcagaaacttgctcatgcaaaacaagatgccgctaatgtaattaatggtctaattcatcttaatgttgctcaacgtgaggtaatgataaatacgaatacaaatgctacaacacgcgaaaaagttgcaaagaacttagataatgctcaagctcttgataaagctatggaaacactacaacaagtagttgctcataaaaataatatattgaacgatagtaaatatttaaatgaagattcaaaatatcaacaacaatacgatcgagttattgctgatgccgaacaactacttaatcagacaacaaatccaacattagaaccttataaagtcgatattgttaaggataatgtcctagctaacgaaaaaatactatttggcgcagaaaaactatcatatgacaaatcaaatgcaaatgatgaaattaaacatatgaattatcttaataatgcacaaaagcaatctataaaagatatgatttctcacgcagcattaagaactgaagttaaacaacttctgcaacaagctaaaacccttgatgaagctatgaaatcacttgaagataaaactcaagtagtgattacagatactactttgcctaattacactgaagcttcagaggataaaaaggaaaaagtagaccaaactgtatcacatgctcaagcaatcattgataaaataaatggctcaaatgtaagtttagatcaagtacgacaagcactagaacaattaactcaagcatcagaaaacctcgatggtgatcagcgagttgaagaagctaaagttcatgctaatcaaacaattgaccaattaacacatcttaattcattacaacaacaaactgcgaaagaaagtgttaaaaacgcaacaaaactagaagaaatcgctactgctagtaacaatgctctggcattaaacaaagtaatgggtaaattagaacaattcattaatcatgctgattctattgaaaatagtgataattatagacaagccgacgacgacaaaattatcgcttatgatgatgcactagaacatggacaagatatacaaaaatctaacgcaacccaaaatgaagcaaaacaagcgttacaacaattaataaatgcagaaacatcgttaaatggtttcgaaagattaaatcatgctagaccacgagctttagaatatattaaatcactagaaaaaataaacaatgctcaaaagtctgctttagaggataaagtaacgcaatcgcatgatttattagaattagaacatcttgtcaacgagggcacaaacctcaatgacattatgggtgaattagctaacgcaatcgttaataactatgctccaaccaaagcaagtataaattatattaacgccgataacctacgcaaagataactttactcaagctatcaacaatgcacgtgatgcactcaacaaaactcaaggtcagaacttagatttcaatgcaattgatacatttaaagatgatatattcaaaactaaagatgcacttaacggtattgaacgtttaacagctgcaaaatcaaaagcagaaaaactaattgatagtttaaaatttattaataaagctcaattcacacatgcaaatgatgaaattatgaatactaattctattgcacaattatctagaatcgtgaatcaagcatttgatttaaatgatgcaatgaaatctttaagagatgaacttaataatcaagcttttcctgtccaagcaagctcaaattatataaattcagatgaagatttaaaacaacaatttgaccatgctttaagtaatgctcgaaaagttcttgcaaaagaaaatggtaaaaatttagatgaaaaacaaattcagggactcaaacaagtgattgaggatactaaagatgctttaaatggtatccaacgtttatcaaaagctaaagctaaagcaattcaatacgtacaatctttatcttatatcaatgatgcacagcgtcatattgctgaaaataatattcacaactctgatgatttatcatctttagcaaatacattatctaaagctagtgatttagataatgcaatgaaagacttacgagatactatagaaagtaattcaacttctgttccaaatagtgtgaattatattaatgctgataagaatttacaaattgaatttgatgaggcgctacaacaagcaagtgcaacaagttctaaaacttcagaaaatccagcaacgattgaagaagtattaggtcttagtcaagccatttacgatacaaaaaatgcattaaatggtgaacaacgacttgcaactgagaagagcaaagatctaaaattaataaaaggattaaaagatttaaataaagcacaacttgaagatgtcacaaacaaggtaaattcagcaaatactttaacagagttatctcagctcactcaatcaacgttagaattaaacgataaaatgaaattattgagagataagcttaaaactttagtaaatcctgttaaagcaagtttaaattatagaaacgctgattataatttaaaacgtcaatttaacaaagctttaaaagaagctaaaggcgtattaaataaaaatagcggtacaaatgtcaatatcaatgacattcaacatcttttaacacaaatagataatgctaaagaccaattaaatggtgaacgacgtctaaaagaacatcaacaaaaatctgaagtatttattattaaagaattagatatacttaataatgctcaaaaagctgcaataattaatcagattagagcgtctaaagacattaaaataattaatcaaatcgttgataatgcaatagaattaaatgatgctatgcaaggtttaaaagaacatgtagctcaattaacagcaactacaaaagacaacattgaatatttaaatgctgatgaagaccataaattacaatatgattacgctatcaacttagcgaataatgttcttgacaaagaaaacggtacaaataaagacgctaatatcataattggaatgattcaaaacatggatgatgctagagcacttctaaatggaattgaaagacttaaagatgctcaaacaaaagcacataatgacattaaagatacgctcaaacgtcaacttgatgaaattgaacacgctaatgcaacatcaaattctaaagctcaagctaaacaaatggtaaatgaggaagctagaaaagcgctttctaatattaatgacgcaacatcaaatgatttagttaatcaagcaaaagatgaagggcaatctgcaattgaacacatacatgcagatgaattacctaaagcaaaactagatgctaatcaaatgattgaccaaaaagttgaagatataaatcacttaattagtcaaaatccaaacttatcaaatgaagaaaaaaataaactaatatctcaaattaataagttagtaaatggaattaagaatgaaattcaacaagctataaacaaacaacaaatagaaaatgctacaacaaaactagatgaagtcattgaaactactaaaaaattaattatcgccaaagcagaagctaaacaaatgataaaagagttatcacaaaagaaacgagatgcaataaataacaacactgatttaacaccttctcaaaaggcacatgctttagcagatattgataaaacagaaaaagatgcacttcaacatatcgaaaattctaattcaattgatgatatcaataacaataaagagcatgcatttaatactttagctcatatcattatttgggatactgatcagcaaccattagtttttgaactacctgaattgagccttcaaaatgctctagtaacaagtgaggtggttgttcacagagatgaaactatttcattagaatctataattggagctatgactttaactgatgaacttaaagtcaatattgtttcattaccgaacactgataaagtagctgatcacctaaccgctaaagttaaggttattttagctgatggctcatatgtcactgtaaatgttccagtcaaagttgtagaaaaagaattacaaatagctaaaaaggatgctataaaaacaattgatgttctggtaaaacaaaaaatcaaagatatagattctaataacgaattaacgtctactcaacgtgaagatgcaaaagctgaaattgaaagattgaaaaagcaagccatcgataaagtgaatcattcaaaatcgattaaagatattgaaacagtaaaacgaactgattttgaagaaatagatcagtttgatcctaaacgctttacgctaaataaagctaaaaaggatatcattactgatgttaatactcaaatccaaaatggtttcaaagaaattgaaacaataaaaggtttaacttctaatgaaaaaactcagtttgataaacaattaactgcactacaaaaagaatttttagaaaaagtcgagcatgctcataatttagtagaattaaatcaattacaacaagagtttaataatagatataaacatattttaaaccaagcacatttactaggtgaaaaacatatagcagaacataaattaggatatgttgtagtaaacaaaactcagcaaatactaaataatcaatctgcttcttactttataaaacaatgggcacttgatagaattaaacaaattcaactagaaacgatgaattcaattcgtggtgcgcataccgtacaagatgtacacaaagcattattacaaggtatagagcaaatcttgaaagtaaatgtaagtattataaatcaatctttcaacgattccttgcataactttaattatcttcattcaaaatttgatgctagattaagagaaaaggatgttgcaaaccatatcgtacaaactgaaacattcaaagaagttctaaaaggaacgggtgttgaaccaggtaaaatcaacaaagaaacacagcaaccaaaacttcataagaatgataatgatagcctattcaaacatttagttgataatttcggcaaaactgtaggtgttattacattaactggtttactttctagtttctggttagttttggctaaaagacgtaaaaaagaagaagaagaaaaacaatcgataaaaaatcatcacaaagatattcgtctttcagatactgataaaatagatccaattgtaataactaagcgtaaaatagataaagaagaacaaattcaaaacgatgacaaacattcaattccagttgctaaacataagaaatctaaagaaaagcaattgagtgaagaggatattcattcaatccccgtcgttaagcgtaaacaaaacagtgataacaaagatacaaaacagaagaaagttacttctaaaaagaagaaaacgcctcaatcaactaaaaaagttgtaaaaaccaaaaagcgttctaaaaagtaa

SEQ ID NO: 4852 - DNA, 396 bp, Staphylococcus epidermidis
atggctaaaatatattttgatgctgcgactaaaggaaatcccggccgaagtgcttgtgcgattattattaaagaaaattcacaaagatatacatttacccatgatttaggtaaaatggataatcatagtgcagaatgggcagcaatgttacacgctttggaacatgcacgcgaattaaaagtatctaacgcgttactttatactgattcaaaattaattgaagatagtatgatgcaaggtaaagttaaaaatgctaagtttaaagtttattttgaaaacatagaaatcttagagcaaagttttgatttgatgtttgtgagatggattccacgaaagcaaaataaagaagcgaatcaacttgctcaacaaacactatacaaacttacatcacaataa

SEQ ID NO: 4853 - DNA, 705 bp, Staphylococcus epidermidis
atgtataatgaaatatttggtattgcgtcatttattgttacattcgctttaatggtactgatgtatcgctgttttggtaaacaaggactaattgcttgggtagcaataggaacgattatcgctaatatacaggtcataaaagcggttcatatttttggtattacggctacacttggaaatgtcatgtttgcttctatatatttagctactgatatattaaatgacatctatggtcgtaaagttgctaaaagagcggtgtggcttggtttctcttctaccttagtaatgattatagtcatgcaaatgtcattgcattttattcctgctccagtagacaatgcgcaaaactcattaaaaatgatttttgatttagttcctagaattgctataggttccattattgcttatatcataggccaacatattgatgtatttatattcagtatgattaaaaagatatttagctctgataagaccttttttattagagcatatggtagtaccattttaagttctatcattgataccggtttatttgtttcaattgcttttattggtactatgcctggtactgctgtttttgaaatatttattaccacttacttgttaaaactagtgtcaactatttttaatgtaccatttggatatatcgctaagtcactatatcgaaaaggaaagatagaacaactagataatgggtattga

SEQ ID NO: 4854 - DNA, 195 bp, Staphylococcus epidermidis
gtgaaagctatactcactaatacagaacaacaagcaattcaacacatcgaccaattgatgaatatttattgtcaccaatgtccattaaaaaagcacaatagaaaaactcacggtaaaacacaagcacatcatttttgtataaatgaatgtacggtcggtaaacaaattaaacaaattggtaatgagttacaatag

SEQ ID NO: 4855 - DNA, 261 bp, Staphylococcus epidermidis; identical to SEQ ID NO: 3241

SEQ ID NO: 4856 - DNA, 441 bp, Staphylococcus epidermidis; identical to SEQ ID NO: 3240

SEQ ID NO: 4857 - DNA, 1050 bp, Staphylococcus epidermidis
atgtttttagcttggaatgaaataaaaagaaataaaattaaattcagtttagtcattggcatattagtacttataagttatttattattcctactgtcaggacttgcaaacggccttattaaaatgaatactgaaggtatagaaaagtggaatgcagacgctatcatattaaaaaaagatgctaatcaaaccgtagagcaatccttattcaatatatccaaagtacaaaatacttatgaaaaatcaaccacattaaaacaacaaggagttattatctcaaaccatcatcgggaagaaaatgcgttactttttggcgttacacacaaatcatttttaattccgcctataattaaaggtcatcaagttgaaagttcaaatgaaatagtcattgatcaaacattagctgataaggggttcaaaataggtgacatcttatctttatctcaatcagacgaaaagctaaaagtggtaggtattgtagaaagtgctaaatataatgcttcacccgtgctattctctaataatcaaaccattgagaaacttaatcccaaattatcaaaagataaaacaaatgctatagtaatcaaagactcaaattggaaaaatcataaacttaacaaatatttagaaagcatttcaatatcgcagtttattaaaaatcttcctggctataaagctcaaaatttaactttgaactttatgatcgttttcttatttataatttcagcaacagtaattggcgtattcttatatgttataacactccaaaaaacacacttatttggtgtacttaaagcacaaggctttaccaacggctatttagcaaaaatggtttttgctcaaactttcatattatctttaattggaacaatcataggatttctcttaacactattaacaggtacatttttaccgactgtcgttccaattcattttaatttattaacgatgttgatatatggaattgttcttatcattatttctttattaggcagtctattttctgttctgtctataataaaaataaatccacttaaagcaattggatag

SEQ ID NO: 4858 - DNA, 663 bp, Staphylococcus epidermidis
atgttagagttcaaacaagtgagcaaatctttcagagatggcaatcaaatgattcaggcagtaaagcctaccgatttaaaaataattcagggggaactgattgctatcgtgggaccttcaggttcaggaaaaagtacatttttaactatggctggcgccttacaaagacctacgtcaggaaatatttacatcaataacaaaaatatatcaatattatctgaaaaacagttatctcaaataagaattaacgaaataggttttatattacaatcgacgaatctcgtgccttttttaacaatcgaacaacaattcaaacttcttagtaaatataaaaaagatacattaagtgaagatgaatatcaaaagttggttaaacagctaaatttatcggatattaccaatcaattaccaaatcaaatatctggcggtcaaaaacagcgcgtggcaatagctaaagctatttacacaaacccatcaatcatactagcagatgaacctaccgcttcactagatacgaataatgcaatggctgtaatgaaaatacttcaaaaacaaacgaaagaaagaaataaaacatgtgtgattgttactcatgatgaacgtttaactcatttttgtgataaaacatatttcatggaggacggagttctttcactccaatag

SEQ ID NO: 4859 - DNA, 957 bp, Staphylococcus epidermidis
atgtataattcattcgacgaagcttatcatggcttatgcgaagagatattagaaatagggaatagacgcgatgatcgcacacataccgggacaatttccaaatttgggcatcaattgcgtttcgatttaaccaaagggtttcctttacttacaaccaaaaaggtttcttttaaattagtagcaactgaattattatggtttattaaaggagatacaaacattcaatacctacttaaatataataacaatatatggaatgaatgggcatttgaaaattatgttcagtctgatgattatcatggaccagacatgacagattttggacatcgttcccagcaagaccctgaatttaacgagcagtataaagaagaaatgaaaaaatttaaagaacgtattctaaacgatgatgcatttgctaaaaaatatggcaacttagggaatgtttatggtaaacaatggagagattgggaagataaaaatgggaatcattacgatcaattaaaatcagttatacaacaaattaaaaccaatccaaactctcgacgtcacattgtttcagcatggaatcctactgaaatcgattcaatggcattaccaccttgccacacaatgtttcaattttacgtacaagagggtaaattaaattgtcaattatatcaaagaagtgctgatatatttttaggtgttcctttcaatattgcaagttatgctttactgacacatcttgttgcaaaagaatgtggacttgaggtgggtgaattcattcatacatttggagatgcacatatttattccaatcatatggatgcaatacatacacaattatcaagagatagttatctaccacctcaattaaaaattaatacagataaatcaatttttgatattaattatgaagatttagaattgataaattatgaatcacaccctgctattaaagcacctattgcggtataa

SEQ ID NO: 4860 - DNA, 486 bp, Staphylococcus epidermidis
atgacattatcaataattgtcgctcacgataaacaaagagtcattgggtaccaaaatcaattaccttggcacttaccaaatgatttaaagcatgttaaacaactgaccactgggaatacacttgtaatgggacggaaaacttttaattctatagggaaaccattgccaaatagacgtaacgtcgtactcactaaccaagcttcatttcaccatgaaggggtagatgttataaactctcttgatgaaattaaagagttatctggtcatgtttttatatttggaggacaaacgttattcgaggcaatgattgaccaggtagatgatatgtatatcacagtaatagatggaaagtttcaaggagacacattctttccaccatacacattcgaaaactgggaagtcgaatcttcagtagaaggtcaactagatgaaaaaaatactataccgcatacattcttacatttagtgcgtagaaaagggaaatag

SEQ ID NO: 4861 - DNA, 849 bp, Staphylococcus epidermidis
atggctaaacaaattatcgtcacagattcaacctctgatttatcacatgaatatttaaaacaacataacattcacgttataccattaagcctgacaatcgacgggaaatcttatactgatcaagttgatatctcttcaagtgagtatatcgatcatattgaaaatgatgcagacgtcaaaacaagtcaaccacctattggtcgatttattgaaacatatgagcaattagctcaagatgacgttgaaattataagtattcatctttcgtcaggcttaagtggtacttataatactgctgttcaagcgagccatatggtagatggcaatatcacagtgattgattctaaatctatttcgtttgggttaggttatcaaattaagcaaattgttgaattaataagtcaaggtacatcaacagaagaaatagtgaaggaaatgacacagttacgtgataacttgcaactgtttgtggttatcggtcagcttaatcaactcattaaaggtggaaggataagtaaaacaaaaggtttaattggaaacattatgaaaattaagccaatcggaactttaagagatggtaaacttgaactagtgcataattctagaactcaaaactctagtgtgcaatatttaaaaaaagaaattacagattttgttaaagatcataaaattaaatcaataggtattgctcacgccaacgttaaagatttcgttgataaaatcaaaaaatcatttacagagtcatttgattttagccaatttgatattaatgtaacaactccagtgatttctacgcacactggacaaggtgcaattggacttgtggtattgagagatacgttgaactaa

SEQ ID NO: 4862 - DNA, 528 bp, Staphylococcus epidermidis
atggcatatgcgacactagctggaggttgtttttggtgcatggttaaacccttcacctcatatcctggaataaaatcagtcgtttccggatatagtggaggacatgtagaaaatccaacatacgaacaggtatgcacaaatcaaacagggcatgtggaagctgtacaaattgaatatgaccctaatattacaacatttgaaaatatcttagacgtttactttaaaacatttgacccaactgatgacgcagggcagttctttgatagaggtgaaagctatcaacctgtcattttttatcatgatgagaatcaactcaaagctgccgagttaaagaaacaacaaattgacgaagagggtatctttaaaaaacctgttatcacaccgataaaaccatataaaaatttctatcctgcagaagaatatcatcaagattactacaaaaagaatcctacgcattatgaacaataccaacgtggatctggtagaaaagcatttatcgaatcacactggggggctcaaaatgattaa

SEQ ID NO: 4863 - DNA, 429 bp, Staphylococcus epidermidis
atgattaaaaaaaacaaagaagaactgaatgacatggagtatctagtcactcaagaaaatggtactgaacctccgtttcaaaacgagtattggaatcactttgaaaaaggaatttacgttgataaattgtccggcaaaccattatttacttcagaggataaatttgaatctaattgcggttggccaagtttctccaaagcattaaatgatgatgaaatcgtagaacttgttgataaatcatttggtatgattagaactgaagttcgatcagaaaaagcgaatagccacttggggcatgtttttaatgacggacctaaagaaaaaggtggtttaagatactgtattaactctgctgcgattcagtttataccttatgataaactagaagagttaggatatggagatttaattaaacattttaaaaaatag

SEQ ID NO: 4864 - DNA, 501 bp, Staphylococcus epidermidis
atgtttaaaaagttatttggaaaagctaaagaagttgacaaaaacattaaaatctacgcacctttgacaggtgagtatgtcaaaattgaagatattcctgatccagtgtttgcgcaaaaaatgatgggagaaggctttggtattaatcctacagagggtgaggttgtttcaccgattgaaggcaaagtcgataatgtttttccaacgaaacatgccgtagggttaaaagccgaaaatggattagagttattagttcatatcggattagataccgttcaattggatggaaaagggtttgaagtacttgttgaaagtggagatgacattaaaataggtgacccacttatacgttttgacttagaatatattaataataatgcaaaatctattatttctcctattattattacaaactctgaacaaactgaatcaattcatattgaagacgtacaagcagtagttaaaggagaaacacaagttattgatgtgacagtaagctaa

SEQ ID NO: 4865 - DNA, 225 bp, Staphylococcus epidermidis
atggttaagaattattcattttatcaatttattatgaccgtgcgtggaagaaaagacgataaaggtgtttttgctgagcaaatttttgaagaccttgcctttccaaaacacgaagatgattttaatacattatctgaatatattgagacacatagcgaattcaccctaccaatgtctgtatttgatgacttatatgatgactatacagaatggttgaagttttaa

SEQ ID NO: 4866 - DNA, 1476 bp, Staphylococcus epidermidis
atgaatgatcatcaaaaaaatcatgcaacatctcaagatgataacacaaagtcaacaccatctaagaatagcaagcatataaaaattaaattatggcatttcatactcgttattttgggtattattcttttaacatccatcattactgtagtatcaacaattttaattagccatcaaaaaagtggtttaaataaagaacaacgtgcaaatttaaaaaaaattgaatatgtctatcaaacacttaataaagattattacaaaaagcaaagttctgataaattaactcaatctgccatagatggtatggttaaagaacttaaagatccatattcagaatatatgactgctgaagaaacaaaacaatttaatgaaggtgtatcaggtgatttcgttggcataggtgctgaaatgcaaaagaaaaatgaacagataagtgttactagtccaatgaaggattcaccagcagaaaaagctggtattcaacctaaagatatcgtcacacaagtgaatcatcattcggtagtcggtaaaccacttgatcaagttgttaaaatggtccgcggtaaaaaaggaacatatgttactttaactataaaacgtggttcgcaagaaaaggatattaagattaaacgcgataccattcacgttaagagtgtagagtatgagaagaaaggcaatgtaggcgtactaacaatcaataaattccaaagcaatacttctggtgaactcaaatctgcaatcatcaaagcgcataagcaaggcatccgtcatatcattttagatttgagaaataatccgggggggttattagatgaggcagtcaagatggctaacatctttattgataagggaaacactgtcgttcaattagaaaaaggtaaggataaggaagaattaaaaacttctaatcaagcactaaaacaagcaaaagatatgaaagtatccatcttagttaatgagggatcagctagtgcttcagaagtgtttacaggtgctatgaaagactatcataaagctaaagtttacggttctaaaacatttggtaaaggtatcgttcagaccactcgtgaatttagtgatggttcattaattaaatatacagagatgaaatggctaacgcctgatggccattatattcatggtaaaggaattagaccagatgttagtatctcaacaccaaaataccaatcactcaatgtcattccagataacaaaacttatcatcaaggtgaaaaagataaaaatgttaaaacgatgaaaataggtctaaaagctttaggttatccaattgataacgaaacaaacatatttgacgaacaattagaatctgctattaaaacatttcaacaagacaataatttaaaagttaatggcaattttgataaaaaaacaaatgataaatttactgaaaaactagttgaaaaagcgaataaaaaagatactgttttaaacgatttactaaacaaactaaaataa

SEQ ID NO: 4867 - DNA, 504 bp, Staphylococcus epidermidis
atgattagattagcaactaaaaatgatttacttagtattactcaattagtcaaagaggctaaacagattatggaagaattcaacaacaaccaatgggatgatgaatatcccgcgaaagagcattttgaagaagacatcgaaaataaaacactatatgttttagacgttgatcatacaatttatggttttattgttatcgaccaaaatcaatcggagtggtatgatgacattgattggcctgttaatcgaaatggggcatacgttattcacagattagctggatcaaaacaatataaaggtgctgcgactgaacttttccaatttgccattgacttagcaaatgaacatgatattcatgtcattttaacagatacatttgccctcaataaacctgctcaaggattatttgaaaagtttggttttactaaagttgatgagatagagatagattatcatccttttgatagaggggcacctttttatgcatattataaaaacatataa

SEQ ID NO: 4868 - DNA, 1074 bp, Staphylococcus epidermidis
atgacaaaaattgcatatacaggtggaggaacagtaggacacgtttcagtgaatttaagtttaattcctacttcgattgaaaaaggacacgaagcattttatattggttcaaaacatggtattgaaagggaaatgatagagtcacaactccctgatattcaatattatccaatatcaagcggtaaattacgtcgttatctatcttttgaaaatgcaaaagatgtctttaaagttttgaaaggaattttagatgcacgtaaaatacttaaaaaacaaaaaccagacttacttttttcaaaaggtggttttgttagtgttccggtagttatagccgcacgttctttaaaaattccaactatcatacacgaatcagatttaactcctggattagctaataaaatttctttaaaatttgctaagaaaatatacacaacctttgaagatacacttacatatcttccaaaagataaagctgattttgttggggctactgtacgtgaggacttaaaacaagggaataaagaaagaggatatcaactcactgattttgataaaaataaaaaagtgttattagtcatgggaggaagtttaggtagtaaaaaacttaataatatcattcgtcaaaatattgaggcacttctccatgattatcaaattatacacttaactggaaaaggacttgttgatgactcaatcaataaaaaagggtatgttcaatttgaatttgttaaagacgacttaactgatttattagcaatcactgatactgttgtaagtcgtgcaggttctaacgcaatttatgaatttttatcgctacgtataccgatgttactcatccccttaggacttgatcaatcaagaggagatcaaattgataatgctaaaaactttgaatctaagggttatggtcgtcatattcctgaagatcaacttacagaagttaacttattgcaagaattaaatgatattgaattacatcgtgaatctattattaaacaaatggaaacatatcaagagagttacacgaaagaagatttatttgataaaattattcatgatgcattaaacaagtag

SEQ ID NO: 4869 - DNA, 615 bp, Staphylococcus epidermidis
atgaatcgatggaaacgcatttcattgcttattgtttttacacttatttttggtataatagctttttttcatgaatcaaggcttggaaaatggatagataacgaagtatatgaatttatttattcatctgaaagtttcattaccacatctattatgttaggtgtaacaaaaattggtgaagtttgggcaatggttgcgctatccttattattagttgcttaccttatgctaaaacgtttcaagattgagacattattctttgtaatagtaatgagcttatctagtacactcaatccactattaaagaatatctttgatagggaacgtccaacattattgcgtttaattgacatttcaggctttagttttccaagcggtcatgctatgggctcaacttcattctttggaagcgctatatatgtaataaaccgtcatgattcgggtatctctaaaggcgtgttaatcggtttatgcgcacttttcattttattaatatcaacttctagagtgtatctaggcgttcattaccctacagatattattgccggcattattggtggtgtattctgcattgttttatcaacgttaatattgaaaaaacaactcgctgtataa

SEQ ID NO: 4870 - DNA, 1092 bp, Staphylococcus epidermidis; identical to SEQ ID NO: 3226

SEQ ID NO: 4871 - DNA, 957 bp, Staphylococcus epidermidis
atgagtaaaaacaaaaaacaaagccttcaatccgctcatcaaaaacctttgttaaaaagaatgtgggaacacaaagtactttacttaatgattttaccttgtttactctttttcttgattttcaactatataccaatgacaagtcttgttctggcattcaaagatttccgcttcgatactggtatcatcggcggtgattggaaagggctatactattttaaacgctttttctctgaccctcgatgtattcaaattattatgaatacgctaattataagtggcatgaaattgattttagctctaccatttccaattattttagccattatgtttaacgaaattaaagattctaaattaggtaagatcagaggtttatttcaaggcgtactttacatccctcattttttatcttgggttgtagttatcggtattttcaagaaattactcgctccagatgatggacttatgaatcaactgatccatcaatttggtggcgacgggtcgacttactttatgatgaaccctgagtatttccacaccatcatgttttctagttatatatggaagaatgtagggtgggattccattatttattttgcagcaattatgagtattaatcctgaaatttatgaatcagctgcgattgatggcgcgaatcgtttcaaacaaattatacatattaccttacctatgttaacaccaacaattgttattttattcatcatttctctaggcgatattttaaaagcagggttcgatcaaatttacctactcaaaacaccaggtaacgctaacgtttcagaaatactggatacatttgtgattcgtactggtattgagcaaggcgatttcagttacgcaattgcgattagtctattacagggtgtgataggacttatcgctgtcgtcattattaataaattcgcagataagaaactggatacatcactatattaa

SEQ ID NO: 4872 - DNA, 1689 bp, Staphylococcus epidermidis
atgtttagaaagtctatgctcatcttaatgattgctgtcattttgttcgtaacagcatgtagcaaagataaaacgcaagatgaagcgaaaagaaaagcagatgctaaaggtaaaccagatacatggattgcagatagaaagcttaaaggacttgtgtttcaaagtgataacgatgcctcccctaaaatgaataaagaagtcgctcaagaacttaagaaaaagactggcatcacgttagaacttcaaaccgtttctaatgaagattccacagaagcattaacttcaggactcgcttcaggagatttacccgacttcatcgtttattacttagacgatagtggaagacctgaaatgaaagtactaaataaagcagcgaaacaaggtcgactcacagacttaacgaaaatgcttaaaaacacaaaaatttatagtaagtatttcaaaaaaggatatttaccaaaagatacgaaagataacatcatgtttaataaagaacaagatggaacgtaccttgtacatatggggattaaccgtcatccaggacaagaagaacgtcgcactgtaggtggtccttacgtcagaaaagatatcatggataaacttcatatcgaccctacttctatcaagacgtccaaagatgtagaaaaacttgctgaaaagatgaaagaacaccacttcaaagatgataatggtaaagaaatcacacctattggcccaacagcgtggggcggtgacgatcgtactaaattctataatgaccttgtgtggactggtcagtctgatgagaaatttttaaataaaggtaagaaaattatacatgaatcacaaaccgaatatccacttaaacgtgtacattacgttaaagaccttatgaagaaaggcttaatgacaaaagagttctatacaatggaagaaaataaagcaaaagaaggactcgttaatggctcatggggcattgtttcagatttacataactatgttactgaaaatcaaagtatgaaatacgttcctcttgggccactcaatacagtcaagggtaaatttagagttgaaaagccatataaatcaggcgcaaacggttgggctgtaccaagtacgactgaacatcctgaagacgtcgttaaactcgctgatttccttgcaagtcgcagaggtaaattactcggtcagtacggtattaaaggacgtgactatacgttagataagaaaggtaaccctcatgttaaacctgaagtgttaaaagaagttgaaaataatccagacgaagctaaaaaacgtggttttagaggtgcgggttcttattgggcagatcatcttggttatactgatatagataataaagctgatttcggtgaaactgaatacggagataatacaaaaacgaaaaagacgactcctgaaaagattgctgatatgtggcattatgatcaaagacagaaacacgccaaaatcgtaaacggactcacagtaaagtcattcttatctaaatatgaatatggcgaagatttagaagttgcactcgatgattatagtgacgctattaaacgtgcttattattctcaatcagacaaggaaacgaaacaaattattgatagtgctaagcaacgtttagaagaggcaggcttaaatcaatttgaaagatacgttgaaaatcaaagagataaaaaaggaactcaaattatttattaa

SEQ ID NO: 4873 - DNA, 897 bp, Staphylococcus epidermidis; identical to SEQ ID NO: 3223

SEQ ID NO: 4874 - DNA, 855 bp, Staphylococcus epidermidis
atgactacaattctacaattaagcgatttacatattgggccacacaatgatgaaaaagatcaaaaaacttacgatttaattcatcatatgatgacacactatcaacctgacatcacagtattaacaggtgaccaaatttggtctgaaggcgtcattgattcaggtcgcgtttataaaaaattaatggagtatttaaatcgatatgatacgcaaattgcaacgacatttggtaatcacgatacagaggggcatctcaaacgttcagacttacgcgctattgaggaccaatattctaccaactatgtacagaaaaatcatagcctcattgttgatgataaagaagcttatacaatagaagttgtaaacaacgatacagtaacacatgtgctttatgttattgatggaggagattataatccatttggcataggtgattatgattttataagacctgaacatgtgaattggcttagggaaacacatcaagcatatcaaactcaatttcaacacaactttcaacataacttattatttacacatattccattacaagaatatagagtagttgagaatattggtgaatatcatggcattttcaatgaacctattgcgtgctcaaaaattaattccggattatttagtcagatgttactaaacggtgatattgaaggtatgttctgcggtcatgaccatgacaatgattttacgattaatttatatgggattcgccttagctttggtcgtgttggtggttacaatacttatggtgatttacaacgtggggctagattaattgagttgcaacctgacgctatatataaatcgaaagtgttagaatttgatgatcgtttctaa

SEQ ID NO: 4875 - DNA, 1326 bp, Staphylococcus epidermidis
atgatcgtttctaaaagaacgtttcggtcattatacattcctattttgatagaacaacttttcatactcatcatgggtcaagctgatacattgatgttaaacagctatagcactgatgccgttgctgcttcgggaatgataagccaaatactcatgctcatcacgtttctgattacaatcattcatgtgggtacaaatatacgtattgttcatttgaaggaacatcaaccttcaagtatttcacaagagatttatcataatttgttattcaatagcatagtatctatcgtatttacgattgtgattgggatcgcattcgaacttatcttacgactttttcaggtacctcaagatatattcaaactgacctatcaatttggaatgattatattgagtgtactcactttaacgacctgtcacatgtatattggtactgtattacgtgtcatgaatcatgcatcatcagctacacgcattactatcattagtaatgtgactaatatcattttgaacggtatcgtactctttattattccagaatatgtaggtaaccctgtattaggtgtcgcggtggtaacagcgttcagtcgtttattgggatgtactttagctttaattgcgctgatacaaattttccctccattcaagcattacttcaagctgagctggaagaaaatatatcaggtttcgacattaggtatcccaacagcaggtgaacaaatttcttataattttgcacagacatttacaactgcatttattgcgatgttaggcactcaagtcatcgctgcgaaatctgtttctactgttttaagcggcctgtcttttagttgtgctatggcatttagtgctgctagccaaatttatttaggaaaatttatatcccgtcgacgttaccgtactttaaagaaagttgttataaaaagtatttggtttaatatcacacaatctttcatgattatgacgtgtgtatttataggatttatagtgtgtggacgttggataacacacgacatacaaacctatcatttaatcatttactatcttgttatactttttggattagaaccgatacgtgcaattaataatctaattgtagatttattaaacgtgacaggggatgtacgttatccagtcaccgtgagtgttgtgaccacatggttgttattattacctggaagttatctattagggattcattggagattaggttatacaggaattattttagtgagtattgctgatgaagcgctgagatttatcattatgtatcttagatggcgaaatgatcgttggcaagcacgaatgaagcagattggagtatag

SEQ ID NO: 4876 - DNA, 768 bp, Staphylococcus epidermidis
atgtataaaagaaatgaacgtttgaatcttattcgtaaacgtgttgatcagtacggacaggtggcagtaaaagatttagctatattcttacaagttacgcctgaaaccgtgagaaaggatttagaaaccttagaaaacgataaactgattacacgtacacatggaggtgcgatacaatacaatcatattaataaagagaaatcatatgcgaataagtggcagaaacaatcacaagtaaaagagcgtattgctaagaaagctgctttgcaaataaagtctggagaaattattgtcatcgatggtggaaccacaacagggcgaattcctcaatatctcaatgatattactcagaccacgattgtgacgaattctctgaagattgcggatgaattgaatcgtgctatagaggagcaacgaattcaagcagaagtgattatgcttgctggaaagacgaatactgaacaagatgttgtgcgcgggcatatgacgaatgagttattacaacgttttaaatttgataaagcttttatttcatgtggttcgtttgatacgagtgattgttatgaatttgatctggaagaagcgcatgcaagtcacattatgattcaaaaaagtcaactgagttatctcttagcggatagtagtaagcgagatgcgcatgcgtcgtatcgtattgatggttttagcgaaattgattatatgatttctgattatgctaaacctcagaatatagaatattttaatcagaagcattggttacagatttaa

SEQ ID NO: 4877 - DNA, 660 bp, Staphylococcus epidermidis; identical to SEQ ID NO: 3219

SEQ ID NO: 4878 - DNA, 1371 bp, Staphylococcus epidermidis
atgattaagcgccaaaaattaaaatataaatggatgcttattacgacgctcattaccttcacgacaatattacttttctgcttaattattattttctttttaaaagatactttacgaagtagtgaaattgacgaagctgaaagaagttcaaatgatatcgccaatctgttccattctaaatctttaagtgatatatctgcattggatttaaatgcatccttagaaaattttcaagaaatactgatctatgatgataacggtagaaagttaattcaaacatcaaatgataatacacttgcttatgataacaaaattgatttcaaacatcctgaacgtatacatattcaaagaagccacggtattaattacttagtaataactgaacctatacgttcgaaagatttttctggatacagtgtattagtccattctcttcaaaattatgataatctcgttaaatcactttatatcgttgcacttgcttttggattaattgcaaccattattactgccggcgtgagttatatcttttcttcacaaattactaaaccgatagttacaatgtccaataaaatgaatcaaattagaagagatggttttcaaaataaacttgaattaactacaaattatgaagaaacagataatttaattgatacttttaatgaaatgatgtatcaaatagaagaatcttttaatcagcaacgtcaatttgtcgaggatgcttcacacgaattaagaacgccactgcagattattcaaggtcatctaaatttaatccaacgttgggggaaaaaagatccagcagttttggaagaatctttgaatatttcaattgaagaagtgaatcgaataacaaaacttgtcgaagaactacttttacttaccaaagatagagtcaatcataatgttttggaatgtgaaaatgtagacgtaaatagcgagattcaatcacgtgtgaagtcactgcaacacctacatccagattatacttttgaaacacatcttgctactaagcctatccaattaaaaattaaccgtcatcagtttgaacaactcttactcatatttattgataatgcaatgaaatatgacactgaacataagcacattaaaattgttactcaactaaaaaataaaatgattatgattgatattactgatcatggtatgggtataccaaaagctgacttagaatttatctttgatagattttatcgtgtagataaatcacgtgctcgtagtcaaggaggcaatggattaggactatcaatagcagaaaaaattgtgcaacttaacggtggtatgattcaagtagaaagtgaactacaaaagtacacgactttcaaaatcagttttccagtactaaactaa

SEQ ID NO: 4879 - DNA, 2805 bp, Staphylococcus epidermidis
atgactaagaacaagaaagaatttacagaggctcctgtaaacttcggcgcaaatcttggccttatgctagatttgtatgatgattatctacaagatccatcatccgtacctgaagatttacaagtcttgttcagtacaattaaaacaggtgaagctcatatcgaagctaaacctaccactgatgggggtggttcacaagcgggagatagcacaattaaacgtgttatgcgcttaatcgataatattcgtcaatacggacatttaaaagcagatatttatccagtaaatcctccagagcgtcaaaatgttcctaaattggaaatcgaagattttgatttagataaagaaactttggaaaaaatatcatctggaattgtctctgaacattttaaagacatttatgacaatgcctatgatgcaattgttcgtatggaaagacgttacaaaggaccgatagcttttgaatacactcacattaataataataaagaacgtgtgtggttaaaaagaagaattgaaacgccttataaagcaagtttaaacgataatcaaaaaaaagaacttttcaaaaaactcgcacacgtagaaggttttgaaaaatatttgcacaaaaattttgttggggctaaacgtttttcaattgaaggcgtcgacacattagttccaatgcttcaacacacaatcacattagcaggtaacgaggggattaaaaacattcaaatcggtatggctcaccgtggacgtttaaatgtattaacgcatgtcttggaaaaaccttatgagatgatgatttcagaatttatgcatacagatccaatgaagtttttacctgaagatggtagtttagaattaacctcaggttggacttcagatgtgaagtatcaccttggtggcgttaaaacgactaactcatacggaatagaacagcgtatttctttagcgaataatccaagtcatttagaaatcgttgcacccgttgttgctggtaaaacaagagcagcccaagataatacacatcaagtaggagctccatctaccgacttccataaagcaatgccgattattatacatggtgatgcggcatatccaggtcaaggtattaattttgaaacgatgaacttaggtagtttaaaaggatattctacaggtggttcacttcatattattacaaataatagaatcggttttacaactgaacctattgatggacgttcaacaacgtactcttccgacgtagctaaaggttacgatgttccaatactacatgtaaatgccgatgatgtagaagcaacaattgaagctattgaaattgcaatggaattccgtaaagaatttcataaagatgtcgttattgacttagtaggttatcgtcgctatgggcacaatgaaatggatgaaccttctattactaatccagttccataccaaaacattagaaaacatgattcagttgaaattttatatggtaaaaagttagttgatgaaggaattatttccgaagacgaaatgaatgaagtcattgacggtgttcaaaaagaaatgcgaacagcacatgataaaattgataaaaatgacaaaatgaataatccagatatggaaaaaccagaatcacttcaaccacctttacaaagtgatacgaaagatttctcatttgatcatttaaaagaaatcaatgatgcaatgcttgattacccaaaagattttcatgtgctaaaaaagctcaataaagtactagaaaaacgtagagaaccttttgaaaaagaggaggcgctcgtcgattgggctcaagcagagcaacttgcatttgcaaccatattacaagatggaacttcaattcgtttaacaggtcaagatagtgaaaggggaacatttagccatagacatgctgtgcttcatgatgaagaaaatggtaatacattcacaccattgcatcatgtacctcaacaacaggctacttttgatattcataattcgccattatctgaagcagctgtagttggatttgagtatggttataacgtcgaaaataaaggtaactttaacatatgggaagctcaatatggcgacttttcgaatatgtcccaaatgatgtttgacaatttcctctcaagttctcgcgcaaaatggggtgagcgttcaggtttaacacttttcttaccacatgcttttgaaggacagggaccagagcattcatcggcacgcttagaaagatttctacaattagccgctgaaaataattcaactgtagttaatctatctagtgcaagtaattacttccatttactacgtgcacaagccgctagtttagataccttagaaatgagaccattaattgtcatgtcacctaagagtcttttaagaaataaaacagtagctaaacctattgatgagtttacatctggcggttttaaacctatcatcacagaagatatcgatgaacaaaaagtcaaaaaagtgattttagcatcaggaaagatgtatattgacctaaaagaatatttagctaaaaatcctaacgattctattcttctcatagcagtagaaagattatatccgttcccagaagaagaaattaaagaagtattaaaatcgttacctcatcttgaaaatgtgtcatgggttcaagaagaacctaaaaatcaaggtgcatggttattcgtgtatccttatctaaaagcacttgttgctaataaatatgatttaacttatcacggtagaatacaaagagctgcacctgctgaaggcgatggagaaattcataaacttgtacaaactaaaattattgaaagtagcattaacaattaa

SEQ ID NO: 4880 - DNA, 1263 bp, Staphylococcus epidermidis
atggcagaggtaaaagttccagaattagcagaatcaatcacagagggtaccattgcagaatggttaaaaaatgtaggcgataatgtagataaaggcgaagctatcttagaactagaaacagataaagttaacgtcgaagtagtttctgaagaagctggggtattatcagaacaattagccgaggaaggcgatacagttgaagtaggtcaagctgtagctgtagtaggagaaggacaagtaaacacatctaacgatagttctaacgaatcttcacaaaaagatgaagctaaagagaaagaaacgccaaaacaatctaatccgaattctagtgaaagtgaaaatacacaagataatagccagcaacgtatcaatgcaacaccatctgcacgtcgacatgcgcgtaaaaatggcgttgatttaagcgaagtatccggaaaaggcaatgatgttctaagaaaagatgatgttgaaaatagtcaaaaatcttcaagtcaaacagctaaaagtgaaagcaaatcacaaaacagtggttctaaacaatctaataacaatccatcaaaacctgttattcgtgaaaaaatgtctcgacgcaaaaaaactgctgcaaaaaaattattagaagtatcaaatcaaacagctatgcttactacatttaatgaagttgatatgacaaacgttatggatttacgtaaacgtaaaaaagaacaatttatcaaagatcatgatggtactaaattaggatttatgtccttctttactaaagctgccgttgcagctctcaaaaaatatcctgaagtaaatgctgagatagatggcgatgatatgattactaaacaattttacgatattggcattgcagtatccactgacgatggattactcgtaccatttgttagagattgtgataagaaaaattttgcagaaattgaacaagaaatcgctaatttagccgtaaaagctcgtgataaaaaattaggccttgatgacatggttaacggttcgtttaccatcactaatggcggtatctttggctcaatgatgagtacaccgattataaatggtaatcaagcagctatcttaggtatgcattcaattattacacgcccaattgcagttgataaagatacaattgaaaatcgtccaatgatgtatatcgcattaagctatgatcatagaatcatcgatgggaaagaggctgtaggattcttaaaaacaatcaaagaactcattgaaaaccctgaagatttattacttgaatcataa

SEQ ID NO: 4881 - DNA, 174 bp, Staphylococcus epidermidis
atgtctaatttatggattatatttgcagttactgtactaatagcagtttattccgcaattgaagtatttacaaatttaaatcataaacaacaaccaagatttaaatattttactatcgcatttgttgtgtttattatcttagcgattatagaagttatatttcttgctcaatga

SEQ ID NO: 4882 - DNA, 810 bp, Staphylococcus epidermidis
atgagtggacttagaagtgtcactttaggaacaaacgatttatctaaaacgaaagaattatttaaccacatcattggtttacaacattcaactaaaaatgaacatgccataagatttggtgacgctaatttaagtcctggaacgcgtgttcactttgttgaggttccagaggaagattataaaaatccacacatagatagtgttggacttagaacaccttctgattctggattagtagaatatcaaactatttttgacaagtttaatatatcctatagttcaatcactgaacttaatggacttaaacatttcacttttaaagatcataatcaacaaaaatttgatatttattctaacgagttaaatacgggtataggcttaggtatgcctactttcgatagtcctgttaaccctttacatcaagttcaaggcttaggtccagtcattattaaggtgaacgagttatctgtcaccacttctattctcacacaagtatttcaattagatttatttgctgagtatcttccacatgaagatgcccaacaacctattcaagtgtttcgtataggtgagggtggtcttggtggtgaaatccacttatttgaaagcgatgaagatattcaaatgaatacacacgggccaattgagcaagtggaattctctacaaatgatacccaattgtatcttcaagcaaaaaatcgtttagatgagattggtgttccatatcaaactctcgaacaggatacttcagaatctcttagaatcactgaaaatagtggcatttcatttatttatacacttgaaaagtaa

SEQ ID NO: 4883 - DNA, 204 bp, Staphylococcus epidermidis; identical to SEQ ID NO: 3213

SEQ ID NO: 4884 - DNA, 792 bp, Staphylococcus epidermidis; identical to SEQ ID NO: 3212

SEQ ID NO: 4885 - DNA, 1890 bp, Staphylococcus epidermidis
atgagtgatcgttttataaaattcaacgatgaacaattagatgcaaaacaagtaatgatgttacaagacttagcacgtttacttttaaaaaatgagcaaacgcaagttaaaatacaaaaattcccttactataatccttatagtaatacactcattgcgagttggttttggtctcatagaccgaaacatattgaacaagctggactaaaaacagatgtcttactcgcaacgtatggatatctgaatatggatctttcaatcatcaatcaagttttacacaacaacgattttgaacaccctaagttctttcatcaattatttaaacttttagaggacgtacgtatatttgaacatattagacaacaaagacctagtactacaaaaatgattgatttacgcatagaaacacgattatcttttacagaatctcaaattaatttctacaaaactaaaactgtatatactgatttactttttctttatttagaacatgcatttttaagtcaaaacttttttaatattccatccatacatccagcatttgatgatattttagttcatatgtatcagtacttaccaaatatttttcagaatcaaacatcagaagataatatgtatttagcagaacgtattatgtatcaagtggatgatttattaaaggaagatatgctaaatgaatattactacttacctcaaaaattatatgaagatatttatgcagatagttttgaagactcaaagcgtacagatgcgagcaatactgatggtaaagataatcaacagacagacgaagatgtagaaacagctgaagctgaaacaaaagccgcagacagtgagtctaaaggcggggcatatttagaaatggagctacatgagggtgaaaacagtgaagttatggctgataatgatacggctcgagaaggcgacagcactgatgatatgactgatatgatgaccaaaaaaggaaaagggtcagaaaatacacttgatcatgatgaaggtggatttataggacaaaaccaagcttttgctttaaaaggcattaataaagacgtaagtattgaatggaatatccctgatattacacctcaaaatgtgatagattatcaatattcaaaaaatgatgtacagtttgaaattaaagatttaatacaaattatcaaaaagaccatcgacagagaacatgaagatgaaagacataatttaacaaagggccgtttacaaaaagaccttattaattggtttattgatgatcaatttaagttattttacaaaaaacaggatttaagtaagacattcgatgcaacatttaccttactcattgatgcatcagcgagtatgcacgataaaatggatgaaacgattaaaggtgtcgtcttgttccatgaaacattaaaatctttgaatattaaacatgaaatactagcatttaatgaagatgcttttgaagctgaccaacgtcaacaaccaaatataattgatgaaatcattaattataattactctatctttgaaaaagaaggcccacgtatcatgacattagaacctcaagatgataatcgtgacggcgtagctatcagaattgcgagcgagcgtttattacaaagaagtcatgaacaacgctttttaatcgtattctcagatggtgaaccgtctgcatttaattacagtcaagatggtattttagatacgtatgaagctgttgaacgtgcgcgtaaatttggtatagaagtatttaatgtctttcttagccaagagccaattactgaagacattgaacaaaccattcataacatatatggccaatttgctttatttgtagaaggtgtggaacatttaccgagtcacttatcaccattactaaaaaaattgttacttaaatctttataa

SEQ ID NO: 4886 - DNA, 1344 bp, Staphylococcus epidermidis
atgaataaaaatacgtggattataggctttactttattcgctatgttctttggcgcaggtaaccttatatttccaacacaacttggactcgaaagtggtcatttcttttggccagccatactagcctttgcactaacgggtattggattaccgcttcttggcgttgtgataggcgcacttgataaacatggttatattgggtcttttaataaaatatcaccacgattttcgttaatctttttaattatcatatatctcactataggaccattatttgcgataccacgtacagcttcaacttcatttgaaatgactgtgactcctattgcacaaaatagtgggaatttagcattatttatttttacagtaatctattttttaatcgttctttatttatgcttgaatcctaataagatgatagatcgaattggttcattacttacacctttattacttattaccattgtcgctatgattattaaaggttttgtagattttagtggacattcttcaaattacggaatgacaaatgcttatcattccaatttaagtggattttcacaaggatttacacaaggttaccttacaatggatgctatcgcttcaattgcattttcaatgattgttgttaatgcgattaaaacaacaggaatacagcatgctgataaaatctttaaacagaccattattgctggtctcatcgctgcaatcgcattagtatttatatatatttcgctagggtacataggcaatcatattaatattccttcagacactctaaaggaattgaaagctaaagatcaaaatatagggacgtatttactcacaacaatggcaacgaagggctttggaactttcggaaaatacttacttggtattatcgtatcattagcatgtttaactactgcttgtggattaattgtatcagtaagtgaatatttccacagaatactacctaagataccttataaagtatttgtgatatttttcattttagttagtttcattctagctaaccaaggacttaattccgtaattaaaatgtcagtccctgtactcagtgtaatctatccagtggctattacagttattttgttaatactcattgctcgcttcatacctacaaaacgtattgcacaacaaataccgctaattattgtagcaattgaatcaatcttaagcttaataacgacacaagggtggatacgtatttcatttatagatggtttacctttaaaagaatattcacttgaatggttcccaattgctgttgtagcaactcttgttggttatatgattagttattttgttaaacaatctaacattgtatatcaaaaagaataa

SEQ ID NO: 4887 - DNA, 1131 bp, Staphylococcus epidermidis
atggtaagtgaacgaagtagtaatcagtcacatccacttgattactatatgaataatcaatcaactgatcatcatacaatcgctgaagatcttgaaatccaattaactgaaaatgataaacaaagaattaaatcaataagtgagcaaattgagccacttaatcatgaaggattgttaaaatatggtgctaatcttcaacaaaagatgtctcatttttcgcatcaaattttagatgatgttcaatcaaaagatatgggaccagttggggaaactttaagtcaattaatgggaaaattaaaatctgtaaatccaaatgacataaatccagaaaaacaatctagattaaagcgtttatttaaacgtactaaagcttctattaatgaagtgttttctagaatgcaatctgtaagttctcaaattgatcgtattactattcaattagaaaaacataaagatcagttaactaaagatgttgaatttcttgatcaattatatcagcaaaataaaacttattttgataacgttactttatatatcttagcggctcaaaaaaagaaaaaagagatattgacagaaaccataccacagttacgtgaaaaggcgcatcaaactggtaatcaaatggatattcaggcaactgctgatatggaacagtttgtggatcgtttagataagcgcatttatgatttacaattatctaggcaaattgctattcaaactgcacctcaaatccgtatgatacaaaatgtcaaccaagctttagccgaaaaaattcaaagttcaattttaacaagtattcctttatggaaaaatcaaatggctattgccctaactttgatgagacaaagaaatgctgtttcagcacaacgttcggttaccgatactacgaatgagttacttactcaaaatgcatcaatgttaaaggaaaatgctattgaaacggcagctgagaatgagcgtggcatcgtggacatcgaaacgttaaagacaacacaaaatgacattattgaaacaattgaacaaacacttcaaattcaagaagatggtagacagaaacgtcaagttgcagagaaagaacttaatgagttagaacaagatttgaaacagcatctattagctatgcgtaaataa

SEQ ID NO: 4888 - DNA, 591 bp, Staphylococcus epidermidis
gtgggtataccagtggcctttattgtttggcttattactgtttttgcgttggatttatcattcattatagacatgcttatcagttttggtagtttcattgcatcatacttccctacgcaaaggctcacttcacgaaagtatcttaatgaaattggtttatcaagaagagattacagatatgttcaatcacagcttcatcatgcacatactaaaattagaaatatcttaaagtcatttattaatattcgttcaatcaaagattttagacaagtaaatgatatatatcgaatttctcgttctattcatacaagcattaagcaaagacccgcgatgttttttaaagttgaaagctttttctattctcatttggataatgcacttaacttagtagactcgtatacacgtcttgcaagaatgccacgtaagtcgcaagatgaaaagctaaaattagaacaaacacgtattactctagatgaaataaagagaacgctcattgctgaccttaaaaggcttaatgaggaagattatgagcgactagatgttgaaatagaattaaataaattagaacagcaacgtcgacataataattaa

SEQ ID NO: 4889 - DNA, 270 bp, Staphylococcus epidermidis
atgcaacgtaaacatattcaagtttttggtacagtacaaggtgtaggatttagattttacacgcaacgtattgctcatcaatttaatattaaaggtacagtccaaaatgttgaggactacgtagatatatatgctcagggcgacgatacagaattagaacagtttattgattctgtaatccaaggtgcttcaccggcttcacaagtgtctaattacaatattgaagaattagaccttgatgaatctttatcagagtttaagacaatttag

SEQ ID NO: 4890 - DNA, 309 bp, Staphylococcus epidermidis
atgtggacagtagtcaagatcagggctgactacgaaggttggtggctatttgaggattggccacaaaaaattgtggaacaatcagaatttactacatacgaccaaatgttggattattacataaatgtattaaaccatagtaagaaatgttacgacaattatgtagtagggaagtataatatacatgctttttacaacaattgcgatttaaacttttgtgaagactgtgaggaagatttacaaatattttatagttttattattttaaaaaataatgaggtttattttaatcttccaaaaatagattga

SEQ ID NO: 4891 - DNA, 201 bp, Staphylococcus epidermidis; identical to SEQ ID NO: 3206

SEQ ID NO: 4892 - DNA, 153 bp, Staphylococcus epidermidis
atgtataaagaatataacttgactcatactctaccaatggaaacttcagttcttatccccacaaatgatatttcacgacatgtaaatgatattgtagaaacaattcccgatactgaattcgatgaattcagacatcatcgtggcttaatataa

SEQ ID NO: 4893 - DNA, 165 bp, Staphylococcus epidermidis
atggaaactaatagaatggaatcaacacgaatggaatggaatggaaaggaatggaatggaatggaatggaatggaatggaatggaatggaatcaacccgagtgcaatggaatggagtggaatggaatggaatggaatggaacaacccgaatggaacagaatgtaa

SEQ ID NO: 4894 - DNA, 1068 bp, Staphylococcus epidermidis
ttgttaacggtaaatcaagttaaagaaattgtaggggcattaaaggatccgattattgatgtgccattgagagaatctgaaggtattgttgatgtctctattaaggataatattaaccatgtgagtgttaaagtggcaatggcgcaattagggggacagccacaattagatcttcaaatggctatagtcaaagccttaaaagaaaatggtgcaaatactgtgggaattcgttttgaagaacttcctagcgaagtagtcgaaagatatataggaaaaggtagtgaaaagcccaaaaccattgaagaactattatcacaaaataatccagttgaattcatttctatagcttcaggtaaaggtggggttggtaaatcgacagttgctgtcaatcttgccgtagcattagcaagagaaggtaagaaagtaggattagtagacgctgatatatacggttttagtgtgcctgatatgatgggaatagatgaaagaccaggtatagatggtaaggagattatacctgtagagagacatggagtaaaagttatttcaatggcattttttgttgaagaaaatgcaccggttatttggagaggtccaatgcttggtaagatgcttacgaatttctttacagaagtacagtggggagaacttgattacttacttcttgatttaccacctggcacaggagatgtagctttagatgtacattcaatgttaccatcaagtaaggaaattatagtaactacaccgcatccaaccgcggcgtttgtagcggcacgagcaggtgcaatggctaaacatacagaacatacaattcttggtgttatagaaaatatgagctattttgaaagtaaagaaacaggtaaaaaagagtatgttttcggaaaaggaggaggcaaaaagctttctgatgaacttgagacgcaattatttgctgaacttcctttagaacaacctacatggaatcccaatgacttttcgccttcgatatatcaatcggatgatcgtttaggagaattgtatactttaatcgcaagaagagttatagcaagcacccaaaaacaataa

SEQ ID NO: 4895 - DNA, 1440 bp, Staphylococcus epidermidis
atggccagttatgaattgtctaagactaagcgaaatttaattgtatctgtaatgttaattagcgctttcgtggccattttaaatcaaacattacttaatacagccttgccacacattatgcgtgagttaaatattaatgagaatacatcgcagtggctgattacaggtttcatgttagtgaatggtgtcatgattccactcaccgcttatttaatggataaagtaaaaacaagaccgctatatttaggtgcaatgggatcatttctgatagggtctatcgttgctgctattgcacctaattttggcgtgctcatgattgcacgggtaattcaagctgtcggtgcaggtatactcatgccattaatgcaatttacattgtttacattgttctccaaagaacaccgtggatttgcaatgggacttgcaggattagttatacaatttgcacctgcaattggacctacatttactggtttaatcattgacaatgcaagttggagagtgccatttattgttattgtcggtatagcattagttacatttatatttggttttgtatcgatttcaagttataacacgacgaaagaaacaaaactggataaaagatccgttatatactctacattaggttttggcttaatgctttatgctttcagtagtgctggtaacctaggtttttctaacccaattgttctttgttcacttttaataagtttaatcatcattggcatttttgttaaacgacaaattacaatttctaatccattattaaatttgaaaatatttaataacaaaatattttgtttttctacaattacttctatgatcattatgttatctatggtaggacctgctttacttattccattgtatgttcaaaatgctttaggattatctgcgttgctatcaggattagtaattatgcctggcgcgattatcaatggtattatgtctgtgtttacaggaaagttttacgataaatatgggcctagaccgttaatatttactgggtttatcttattgatttcttgtacatttctattatgctttcttaaagtagatacatcctatacgtatttgatagtaatctatgcgattcgtatgtttgcagtgtctttactaatgatgcctatcaatacgaccgggataaatgcattgaaaactgaagacatttcccacggaacggcaattatgaactttggtcgtgttatggcgggatctctaggaactgctctaatggtcacttttatgagtataggtgctcaatgggttgtatcatcaagtgaacacgctagtaaagaaatgatccagcgacaaagtgttgctgtgggagttgatgtatcgttcgccttagtcactgtttttgtgattattgcttttgttctagcgttatttataaaggagcctaatcatttaactcacaatagtaggaaagtataa

SEQ ID NO: 4896 - DNA, 468 bp, Staphylococcus epidermidis; identical to SEQ ID NO: 4690

SEQ ID NO: 4897 - DNA, 1338 bp, Staphylococcus epidermidis
atgaatcttaagtctatcattactgtaatggcactcatactaataatgtttatggcagctatagaaacatctattatttcattagcattaccaacaataaaaaatagtttgaatgccggtaatctagtttcattagtatttaccgtatattttattgctttagtcatagctaaccctatcgttggtgaacttatgtctagatttaaaattatttacattgctgttgtaggggtattattgtttgccttaggtagtttaatgtcgggattaagtcagacgtttacttttttaattatctctcgaacagtacaaggttttggagcaggagttatgatgtcactctcacaaatagttcctaagttggcttttgaaattcctttgagatataaaattatgggtatagttggaagtgtttggggaatttcgagtattattggcccattattaggtggtgcgattttagagtttgcttcatggcattggctattctatatcaatattcctattgctatagtggcaataatacttgtacttatgacttttcattttcctgatgagacacaagtacaacagagtcgttttgatataaaaggattgattatcttttatatctttatagctttattaatgtttggtttactcaaccaacatcatattatttttaacatattctcaattattttagctttagctgttttatggctactatttaaaatagaaaatagtatcgaacaaccatttcttccaacaaaagaatttaacatatcaatagttctagtttttataacggatttacttattgcgataacactgatgggatataatttatatataccagtatatttacaagaaaaacttagtttatcacctttacaaagtggatttgtaatattcccgttgtctgttgcttggattacgcttaatttcaatttaggtaaaatagaagcgcattttactagaaaaacattatatatttgctcattttttgttttattagttagtagtctgatgataatgtttggcttaaaactcccattgcttattgcttttgcggttgtttttgcaggtttaagttttggttatatttatacaaaagatagtgttattgtccaagaggaaacttctccaaaaaatatgaaaaagatgatgtcattttatgcattgacaaaaaatttaggttcgtcagtcggatctacgattatgggctatatgtatgcactaaatgttggtttatttggttctaatttacacaatgtattaggattagtcttaataattgcagtatgtttaattgtaatgtggatgacattatataaaagcaatactattcaatcttag

SEQ ID NO: 4898 - DNA, 684 bp, Staphylococcus epidermidis; identical to SEQ ID NO: 4688

SEQ ID NO: 4899 - DNA, 1188 bp, Staphylococcus epidermidis
atgttagacaaaaatcaattggaaaagtataaccaagagcatttgtatgaatatgaaaaattaatgagtagtaatgaaaagaatgctttagatgaaaaagtagatcagttaaatcttgcagaaattcaagatttatatcaagatttatatgttaatagaaaaactattgatgatgtatcttctgtatctgaagtcaaatatgaagtgaaatcgcgactcaatgaagaagaacgacatacatatgaacaaaaaggttatgaggcaatacgaaatggtgaatttgctgtattattgatggctggaggacaaggtacgcgtttaggatataaagggcctaaaggttcttttgaaatagagggtacgagtttatttgaacttcaggcgcgtcaactgattcgtttaaaagaagaaaccggccacacaattaattggtatattatgacaagtgacattaatcataaagatacaatagagtattttaaacaacataaatattttaactatgatgccaatcatattcatttctttaagcaagataacattgttgctttaagtgaagaaggaaagcttgttttaaatagagatggacatataatggaaacacctaatggtaatgggggtgtattcaagtctcttaagaaagcaggatatcttgataagatgcaacaagatcacgtcaaatatatcttcttaaataacattgataatgtcttagttaaagttttagacccgttatttgccggttttacagtgacacaaagtaaagacatcacatcaaaaacaattcaacctaaagatagtgaaagtgtaggtcggcttgtaaatgttgattgtaaagacactgtgttggagtattctgaattagatacagacatagcaaatcaatttaacaatgctaatataggtatccatgcttttaaactaggtttcattaccagtgctgttgatagagaattaccgtatcatttggcaatcaagcaattaaagcaattagatgaaaattttggtgtggttgaacgacctacattaaagtttgaattattttattttgatatatttaggtacggtacaagctttgtaacattacaagttccaagagaggaagaattttcacctttaaaaaataaagaaggtaaggatagtgtacatacagctacagaagatttaaaacgaatgggtttgatttaa

SEQ ID NO: 4900 - DNA, 510 bp, Staphylococcus epidermidis; identical to SEQ ID NO: 4686

SEQ ID NO: 4901 - DNA, 261 bp, Staphylococcus epidermidis; identical to SEQ ID NO: 4685

SEQ ID NO: 4902 - DNA, 315 bp, Staphylococcus epidermidis; identical to SEQ ID NO: 4684

SEQ ID NO: 4903 - DNA, 1374 bp, Staphylococcus epidermidis
atgaatggatttaaaaaagttgacatagtaagaggtagaattaaatttatcactatgtcattgttagggattatattatttttagttcctataccagtcgttcaagatggaaagcagcaaacgacacttcctatagcttttttagctggtttattaaaagattggcttggtggtatcatgccaattttaattgtaaccatcataactgtatcaggtattttaacaatattatgctctacaatttataaaaataaattaaatcctcaaggtttaatgagcagtgctttcaacgttaaaataggatggcttgttttgagagtattagctgtcttcttttcttggttaacatttttaaatattggacctgaaatgattaaatctgaagatacaggtggattagtattttcaagtttattacctactcttgtagcagtatttttatttgctgcaatctttttacctttattaatggagtatggtctattagaattacttggacccatctttagacctatcatgcgacctttgtttactttacctggtagatcgacagttgataatctagcttcatttataggtgatggtacagttggtgttttaattactagtaaacaatatggtgaaggatattactctagaagagaagcaacagtaatatccacaacctttagtgttgtatctattacgttcgctattgtcattgccgaaacaattagaatgcaagatcaatttttctatttttatttaacagttgtcatttcatgcttaattgcagcaatgattatgccaagaatttggccacttaaaaatattcctgacgaatatgctaaagaagtaagtgaagaggctcgtaatgaacagctaccagaaggcaaaacagcattaaaatatggttttgatttagcaactgaagttggaattaaatcgccagggtttaaagaatttttaatttcaggttttaaaacagttgtagatatgtggtttgtaattttaccagttgttatgagtataggaacaatagctaccattattgctaactacacgcctgtttttgaaattataggaaaaccatttgttccagtactagaattgttacaaattccagaagcacatgaagcatcacaaacaattttaattgggtttgccgatatgttcttaccttcaattcttattgaaggggttcaaaatgatgtaacacgttttgtaattggagcattgagtatctcacaacttgtgtatttatctgaagtaggcggcgtgattcttggttctaaaattccagttagtataagtaaattatttatgatttttttaattcgtactatcattacgcttccaataattgctttattagcgcatttatttatcggataa

SEQ ID NO: 4904 - DNA, 876 bp, Staphylococcus epidermidis; identical to SEQ ID NO: 4682

SEQ ID NO: 4905 - DNA, 1032 bp, Staphylococcus epidermidis
atgactatggtgaataaagatagtcaatccgctattgaacaaaaaaagaaaaagcgcactacactcacttttattgtgggtgtgtgccttctttttatttcagtatatttgaatttagcgattggttcttcaaaaatacaatttaatgatattttaagttatgtaactggacacacgaatacaaaggcaactttcttaatacacaatgtacgtatgccaagaatgctagctggtttaattattggtggcgctttagcaattgcaggtttattgatgcaagcaattaccaaaaatcctttggcttcaccacagatttttggtgtgaatgcaggtgcttccttcgttattgtacttataactgtacttataccatcgctaggctcttactctacaattttagcgataattggtgccttcttaggaggttttactgtttatacattgtctggctctactaagtcgattacaccgattaaattagcacttgcaggtatggctattcatctgttctttagtagtatgactcaaggtataattattctaaatgaagattctaatgatacactgatgttctggttagttggttcattagccggtataaaatggcaacagattatatttatcttaccatttttactccttgctatttttgtgaccatatttatgggaagacaattaactatattagagttaggtgatgatattgccagaggattaggacaaagaacagaaatcgtcagaatgattgttggaatattggtcgttgttcttgctggtgtttctgtttctattgctgggcctataggatttgtaggtttgatagttccacacatagtgaaaagatatataaataaaaattatgtattgatgatacctttaacatttatattcggcgctactttattacttatttctgatgtattgtgtcgcttaattacttatccattcgaatcgccagtaggtattgttacatcatttgttggtgctttttacttcttattcataactgttagaggggtgaatcgcatatga

SEQ ID NO: 4906 - DNA, 996 bp, Staphylococcus epidermidis
gtgagaggtttaaaaattttaagtgtaattggcttattgtttgttttaattgcaactgcagcatgtggaaataatagttcaagtaactcaagtaaagagtcatcaaaagatggagttgaaatcaagcacgaagaaggtactacgaaagtacctaaacaccctaaacgtgttgttgttcttgagtattcatttgttgatgcgttagttgctttagatgttaaacctgttgggatagcggatgataacaaaaaaaatcgtattattaaaccattaagagataaaattggaaaatacacttctgtaggaacacgtaagcaacctaacttagaagaaatcagtaaacttaaaccagatttaattattgctgataataatagacacaaaggtatttataaagacttaaataaaattgctcctacgattgaactgaaaagtttcgatggagattataatgaaaatattgatgcttttaaaacaatttcaaaagctttaggtaaagaagaagaaggtaaaaaacgcttagaagaacacgataagaaaattgaagaatataaaaaagaaataactatggataaaaatcaaaaggtattgcctgcagtagctgctaaatcaggtttgcttgctcatccaagcaactcttatgttggtcaattcctaagtcaactaggttttaaagaagcattaagtgatgatgttactaaaggtttaagtaagtatcttaaaggaccttacttacaaatgaacactgaaactttatctcaagtgaatcctgagcgtatgttcataatgacaaacaaagcaagttctaacgaaccttcactaaaagaactagaaaaagatcctgtatggaagaaattaaatgctgtaaaaaatcaacgtgttgatattttagaccgtgacttatgggcaagatcacgtggtttaatttcttcagaagaaatggcaaaagaacttgttgaattatctaagaaagatagtaaaaaagataataagtaa

SEQ ID NO: 4907 - DNA, 1062 bp, Staphylococcus epidermidis; identical to SEQ ID NO: 4679

SEQ ID NO: 4908 - DNA, 1758 bp, Staphylococcus epidermidis
atgaatcataaggaatggcttttagctgacaaaaacatccaatatcgaacgattaacgcaatgattaaggaacatattgtttctgaaggtatgcgtattaaagaaggtacgtgtaaagttgaaatttttctcaataatcaccttttatcgttaaaagtagcgcgaaaaagtgccttaaaaagatacgtttttactggtgacatagtattaaaaaataaaaaattgtctcaatcaattgaaagtttagaagaacttcttcaaatactaacggaaatatttcatatcaacatttcaaaacgattatacgatgaattaatacatagtagggatagtttgtatgaaacgtacaaacatttttataatagacaaacactcattcatcagagtatgaaatttagtaaattacccgattctataaattttattgcttggctgcaacatttacaagatagtggtattacagatgatttaagttactcggaaagtcttgtgatagaagggcatccaacacatcctttaacaaaaactaaattgcctctcagtactaatgaattgaaactttatgcaccagaatttgaaaaagttattccattaaatattatgcttattgaaaaaaatcatgtagtaacaacagcaataaatgatgatcaaaattttattctaaatcaagttattcctgaatatcgagatcgtttaaaatgctacctcgagccacttcgattaaatcttaacgattacagagtgatgttgatacatccttggcagtatgatcatactatcggcgaacaatttgaagaatggatagccaagaaaatcttactacctacaccatttactgttgagtccaaagctactttatcatttagaacaatggatttaattcatacaccatatcatgtgaaattgccagtaaatgttcaagctacaagtgctgttagaacagtttcatcagttacgactgtagatggtcctaagttaagccatgcattacaaggattgcttcaggaatttccagaacttcaagtcgcgatggaaccttatggagcttatgctcacacggcatctgatttatcaaaacaattagcgcttatcatacgtcaaaaacctacgatatatgattatggttgtacagttgtaacagctagtttagttaatcctaatccaattgataatcaggcagttgtagatagttatttaaaatggatagaaaatgaaatcacacttgatcatattaagcattttatagcaatttatacacaaaccttagttacaccgcttattgcgtatattcaaaattatggcatagcacttgaagcacatatgcaaaatacgattgttaatcttggacctaattataaaatgaaattcattgtacgtgatttaggtggttctcgtatagatttaaatacacttaaacagaaagttcctcaaatagatgttacaaatgaaagtcttattgcagatactattgaagaggttattgctaaatttcaacatgcagttattcaaaatcaactatcagaattgattcatcattttaatcagtatgatgaagtaatagaagaagaattatttgaaattgtgcgtgaagaaatcgaaatggcaatcgataatgacaagccacatgctgaaaaattgaaaaaaatattgtttgggtcaactatcacagtcaaagctttattaagtatgagaatggaaaataaagtgaaaaaatatttaaataccaagttagataatccaataaaaaaagaggtgtag

SEQ ID NO: 4909 - DNA, 1182 bp, Staphylococcus epidermidis
atggcaaaatatttcttttccagttcttttctgttatttttaggaaattggattggtcaagtgggtttaaattggttcgtactcacaacatatcataatgctgtatatttgggtttagttaatttctgtcgtcttatacctattttactattaagtgtttgggcaggatccatagctgataaatatgacaaagggcttctgttacggatcactattacttcatcattcataattacagcattattgtgtttacttacttatagtcttaacagtataccgattttcatcattcttttatatgcaacatttaggggcatactaagtgctgtagaaactccagtgagacaagcagttttacctgatttatctagtaaaatttctacaactcaagcagtttcttttcattcgttcattattaatatatgccgatcaataggaccagcaatagcaggtggattaatagctgtataccatacacccactacatttttagctcaagcagtgtgctattttatcgcagcagttttatgtatacctattcattttgaagtcatattaagtcaaaaagaaggaaaagcactaccacttaaagttgtactaaattattttaaaagtaatttagaaggtagtcagatattcattacgtctataattattatggcaacaggcttttcttacactacagttttaccagtattaacaaaccatatttttcctggtcaatcgcaagtgtttggtatagctatgactttttgtgcgattggaggaatagttgcaacaatagtcttaccatcaattttaaaacacttgagtacagtaaaaatgtattatctcagttcaatattatttggtatagctttactaggtattatcatacatcatttagtagttatgtttatctgtattacgttaataggcttgtttagtcaatgggctagaacaactaatagagtttattttcaacatagtgtaaaggactgtgatagagggaaagtattaagtattataatgatggatcgaggtatgattccgttaggtagtttaataatgagctttttcgcggatatgttcggtattttaactacatttactattatgggaattagcactatcagtatttcactcattttttatatcatacaacgtatttcgaatatggaggaaagcaataatgaatcataa

SEQ ID NO: 4910 - DNA, 1962 bp, Staphylococcus epidermidis
atgaatttcaatcaatttataaataaacaaaatataataatgactgaagatgaacataatgtatatgactttcttaaacatcatgatcctaattggtcttctaattatattgatcatttattagatggacgtgataaagtaagtcaacgtttaattacatctttacatagggagaatttagtaaaaagtcgcgatcatagtcgtatacttaatcgacatcagtttgctggatacggagttaatgtgattgccattttagaaatctattttccaatatctaatatttatttgtatgcaccaataactggaatgcatgcattcgatcgcattgatgttgaaggacctttttattttaagaatctaagtaaagaagatgattttgaacgtgtactacatcctaatcaaatattagattggatattaattgaagatgaaaacttaaataacgaggctagcgtacaatttagaaatgatttaaataatagtgcagctaatatgacttttgctttaagtttccagcactatacgatgcgtaatgaaagagcgccattatataaccttattaaaaatgcaaatgatagttacttgcgttccgaacaatctgtcatcgaaggtcatccccttcatcctggtgctaagttaagaaaaggaatgaatgctgaggaaaactttatgtattcatcagaatttggtaatgttattcatctaaaagccgtgtttattcataaaagtataagtcgtattcaatcattgaatgtagattacaatgttgccgtaaagcaaatgtttcccgacttaattaaaaccttagaaaaagaatttggcgaagattttaatttaaaaaattatcatttaatgatggttcacccttggcaaataaaacatattttacaaagtgattatcgggatgaactaaatgaaaagttaatattgataagtaatcattcggtaccatactatgccggtctatcatttagaacgttagtacctaaacaacctgatttatccccgcacatcaagttatcgacgaatgtacatataaccggtgagattcgaacattgtctgaacagacgacatataatggaccattagtgacgcaaattttaagagagattatgtcaaaagatgaagatttttcacattatcaatctacttatatcgatgaaaatgcagggatacacttttataatcgaaacgacaatgaggcaattcaaacagatcgaagtgaacaattagggactttgtttagaaataatttatatcaatttatatctaatgaaacagtgccagtaattccatcaagtttggttgcgacctatccctataatactgaagcaccaatctgtacgttaatcaaaacgtatcaaaatacgcatcaatataaaaattatgaagaagcagcgaaacaatggattaaagactatagcaaagctcttcttggcttagttatccctctttattcaaaatatggaatttcgctagaggcacatttacaaaattcagtggcaacttttaataaagatggctcactaaatatgatttatatcagggactttgaaggattacgtattgataatgaacaattgaataatgctggatttaccactagacatttccatgaaaaatctagaatccttacaaattctaaaacatcagtatttaataaaatgttctattcaacagttcaaaatcatttaggtgaactcgttattacaatagctaaatattctaatagtaaagtccttgaacaagaaatatggcaaattatttcacaaacagtagaagacatttttaatcacatgactcacatttcaaaacaacatctcaacaacatcaagcgcactattttcgcatccgaaatcgattataagtgtgtcacaacaatgcgtttagaggatcaagcacatgaatatacgtatattaaagtgaataatccacttcatagaaagaatgatttataa

SEQ ID NO: 4911 - DNA, 501 bp, Staphylococcus epidermidis; identical to SEQ ID NO: 4675

SEQ ID NO: 4912 - DNA, 240 bp, Staphylococcus epidermidis
atggctgataataacaatcaaaacggacaagacgctactcaacaatttataaatattttaaaatcgtttaaatggcgtattattggatttttagcatttttaattatagctatattattcctaactctcggattctggaagacaattttaattatagtgttatgtttaataggaatcggtatcgggtatattaaagaccgtacacaagatttcttaaacttcctaaatagatggagttag

SEQ ID NO: 4913 - DNA, 537 bp, Staphylococcus epidermidis; identical to SEQ ID NO: 4673

SEQ ID NO: 4914 - DNA, 1011 bp, Staphylococcus epidermidis
atgaaagcgataggatttaaatcttcattccaattagatgaaggaaattgttttgaggaatttaactttgatatacctcatccatccggccatgaattattagtcaaggttcaaagtattagtgtgaatcctgttgatacaaaacagcgtacaataccagttgacaaagcgccacgtgtacttggctttgatgctgttggtgtgattgaaaagataggagatcaagtgtcaatgtttcaagaaggggacgtcgttttttattcaggttctcctaaccaaaatggttcgaatgaagaataccaattaatagaggagtatttagtagctaaagcacctacaaatttgaaaagtgaacaagcagctagcctacctttaactgggctaacagcttatgaaacgcttttcgatgtttttggaatttcaaaagaaccatctgaaaataaaggtaaatcattgttaataattaatggagcaggtggtgtaggtagtattgcaacacagatagcgaaattttatgggttgaaggttattacaactgcttcgagagaggatactataaagtggtctgttaatatgggtgctgatgttgtactgaatcataagaaagatttaagtcaacaatttaaagataatcatattgagggtgttgactatatcttttgtacattcgatacagatatgtattatgaaatgatggttaacttagttaaacctagaggacatattgcgacaattgtcgcatttaattcgcaacaagatttaaatttattgaaatctaaaagtgtaacatttacgcatgaatttatgttttcaagaccattacaccatacagatgatgtaatcaaacatcatgaatatcttaaggatataacagaaaaggttgaacagggatattatcaaccaactaccacgaaagttatcaacggattagatgtagatagcctttatgaagcgcatcaaattttagagtctcattctatgattggtaagcttgttatcaatcttaagtaa

SEQ ID NO: 4915 - DNA, 1005 bp, Staphylococcus epidermidis
atgaataataaacaaatagtatttaataaagtaccagacggaatgccacaagacgatacatttaaatatgaagatatagatgttattgaaccttcagaaaatgaattgcaattgaaaacattatatatatcggttgatccatatatgagaggacgtatgacaaatgctgattcttatgtagatccgttcaaacaaggggaaccgttcaatggacatacggtatctaaagttttgaaatccaaggatagtaattttgatgaaggtgatatagtagtgggtatgctaccttggagaaaaataaatacagtaaatagtgagtatgttaacaaagtacctacttctgacgtaccattacatctttatcttagtgtgttggggatgcctggtcagactgcttatcatggattacttgatattggacaacctaaagaaggtgaaacagtagttatttcagcagcttcaggtgcagttggttcagttgtgggccaaattgcgaagcttaaaggttgcagagtcgttggtatagctggtggagataaaaaagtgaactatctaaaaaatgaacttcgttttgatgctggtatcgattacaaaaaagataatttccctgaagcgttaaaagaagcggtgcctaacggtatagatgtctacttcgaaaatgtaggtggatatattggcgatgaagtcttcaaacatctcaatacacatgcaagaattcctgtttgtggtgcgatttcatcctataatcatccagaaaaagatattggaccacgcattcagcaaacattgattaaaaatcaagcaatgatgagaggtttcatagtagcagaattcgctgatggttttaaagaagcgagcaaacaattagctcaatgggttcaagagaataaaattaaaacacaagtttcagtagaagatggttttgataaagtgccgcaagcctttagaaatctgctaactggtgataattttggtaaacaagttattaaagtggcaagtgaataa

SEQ ID NO: 4916 - DNA, 1026 bp, Staphylococcus epidermidis
atgagattaagtttacttgattatgtcccgttgttcgaagggcgtaccccaaatgacgccctaaagcatagtattaaattagcccaatacgctgagaaacttgggtacttacgatactgggttgcagaacatcatcaagtttattctgtcgtttcgagtgcacctgaaataataatgatgtcgattttagaacacacacaacacatcagagttggtagtggaggtgtgatgttaccacattatagtccttataaagtagctgagcaatttaaaattatggaagcaagacacccccaccgtatcgatatggctattggacgttcgccaagctttaaaaatgttaatgaagcattaaatgaaaacaaaaatgaaaaattaccattcaatactcagattactgacttgcttaaatacttcaataacgatacatctcaagaccatcgttttaaatcattattagctacacctatggttacttcatttcctcagctatatattttaggtatgagtattagaagcgcaaaattagctgctcagcgcggactaccttttgttattgcacgaatgggacaatctgagacagaccttcatgaagctataagcacttatcgaaaatatttcaaagcttatcatggtgaaattaataatgcgaaaccatatgttattttagcaacttttgtggtaacagcttctaatttatctagagttaaacaattgctacatgcgcttcaactttggttgatgcgtattaactatttaaatcaacctaagagttatccatcgattgaaacagcacagaacaagcattatagtcaacgagaattagaaaagcttgaaaagatgaaatcgaaaatcatatacggaatgccaaatgatgttgcggaacaacttaccttacttcatcaacaatttaaagtggatgaaatcctcatcttacctcatgtatttggtgaagacgctagaatggaattaattgagttaattgcgaatgaattgattccatcttgttcacgcgatgaattttag

SEQ ID NO: 4917 - DNA, 870 bp, Staphylococcus epidermidis
atgatgaagtcaaaattcacaattctattatttacaatcttttctacaacagtattagttttggttattatttataacaaaactcaatcccaatcatacatttcgactcactattctaataataaaataaaaacaacagcaacacttttttaccatggttatggtggtagcgaacgctcagaaacgtttatggtcaaacaagcgttaaataaaaatgtaaccaatgaggtgataaccgctagagtgagtagtgaaggaaaagtatattttgataaaaaattaagtgaagatgcagcaaaccctattgtcaaagtagaatttaaagataataaaaatggaaattttaaagaaaatgcttattggattaaagaagttctatcacaactaaaaagtcaatttggaattcaacaatttaattttgtaggacattcaatggggaacatgtcatttgctttttacatgaaaaattatggggacgatcgacatttgccacaacttaaaaaggaagttaatatagcgggagtttataacgggattttgaatatgaatgagaacgtgaatgaaattatcgttgataaacaggggaaaccaagtagaatgaatgccgcatatcggcaattgttatcactgcataagatttatagtggtaaggaaatagaagttttaaatatctacggagatttagaagatggctcacattcagatggacgtgtgtcaaatagctcttctcaatcgcttcaatatttactaagaggtagcgctaagtcttatcaagaaatgaaatttaaaggtgcaaaggcacaacatagtcaattacatgagaataaagatgttgcaaatgaaatcatacaattcttatgggaaacttaa

SEQ ID NO: 4918 - DNA, 1413 bp, Staphylococcus epidermidis
atgactaagaaattacctgatgactttatttttggtggagcaaccgctgcttatcaagcagaaggagctactcagactgatggtaaagggcgtgtcgcttgggacacgtatttagaggagaattattggtacacagctgaaccagcaagtgatttttataacagatatcctgttgacttggaattaagtgaacgctttggtgtaaatggtatacgtatctcaattgcttggtctcgtatttttcctaaaggttacggtgaagtgaatcaaaaaggtgtcgagtattatcataatcttttcaaagaatgtcataaacgtcatgttgaaccttttgtaacattacatcactttgacacaccagaggtacttcacaaagatggagatttcttaaatcgtaaaacaatagactattttgtagattatgctgaattttgttttaaagaatttccagaagttaagtattggacaacattcaatgaaattgggccgattggtgatggtcaatatttagttggtaaattccctccaggtatcaaatatgactttgaaaaagtattccaatctcatcataatatgatggttgcacacgcacgtgctgttaaactttttaaagatgaaaattataagggagaaataggtgttgtccatgcattacctacaaaatatccatatgatccatctaatcctgaagatgtgagagcagccgaacttgaagacattattcataataaatttattttagatgcaacataccttggtaagtactcacgtgaaacgatggaaggagtacaacacatcttatctgtgaatggtggtcaattagagatttctgatgaagactacaaaattttagatgaagctaaggatttaaacgatttcttaggtattaattattatatgagtgactggatgcgtggttttgaaggcgaatctgaaataacacataatgccactggtgataaaggtggatctaagtatcaacttaaaggtgtaggacaacgtgaatttgatgttgatgttcctagaaccgattgggattggatgatttatccacaaggtttatatgaccaaattatgcgtgtagtaaaagattatccgaattatcataagatttatattactgaaaatggattaggatataaagatgtattcgacgaaaaagaaaaaacagtacatgacgatgcacgaattgactatattaaacagcatctaagtgtgatagcagatgcgattgcagatggtgccaatgttaagggatacttcttatggtctcttatggatgtattttcatggtcaaatggttatgaaaaaagatacggtttattctacgttgattttgaaacacaggaaagattccctaagaaaagtgcatattggtacaaagaacttgcagaaagtaaagaaattaaataa

SEQ ID NO: 4919 - DNA, 1749 bp, Staphylococcus epidermidis
atgaataaattaatagcatggatagaaaaaggaaagccattctttgaaaaaatatcacgaaatatttatttaagagcgattcgtgatggatttattgctgctattccaattatcttattctcaagtatatttattttaattacctatgtaccaaatgtgtttggttttacttggagtaaaactatggaaggtatattgatgaaaccctataactatacaatgggaatagttggtttgcttgtagcaggaaccacagctaaatctttaactgattcttacaatcgaaaactagataaaacgaatcagattaactttatttcgacaatgatggcagctatttgtggatttttattcttagctgctgatcctgttaaagatggtggattttcaagtgcatttatgggaacaaaaggtttattgacagcctttatttctgcgtttattaccgtgattgtttataatttctttgtcaaaagaaatattaccattaaaatgcctaaagaagtaccaccaaatatatctcaagtatttaaagatattttccctttatcagccgtaattttaattttgtatgctttagacttactttctagagcaatagtccacacaaatgtagcaaatgcagtattaaaagtatttgagccactatttactgcggcagatggttggattggggtaacactcatattcggtgcgtttgcgttcttctggtttgtaggtattcatggaccttctattgttgaaccagcgattgcagcaattacttatgcgaaccttgaaacaaatttacacttaatacaagctggagaacatgctgataaagtaattacaccgggtacacagatgttcgtagcaactatgggaggaaccggtgcaacattagttgttccatttatgtttatgtggttaacaaaatcaaaaagaaataaagcgataggtagagcatcagtcgtacctacattctttggtgtcaatgaacccatactttttggtgcaccactagtactaaatccggtattctttataccttttatttttgcacctatagtaaatatatggatttttaaattttttgttgatgttttaaatatgaatagttttagtatctttttaccttggactactcctggtccactcggtattgttatggggactggatttgcattttggtcatttgtgttagcaatattacttattgttgttgatgtgattatttactatccattcttaaaagtatacgatgaacaagtgcttgaagaagaattaggaaataaagaagcaaataatgaattaaaagaaaaagtatcagcaaactttgatacgaaaaaagccgatgctattttagcaactgcaggggcaagtgaagcggatactgatgatacatcttcagttgatgaaacaacttctacatcctctacagatactattagtgaacaaacaaatgttttagttttatgtgcaggtggaggtacaagtggtttactagctaatgctttaaataaagctgctgaagagtatgaagtaccagtaaaagcagcagcaggtggttatggtgcacatatggatattatgaaagattatcaattaattatcttagcaccacaagttgcttcgaattttgaagatattaaacaagatactgatcgcttaggaattaaattagccaaaactgaaggcgctcaatatatcaagttaacaagagacggtgaggcggctttagaatttgtaaaacaacaatttaacaattaa

SEQ ID NO: 4920 - DNA, 315 bp, Staphylococcus epidermidis; identical to SEQ ID NO: 4666

SEQ ID NO: 4921 - DNA, 978 bp, Staphylococcus epidermidis
atgacaaaatcacaacaaaaagtgtcatcaattgagaaattaagtaatcaagaaggtattatttcagctttagcatttgatcaacgtggtgcattaaaaagaatgatggcagaacatcaatctgaaacaccaacagttgagcaaatagaacaattaaaagtacttgtttctgaagaattaactcaatatgcgtcttcaattttattagatccagaatatggtttaccagcatcagatgctcgaaataatgactgcggactattacttgcatacgaaaaaactggatatgatgtgaatgcgaaaggtcgtttgccagattgcttggtagaatggtctgcgaaacgtttgaaagagcaaggggccaatgcagttaaatttttactttattatgatgtagatgacacagaagaaattaacatacaaaagaaagcatatattgaacgaattggttcagaatgtgttgccgaagatattcctttcttcttggaagttttaacatatgacgacaatattcctgacaataaaagtgcagaattcgctaaagttaagccacgtaaagttaatgaagcaatgaagttattctctgaagatcgttttaatgtggatgtacttaaagttgaagtacctgtgaatatgaattttgtggaaggattttcagaaggagaagttgtttatactaaagaagaagctgcacaacatttccgtgatcaagatgcagctactcacttaccatatatttatttaagtgcaggtgtatcagcagaattgttccaagatacattaaaatttgcgcatgattctggtgcgcaattcaatggtgttttatgtggacgtgccacatggtcaggagcagttaaggtatacattgaagaaggagagcaagctgccagagaatggttgcgtacggtaggatttaagaatattgatgatttgaatacagtattgaaaacaacagctacatcatggaaaaacaaataa

SEQ ID NO: 4922 - DNA, 933 bp, Staphylococcus epidermidis
atgattttaacattaactttaaatccctcagttgatatatcttatcctttagatcagtttaatttagatactgttaatagggtatctcaaacaagcaaaacagcaggcggtaaaggattaaatgttactagagtattgtctgaatttggtgaagacgtaatagcaagtggttttttaggtggagcattaggtcaatatattgaagaacaaatagaaactactcgtattaaacaagcatttttcaaaatcaaaggcgaaacacgaaattgtattgcaatactacatgagggacaacaaactgaaatccttgaaaagggtcccacgattgaacttaaggaatcagaggaattcaagtcacatctattaaaacttttcaaagaaactgatgtggctgttatgtctggtagtctgcccaaaggacttaatactgattattatacggatattgtgagattagcaaaagaacaaggaattttgaccattttagatagctctggtcaatcacttgaggaagttcttattagtaatgagaaacctacagtaattaaaccaaatatagatgaattatcacaacttttaaattacaaagtaactaatgatattaaagaattgaaagtggcattaagtcagccaatatttaatgatattgaatggattattgtttcattgggcagtgaaggtgtttttgcaaaacataatcaaaaattttataaggtgaatattcccaacattaaagtagttaatcctgttgggtcaggagattctactgtagcaggtattgcttctggactcattcatcaacaaaccgatgaagagttattaaaaaaagcaaatgcattcggaatgctaaatgcaatggaacaacaaacaggtcatattaatacagataaatttgacgaaatattcaaacaaatagaagttatagaggtgtaa

SEQ ID NO: 4923 - DNA, 516 bp, Staphylococcus epidermidis; identical to SEQ ID NO: 4663

SEQ ID NO: 4924 - DNA, 429 bp, Staphylococcus epidermidis; identical to SEQ ID NO: 4662

SEQ ID NO: 4925 - DNA, 756 bp, Staphylococcus epidermidis
atgaacaaatatgataggttagatgaaatcacaaaattagtaaataaacgaggttctgtaagaacaaatgaaatcgtcgaagatttaaatgtgtcagatatgactgtgcgccgtgatctcgcagagcttgaagaaaaaggtgttctcactaaaatacatggtggtgctcgtagtaattcagctttccaatataaagaaatgtctcatcaagaaaaacatacacgttttattgaagaaaaacgatttatagcaaagaatgcagtagatttaattgaagatggagatactattttcttaggtcctggtactacagttcaaaaattagctgaagaactaaatcattattcattaacaattattactaattgtttaccagtatttaatatattaataaaaaaacaaacgttacatttcagagtctatttattaggtggggaaatgcgtgatttaactgaagcatttgtaggtgagatgacaaatcagttattaagtcaactaagatttagtaaaatgttttttagtagtaatggtgttaaagatggtctagctatgacatcctcaatagaagaggcttatacgcaacaaattgcacttagccattcgttggaaaaatatttactgattgactcttcaaaaattggtaaggatgatttttcatcattttgtgagcttcgtgaactcaatgcagttttaacagataataatgacttggaaaagaaagaaaaaatagaatcatatgttgaggttattagctaa

SEQ ID NO: 4926 - DNA, 741 bp, Staphylococcus epidermidis
atgaaaaaaccagatattcaacagttaaaagatatcgtaaacaactctaatcaaattgttttctttacaggagctggtgtttcagttgcaagcggaattccagattttcgctcaatgggtggcttgtatgatgaaatatcaaaagatggacagtctccagagtatttgcttagcattgatcatttacatgataataaagaaagttttataaacttttatcatgaaagacttttaattgccgataaaaaacctaatattgttcatcaatggattgcacaactggaaaatcagcaaaaatcacttggcgtcatcactcaaaatatagatggtttacacgaagatgcaggtagtcacaatattgatgagctacatggtacacttaatcgcttttattgtattaactgttatgaggagtactcaaaatcatatgtcatgacacatcatctcaaatattgtgaaaaatgtggtaacgtcatcagacccgatattgttttatacggcgagatgttaaatcaaaaaacagtcttcaaggcattagataaaattcaacatgcagatacactcatcgtattaggttcatcacttgttgtacaacctgctgctggttttgtatcagaatttaaaggtgacaacctagttatcattaatagagatgcaactccatatgatcatacagctagcttagttatacacgatgatatgactagtgttatagaagaaattgtaaatagtaatagttaa

SEQ ID NO: 4927 - DNA, 393 bp, Staphylococcus epidermidis
ttggcacaagttgaatataaaggcacaggccgtcgtaaaaactcagtagcacgtgtacgtttagtacctggcgaaggtaacattactgttaacgaacgtgatgtacgtgactacttaccattcgaatcattaattttagacttaaatcaaccatttgatgttacagaaactaaaggtaactatgatgttttagttaacgtacacggtggcggatttactggacaagctcaagcaatccgacatggaattgcacgtgctttattagaagcagatcctgaatacagaggttctttaaaacgcgctggattacttactcgtgacccacgtatgaaagaacgtaaaaaaccaggtcttaaaaaagcacgtcgttcaccacaattctcaaaacgttaa

SEQ ID NO: 4928 - DNA, 438 bp, Staphylococcus epidermidis
atgcgtcaaacatttatggcaaatgaatcaaacattgagcgcaaatggtatgttattgatgctgaaggccaaacattaggtcgtttatcatcagaagtagctgctatattacgcggtaaaaataaagtaacttatacaccacatgttgatactggtgattatgtaattatcattaatgcatctaaaattgaattcactggtaacaaagaacaagacaaaatgtaccaccgtcattcaaatcacccaggcggtttaaaatcaatctctgctggtgaattaaaaagaacaaatcctgaacgtttattagaaacttcaattaaaggtatgttaccaagtacacgcttaggtgaaaaacaaggtaaaaaattatttgtatatggtggcgctgaacatccacacgctgcacaacaaccagaaaactacgagttacgtggttaa

SEQ ID NO: 4929 - DNA, 804 bp, Staphylococcus epidermidis
ttgcgtatattagttgaaattgcttatcaaggtaaccaatttttaggttttcaaattcagcaacaaggacgaactgttcaacaacaatttgaaaagattcttaaacgaatgcataaacatcatgtacgaattcatccctcaagcagaacagacaggggtgtgcatgcgtatcagcaattctttcatttcgataccgaattgaatattgataacaaacaatggcaatatgcgatgaatcgagctttaccagatgatatttacgttaaaaatgtacgaaatgtcgacgagtattttcattgtcgttatgactgcgtaggcaaacgctatcgttacaaagtttatcaaggtaatcatcgaaatccttttaagagtggtactgaaacttttgtttatgaaacattagactatgataaaatgaacaaagctgctcaagaatttataggtacacatgattttaccggtttttgttcacagaaaacagaagttgaaagcaaagtaagaacactctatcagagtgaaattgttgctactaaagagggatttgattatgtcgtaacaggttctggatttctttataatatggtccgtgtattggtagctttcttaattgaagtaggaaaaggaaagcgtgaacctaatgacgtccctaagctcttagaggacaaaaatagaaataatgtgcctctcacagctccacctgacggattatatttagaaaagatttatttaagcccagaagaattgatacaagaatatgggaaagatataaaaatacactacaaaaaatcgttggaaaaacactaa

SEQ ID NO: 4930 - DNA, 807 bp, Staphylococcus epidermidis
atgaagaataaattaatcattggacgatatcttcctatgcaatcaattattcatcagcttgatcctagagctaagttaatatttgtctttttctttattcttttaatttttttctgtcattcactaggtacatatgcatggttgtttctttttataatattatttattaagttagcacgtattcctttttggtttttaattaaaggattaacacctatctttttcttcttggttttcactttttctatgcatgtgttatttactaatggaggtatcgtattatttcaatggaagtttatcactattgaatcaaatggtgttatggaaggaatttatatatcactaagattgatttttatagttatgattgcaacaatcatgacactttcgactagtccgattgatttaacagatgcttttgaaaaattatttgtacctcttaaagtgattaaagtaccagtacatcaattaagtatgatgatgtctattgctctaaggtttataccaacattaatggacgaattagaaaaaattatacttgctcaaaaatctagagggtcagaaataagttcaggaagtttaataacacgaattagagcttttatacccatcatgattccattatttatttctgcctttcaaagagcagaagaactagctatagcaatggaagtcagaggttatgatattaacatcaaacgaacaagctataggttattacattggcaatataaagacacattaacagtcttacttttaatacctatcgctactatattatttattttaaaattttcaggagtgtaa

SEQ ID NO: 4931 - DNA, 861 bp, Staphylococcus epidermidis; identical to SEQ ID NO: 4655

SEQ ID NO: 4932 - DNA, 810 bp, Staphylococcus epidermidis
gtgaatgggtcaaatcctatcattgaatttaaagatgtatcatttcaatatcaaagtgatgctgctttcacattaaatcgcgtttcattctcaataccagctggacaatggacttctattgtaggtcacaatggttcaggaaaatctactattgctaaacttatggtaggtatagaagaaccaagtgaaggacaaattctatttcaaaatctaccagtagactctcaaaataagcgagaagtgaggaaacatatcggaattgtttttcaaaaccccgataatcaatttgtaggttctatagttaaatttgatgttgcttttggtcttgaaaaccaacttgttccttataaagaaatggtatctaaagttaatcaagtattaactgaagtagatatgataaataaagccgatgatgaaccccattcactttcaggagggcagaaacaacgtgttgccattgctggggtacttgcacttaatcctgatgtgctgattttagatgaagcgacaacgatgctagatcctcatggaaagtcatctttacttaaccttgtaaatgaagttaaagtaaataatcatgttacaattatttcaatcactcatgatttagatgaagcaatgcatgctgatcaaatcattgtattgaataaaggaactgtttttaaacaaggaacacctcaagatatttttaagtgcgaagaggcactaatatcggttggattggacttaccatttcctttgaaaatgaatcgacttttaggttttgattcaacttatgtaacttatgaagggttgattaaaaaattatga

SEQ ID NO: 4933 - DNA, 369 bp, Staphylococcus epidermidis; identical to SEQ ID NO: 4653

SEQ ID NO: 4934 - DNA, 945 bp, Staphylococcus epidermidis; identical to SEQ ID NO: 4652

SEQ ID NO: 4935 - DNA, 390 bp, Staphylococcus epidermidis; identical to SEQ ID NO: 4651

SEQ ID NO: 4936 - DNA, 366 bp, Staphylococcus epidermidis; identical to SEQ ID NO: 4650

SEQ ID NO: 4937 - DNA, 114 bp, Staphylococcus epidermidis; identical to SEQ ID NO: 4649

SEQ ID NO: 4938 - DNA, 219 bp, Staphylococcus epidermidis; identical to SEQ ID NO: 4648

SEQ ID NO: 4939 - DNA, 648 bp, Staphylococcus epidermidis; identical to SEQ ID NO: 4647

SEQ ID NO: 4940 - DNA, 1293 bp, Staphylococcus epidermidis; identical to SEQ ID NO: 4646

SEQ ID NO: 4941 - DNA, 441 bp, Staphylococcus epidermidis
atgaaattacatgagttaaaagcagctgaaggatcacgtcgtgtacgtaaccgtgtaggtcgtggtgctgcaactggtaacggtaaaacaagtggccgtggtcaaaaaggtcaaaaagcacgttcaggtggtaaagtaagaccaggatttgaaggtggacaattacctttattccgtcgtttgcctaaacgtggtttcactaacattaaccgtaaagaatatgctattgttaacttagaccaactcaataaatttgaagatggtactgaagttactccagctttattagtagaatctggtgttgttaagaatgaaaaatctggtatcaaagtactaggtaacggttcactagacaagaaattaacagtgaaagctcataaattctcagcttcagcagcagaagctattgatgcaaaaggtggagcacacgaggtgatctaa

SEQ ID NO: 4942 - DNA, 183 bp, Staphylococcus epidermidis; identical to SEQ ID NO: 4644

SEQ ID NO: 4943 - DNA, 501 bp, Staphylococcus epidermidis; identical to SEQ ID NO: 4643

SEQ ID NO: 4944 - DNA, 363 bp, Staphylococcus epidermidis; identical to SEQ ID NO: 4642

SEQ ID NO: 4945 - DNA, 537 bp, Staphylococcus epidermidis; identical to SEQ ID NO: 4641

SEQ ID NO: 4946 - DNA, 399 bp, Staphylococcus epidermidis; identical to SEQ ID NO: 4640

SEQ ID NO: 4947 - DNA, 186 bp, Staphylococcus epidermidis
gtggctaaaacttcaatggttgctaagcaacaaaaaaaacaaaaattcgctgtacgtgaatatactcgttgtgaacgctgtggtcgtccacattctgtgtatcgtaaatttaaattatgccgtatttgtttccgtgaattagcatacaaaggtcagattcctggcgtacgtaaagctagctggtaa

SEQ ID NO: 4948 - DNA, 540 bp, Staphylococcus epidermidis
ttgaaccgtttaaaagaaaaatttaatacagaagttactgaaaacttagtgaaaaaattcaattatagttcagtgatggaagtaccaaaaattgagaaaatcgttgtgaatatgggtgtaggtgacgcagttcaaaattctaaagttttagacaatgctgttgaagagttagaattaattactggtcaaaaaccattagtaacaaaagctaaaaaatcagttgcaacattccgtttacgtgaaggtatgccaatcggtgcgaaagtcactcttcgcggagaaagaatgtatgaattcttagacaaactcattgcagtttcattaccacgtgtacgtgacttccaaggtgtttctaaaacagcttttgatggtcgtggaaattacacacttggtgttaaagaacaattaattttcccagaaattgactacgataaagtaacaaaagttagaggaatggatattgttatcgtaacaactgctaacactgacgaggaagctcgtgaattgttaacaaacttcggtatgccatttcgtaaataa

SEQ ID NO: 4949 - DNA, 318 bp, Staphylococcus epidermidis
atgcatatcaaaaaaggtgacaacgtaaaagttatcgcaggtaaagacaaaggtaaagaaggtaaagtactagctactgaaccaaaaaaagaccgtgtcgttgtggaaggtgttaacgttataaaaaaacaccaaaaaccaactcaattaaaccctgaaggtggaattttagaaacagaggcagcaatccatgtttctaacgtacaattattagatcctaaaacaaatgaacctacacgtgtaggatataaaacagttgatggtaaaaaagttcgtatcgctaaaaaatcaggcgaagaaattaaagctaataattaa

SEQ ID NO: 4950 - DNA, 369 bp, Staphylococcus epidermidis; identical to SEQ ID NO: 4636

SEQ ID NO: 4951 - DNA, 264 bp, Staphylococcus epidermidis; identical to SEQ ID NO: 4635

SEQ ID NO: 4952 - DNA, 210 bp, Staphylococcus epidermidis; identical to SEQ ID NO: 4634

SEQ ID NO: 4953 - DNA, 435 bp, Staphylococcus epidermidis; identical to SEQ ID NO: 4633

SEQ ID NO: 4954 - DNA, 654 bp, Staphylococcus epidermidis; identical to SEQ ID NO: 4632

SEQ ID NO: 4955 - DNA, 354 bp, Staphylococcus epidermidis; identical to SEQ ID NO: 4631

SEQ ID NO: 4956 - DNA, 279 bp, Staphylococcus epidermidis; identical to SEQ ID NO: 4630

SEQ ID NO: 4957 - DNA, 834 bp, Staphylococcus epidermidis; identical to SEQ ID NO: 4629

SEQ ID NO: 4958 - DNA, 276 bp, Staphylococcus epidermidis; identical to SEQ ID NO: 4628

SEQ ID NO: 4959 - DNA, 624 bp, Staphylococcus epidermidis; identical to SEQ ID NO: 4627

SEQ ID NO: 4960 - DNA, 663 bp, Staphylococcus epidermidis; identical to SEQ ID NO: 4626

SEQ ID NO: 4961 - DNA, 309 bp, Staphylococcus epidermidis
atggcaaaacaaaaaatcagaatcagattaaaagcttatgatcatcgtgtgattgatcaatcagcagaaaaaattgttgaaactgcaaaacgttctggtgcagatgtttctggaccaattccattaccaacagaaaaatcagtttatacaattattcgtgctgtgcataagtacaaagattctcgtgaacaattcgaacaacgtactcataaacgtttaatcgacattgttaatccaacacctaaaacggtagatgctctaatgggcttaaacttaccatcaggtgtagacatcgaaattaaattataa

SEQ ID NO: 4962 - DNA, 399 bp, Staphylococcus epidermidis; identical to SEQ ID NO: 4624

SEQ ID NO: 4963 - DNA, 1335 bp, Staphylococcus epidermidis
gtgaaaaagtacttccagttcgataagcatgggacaagttataaaaatgaaattttaggtggaattacgacctttctatcaatggcatatattctagctgtaaacccgcaaattttaagtttagctggtgtaaaaggtgcaacaagtgatatgaagatggatcaaggtgccatctttgtagcgacagctttagcagcgtttgttggatcattatttatgggattaattgctaaatatccaattgctttagcacctggtatggggttaaatgcattttttgcttttacagtagtattaactatgggaattccttggcaagtaggattaacaggtgttctattctctggtatattttttgcattacttactgttactggtttaagagaagttattatcaatgctatccctcatcaaatgaagctagctgtttcggcagggattggtttatttatcacatttgtggggttacaaagttcagggataataattaaaagtgattcaactttagtaaaattaggacatttgactgaagcaccagtacttttagcgattttcggaatcattgttacggtcattttatatgctatgaaaattcctggttcaatttttataggaatgattgtaactgccgtagcgggtatgctaactggtcaaattcatccaccatcaggaataattggagaagttccaagtatcaagccaacctttggtgcggcatttgaatcatttaatgatcctggtcaactgtttactattcaattcctaattgttattttaacattcttgttcattgatttctttgatacagctggtacgttagtagctgttgccacgcaagcaggattgatgaaagataacaaattaccgagagctggaagagcgttattctctgactctttagcaactattgtaggttctgtgtttggtacaactaccacaacatcatatattgagtctacttctggcgtagctgtaggggctagaacaggatttgcaagtatagtcacgggtatttgtttcttattagcattattctttagtccgttaatagaagttgtaacaagtgcagtaactacacctgctttagtcgtagtaggtgtattgatggcggctaattttgctgatataaattggaagcaatttgaagttgcagtaccagcttttattacaatcattatgatgccattgtcttattctattgccactggtattgcatgtggatttattttttatccaataacaatgattatcactaaaaagtataaagaagttcatccaattatgtactttttaatggctttgtttatattatattttatattcgttcataaataa

SEQ ID NO: 4964 - DNA, 2136 bp, Staphylococcus epidermidis
atgaaatctttaatcttagctgaaaaaccatctgtcggaagagatatcgctaatgctttgaatcttcaacaaaaaagtaatggttatatagaagggaaacagtatatagtaacttgggcattggggcatcttgtgacaaatgcaacgcctgaacaatataacccttcatataaagaatggaatttagaagacttacctatcattcctaagaaaatgaaaacagtagtgattagtaaaacaaatagacaatttaaaattgtaaaatctttaattttagataaaaatgttaaagaaattattatagcaacagatgctggacgagaaggtgaactagtagctcgtcttattttagataaagtaggtaataaaaaaccaatcaagcgtttgtggattagttcggttacaaaaaaagccatacaagaaggatttaaacagttaaaaaatggaaacgcgtatcaaaatttatatgaagcagcacttgcacgaagtgaagcagattggatagtagggattaatgcaacacgtgcactaacgacaaaatatgatgcacaattatcattaggtcgtgtacaaactccaacaatacaaatagttaaatcaagacaagatgagattaactattttaaaccagaaaaatattacacgttatccattaatgttgatggttacgatttaaaccttaagcaacaaaagcgatataaagataaaaaagaattagaattgattgaacataaaattaaacatcaagaaggaaagatattagaagttaaaggaaaaaataagaaatcttacgcgcaacctttatttaatttaacagatttacaacaagaggcatataaacgttacaagatggggccaaaggagacactaaatacattacaacatttatatgagagacataagttagtaacctatccccgtacagattctaattatttaacagatgatatggtcgatacaattcaagaacggttaagagcaattttagctacagattataaatctcatgttcgagatttaatttctgagtccttttcttctaaaatgcatatttttaataatcaaaaagtttcagatcatcatgcgattattcccacagaggttagaccatctattgaacaattgagtcaacgagagtttaaaatttatatgctaatcgcagaaagatttttagaaaatttaatgaatccttatttatatgaagttttaacaatccatgcacaactgaaagattacaattttgttttaaaagagataatacctaaacaattaggatataaagctttaaaagatcaaacctcttcgcatactttaacgcattcttttaaagaaggtcagttatttaaagtacatcgtattgagattcatgaacatgaaacaaaggcaccggaatattttaacgaaggttcattacttaaagccatggagaatccacaaaatcatattgatttgaatgataaaaagtatgcaaaaacactcaaacattcgggggggattggaactgtagcaactagggctgatattatagaaaagttatttaacatgaatgctttagagtcgcgagatggcaaaattaaagttacatcaaaaggaaaacaaattttagaattgtctccaagtgaattaacctcacctatactaacagcccaatgggaagaaaaattaatgcttattgaaaaggggaaatataattctcagaaattcatacaggaaatgaaaaactttacatttaaagtggtaaataaaattaaaagcagtgagcaaaaatataaacatgataatttaacaacaaccgagtgcccaacatgtggtaagtttatgataaaagtcaaaactaaaaatggacagatgcttgtatgtcaagatcccaaatgtaaaactaagaaaaatattcaacgcaagactaatgcacgttgccctaattgtaagaaaaaaatgactttattcggtaaagggaaagaagctgtttatagatgtgtatgtggccacacagaaactcaatcacaaatggacaaaagaatgagagataaaacgaatggtaaagtttcacgtaaagaaatgaaaaaatatataaataaaaaagaagaaatcgacaataatccattcaaagatgctctgaaaaatctaaaattgtag

SEQ ID NO: 4965 - DNA, 864 bp, Staphylococcus epidermidis
gtgcaaattgtagattttttgatagcacttttaccagccctgttttggggtagtgtagtcattataaatgtttttgtaggtggtggaccatataatcagattcgaggtacaactttaggtacactttttatcggattttctctacttgctactggacacgcagcgtttgataaccttacagtaattattgtcggtttagtatcaggagctctatgggcttttggtcaaggtaatcaattaaaatcagtgcatttaataggtgtatctaaaacgatgcctatttcaacgggtatgcaacttgtcggtaccactctatttagcgctattttcttaggtgaatggagcacgattgttcaagtagtgatgggacttatagcaatgatcttattggttgtaggtatttctttaacatcacttaaagccaaaagcgaaggcaaatccgataacccagaatttaaaaaagcaatgggaatattacttctatcaacaatcggttacgtaggttatgtcgttcttggagatatttttggagtaagtggtacagatgctctcttcttccaatcaattggtatggcaattggaggattaatcctttcaatgaaccataatacttcaattaaatctactgctctaaatcttataccaggtgttatctggggtatcggtaacttatttatgttctattcacaacctaaagttggtgtagcaactagtttctcattatcacaactgcttgttattgtttcaactttagggggtatctttattctaggggagaaaaaagatcgtcgccaaatgattggtatttggtcaggtattatcgttatagttatagcttcaatcattttaggcaacttaaaatag

SEQ ID NO: 4966 - DNA, 792 bp, Staphylococcus epidermidis
gtgtttgaagaattagaaaataaagtggttcttattactggagctgccactggaattggcaaatctattgcggaaaattttggtaaagctaaggccaaggttgttataaattaccgttctgatcgacatcatgatgaaattgaggaaattaaacaaactgttgctaaatttggtggtcaaacattggtggttcaaggtgatgtttcaattgaagaagatattaaacgaatgattgaaacaacaattaaacactttggaactttagacattataattaataatgctggattcgaaaattcaatcccaactcatgaaatgtcgattgacgactggcaaaaagttattgacataaacttaactggcgcctttgtgggttcaagagaagccatcaatcaatttttaaaggaaaacaagaaaggtactattattaacatttcgagtgttcatgacactattccatggcctaattatgtacactatgccgcaagtaaaggtggcttaaaattaatgatggaaacaatgtcaatggaatatgcccaatacggtattcgtattaataatatatctcctggggcaattgttactgaacacactgaagaaaaattttctgacccaacgacgcgtgaagaaacaataaaaatgatacctgcacgtgaaattggaaatgctcaagatgtagctaatgcagtactattcctatcttcagatcttgcaagttatatacacggtacaacattgtacgttgatggtggcatgatgaactatccagcatttatgggtggtaaaggttaa

SEQ ID NO: 4967 - DNA, 909 bp, Staphylococcus epidermidis
gtgactgaacaatttgtcataattatattattaatagcacttggttattttcttaaacgtatgaattacttgaaagcaactgatagtcaagtactttcaactttagtgttaaatgttacattaccttcactcgttatagttaacttaaatagtgcaaaattagatgtatctttttcaatattacctataatgatgattatttacggtatagtagctaaaattattgtaatttggttctttagaaaatatgataaccatatgcgtggttctgttggtatgatgactggatctatgaatattggtttgtttgcttatccgttggttgaagcgatatggccatctaaaggtatgatatatttcggaatggttgatattggtggggccattatcatgtttggtattacttattttgtaggaagttattttagcgaaggtagtgaccaatttaacttcaaatttttaggaaaaaaattagttcaatcagtcccattagtaacctatatgattatgtttggattgaacatgtctcatattcatatatggcaaccagctattgatttctttagtgtattatcaaaggcgaatatgcctttatccatgatattattaggtgtaatgcttaattttagtattgagagagaatacctccctgtaacaattaaatatctttgtttacattacgggttaggtatgttagctggaacactagttcactttttattacctgtatctgatgatatgattaaaacaactttgcttataacgtggttattaccagtaggagtagcaatcataccatattcgattcaattcaaatataagacattaccatttgttggaatggtaactaatttaaccattattattagcattatcattttgtatatttatcaagctgtatttgtataa

SEQ ID NO: 4968 - DNA, 171 bp, Staphylococcus epidermidis
atggacttgaattcaaagttatcagaacttaaatatgattatacacgattacaaaacgatttagaaaaacgtgagtcgcttcatcaagatattgaccctctacttaaacaacttgaaaatattgaacaagaaatctcctatatacgttcaaaattaaatcaacaatcttaa

SEQ ID NO: 4969 - DNA, 216 bp, Staphylococcus epidermidis
atgggcatattgttactatttgtagttgctttgacaacgttacaattccctaaagaaaattggtgggtatttgtcgttttattgcttttagttggtaatgttgaagtgactggttttaaagaattaaaagatgataaaaaaggtgttagtatcttgaatatcttatcacttttattatttgttatatttattattttaatttttatactatattaa

SEQ ID NO: 4970 - DNA, 3156 bp, Staphylococcus epidermidis
atgattaaaaaattattacaattttcgttaggtaataaattcgctatttttttgatggtagttttaattatattaggtggcgtttattcaagcgccaaattaaaacttgaattattaccagatgttgaaaatccagttatttcagttcaaactacaatgtctggagcaacaccccagtcaacacaagatgaaataagtagtaagattgataatcaagtacgctcgttggcctacgtaaatagtgtacagactgaatctatacctaatgcttctatagtaactgtagaatacgataatggtacagatatggataaagctgaagaacaattaaaaaaagaaatcgacaaaattaagtttaaagatggcgttggtgaacccgaattaacaaggaactctatggatgcttttccaattgtggcatattcttttacgagtaataatcaaaagttaaaagacgttactaaaaagttaaatcaacagctcgtaccaaaattacaaaccattgatggtgtacaaaatgcacaattaaacggtcaaactaatcgtgaagtatcgttaaagtttaaacaaaaaaatttagatgaaaaaggtttaactgcaaatgatgttgagaactatataaaaacggctacacgtgaaacgccattaggacttttccaatttaataagagtaataaatctattgttgttgatggtcaatttaaatctgtagacgcttttaaaaatcttaaaatccctttatccatttctggacaagctgtacaaaatgatagcgattccgacagtgatagtctaatgccaagtgataatactcgctcgactaatagttcaactcatatggcacagaaaggccaaatgccatctgtaccacttaaagatttagcagatattagtgtcggtgatgaacgtacttctatatccaagacaaatggaaaagatgctgttaacttacaaattatgaaatcacaagatgctaatactgtgcaagttgcgagagaagttcagaaaaaagtagatgaatttgtacgtaatgagagtggaatgaaatctattaaaacaatggataccgctaaacctattgaagactctctttatactatggttgaaaaggccgctctcggtacgattgttgctattatcgttattcttctgtttttaagaaatataagaactacagctatttcaattgtatctataccaatgtcaatattaattgcgctcatagcattaaaattaagcaacgtatcattaaatattcttactttaggtgcattaacagttgcaatcgggcgagttatagatgattctatagttgtcgttgagaatatatttagaagattatctgatccgaatgagaagttcaaaggggaaaatttaattataagcgctactagagaagtatttaaacctattatgtcatcgacccttgttactatagtagtgtttttaccactagtgtttgtatcaggttcggtaggtgaaatgtttagaccatttgcgctagccattacttttagtttattagcttcactacttgtttcgattaccctagtgccttctttaggtgcaacattttttaaaaatggcgttaaaaatagggaacaaaaacaaggtctaggaacagttgggagagcctatcgaagcactttgaattggtcacttaatcataaatggattgtgcttatagttagtatttttattttagttggaagtgtggtcataggcgcaaaaaatctaggaacgagttatatttcaactggagataataaatttttagctctaacatatactccaaaacctggagaaacacagaaatctgtgacacaacatgctgaaaaagtacaaaattatttagataaaaaagataaagtagaaactgttcaatattctataggcggtcctacaccacaagatcctaccggtagtaccaacagcatggcaattatgattaaatatcaatctgacacgcctaattttgacgaagagcctgataaagtacttaaacatatcgagacatttaaacaacctggagaatggaaaaatcaagatttaggaacaggagcaggtaataattctgttgaagtaactgtcaaaggacctaatacaagtgcaatgaaagatacagtcaaccgtgtagagaaaatgatgactgatattaaaggcataacgaatgttaaatctgatttatcacagacgtatgaccaatatgaaataaaagttgaccaaaataaagctgcagataatggtatttctgctgcacaacttgcgatgaatcttaatgaaaacttacctgagaaaacaatttctacagttaatgaaaagggtaaatctattgatgtaaaggtcaaacaaaataagcaaacagattggtcttctcaaaaaattaaaaacattaaactaaataagcctacgggcggtacgattaaacttagtgaaatagcatctcttaaaaaatcatatacaccaagtaaactgactcaagaagatggcgattatgctacgactgttacaggtaaagtgactgataaagatgtgggtggtaaatctcaacaagttatggctaaagtgaaagaccttgagaaacctagtcatattaaaattaatgtcggcggtgcaactgatgacattgataaggctatttctcagcttgctatggcgatgatagcagcaattatcattgtttatttaattttagttattacatttagaggtggtctggcaccatttacaatcttgttctcattaccatttacggttatcggtgtagtacttgcactcatcattaccggagaaactatttcagttccaagtttaataggtatgcttatgttaattggtatcgttgttacgaatgctatagtattaatcgatcgtgttattaacaatgaaaaacaaggtatgccgatgaaacaggcattgatagaagcgggtggtacacggataagacctatattaatgacagcaattgcaacaataggtgcactagtgccgttgttatttggtcaggacagttcaatattaatttcaaaaggtatggctgcaacagtaataggtggattaatttcttcaacgctactcacactctttgtagtaccggttatatacgaaattttattcactttaaaaaataaaattactaaaaagtttaatatgtaa

SEQ ID NO: 4971 - DNA, 1251 bp, Staphylococcus epidermidis
atggaaaagatgaacatcactaatcaacaacatgacgcatttgtgaaatctcatcccaatggtgatttattacaattatctaagtgggcagatacgaaaaaattaacaggatggtattcgagaagaattgctgttggtgaaaatggtcaaattaaaggtgttggccagctactattcaaaaaaatacctaaacttccatatactttatgctatgtatctaggggatttgtagctgattataataataaagaagtgttagaagctctacttagctatgctaaagaagtagcaaaagatgaaaagtcgtatgctatcaaaatagatcccgatgtcgaagttgataaaggtgcagaagcacttaaaaatctacgtgagcttgggtttaaacataaaggttttaaagaaggactgtctaaagactatattcaaccaagaatgactatgattacgcctattgacaaaacagatgatgaattagttcaaagtttcgaacgtcgaaatcgttcaaaagtaagacttgcactgaagcgtggaactaaagtagaacgatcaaatcgcgaggggcttaaaatctttgctaatttaatgaagataactggggagagagatggttttttaactcgagatattagctattttgaaaatatatatgatgcacttcatgaagacggtgatgcagaactcttccttgttaaattagagcctaaaccagtattagatatggttaatcaagatcttgaagcacaattagctgagaaagagaaattacaatcaaaaaagcaagataaaaagacacttaataaacttaatgatattgataataaaattaagaaaacaaatgaattaaaatcggatttaacagaacttgaaaaaagcgagccagaaggtatttacttgtcaggagcgctcttaatgtttgcaggaaacaaatcttactatctctatggcgcttcctcgaatgactatcgtgatttcttaccaaaccatcacatgcaatttgaaatgatgaaatatgcacgtgagcatggtgcaacaacctatgactttggtggtacagataatgatcctgataaagattcagaacattatgggttgtgggcttttaaacgagtttggggtacatatttaagtgaaaaaattggagaatttgattatgtattaaatcaaccgctatatcatttagttgagaaagtgaaacctcgtttaacgaaagctaaaattaaaatatcacgtaaacttaaaggtaaataa

SEQ ID NO: 4972 - DNA, 762 bp, Staphylococcus epidermidis
ttgaacttaaaattagaccatatcattcactatttacatcaattagagtcatttaagtttcccggagaaatattagaattgcaaaatggtggaagacatcatcatttgggcacctttaatcaaatagcaccgattaaaaatagttatatcgaattgctagatgttgaaaatgagtcaaaacttagcaatatagctaaaactgaagaaggtcgtgtatcatttgctacaaaaatagtgcaggatcattttaaacaagggtttaaaggtatttgctttagaacaaaggatataaatcaggttaaaagtactttagaaaatagaggcgttgatgtgataggtcctattgatatggaaagagaaaataaaaaaggtcatcaaattcgttggagattgctatatattgctaaccctgactatacagtcaaaccacctttctttatagaatgggataacaacaaaaagcaaaacctagcacaaatacataatttcaacttgtcatcgtttaaaattaaagaggtgattattactagcactctacgtgaaacaacagtaagtctttggaaagaatggtataatctgaaaatagtaaatgaaacggctacatctactgatctcaaattagaaactgatgaagttatctataaaatagaagacggcaaagattcaggttttcatacattaataatgaccgatatcaatgccacagcaccatattcaatatttatacgtggtgctaaatatcgttttgagccacccaactag

SEQ ID NO: 4973 - DNA, 441 bp, Staphylococcus epidermidis
gtgttagatattttaaccaatgaatttttcaatagttttataggtatatatagaccctatattaaacttacacaacctatattagatcagcatcagattcatactggccaatggcttgtgctaagagatattgccaattatcaacctactacccttgtaaaaatttctcatcgtcgttcaatagaaaagcctacaacacgaaagttgattaaagtgttgttagacaatggttgggtcatgacaaaaacaggagttgataagagagagaaattattgagtttaactgacaaaggccaaagactttttgaaactattaataaaaagatcactgtcattcaacaagatattataaaaaaaactggattaactgatgagcaagtatttgatattacaaatgcgatgtctcaaattcatgaagcaatgataaaggaggaacagtaa

SEQ ID NO: 4974 - DNA, 1194 bp, Staphylococcus epidermidis
atgaatcagtctacaataattaaagaccccatctttacgaagagttttaatattaactttgctattaacttttttgtttatctatgtatgtatttattaattgtcgttatcgcgagctatagtaaatcagaataccatgcttctgattctgttgctggactcgtagtcggactttttatagtaggatcattaataggtcgatttgtaacaggtaaatacgtcaatcgatttggtccaaaaaaaattctcatttttggtttaatatgtttagtagtaacacagctactttattttatacctggttctgtttggttcttaatgatggtgcgtttactgaacggcttagcaacagcggttgctacaactgctacaggaacaatagcagcatatattacaccacctacacgcaaaagtgaaggtatcagtttattctcattaagtttggtgttgggaaccgctattggcccattttttggtatgttattgatgaattccttttctatcaatattttatttactatttgtgtaattttaggtgtcataagtggtctattatcactgttaattaaaattaatttcacaacagttaaagaaaacacaattacacataaacgattcaatttggctcattttgtagccaaagaagccattccggtagcattcgtcatgctattaatcggtgttacttacgctgcaattttaacttatttacaggcttttgctgttgaaagagatctagttacatcagcaagttactttttcattttttatgctattgcgtccctcataacaagacctattgctggaagattgatggatgataaaaacgaaaatgtagttgtttatccagcatttatctttttagtattatcttttgttctactgatgcttagttttaacggatgggtattacttattgcaggtatcgcattaggaattggttatggtaacttgtcatcttgtatgcaagctatcgcaataaaagtatctccatcaaataaatatggcttagctacatcaacttactttattggtttagatataggaattggatttggaccatccttactaggtcttttcacacatatgatttcttatagtcaattatatggaatcatgggtattttaggatttgcaactttagtcatctatattttagtgcacggacgtaaggtttacagcacttcatattaa

SEQ ID NO: 4975 - DNA, 942 bp, Staphylococcus epidermidis; identical to SEQ ID NO: 2559

SEQ ID NO: 4976 - DNA, 504 bp, Staphylococcus epidermidis; identical to SEQ ID NO: 2561

SEQ ID NO: 4977 - DNA, 417 bp, Staphylococcus epidermidis
atggaattatatagtatgcctatgtttaataaatttttagttaacgacatagagaaatcatcggaatggtatcaagagaatttaggttttaaaagtatttttaaatttaaaaatgaacaaaatcaaattttaatggagcatttacgattagcaaaatatcaagatttgatgttaatttctggcaaacagtttgaagtcggtaatgcagtttatacaaatatacttgtaccaaatattcgaattttaaaacaacgaatatcttctcaatatatcgtggaagatcttgaagaaaaaccatggaattctattgaaatgacaattaaagatttagataatcatttaattacgcttacacaaagtaacataaaaaatgaagaatttaatgctttgatgcaacatacttcaaaaactttttaa

SEQ ID NO: 4978 - DNA, 345 bp, Staphylococcus epidermidis
atgcgtagtgtaattaagttggaaaatacatttatattcataatcacaatcgccgtttatgttaaattagaattttctatatggctgtttttacttttactattagttccagatatatttatgttaggatatgtgattaatagaaaaacagggagttatgtctacaatattggacacacgtatatcacacctataattatcgcgctattatatttatacattgatgaaaggttactattacagatttctttaatatggttagctcatattagtatagatagaactttaggtttcggactcaaatattcatcagatactgataaaacgataatacaaaagatgtaa

SEQ ID NO: 4979 - DNA, 1308 bp, Staphylococcus epidermidis
atgagcaaagtaaataaacctttatatttctatcttatgttatttctgttgacaactttaattggtgcttttctactctatttgccctatacagggaagaaacccattaactttattgacgcattgtttgtagcttctagcgcattcacagtaacaggtctatcaccagttgatgttggaacacaatttaatatttttggagaaatcattatcttattacttatacaaattggtggattaggtattgtcactgtagcaatgctaactctcatctttttaaataagaaaatatcaattaacaatagaattttatttatgattacttggaatattgacgaacccggtggtgtaattaaacttattaaacatctagccatatacagcatcgccactgaattatttggtacactttgtctatgtttatcgtttattccaaaatttggcataggtaaaggtctatttttaagtttattcacttcagtttccgcatttaacaacgcaggattcgccctttttaaaaacaacttaatcgatttttcaaatgatccggtaatcattatcactattccaatacttatcattttgggaggtttgggacatttagtcgtggttgatttgtggaacgccaaaagttttagaaaattatccttacactctaaactcgtgttaactaccactggattattaattttgataggcacggttttcttctttttactagaaaatcaaaactctatgttacacatgggattaattgaaaaaataggaaatgcatttttccaatcagtgacaacaaggactgcaggatttaacacaattgacgttggaaacattaaaacaccgacagctttattacttatggctctcatgtttattggaggtgcaccattgagtgctgcaggtggtataaaggttacaacttttgttattgcaacaatcgctatttttaatacgatacgcaaagaaaaaaacaactctatatttaatagagaaatatcagaaagatacatacagttgtctttcgtaactattctcatttctattgcatttatcggtatggttacgtttatacttaccataatcaattccaatatacctttaatcaaaatactcttcgaagtcgtatcagcattcggtacagtcggtctcactatggatttaacttccgaatactataattggactgagtttattattatcatcgtaatgttatgtggtaaaattggattactgaatattagtagagcgcttgttccacctaaagaccctaaaaattatagatataccaaaggacacattcacttataa

SEQ ID NO: 4980 - DNA, 234 bp, Staphylococcus epidermidis; identical to SEQ ID NO: 2566

SEQ ID NO: 4981 - DNA, 171 bp, Staphylococcus epidermidis; identical to SEQ ID NO: 2567

SEQ ID NO: 4982 - DNA, 126 bp, Staphylococcus epidermidis; identical to SEQ ID NO: 2568

SEQ ID NO: 4983 - DNA, 543 bp, Staphylococcus epidermidis; identical to SEQ ID NO: 2569

SEQ ID NO: 4984 - DNA, 180 bp, Staphylococcus epidermidis; identical to SEQ ID NO: 2570

SEQ ID NO: 4985 - DNA, 447 bp, Staphylococcus epidermidis
atgatgagtttcatacatataaataaaacggactatcacggtgaagtgacagcccctaaaacaaaagcagcaatacgtgatatatacctaccttttcatatgatgaatgacatagaaaaatatttaaaatggtacaaagaaaacaatgtatataaagatgattatgtattattcggtacattcttcaaggcatacagtgaatcaactatagatcgttggtttaccactgcattaaaagtgttagatgaacaactgccagacgttcagacattccctagaatcgttatacatgaattaagacatagccatgcgtctatgctagtcaatcatggtgcaagtatcatggtaatagcacagcgtttaggtcatgctgatagtaatgaagtatataaccgatacggtcatttgtaccctagtacgcagaaagaaatagttaaatacttgtaa

SEQ ID NO: 4986 - DNA, 675 bp, Staphylococcus epidermidis
atgaatgagttaggtcaaacaattattgagaattacaatacctttgcgccaaaaaatatgttctcagagtggcttaagaatctgctacaaccacttgccactttatcgttgggattttttgtatataaatacactgataatcgtcataaaaaaagattattaaacgagttagattcgaagtcagaatggagaaaaacgttatttataataggtgggaactctaccgtcacattagatgatgtatatcaattcagaactgcactaagatttaattttaaaaacaatgggaactatatcgataaagagaaaagcaaaaaagaaggctttagttatttctttgacaatatgaatataataattattaaatactgtattaatctaatagaaaagaagcaagcagtatctaactcaatagatttagatataaaagatcaaaacagtataagactattttgtagatatatgttagcagaccactgggagaaaaatcaaaataaaaatttaaaatttgatgatcctaacaaagaagaagagttatgtattttcacattaaaagagtttttgaagctacacaaatattatcaaaattctaaagatgaagattcaaaaaataaatttaagtctttatttgacgaatcgaaagagttagtagaaaaaaaagacaccccttcataa

SEQ ID NO: 4987 - DNA, 471 bp, Staphylococcus epidermidis
gtggctaagaaaaaatcaaaatcaccaggtacgttagctgaaaaccgtaaagcaagacatgactacaatattgaagatacaattgaagcgggtattgctttaagaggtactgaaattaaatccatacgtcgtggtagtgccaatttaaaagatagctttgcgcaagtgagacgaggcgaaatgtacctgaataatatgcatattgcaccatatgaagaagggaaccgttttaatcatgaccctttacgtacacgtaaattactcttgcacaaaaaagaaattcaaaaattaggtgagcgtacacgagaaataggttattctattattccgttgaagttatatttaaaacatggtcaatgtaaagttttattaggcgttgctagaggtaaaaagaaatacgacaaacgtcaagcacttaaagaaaaagcggtaaaacgagatattgatcgtgcagttaaagcccgttattaa

SEQ ID NO: 4988 - DNA, 2349 bp, Staphylococcus epidermidis
atgaatttaaagcaatccatcgaagaaatgataaaacaacctgactatgaacccatgtcagtatctgactttcaagatgcgttaggtttaaacagtgccgactcatttagagatttaattaaaatactcgttgaattagaacagtctggtttaattgaacgtacaagaacagacagatatcaacgtaaacaatccaacaaaacaaattcaaaactaatcaaaggaacgttaagtcaaaataaaaaaggctttgctttcttaagacctgaagatgacgagatggatgatatttttattccaccaactaaaatcaatagagcattagatggagatactgtcatcgtggaaattcaaaaatctcgtggagaacataaaggtaaaattgaaggtgaagtaaaatctattgaaaagcattcagttacacaagttgttggaacgtatagcgaagcaaagcattttggtttcgtattaccggatgacaaacgtattatgcaagatatctttatacctaaaggacaaaatttaggtgctgtagatggtcataaagtattagtacaaattacgaagtatgccgatagtactgacaatccagaaggccacgtttcagcaatattaggtcataaaaatgatccaggtgtagatatactttccatcatttaccagcatggaatagaaatcgagtttccagatgatgtattacaagaagctgaagaagtaccggatgtaatagaaccatctgaaatcgaagggcgtcgtgatttaagagatgaattaacaatcactatagatggcgcagatgctaaagatttagatgatgccattgctgtaaaaaaattaaaaaatggcaacaccgagcttacagttagtattgcagatgtaagttactatgtaaaagaaggatcagctttagataaagaagcatatgatcgtgcgacaagtgtgtatcttgtcgatcgagtaatcccgatgattccacaccgtctaagtaatggaatatgctcattaaatccggaagaagatcgtttaacattaagttgtcgaatggaaataaatgaacgaggcgaagttgtaaaacatgaaatctttgatagtgtaatacattcaaactacagaatgacatatgatgcagttaacaaaattatcactgatcaagattctgaaatacgttcacaatataaagatttaacacctatgttagatttagcgcaagatttatcaaatagattaattcgtatgcgcaaacgtcgtggagaaattgattttgatattaatgaagcgaaagtacttgtgaatgacgaaggtattccaacagaagtgctaatgagagaacgtggcgaaggagaacgtttaattgaatcattcatgttagcagccaatgaaacagtagctgaacacttcaataaattggaagtaccatttatttatcgtgttcatgaacaaccaaaatctgaccgattaagacagttcttcgactttattaccaattttggtattatgattaaaggtacaggtgaagatattcatccaacaacattacaaaacattcaagaagaagttgaaggtagaccagaacaaatggttatttcaacgatgatgttacgttctatgcaacaagcacattatgatgatgttaatttaggacattttggtttgtctgctgagtactatactcactttacgtctccaatacgccgttatcctgatttaacagtgcatagattaattcgtaaatatttaatagagaattctatggataaaaaagaaatacgtcattgggaagagacgttgccagaattagctgagcacacatcacaacgtgaacgccgtgccattgaagccgaacgtgatactgatgaattgaaaaaagctgagtatatgattcaacatattggtgatgaatttgaaggtatcattagctcggttgctaattttggtatgtttatagaattacctaatactattgagggtatggttcatatcgctaatatgacagacgattattatcattttgatgaacgacaaatggcactaatcggtgaacgtcaagcaaaggtctttcgcattggtgatgcggtcaaagttaaagtgacacatgttgatgtggaagaacgcatgatagatttccaaattgttggcatgccattacctaaaaagacatcatcacaacgacctgctcgtgagaaaaccattcaagctaaaacacgtggcaagtcgttagaccatactaaaagtgatcgtaatggtaaaggtaaaaatgctcgtaaaaaagataaacaaggtaatacgcaccacaaacctttttataaagataaaagtgtgaagaaaaaatcacgtcgaaagaaaaaatag

SEQ ID NO: 4989 - DNA, 741 bp, Staphylococcus epidermidis; identical to SEQ ID NO: 2575

SEQ ID NO: 4990 - DNA, 234 bp, Staphylococcus epidermidis; identical to SEQ ID NO: 2576

SEQ ID NO: 4991 - DNA, 459 bp, Staphylococcus epidermidis
atgacagactcaaatgctaaagaaataagaactggacgtttaattgcgataagttcattagtgttttgtattttacttatcatacaccactttattgtattagatgaatcaacagctaaatcaattttatctttagctggtcaaaaaacatcagatacagcagtgaaaaacattttaaatagtgaccgatgcactggaattatgtatattttagcttacttagcaggtactgttgctttctggaatcgccatccatatttatggtggtttatgtttgccgtatatatttctaatgcactatttacactcgtaaatctttacttatttattcaaggtattttagatgtaaaaaatgtacttgcagttttaccaattttaattgtagtgattggatctataattctagcaatttatatgctagttgtttctattacacgtaaaagtactttcaatagatag

SEQ ID NO: 4992 - DNA, 1305 bp, Staphylococcus epidermidis
atgccaattattacagatgtttacgctcgcgaagtcttagactcacgtggtaacccaacagttgaagttgaagtattaactgaaagcggtgctttcggacgtgcattagtaccttctggtgcttctactggtgaacatgaagcagttgaattacgtgatggagataaatcacgttatttaggtaaaggtgtgactaaagcggtagaaaatgttaacgaaatgatcgcaccagaaatcgttgaaggtgaattttcagttttagatcaagtatctattgataaaatgatgattcaattagacggtacacacaacaaaggtaaattaggtgcaaatgccattttaggtgtttctattgccgtagctcgtgcagctgctgacttattaggtcaaccattatataaatatttaggtggatttaatggtaaacaattgccagtacctatgatgaatattgttaatggtggttctcactcagatgcaccaattgctttccaagagttcatgattttacctgtaggtgctgagtcattcaaagaatcattacgttggggtgcagaaatcttccataaccttaaagcaatcttaagtgaacgtggtttagaaactgcagtaggtgatgaaggtggtttcgctcctagatttgaaggcactgaagacgctgtagaaactattattaaagctatcgaaaaagcaggatacaaaccaggtgaagatgtattcttaggatttgactgtgcttcttctgaattctatgaaaatggtgtttatgattacactaaattcgaaggtgaacacggtgctaaacgtagtgcagcagagcaagttgactacttagaagaattaattggtaaatatccaatcatcactattgaagatggtatggatgaaaacgattgggaaggttggaaacaattaactgatcgtatcggtgataaagttcaattagttggtgatgatttattcgtaactaacactgaaattttatctaaaggtatcgaacaaggtattggtaactcaatcttaatcaaagtaaaccaaatcggtacattaactgaaacattcgatgctattgaaatggctcaaaaagctggatatactgcggttgtatctcaccgttctggtgaaactgaagatactacaattgctgatatcgcagttgctacaaatgcaggccaaattaaaacaggttcattatctagaactgaccgtattgctaaatacaatcaattattacgtattgaagatgaattatacgaaacagctaaatttgaaggaattaaatctttctacaatttagataaataa

SEQ ID NO: 4993 - DNA, 1518 bp, Staphylococcus epidermidis
atggcaaaacaaccaactgccttaatcatcttagatggtttcgcaaatcgtgaaagtgaacatggcaatgcagttaagcaagcacataaacctaattttgatcgatattatgaaaaatatcctacaacacaaatagaagctagtggcttagatgtaggtcttcctgaaggtcaaatgggtaactctgaagtaggacatatgaatattggtgcaggacgcatcgtatatcaaagtttaactcgtattaataaatcgattgaagacggagaattctttgataacactgtattaaataacgctgttaaacatgttaaagacaatggctctgcgcttcatgtattcggattgctttctgatggtggtgtacacagtcattataagcatctatttgctattttagaattagctaaaaagcaaggaatagataaagtatatgtccacgcatttttagatggtcgtgatgttgatcaaaaatctgctttgaaatatatagaggaaactgaagataaatttaaagaattaggtgtaggccaattcgcttctgtttcaggacgttattatgctatggaccgtgacaagcgttgggatcgtgaggaacgtgcctataatgctattcgtaactttgaaggtcctacatttacttcagctaaagcaggcgttgaagctaattataaaaatgatgtgactgatgaattcgtcgaaccgtttatagttgaaggccaaaacgatggtgtgaacgacggagacgcagtaatcttttataatttccgtccagatagagcagctcaactttcagaaatctttactaataaagcgtttgatggatttaaagttgaacaagtggacaacttattctacgctacattcacgaaatataatgacaatgtagatgctgaaattgtatttgaaaaagttgacttaaataatacaatcggtgaagttgctcaagataatggcttgaaacaattacgtattgctgaaactgaaaagtatccacatgtaacatactttatgagtggtggacgaaatgaagagttcgaaggagaacgtcgtagactcatcgattctccaaaagtagcgacttatgatttaaaacctgagatgagtgcatatgaagttaaagatgcattattagaagagttagacaaaggtgacttagatttaattctactgaactttgctaacccagatatggttggacatagtggtatgcttgaaccaacaattaaagcaatcgaagcagtagatgagtgtcttggtgaagtcgttgacaaaattattgatatgggtggtcatgccatcatcactgcagaccacggtaactcagatcaagtattaactgatgacgaccaacctatgacgacacacacaactaatcctgttccagttattgtaactaaagaaggtgttacattaagagaaactggacgtttaggcgatttagcgccgacattattagatttattaaatgttaaacaaccatctgaaatgacaggtgaatcactgattaaacattag

SEQ ID NO: 4994 - DNA, 762 bp, Staphylococcus epidermidis; identical to SEQ ID NO: 2580

SEQ ID NO: 4995 - DNA, 1191 bp, Staphylococcus epidermidis
atggctaaaaaaatcgtttcagacttagatttaaaaggtaaagttgttcttgagcgcgctgattttaacgttccaattaaagatggtgaaatcactaatgacaacagaattgttcaagcattaccaacaatcgaatatattattgaacaaggtggtaaattagttttattctctcacttaggtaaagttaaagaagagagtgataaagaaggactttcacttaagcctgttgctgaaaacttatctaagaaattaggtaaagaagttatattcgttcctgaaacacgtggcgaaaaactcgaaacagcaattgaaaacttaaatgaaggcgatgttttattagttgaaaatacacgtttcgaagatttagatggtaaaaaagaatctaaaaatgatcctgaattaggtaaatattgggcgtcattaggtgatgtatttgttaatgatgcatttggtacagcgcaccgtgaacatgcgtcaaacgtaggtatttctactcatctagaaacagcagctggttacttaatggaaaaagaaattaaatttattggtggcgtagtgaatgatccacaaaaaccagtagttgctattttaggtggcgctaaagtttcagataaaattaatgttatcaaaaatttagttaatatcgcagataaaatcttaatcggtggcggtatggcttatacatttattaaagcgcaaggtaaggaaataggtctttcattattggaagaagacaaaattgattttgctaaagacttgttagagaataatggcgatcaaatagtattacctgtagattgtaaaatcgctaaagaattttctaatgatgcaaaaatcactgaagtatctatcaatgaaatcccttcagatcaagaagcaatggatattggacctaaaacagtagaattatttaataaagaattacaaggtgcacatactgtagtatggaatggacctatgggtgtattcgaatttagtaattttgctaaaggtacaatcggtgtatgtgagtctattgctaaattggaagacgctactactattattggtggtggtgactctgccgcagcagcaatttcattaggtttcgaagatgactttacacacatctctactggtggaggagcatcattagaatacttagaaggtaaagaattacctggtataaaagctattaatgataaataa

SEQ ID NO: 4996 - DNA, 1011 bp, Staphylococcus epidermidis
atggcaattaaagtagcaattaatggttttggtagaattggtcgtttagcattcagaagaattcaagatgtagaaggtcttgaagtagttgcagttaacgacttaacagatgacgatatgttagctcatttattaaaatacgatactatgcaaggtcgtttcactggagaagttgaagttatcgaaggtggattccgtgtgaacggtaaagaaattaaatcattcgatgaaccagatgctggtaaattaccatggggcgatttagatatcgacgtagtattagaatgtactggtttctatactgataaagaaaaagcacaagctcacatcgatgcaggtgctaaaaaagtattaatctcagctccagctaaaggtgatgtaaaaacaatcgtattcaacactaaccatgatacattagatggttcagaaacagttgtttcaggtgcttcttgtactactaactcattagcaccagttgcaaaagttttaagtgacgaattcggtttagttgaaggtttcatgactacaattcacgcttacactggtgaccaaaatacacaagacgcacctcacagaaaaggtgacaaacgtcgtgcacgtgcagcagctgaaaatattatccctaactcaacaggtgctgctaaagctatcggtaaagttattccagaaatcgatggtaaattagacggtggagcacaacgtgttccagttgctactggttctttaactgaattaactgtagtattagacaaacaagatgtaactgttgaccaagttaacagtgctatgaaacaagcttctgacgaatcattcggttacactgaagacgaaatcgtatcttctgatattgttggtatgacttacggttcattatttgatgcgactcaaactcgtgttatgactgttggagatcgtcaattagttaaagttgcagcttggtacgacaatgaaatgtcttacactgctcaattagtacgtacattagctcacttagctgaactttctaaataa

SEQ ID NO: 4997 - DNA, 1014 bp, Staphylococcus epidermidis
gtgaaagacttaattaaagttcaacaaaagcttatacctgatcttatagataagatgtatagacgcttttatattttatctactatctctcaaaatcaacctgtaggaagaagaagtctaagtgaacatatggatatgactgagagagttttacggtcggaaacagatatgttaaagaagcaagaattaattcgtgtcaaacctacgggaatggaaattactaatgaaggtactgaagtattagcacaactaggtgaatactttaatgtttatagcgatgaccataaattggccagtgctatcaaagataaatttcatattaaagatgtacatgtcattccaggagattccgattctaatcgaactgtaaaacgtgaaatgggtcaacaagctgggcaacttttagaaggtatactttatgaagatgctattgtctctgtaactggtggttcaacaatggcgtgcgtgagtgagtcgatacatttattaccgtttaacgtattctttgttccagctagaggtggacttggagaaaatgttgtttatcaagcgaatacaatcgcttcgagtatggcccaacaagctggtggctattatacaacactctatgttccagacaacgtgagtgagtccacatacgatacgttaatgttggaaccttctgtcatgcatacactagataaaatcaagcaagctaatataacaatacacggcattggtgatgcgctgaagatggcgcatcgacgtcaatcatctcaaaatgtgattgataaccttcaacatcatcaagccgttggagaagcttttggatattattttgatgctcagggtcaaatagttcataaggtcaaaacgattggccttcagctagaggatcttgagaacaaagactttatctttgcggttgctggtggacaatcaaaaggagaagctattaaagcttatctttcaattgcaccggaaaacactgtattgattacagatgaagccgcagcaaaagtcattttacaatag

SEQ ID NO: 4998 - DNA, 237 bp, Staphylococcus epidermidis
atgtcgaatcataattattctgacgaaaaaatcgaagttatagatccgagtgatgatagatataaaggagatgattattttaataaaaattcatctcaaaacaatcaaaatttaaaaacttttaatcaaacttattcttatggttgcacacattcaggatgcggctgtatattaggctgtttaactatttcacttatttcattcttactttcattactaattttttggattatataa

SEQ ID NO: 4999 - DNA, 621 bp, Staphylococcus epidermidis
atgagcggtatctccaaatttattagtgcgattgtagttttgctattattaataggtttagcatttggtatttactcatttgtcgatagttcaaaaaaaggtaacgaacgactcagtgataaaacaacacagcaagaaaagaaaaaagacgataaagacaaaaaggaaaaaaaagataaaaaatcggtggaagaaaaaaagaataatacacaacaaacgcaacaagttcctcaaactcaacaaacgcaacaaacgcaacaaactgttcaaacgccacaaagacctacaactcaaactccgatgagacaaaatccacaaacaggagaaaagagagcaaaagaaccaaaaactgatgaaagaaaaaaaactagacaagacagttcaaattctaaagaaagcccaaatgaaaaagatcaatcgtcaacacaacaaaagccacaacaaaataaatctaaccagtcatcagagaatcgtcaaagtacccaaaataaatcaaatcaaacacagtcaaccagaccacaaaacaatggaaatagtggcaatcaaaatgctagttcggggcagaacacacaaaaacaaaataataacaatcaaaattctcaaagctcaaaaaaggattaa

SEQ ID NO: 5000 - DNA, 900 bp, Staphylococcus epidermidis
atgaaacgctatttaattactggtggaactggcatggtcggttcccacttggtcaacgaaattaaacaaaccgatgcacatattacaattttaaccagacaggataaaacttctaatcatcccaaaatcacgtatatcaactggtcaaaagagggttggcaacatcaagtaccagatatagatattgttattaatctagctggtgcaacgttgaataaacgttggacatcttcccacaaacaagcgatgatgcttagtcgtattcaatcaacgcaaacactatttgaactttttgaaacacgtgaacacaaaccagaagttttatttaacgcaagtgcaatgggctactaccctccagatttatttacaagttatacggaattatatcgaacacttccatttgatttcttatcagaaattgtatatcaatgggaacggtttgcgaataaatttaagcaattcggtacacgtgtcgttttaggtcgattcggtcttattctatcagacgatggtggtgctcttgaaatgatggaacttccgtatcgtttatatgttgggggaaaactcggctctggaagacaatggtactcttggattcatatcgatgacttaattagaggtattttatttactatcaatcatgataacgctgaaggtccatttaatttaactgcacctattcctgaaagacaaaacttatttggttatactttagcacgtgcgatgcataaaccacatgaaacgtgggcacctaaattgatactacgtgcagtgctaggtcagatgtctactgtcatattagatacacaaaaagtacttccaaataaattacatgcactaggttttgagtttaagtataataatttaagaaatgctttagatgatttaattaaagcttaa

SEQ ID NO: 5001 - DNA, 192 bp, Staphylococcus epidermidis
atgaaagatactcagttaacatatatattattaatcattgcaagtattttattaattgctaatggtatatttgcatttgaacgtacgttatcaatgatattaatgtcgatattatttatattagttggaatcattttattatcaacaacattgaataccatgtatcaatcatcaaaacactcaaaacgttaa

SEQ ID NO: 5002 - DNA, 585 bp, Staphylococcus epidermidis
atgaatttaattcctacagttattgaaacaactaaccgcggtgaacgtgcgtatgatatatattcacgtttgttgaaagaccgtattatcatgctaggttctcaaattgatgataacgtagctaactctattgtgtcacaattattattcttgcaagcgcaagattctgaaaaggatatttatttatatattaattcaccaggtggcagtgtaactgctggatttgctatttatgatactatccaacatatcaaaccagacgttcaaacaatctgtattggtatggcagcgtctatgggttcattcttgttagcagcaggtgcaaaaggtaaacgatttgcgctacctaatgctgaagttatgattcaccaaccattaggtggtgcacaaggacaagcaactgaaattgaaattgcagcaaatcatattttaaaaacacgtgaaaaattaaatcgtattttatcagaacgtacaggtcaatcaattgaaaaaattcaacaagatactgatcgcgacaacttcttaacagctgcagaagctaaagaatatggattaattgatgaagtaatggaaccagaaaaataa

SEQ ID NO: 5003 - DNA, 945 bp, Staphylococcus epidermidis
atgagctttgcatcagatatgaaaaatgaactaacacgcatagaagttgacgaatcgaatgctaaagcagagctcagtgcattaattcgcatgaatggcgcacttagtctatcaaatcaacagtttgtaattaatgtacagacagaaaatgcgacaacagctcgtcgaatttactctcttatcaaacgtatatttaatgttgaagttgaaattttagttagaaaaaagatgaaattgaaaaaaaacaatatttatatatgtcgaacaaagatgttagcgaaagaaatactaaatgatttaggaattttaaaaaagggagtttttactcacgatattgatccggatatgattaaagatgatgaaatgaaaagaagttatttaagaggggctttcttagcaggtggttctgtaaataatcctgaaacatcttcatatcatcttgaaattttttcacaatatgaagatcattccgaaggtcttactaaattgatgaatagttatgaactcaatgcgaaacatttggaacgtaaaaaagggagtattgcgtatcttaaagaagctgaaaaaatttccgactttcttagtttgataggtggctatcaagcattgttaaagtttgaagatgtaagaattgtccgtgatatgcgtaattcggttaatcgtcttgttaattgtgaaacagcaaatcttaataaaactgttagcgcagcaatgaaacaggttgaaagtatacaattaattgatgaagaaattgggcttgaaaatttacctgatcgtttaagagaagtagcgaagctcagagtagaacatcaagaaatatcgttaaaagaattgggtgagatggtttctacagggcctatatctaaatcaggtatgaatcaccgtttaagaaagttgaatgaattagcggataaaataagaaatggtgaacaaattgaattataa

SEQ ID NO: 5004 - DNA, 996 bp, Staphylococcus epidermidis
atgaaacaaatgaatgtagtacttattggtggtggcactggactttctgtccttgctagaggccttagagaatttccaatagacattactgccattgttactgtagcggacaatggtgggagcacggggaaaattagagatgtcatggatattccagcgcctggtgatattcgtaatgtcattgctgctttaagtgactcagaatcgatattaactcaattgttccagtaccgttttggtgaaaatcaagtagatgggcattcattaggtaatttagttattgctggaatgactaacattactaatgattttggacacgctattaaagagttaagcaaagttttaaatattaaaggccaagtcatcccttcaacaaacgcaagtgtgcaactcaacgcggtgatggaagacggtgaaattgtacatggagaaactaatatacctaaaacacataaaaaaatagatcgtgtgtttttagaaccaagtgatgttgaaccaatgaatgaagcgatagaagctttagaacaagcagatttaattgtcttaggaccaggttcattatatacaagtgttatatcaaatttatgtgtcaaaggtatttcagaagcattattacgtacatctgctccaaaactttatgtatctaatgttatgacacaaccaggcgagactgataattatgatgtcaaagagcatattgatgcacttactcgacaagttggtgaaccatttattgattttgtcatatgtagctcagaatcctatagtaaagatgttttacaacgatatgaagaaaagaattcgaaaccagtagcagtacataaagaacaattaaaagatagtggaattagagttttaacggcatctaatttagttgaaatatctaatgaacactatgtcagacataacacaaaagtattatcaaaaatgatttatgaacttgccttagaattaacaagtacaattcgctttactcctagtgataaaaagaaataa

SEQ ID NO: 5005 - DNA, 909 bp, Staphylococcus epidermidis
atgacaagcaacgaaaaagaaatgggtaaaagtgaattgttagttgttacaggtatgtctggagcgggtaaatcattggtgattcaaagtctcgaagatatgggatttttctgtgtagataatttaccacctgtactattacctaaatttgtagaattgatggctcaaggaaatccttcattgcaaaaagtagcaattgcaatagatttaagaggtaaggaattatttaaatctctagttaaagaaattgatattattaaaagtcgtaatgacgtgattttagatgttatgtttttagaagctaaaactgaaaaaattatttcacgttataaagaatcaagaagagcgcacccactaaatgaacaaggacaaagatcattaatagatgcaataaatgaggaacgtgaacatctatcagaaatccgaagtatcgctaattacgtgattgatacaacaaaattaaaacctaaagaattaaagcaacgcatttcaaagttttatttagatgaaaactttgaaacatttacaatcaacgtgacaagtttcggtttcaagcatggtatacaaatggatgctgatttagtttttgatgtcagatttctacctaatccctactatgtagaggaattgcgtccatttactggtttagatgagccagtgtacaattacgttatgaagtggaaagaaacccaaatattttttgataaattaacagatttattaaaatttatgattcctggctacaaaaaagaaggtaaatcgcaattggttattgctataggttgtacgggtggacaacatcgatcagtcgcattagctaaacgtttagctgaatatcttaacgagatttttgaatataatgtttatgtgcatcatagagatgcgcatattgaaagtggagagagataa

SEQ ID NO: 5006 - DNA, 933 bp, Staphylococcus epidermidis
atgactgaagtagattttgatgtagcaataatcggtgcaggtcctgccggtatgacagcagcagtatatgcatctcgtgccaatttaaaaactgtcatgattgaacgcggtatgccaggcggtcaaatggcaaacactgaagaagtagagaattttccaggatttgagatgatcacaggtcctgacttatctactaaaatgtttgaacatgctaaaaaatttggtgcggaataccaatatggcgatattaaatctgttgaagataaaggcgactataaagttatcaatttagggaataaagagataacagcacatgcagttattatctcaactggagcagagtataaaaagattggcgttcctggtgaacaagaattaggaggacgtggagtaagttattgtgcggtttgtgatggagcattctttaaaaataaacgtcttttcgtaattggcggcggagattcagcggtagaagaaggtactttcttaactaaatttgcagataaagtaacgattgttcaccgtagagatgaattacgtgcacaaaacatcttgcaagaacgtgccttcaaaaatgataaagttgactttatttggagtcatacacttaaaacaattaatgaaaaagatggtaaagttggttcagttacacttgaatcaactaaagatggtgctgaacagacttatgatgccgacggtgtattcatttatattggaatgaaaccactcacagcaccatttaaaaatcttggtattacaaatgacgcgggatacattgtcacacaagatgacatgagtactaaagtacgaggtatttttgctgcaggtgacgttcgtgataaagggttacgtcaaattgttactgctacaggagacggtagtattgcggctcaaagtgcagctgattatattacagaattaaaagataattaa

SEQ ID NO: 5007 - DNA, 1440 bp, Staphylococcus epidermidis
atggcacaaaaagaaaataacatcattccaatgatttttgatgaggctttttatcgtaaaatggctacccaaaagtggcgacaacaggactacaagaaggcggcagaatattatgaaaaagtgcttgagttgtcacctaaggattttgatattcaacaacactatgctcaatgtttagttaaattaaatatcggcaaaaaagcagaacgtctattttatgagaatattgttaaagactttcatgtagcagaaagtttctatgaactaagtcaattaaatatagaattaaacgagccaaacaaggcattcttgtttggtattaattatgtaatattgtcagaggataaagattttagagaaatgcttgaaaaaacattcgaagtcacgtatacaaatgaacaaaaaattgaattagaagcacaattgttttcaacacaacttttatttcaatttctcttttcgcaaggtaggttagaagaagcccgaacatatattttgaatcaatcttacgagatacaacagcatagggtgattaggaatttacttgcaatgtgttatttgtatctaggtgagtatgatagcgccaaagcaatgtttgaagaacttttaaaggaagataattcagacgtgcatgcactttgtcactacacattattactttataataaaaaagaaacagaaaaatatcaaaaatatcttaaaatacttaataaagtagtaccactaaatgacgacgaaacctttaaattaggaatcgtattgagttatttaaaacagtatcgtgcttctcaaaatttactttatccactttataaaaaaggtaaatttgtctctattcaaatgtataatgcattgagtttcaatttttattacctaggaaataaagacgaaagtattgagatgtggaacaagctcactcaaatttctgaagttgatgttggttatgcaccttgggtaattgaggaaagtaaaacggtatttgaatcacgagtgttaccattattactagatgataataatcattatcgactttacggtatttttttacttcatcaattaaatggaaaagaaatactaatgactgaagatatttggtcaattcttgaatcaatgaatgactatgagaaactttatctcacatatttggtacaaggactcacactcaataaattagattttatacacagaggtatgcaaaggttgtataattttaagaaattcaaatataacacgtctttatttacagattggattaatcaagcagaaatgattatagctgaaaatgtagatttagtagatgtcgatagatatgtagctgcatttgtttacctatcgtatcgtcgttctagccaaccacttaccaagaggcaattgatggacgattttaatgtttctagatacaaactgaataaagcaattgaatttatattgagcatataa

SEQ ID NO: 5008 - DNA, 528 bp, Staphylococcus epidermidis
ttgagaagattaagtaaagagaagcatcatcaagtgaatcctttatggcatatatatagaaaaattaaattcgtaaaagtgctaaagcaaacgttgattatagaaattgcaagatttgttcctagtatgaaacttaaaaataaaatatataaaaagcttttaaaaatggatgtcgggaatcatacttcatttgcatataaagtgttgcctgatttgttttatccagaatacatttcggttggcaagaatacagtcattggttataatacaacaatattaactcacgaagtacttgttgatgagtggagagtaggaaaagtcattataggcgattacactttaataggtgcaaatacgacaatattaccaggaataaccataggaaatcatgttaaaattggtgcgggtacggttgtgtctaaagatgttcccgattacagttttgcatttggtaatcctatgcaaatacaattagattcaggaggtgacaatgaatggcacaaaaagaaaataacatcattccaatga

SEQ ID NO: 5009 - DNA, 840 bp, Staphylococcus epidermidis
atgaatataacattagaatatatcgatcctgttgcctttagcttgggaccaatccaagttcgatggtatggaattattattgcttgtggtatcttacttggatacttcattgcacaagcagcattgaaacaggttggattacataaagacaccttaatcgatattatattttatagcgcgattgttggattcatagttgcgagaatatactttgttacatttcaatggccatattacatgaatcacttgagtgagataccaaaaatttggcatggtggtattgccatacatggtggcttaattggtggacttatctctgggattattgtttgtaaaatcaaaaatctacatccgtttcaaataggagatattgtggcaccaagtattattttagctcaagggataggacgctggggaaactttatgaatcatgaagcgcatggaggtccagtatctagagcttttctagaacatttacatttgccagactttattattagaaatatgtatattgaaggccaatattaccacccgacgtttctatatgagtctatttgggatgtaataggttttgtcattttaattactttaaggaaacgtctaaaacttggagagacattctttggttatcttatttggtattctgtagggcgctttttcgttgaggcgatgagaaccgatagtttgatgcttacgagtcatatacgtgtcgcgcaacttgtttctgtcgtgcttattatgattagtgtgatattcgtaatttatagaagagttaaataccaaccaataaaatatgaaaattcaggaccattaacatggccgattaaaaaggctaagtga

SEQ ID NO: 5010 - DNA, 933 bp, Staphylococcus epidermidis
atgttaacaacagatagattagttaatacgttaaatttagaattacttactggtgaagaaggtttagatagaccaattaaaaacacagatatttcacgtccaggtttagaaatggctggatatttttcacattatgcttcagaccgtattcaattattagggacaacggagttatcattttataatttacttccagatgaagagaagaaaggaagaatgagaaaattatgccgacctgaaactccagcgattattgttacacgtgggttagaaccacccgaagaacttatacaagcatctcaagaaacgcatacaccaattattgttgcgaaagatgccacaacgagtttaatgagtaggttaacgacatttctcgaacatgaactcgcgaaaactacttctttgcacggtgtacttgttgatgtttacggtgtaggtgtactaattacaggagattctggcattgggaaaagtgaaactgcattagaattagtcaaacgaggccatagattagtggctgatgataatgtagaaatcaaagaaattactaaggatgaacttgtagggaaaccgcctaaacttatcgaacatttgctagagattcgtggtctcggaatcattaatgttatgactttgtttggagcaggatcaatattaactgaaaaacaaattcgattaaatattaatttagaaaattggaataagaataaattatacgatcgtgtaggtcttaatgaagaaacattgaaaattcttgatacggaaatcactaaaaaaacgataccagttagaccagggcgtaatgtagcagtaattattgaagtagctgctatgaattatcgtcttaatatcatgggtattaatacagcagttgaatttaatgagagacttaatgaagaaatcgttcgaaatagtcataaaagtgaggagtaa

SEQ ID NO: 5011 - DNA, 2835 bp, Staphylococcus epidermidis
atgaaaggaccgtcaattgtagtaaaaggtgcacgagcacataatttaaaaggagtagatattgaattacctaaaaacaagttgattgtcatgactggactttcaggctcaggtaaatcttcgttagcgttcgatactatttatgctgaaggtcaacgacgttatgtggaatcgttaagtgcatatgcgcgacaatttttaggacaaatggacaaacctgatgtagataccattgaaggtttgtcaccagcaatatctattgatcagaagacgacaagtaaaaacccacgttctaccgttgccactgtgactgaaatctatgattatattcgattattatatgcgcgtgtcggtaaaccgtactgtccttatcacggtatagaaattgaatcacaaactgttcaacaaatggttgatcgtattttagaattggaagaacgtacaaaaattcaattacttgctccagttatatcacatagaaaaggaagtcatgaaaaattaattgaagatataggtaagaaaggatatgtgcgtttacgtgttgatgatgaaatcgtcgatgtaaatgaagtgcctcaattggataaaaataaaaatcacacaattgaagttgttgttgatagacttgtagttaaagatggcattgagacgcgtttagcggactctattgagacagcacttgaacttgctgaaggtaatttaacagttgacgttattaatggagaagaacttaaattctctgagaaccacgcatgtcctatatgtggtttctctattggtgaattagaacctagaatgtttagtttcaacagtccgtttggtgcgtgtccaacttgtgatggtttaggtcaaaaactaaaagtagacctagatttagtcattcctgataaaaataaaactttaaatgaaggtgcaattgaaccatgggaaccaacaagttcggatttttatccaactttattaaaacgtgtatgtgaagtctacaaaattaatatggataagccatataaaaaattgactgatagacaaaaaaatatacttatgaatggttctggagaaaaagaaattgaatttactttcacgcaacgaaatggtggtactcgtaaacgtaaaatggtttttgaaggtgtggtacctaacattgaccgtcgttaccatgaatctccctctgaatatacacgcgaaatgatgagtaaatatatgacagagttaccgtgtgaaacttgtcatggcaaacgcttaagcaaagaagcgttatctgtatacgtaggcgactataatataggtgaagtcgttgaatattcaattaaaaacgcgctttattatttcgaaaatttaaaattaagcgaccaagataaatcgattgcagatcaaattttaaaagagattatttcaagattatcatttttaaataatgttggtttggaatatttgactttagatcgctcatcagggactttatctggaggggaagcacaacgtattcgtttagcaacacaaattggttcacgattaaccggagtactatatgttttagatgaaccttctattggattacatcaaagagataatgatagattaattaatactttaaaagaaatgcgtgatttaggtaatacacttattgtcgttgaacatgacgatgatactatgagagcagctgattatttagttgatgtgggtccgggagctggtaaccacggtggagaggttgtctcaagtggtacccctaataaagtaatgaaagataaaaaatccttaactggtcaatatttaagtggaaaaaaacgaattgaagtccctgaatacagacgagaaatcaccgatagaaagattcaaattaaaggtgctaaaagtaataatttgaaaaatgtaaatgtagacttcccactatctgtcttaactgttgttacaggtgtgtcaggttctggtaaaagttcactcgtcaatgaaattttatataaagcattagctcaaaaaattaataaatctaaagtgaaacctgggaattttgatgaaattaaaggaattgatcaattagataaaatcattgatattgatcaatcgccaataggtagaacaccacgttctaacccagccacatacactggtgtctttgatgacataagagatgtctttgcacaaacgaatgaagctaaaatacgaggttatcaaaaaggtagatttagttttaatgtcaaaggtggacgatgtgaagcttgtaaaggtgatggaattataaaaattgaaatgcattttttaccagatgtctatgtaccttgtgaagtatgtgatggtaaacgctataatcgtgagactttagaggtaacatacaaaggtaaaaatattgcggatgtattagaaatgactgttgaagaagctacgcatttctttgaaaatattcctaagattaaacgtaaattacaaacacttgtagatgttgggttggggtacattactttaggtcaacaagctactacattatctggtggcgaagcgcaacgtgtaaaactcgcatcagaattgcacaaacgttcaacggggcgttctatttatattcttgatgaaccaactacaggattacatgtcgacgatataagtcgtttattaaaggtattgaatcgtatagtggaaaatggtgatacggtcgttattatcgaacacaatcttgatgttattaaaacggctgatcatattattgatttaggtccagaaggcggtgaaggtggaggaacaatcatcgcaactggtacacctgaagagattgctcaaaataaagggtcttacactggtcaatacttaaaaccagtattagagagagacagcgttgaatag

SEQ ID NO: 5012 - DNA, 1986 bp, Staphylococcus epidermidis
atggtagaacatgttccatttaagttaaagtctgaatttgagccacaaggtgatcagccacaagcgatacaaaaaattgtggatggcgtaaatgaagggaaacgtcatcaaaccttattaggtgcaactgggacaggtaaaacttttactatgagtaacgtaattaaagaggttggtaaacctacacttattattgcacataacaagacattagcaggtcaactatatagtgaatttaaagaatttttcccagaaaatagagttgaatatttcgttagttattacgactactatcaacctgaagcatacgtgccttcaacagatacctttattgaaaaagacgcctccattaacgatgaaattgaccaactacgacattctgctacaagttctttatttgaacgtgatgatgtcattattatcgcaagtgttagttgtatctatggtttaggtaatccggaagaatataaaaatttggttgttagtgtacgtgttggtatggagatggaacgaagcgaattgttgagaaagttagttgatgtacaatactcacgtaatgacatagattttcaacgtggtacatttagagtgcgtggagatgttgttgaaatattcccagcttctagagaagaaatgtgtattcgcgtagaattttttggagatgaaattgatcgtatcagagaggttaactatttaactggtgaagtaattcgagaacgtgaacattttacaattttcccagcttcgcacttcgttactcgtgaagagaaaatgaaagtagctattgaacgtatagaaaaagaattagaagagagactaaaagaattacgtgatgagaataaattattagaagctcaaaggttagaacaacgtactaactatgatttagaaatgatgagagaaatgggcttttgttcaggtattgaaaattattctgttcacttaactttaagaccattaggttcaacaccatatacattgcttgattattttggagatgattggcttgtcatgattgatgagtctcacgttacgttacctcaaattcgtggtatgtacaatggggatagagctcgtaaacaagtattaatagaccatggatttcgtttgccaagtgcgttggataaccgaccattaaaatttgaagaatttgaagaaaaaacaaaacaacttgtttatgtttcagctacaccaggcccatatgagttagaacatacagatgaaatggttgaacaaattatacgacctactggtttacttgatcctaaaattgatgtgcgtccaactgagaatcaaatcgatgatcttttaagtgaaatccaagatcgcgttgacaaagatgaacgtgtacttgtgacaacacttactaaaaaaatgagtgaagatttaactacatatatgaaagaagcggggattaaagttaattatttacactcagaaattaaaacattagaacgaatagaaattattcgagacttacgtatgggtacttacgacgcaatagttgggatcaatctgctgagagagggtatagatatacctgaagtatctttagttgtaattttagatgcagataaggaaggcttcttacgttctgatagatctcttattcaaactattgggcgagcagcacgtaatgacaaaggagaagtcattatgtatgcggataaaattacagattctatgcaatatgcaatagatgaaacacaaagacgtagagaaatacaaattgctcataacaaagaacatggcatcacgccgaaaacaattaacaaaaagattcacgacgtcattagtgctactgtggagagcgatgagacaaatcaacaacaacaaactgaattacctaagaaaatgacaaagaaagaacgtcaaaaaacaatagaaaatatagaaaaagaaatgaaaaaagcagccaaagatttagatttcgaaaaagcaacagagttaagagatatgttatttgaattaaaagcagaagggtga

SEQ ID NO: 5013 - DNA, 234 bp, Staphylococcus epidermidis
atgatttggtatgtttgtgcggccttctttccttgtatattagttgtgctgtttagtgtggtgactagaagtaaatggattggtacattagtcacactggtaataataggggcatcagtttataaaggattctttcacaacgaatggattatttttatagatgtgacaagtttattagctggttatttaataattgatcaacttgaatttcataagaaccaaaatgattcttaa

SEQ ID NO: 5014 - DNA, 642 bp, Staphylococcus epidermidis
atgggaatgcatcaatattttaaaagactatcagatttagaaaaattaataagattaccaggtaaatttaaatattttgaacacaatgtcgcagctcattcttttaaagtaactaaaattgcgcaatatatggctactgtcgaagaatatcatggaaataaaatcgattggaagagtctttatgaaaagtcactcaaccacgactttgctgaagtgtttacaggtgatatcaaaacaccggtaaaatacgcaagtaaggaattaaaacatttattctcccaagttgaagaagaaatggtcgatacgtttatcaaagaggagataccaacacaatatcagcacgtgtatcgtgaacgtttacaagaaggtaaagatgattctctagaaggtcaaattctatctgttgctgataaaattgatttattgtatgaaacatttggagaaatacaaaaacgtaatcctgagccactattttttgaaatatatgaaatgagtttagaaactattatacaatttgatcacttagaatctgtaaaagattttattgaaaatgttatacctgaaatgctcacagaaaactttattcctcgaactgaattacgtgaaacaacaatgtcaattctaaacagaagaaatgggtga

SEQ ID NO: 5015 - DNA, 801 bp, Staphylococcus epidermidis
atgaaaaaaacgctaactgtaacgttaagttcgattgcagcttttattgcaatcaacactgcagctaacgcacaagaatctgagacgccgcaactagacacatatgcaacgggtgatgtaattacaaatcaatcaaacttaggtatttacattgtaaaacctggagatagtttatataaaattgctttagaacataatctttctttagaagagctttatgcattaaatcctggtgtagaacctcttatttttccgggagatgaaattgtagtatctgaaactgcatttgaacaatttaataacacaaacacattcgtaaattatgaaactaactacattccagtaggatataataatgtatcaactgatacatccaacactacttatgataattatgatagtgaatcaactgatacatactctgtgtcaaacgcctatgatggtctaagaagtgtatctaactcagctaatttatacactactggtcaatgtacttattatgcattcgatcgtcgagctgagctagggaaaccaattggaagtctatggggcaacgctagtaactgggcatattcagctaatcaggctggctttaatgtagatcacacacctgaggttggtgctgtattccaaagtggtccgggtcaaaatggggctggtgcttatggacatgttggcgttgttgaatcaatcaattctaatggttctgtaactgtttcggaaatgaactggaatggtggcgttaacgtaaaatcttacagaactattagcaaccctaattcatataattacattcactaa

SEQ ID NO: 5016 - DNA, 1002 bp, Staphylococcus epidermidis
atgatgactgatcctgatttttggaatgatcaaactaaagcacaagatatcattgataagaacaatgcactaaaatctatagtaaatgggtattatcaactgacaaatgctgtcgatgatatgagtgcgacgagagagttattacaagaagaatatgatgaggatatgaagatagaattagaagaggaagttcagcaatttgaagaacaaattgatcaatatgagttacaattactcctcgacggaccacatgatgcaaataatgctatattagagcttcatcccggtgctggcggtacagaatcacaagattgggtaagtatgcttcttaggatgtatcaacgttactgtgaacaaaatggctttaaagttgaaacggttgattatcttccaggagatgaagcaggcgttaaaagtgtcacattacttattaaaggacataatgcttatggttatttaaaggcagaaaaaggtgttcatcgtttagttagaatttcacctttcgattcatctggtagacgccatacttcttttgcatcatgtgatgttattcctgattttaataatgatgaaattgaaatcgagattaacccagatgatatcacagtggatacttttagagcttcaggcgctggtggacaacatattaacaaaactgagtctgcaattagaattacacatcaccctacaggtattgtagtcaacaaccaaaatgaacgatctcaaataaaaaatagagaagctgcaatgaaaatgttgaagtccaaactttatcaattaaagttagaagagcaagagcaagaaatggctgaaattcgaggcgaacaaaaagacattggatggggaagtcagattcgttcttacgtctttcatccatattcaatgattaaagatcatcgtacgaatgaagaaactggtaaagtagacgctgttatggatggagaaataggcccattcatagaagcttatttaagaaaagaaatggatagtcgagacgtataa

SEQ ID NO: 5017 - DNA, 2535 bp, Staphylococcus epidermidis
atgggatttttatcgaaaattgttgacggcaataaaaaagaaattaaaagattaggtaagttagcagataaagtacttgctttagaggaagatactgcgatattaaccgatgaagaaatacgtgaaaaaacaaaatcttttcaaaaagagttagcagaaattgaagatgtaaaaaaacaaaatgattatttagataaaattttacctgaagcttatgcacttgtacgtgaggggtcaaagagagtatttaatatgattccttataaagtacaagtaatgggtggtattgctatacataaaggtgatattgcagaaatgagaacaggtgaagggaaaacattgactgcaaccatgccgacgtatttgaatgctttagctggtagaggtgtacatgttattacagtcaatgaatatctatcaagttcacaaagtgaagaaatggctgaactatataactatcttggcttaactgtaggtttgaacttaaatagtaagtcaactgaagaaaaacgtgaggcttacgcacaagatatcacttatagtacgaataatgaacttgggtttgattatcttagagataatatggtgaactatgctgaagagagagtaatgcgtcctctacattttgcaattattgatgaggtcgattccatattgatcgacgaagcaagaacacctttaattatttctggtgaagcggaaaaatctacttctttatatactcaagcaaatgtttttgcaaaaatgcttaaagcggaagatgattataattatgatgaaaaaaccaaagctgtacatcttacagaacaaggtgcagataaagctgaacgtatgttcaaagtagataatctttatgatgttcaaaatgtggaagtgattagtcatattaatacagctttaagagctcatgttactttgcaacgcgatgttgattacatggtcgttgacggtgaagtattaattgttgaccaatttactggacgtacaatgcctggacgtcgtttttctgaaggtttacaccaagcaattgaggctaaagaaggtgtagcaattcaaaatgagtctaaaacgatggcatccattactttccaaaactatttcagaatgtataataagttagcggggatgactggtacagcgaaaaccgaagaggaagaatttcgtaatatctataatatgacagttacccaaattccaacaaacaaacctgttcaacgtaaagataattcagacttaatttatattagtcaaaaaggaaagtttgatgcggtagttgaagatgttgtagaaaaacataaaaaaggacaacccgtcttactaggtactgttgctgttgagacttctgaatatatttcaaatttactaaaaaaacgtggtgtcagacatgacgtattaaacgctaaaaatcatgaacgcgaagctgaaatcgtttcaaacgcggggcaaaaaggtgcagttacaattgccacaaatatggctggacgtggaacagatattaaacttggtgatggtgttgaagagttaggtggacttgctgttattggtactgagcgtcatgaatcaagacgtattgatgatcaattacgtggacgttcaggacgccaaggtgatagaggagatagtcgtttttacctatctttacaagatgaattaatggtacgttttggttcagaacgcttacagaaaatgatgaaccgtttaggaatggatgattcaacgccaatcgagtcgaaaatggtatctcgagctgtagaatcagctcaaaaacgagtagaaggtaataactttgacgcgcgtaaacgtattctagaatacgatgaagttttacgtaagcaacgtgaaattatttataatgagcgtaatgaaatcattgatagtgaagaaagttctcaagtcgttaacgcgatgttacgttctacattgcaacgtgcgattaatcattttattaatgaagaagacgataatcctgactacacgccatttatcaattacgttaatgatgtgttcttgcaagaaggagatcttcaagatacagaaattaaaggtaaagattcagaagatatttttgaaattgtatggtctaaaattgaaaaagcatatgcacagcaacaagaaacattaggagaccaaatgagtgaatttgagcggatgattttattacgttcaattgatacacattggactgatcatattgatacgatggatcaattgcgtcaaggtattcatttacgttcatatgcacaacaaaatccacttcgtgattatcaaaatgaaggtcatgaattatttgatatcatgatgcaaaatatcgaggaagatacatgtaagtatatcttgaaatcagtggttcagtttgaagatgatgtagtacgtgaaaaatctaaaagctttggtgaagcaaaacatgtaactgctgaagatggcaaagaaaaagcaaagccccaaccgattgtaaaaggtgatcaggtaggtagaaatgatccatgcccatgtggtagtggtaaaaaatataaaaattgtcatgggaaagcgtaa

SEQ ID NO: 5018 - DNA, 570 bp, Staphylococcus epidermidis
atgattagatttgaaattcatggagataacctcactatcacagatgcaattcgcaactatattgaggagaaagtaggtaaattagaaagatactttaacaatgtgccaaatgctgtagcacatgttagagttaaaacttattctaattctacaactaaaattgaagttacaattcctttaaaagatgtcactcttagagctgaagaaagacatgatgatttatatgcaggcattgatttaattactaacaaattggaaagacaagtacgtaaatacaaaactcgtgtaaatcgtaaacatagagatcgtggagatcaagatatctttgttgctgaagtacaagagtctacaacaaacaatcatgcagatgatatagaaagtgaaagtgatattgaaattattcgttctaaacaattcagcttaaaaccaatggattctgaagaagcagtattgcaaatgaatttattgggacatgatttctttatttttaccgatagagaaactgatggcacaagcattgtttatagacgaaaagatggcaaatacggtctgattgaaacaactgaataa

SEQ ID NO: 5019 - DNA, 675 bp, Staphylococcus epidermidis
atgcgtaaatgtatccagtgcaatcaacctattcatgagaccattcatatttataacttatttaaaccacctcagatattttgtgaacgatgtgaaacattatggcttaactccaaaattcataaagatggtaggtgtcctaagtgccttaacaacaaaatttctactgatggcgaatgtcatgactgtcaattcttaagtaaaacattttatttaatggaacaattgttttgtgattatagttatgatggtatgatgaaagaaatcatacgccagtataagattaagcgagacttctatttggcagaagtattggcgagaaaattagttttacctcaaacgcaatatgattatatagttcccattccttctccaattgaacgcgacattgaacgtacatttaatcctgtgaccactgtcttagataaaatgggcatctcatatcaagatgtattaggtacacatatacgtcctaagcagtcaaagttaggaaagattgaacgttcaaaagcccctaatccattttatataaaagatgaagagataaatatcgaagggaaagtaatactactcatagatgatatttatacaacagggttaactattcatcacgcagggtgtaaattgtacgataaaaaagtcagaaaattcaaagtgtttgcgtttgcacgataa

SEQ ID NO: 5020 - DNA, 1164 bp, Staphylococcus epidermidis
ttgcaatattttgtgacttacaattcaacgatattggataaaacaatcacatactgtagacgatgcattcaattaggcagaatggatagtattacagatatatgtctcgtaaaaagttttcaaaaagcaacaaaagcgaattatcagttaccctttgaattatcaaagcaacagcaatacgcttcagaaactatcgttcaagctataaaaaataataatgacctcttgttatatgccgtcacaggagcagggaaaactaaaatgatgtttgagggaattaggatagctcgtcagatgggacataatattgctattgtatcacctcgtgtagacgttattattgagataagtcatcgaattaaagatgcttttatcgatgaacatatagatgtgctacatcaatctagtagacagcaatataatggtcattttgttattgctactatccatcaattattgaggtttaaacagcattttgatactgtatttgtcgatgaggtagatgcttttccgttgtctatggatccacaattatcaaatgcaatacaacttgcttcaaaatcgaatcattcacatattttcatgacggccacaccaccgcgtcattttttaaaacaattccccccagaaaaaataattaagttaccagcccgttttcaccgatccccccttcctattcctaagttcaaatatttcaaattaaaatcaacacgaaaacaaaatttattacttaatatatttagatatcaaattaaccaacaacgttttactttggtctttattaataatatagaaattatgaataaaatgtatcaacagtataaaatggacatccctgatttgatttgcgttcacagtgaagatgatttacgatttgaaaaaattgaagctttaagacgaggacaacacaaaattgtattcactacaactattttagaaagaggatttacaatgacacacttagatgtcgttgtagttgatgctggaagttttcaacaagaggctttaattcaaattgctggtcgcgtaggacgtaaacagcagtctccaagtggcttagttttatttcttcatgaaggtgttacattatcgatgattttagctaaaagaaacattatttcaatgaatcgtttagcaattaaaaggggatggattgatgcgtaa

SEQ ID NO: 5021 - DNA, 867 bp, Staphylococcus epidermidis
atgaagattgcagttatgaccgattctacaagttatttaccacaacatataatagaacaatataacataccagtcgcttcactaagtgtaactttcgatgatggagtgaatttcactgagagtgatgatttttctgtagatgatttttataaaaaaatggcttcatctaaaactataccaacaacaagccaacctgctattggcgattggattgaaaattttgagagattaagagaacaaggatacactgatgtcatcgtgattaacttatcaagtggtataagcggaagctatccttcagcaacacaagctggtgaaatggttgaagatattcaagtacatacgtttgatagccgtcttgctgcgatgattgaaggtagctttgcaatttacgctgctcaattggtacaaaagggatataaacctgatgatattattaatgaactaactgaaataagacaacatattggtgcatacttaattgttgatgatttaaaaaatttacaaaaaagtggtcgtatcactggagctcaagcttgggtaggtacattattgaaaatgaaacctgtcttgcgttttgaagaagatggtaaaatacatccacacgaaaaagtacgtactaaaaaacgtgcgctaaaatctttagaaacaaacatttttaaagaaataaaaggcatggaagatgtgacagtatttgtaataaacggtgataaaactgaagatggaaagtcatttcttcagcaattaaaggaagatcatcctaatgttcatattcagtattgtgaatttggaccagtgatagcatcacatttaggatcaggcggtttaggattgggttacttcccaagaagaatcgacattaattaa

SEQ ID NO: 5022 - DNA, 642 bp, Staphylococcus epidermidis
atggataaatccataattactattaaacaagcacattcaattgaaaatgtgataagtaaatcacgctttatagcatatattaagcctgtttcgactgaaaatgaagcaaaagcttttatagatgaaattaaaacaaaacataaagatgcaactcataattgttcagcctatactgtcggaccagagatgaatattcaaaaggcaaacgacgatggcgaaccaagtggaacagctggcatcccaatgcttgaaatactgaaaaaacaagagatacacaatgtttgtgtcgtcgtgacacgctacttcggtggtatcaagttaggtgcaggcggtcttattagagcatatagcggcgccgtgcgtgatgtgatatatgatataggtagagtcgaactaagagaagctattccagtaaccattacgttagattatgatcagacaggtaaatttgaatatgaacttgcctctactacattcttattaagagaacaattttataccgataaagtaagttatcaaattgacgtagtaaaaaatgaatatgatgcttttatagactttttaaatcgaattacttctggaaattatgatttgaaacaagaagaccttaaactattaccttttgatattgaaaccaattaa

SEQ ID NO: 5023 - DNA, 1080 bp, Staphylococcus epidermidis; identical to SEQ ID NO: 2609

SEQ ID NO: 5024 - DNA, 1077 bp, Staphylococcus epidermidis; identical to SEQ ID NO: 2610

SEQ ID NO: 5025 - DNA, 762 bp, Staphylococcus epidermidis; identical to SEQ ID NO: 2611

SEQ ID NO: 5026 - DNA, 495 bp, Staphylococcus epidermidis
atgtttatttatctgtttcactttatcattagtttcattgccacagtccttttttcaattatatttaatgcacctaaaaaattgctattagcttgtggatttgttggagctgttgcttggacaatatatcagatgacagtaggtatggatttaggtaaagttggcgcttcatttttaggaagtctaatattaggattaatgagtcatacaatgagtagacggtacaagcaacctgttattatatttatcgtccccggcattatacctctcgttccaggtggcgcagcatatgaagctacaagatttttagtatcaaatgattatacgaatgcagttaatacttttttagaggtaacattaatttctggtgcaattgcattcggtatacttgtatctgaaatagtctattacatttattcacgcatcaagcaatcttatggtaaaatcaagggtaaaacttataaaaaatcctataatatgaataatagagtataa

SEQ ID NO: 5027 - DNA, 1239 bp, Staphylococcus epidermidis
atgaagaaacaaattatcgaaagattaacgagatatgtaaaaattgatacacaatctaatcctgattccaagacgacaccatctacgaataaacagtgggatttattaaatctattagaagaagagcttcaatcattaggtcttaaaacagacatggatgaacatggttacttatttgctacactcgaaagcaatattaattataatgtacctactgtcggttttttagcacatgtagacacttcaccagatttcaatgcttctcatgtaaatccgcaaatcattgaagcctataatgggcaacctatcaaacttggtgaatctcagcgtatcttagatcctgatgtttttcctgaattaaataaagttgtgggtcatacactaatggtgacagatggtacatctctactaggcgccgatgataaagcaggtgttgtagaaataatggaagggataaagtatttaattgatcatcctgacattaaacacggtacaattcgagttggctttacacccgatgaagaaattggacgaggcccgcatcaatttgatgttagtcgatttaatgcagattttgcatatacaatggatggcagtcaattaggagaactacaattcgaaagtttcaatgcggcagaggtaactgtcacttgccatggtgttaacgttcatccaggttcagctaaaaatgccatggttaatgcaattagtttaggtcaacagtttaatagtttacttccctcacatgaagttcctgaaagaactgaaggatacgaagggttctatcatttaatgaattttacaggtaatgttgaaaaagcaactctacaatatattattcgcgaccatgacaaagaacagtttgagctacgtaaaaaacgcatgatggaaattcgtgatgatattaatgttcattataatcattttccaattaaagtagatgtgcatgaccaatattttaacatggcagaaaaaattgaacctttgaaacacatcattgatatacctaaacgtgtctttgaggctttagacatcgtacctaacactgaacctattcgaggtggtacagatggatcacaattatcttttatggggttacctacacctaatatttttactggttgtggcaatttccacggtccttttgaatacgcttctatcgatgtaatggaaaaggctgttcatgttgtcgttggtattgctcaagaagtagcaaacagccatcaatcttataaataa

SEQ ID NO: 5028 - DNA, 1131 bp, Staphylococcus epidermidis; identical to SEQ ID NO: 3467

SEQ ID NO: 5029 - DNA, 321 bp, Staphylococcus epidermidis; identical to SEQ ID NO: 3468

SEQ ID NO: 5030 - DNA, 891 bp, Staphylococcus epidermidis
atgagaaaactactatttatcataacaattatcattttaagcatagttgtatctgcttgtggaaatgaaacaaaaagagatattaaacaatttgaaagtcaatataaagaaattcatcaaaaacaacacagtgtagaaaaagttatggataaaataccattaaaagaattagataatttaagtaaaactgatactactgataaaaataaaaaagaatttcgtgcacttcagcaggatattaataactatttgatacctgagtttaaaaaatataaaaattccactcaacatttaactgcagatactaatgaggttaagcacttgaaagaggattatctaaaaactgttgaaaataaagagaaatctatatatgatttaaaagaatttgtagatttatgtaatcgctcaattaaagataatgaagatattttggattatactaaattattcgaaaaaaatagaactgaagtggagtctgacattaataaagcacaaaataaagaagatgcaagtcaacttaaatcaaaattagaagaaaataatcaacaattaaaagatactgctaaaaaatatttaaattcttcaaataatgattctgattcagcgaaagaagcaatcaaagatcatatttcaccacttattgacaaacaaattacggatattaataaaacaaatatttctgataatcatgttgataatgctagaaaaaatgcaatagagatgtattatagtttacaaaattattatgatacgagagtagatacgattaaaactagcgaaaaattagctcaaattgatgttgatcgattgccaaaagagggaaaagatatatcagaaatagataaatcgttcaaaagagaattaaaaaaaataaaagaaagtgtaaattaa

SEQ ID NO: 5031 - DNA, 528 bp, Staphylococcus epidermidis
atgtacgctaatgttcaaccttttattaaaaaagaatctgtgaaacaatttacatatgaatataacaaagtgaaagatgtattgttttctattttagattctcctattaaatacactcagcatatcggtggtacctgtcattttaattatcaaactgagcccattttagatatacttgttggtgtaaataacttgcacgatattacttcactagatgaaaagcgcctaaattatgctggtttttatcgtttgcaccattcttacaagaaaaaagttgtcatggcacgttttaataatttaagtgaattaaaacaagaagtaagattacatattattcaaatggaaacttctcttttcaaacaatatcaaacagtcaatcatttactacacaacgataaagcaatagcagaatggtttgcaagtaagaaaaatgaaattgtgcaacatgctaaaaagatacgtgaatatgagtctcaaaaacaaaatttgtttgagaaattatataaggaatctaatttgttatcgtaa

SEQ ID NO: 5032 - DNA, 933 bp, Staphylococcus epidermidis
atgttcaaaacattgaataaaaatgacatcttacgcggattagagtcaattcttcctaaagatattattaaagtggatgaacctctcaagcgttatacatatacagaaacaggaggagaggcagatttttatttatcccctaccaaaaatgaagaagtccaagccatcgtaaagtttgcccatgagaacagtataccggtaacttatttaggaaatgggtctaacattatcattcgagaaggtggaattcgaggaatcgtcctcagcttattatctctcaatcatattgaaacctctgatgatgcaattatagcaggtagtggtgcagcaattattgacgtttcaaatgttgcacgtgaccatgtattaaccggtttagaatttgcatgcggtatccctgggtcaattggtggcgccgtattcatgaatgctggtgcttatggcggagaagttaaagactgtattgactatgcattatgtgtcaatgaaaaaggtgatttattaaagctcactacagctgaactggaattagactatagaaatagtgtggtacaacaaaaacatttagttgtattagaggctgctttcaccttagaaccaggtaaattagatgaaattcaggccaaaatggatgatcttactgaaagacgtgaatctaaacaaccgcttgaattcccttcttgcggaagtgttttccaaagaccaccgggtcattttgcaggtaaactcattcaagattctaatttacagggctatcgaatcggtggcgttgaagtttcaactaagcatgcgggattcatggttaatgtagacaacggtacagcaactgattatgaagcacttatacatcacgtacaaaaaacagttaaagaaaaattcgatgttgaattgaatactgaggtacgtattataggtgatcatcccacagattaa

SEQ ID NO: 5033 - DNA, 315 bp, Staphylococcus epidermidis
ttggcaaaggtttatggatcactcatagataatgaaacacgatgtacacattatttttcatctttagatgttattgccattaaatttaaatgttgcaacaaatattatccgtgttataaatgtcataatgaacacgtatctcatacaattgaaagatgggctgaaaatgagtttgatgaaaaagctattatgtgtggtgtttgtaaacatgagatgcgtattcgtgactatatgatggtagaaatgtgtcctcgttgtaaagcgcattttaacagtcgttgtaaatttcattatcatttatattttgaagtataa

SEQ ID NO: 5034 - DNA, 1044 bp, Staphylococcus epidermidis
atgaaaaaaacagtcttatttttattattgtctctagttttagttttaacggcttgtagtaatagttcgaataataattcaacttcgaaaaagaaaaatagtgattctaaagaaactgtaaccatcaaaaatagttttgaagcaagtggtaaagaaaataatggcagtgataagaaaaaaatctctaatactgtcgaagtaccaaagaatcctaaaaatgccgttgtattagattatggagcgcttgatgtgttgaaagaattaggtgtggctgataaagtaaaaggtttacctaaaggtgaaaataaccaatctttacctaaatttttagatgaatttaaagatgataagtatattaatactggaaatttaaaagaagtgaactttgataaagttgcatcagctaaaccagatgtgatttttatttcaggaagaacagctaatcagaaaaatttagatgaatttaaaaaagctgcaccaaaagctaaagttgtatatgtaggtacaagtgatgacaacttaattaaagatatgaaaaaaaatacagaaaatttagggaaaatctacgataaagaaaataaagctaaaaaaattaataaagatttagatagaaaaatatctgatatgaaagataaaactaaagactttaataagaaagtaatgtatttattggttaacgaaggtgaactatcaacgtttggaccaggaggaagatttggtggtttagtgtttgatacattaggatttaaacctgcagacaaaaaggttagcaaaagcccgcatggtcaaaatataaataatgaatatattaacaagcagaatccagatgttattttagctatggatcgtggttcagttgtaggtggtaaagcaacaacaaatcaagttttaaaaaacaaagttataaaaaatgtaaaagcagtaaaaagtaatcatatttacgaattagatccaaaactatggtatttctcttcaggatcttcaacgacaactatcaaacaaattgatgaattaaatgaagtagtagagaaagttgaaaaataa

SEQ ID NO: 5035 - DNA, 780 bp, Staphylococcus epidermidis
ttgattcaaattcgaaatttagataaaacgatagacaataaacctattttaaaagatattagcgtagatattaaaaagggaaaattgacttcactcataggtcctaacggtgctggtaagagtacattattatctgctatcagtcgcttatttagttatgagaacggttcaattttgattgaagacaaagaaatttcagaatataaaactgacgatttagctaaaaaattaagtattttaaaacaatctaatcacactgatatgaacataactatcgagcaactagttaaatttggtcgttttccatattcaaaaggtcgaatgaagcaagaagactatgacaaagtggaatatgctcttgacttattacagcttaatgaaattaaacatcgtaatattaaaacactatctggaggtcagcgacaacgtgcatatattgctatgactatagcacaagatactgattatatattattagacgagcctttaaataatttagatatgaaacattcagtacagattatgcaaacgttacgagatttatgtcgtcagttaaataaaacaatcattatcgtattacatgatatcaactttgcttcttgttattcagacgacatcattgcgcttaaacaaggtgagctagttaaagctgatgataaagataatgttattcagtctgacattttaaatagtttatatgaaatggaagtacgtatagaggagataaggggacaacgtatttgtctatattatgatgaaactacttttgactcagtttaa

SEQ ID NO: 5036 - DNA, 960 bp, Staphylococcus epidermidis
atgcaaatgagcgctaataaaaaaataagtatactggtcgttatggcaatttgtatggcaattttttatttattggtaggtttagattttgatatatttgaatatcaattccaaagccgtttcaaaaaatttattcttatattattagtaggagcatcgataggaacgtccgtagttattttccaatctattactacaaatagattattaactccttctattatgggacttgattctgtgtatttatttgtcaaagtcttacctatttttattttaggtgaacaagcaactgttgttacaaatatctaccttaattttttaatcactttgatcgcaatggtgtttttttcattgctattatttcaagttatatttaaactaggtcacttttcagtctatttcatattactagttggtgtaatattaggaactttcttccgtagtattacaagttttctccaacttataatgaatcctgaatcttttttagcagttcaaaatgttatgtttgctagctttgaagcatcaaattctaaattagtaactgtttcaggcatattattagttatcttaataattgttacaataatacttcgaccatatttagatgttcttttgttaggtagagcacaagcaattaatctaggtgtttcttatgagaatatgacgcgtatgtttcttattttggttgctttactcgtctctatatctactgcattaataggtcctgtaacatttcttggcttattaactgtcaacttagcacacgaatttatgaagacctatgaacacaaatttattttaccggcaacaatattattcagctggattagtttatttatagcgcaatgggtagttgaaaatctattcgaagcaacaactgaattcagtttgatagtagatttagttggtggaagttacttcatatatttgcttgtcaaaaggagaaatgcaaattga

SEQ ID NO: 5037 - DNA, 975 bp, Staphylococcus epidermidis
atgaaatttatttttaaaggttataccttatttattttattagtgattttaactattgtctctttatttataggggtgagtcagctctctctaatagatattttccatttaagtgatgaacaaataaacattttgttttcgagtcgaattcccagaacagttagtattctactttcgggtagttcactagctttatcaggattaattatgcaacagatgatgcaaaataaatttgtaagcccaacgactgctggtactatggagtgggcaaaattaggtattttaatgtcattgttgttctttcctaatggtcacattttaatcaaattattatttgctgttgttctaagtattgttggaacgtttttatttgtccaattaattaatcttatccgtgtaaaagatgtaatctttgttccacttttaggcattatgattggtggtattttatccagttttactacatttgtagcgttgagaaccaatgctttacaaagcattggaaactggttaactggtaactttgcagttataacgagtggtcgttttgaggtgttgtatctcacaataccattacttattttggcatttgtatttgcaaatcattttactattgcaggtatgggaaaagactttagtcataatttaggtgtaagttatgaaaaaatcattaaaatagcattattcataacagcaacgctaacagcattagttgttgttactgttggaacattaccatttttaggtttaatcgtaccgaatatcatatctatctatagaggcgatcatttgaaaaatgctttaccacacacgcttatgctcggtgcaatttttgttttaattgctgatattattggtagaataattgtttacccttacgaaattaatattggattgacgataggtgtatttggcacaattattttcctaatcttgctaatgaaaggtaggaaaaattatgcaaatgagcgctaa

SEQ ID NO: 5038 - DNA, 969 bp, Staphylococcus epidermidis; identical to SEQ ID NO: 3477

SEQ ID NO: 5039 - DNA, 2106 bp, Staphylococcus epidermidis
atgaaaaccatggaagaaaagaaatacaatcatattgaattaaataatgaagtgaccaagagaaaagacaatggtttctttgatttagagaaagatcaagaagcattgaaagtgtatcttgaagaaatccatgataaaatgatttcttttgatgatgaaatcgaaagacttcattatcttgttgataataatttttattttaatgttttcgaaaaatatagcgaagcagaattaagtgaaattactgaatacgcaaaatcaattcacttccaatttgctagttatatgtcggcaagtaagttttataaggattacgctttaaaaacgaatgataaaactaagtttcttgaggattataatcagcacgtcgcaatcgttgcactttatttagcgaatggtaatgttaaacaagcaaaacaatttatttctgcaatggtggaacaacgttatcaaccggcgacaccaacattcttgaatgcaggtagagcaagacgtggagaacttgtttcatgtttcttattagaagtagacgatagcttaaattctatcaatttcattgattcaactgcaaaacaacttagtaaaattggtggtggtgtggccattaatttatcgaaacttcgtgcacgtggagaagcaattaaaggaattaaaggtgtagctaaaggtgttttacctgttgctaaggcacttgaaggtggatttagttatgcagatcaattaggacaacgtcctggcgctggggcagtgtacttaaatattttccattacgatgttgaagagtttttagatactaagaaagtgaatgcagatgaagatttacgtttatctactatttcgactggtcttattgtaccttctaaattctttgatttggctaaagagggtaaagatttctatatgtttgcacctcatacagttaaacaagaatacggtgtgactttagatgatattgatttagaaaagtattacgacgatatggttgcaaaccctaatatcgataaaaagaaaaaagacgcacgtgaaatgttaaatatgattgcacaaacacaattacagtctggttatccatatcttatgtttaaagataatgcaaacaaagtacatgcgaattcaaatattgggcaaattaaaatgagtaatttatgtactgaaattttccaattacaagagacatcagtaattaacgactatggaattgaagatgaaattaaaagagatatttcatgtaacttaggctcattgaatatagtgaatgttatggaatcaggtaaattcagagattctgtgttcacaggtatggatgctcttacagttgtaagtgatgaagcaaatattcaaaatgcaccaggtgtaaaaaaagcgaatagtgaactacattctgttggactaggagtaatgaacttacatggttatctagctaaaaataaaattggctatgaatctgaagaagcaaaagactttgctaatatattctttatgattatgaactattattccatcgaacgttcaatggaaattgcaaaagagcgtggagaaaagtatcaagactttgagcaatcagactatgcaaatggtaaatattttgaattctatacatctcaagaatttgaaccaaaatttgaaaaggttcgccaactttttgatggtatcgatatacctacttcaaatgattggaaagaattgcaaaataaagtagaacaatatggactttatcacgcttatagattagctattgctccgactcaaagtatttcttatgttcaaaatgcgacaagttctgttatgcctattgttgaccaaattgaacgtcgtacgtatggaaatgcggaaacattttatccaatgccatttttatcaccagaaacaatgtggtactacaaatcagcatttaatactgaccaaatgaaacttattgacttagtagctacaattcaaactcacgtagaccaaggtatttcaacgatactttatgttaattcagaaatttcaacacgtgaactttcaagattatatgtatatgcacaccataaaggccttaaatctttatactatacacgtaataaattattaagtgtggaagaatgtacaagttgtgcgatttaa

SEQ ID NO: 5040 - DNA, 399 bp, Staphylococcus epidermidis; identical to SEQ ID NO: 3479

SEQ ID NO: 5041 - DNA, 147 bp, Staphylococcus epidermidis
gtgcgtgctcaaccaactcgaccggttcaacctggccatcgacgtcatcgaccgggtgcccaggctaaaagacgtttcggcgcacgtgcgcgaggaactcaagaacaggctcatcgagcaccgtcagtacatccgcacccatggtga

SEQ ID NO: 5042 - DNA, 579 bp, Staphylococcus epidermidis; identical to SEQ ID NO: 4107

SEQ ID NO: 5043 - DNA, 459 bp, Staphylococcus epidermidis
atgagtcgttctagtgcaataaatgcgtctcgcaatgcacaacaatctagtcagcgtgctgcccaacaagcaacaaaatcaagtcgtgtaacagcaaccaaaaataaaggacaacagagtgtatcaagccaaaaagcacaatctcgttctttaatgccgtctcaaagaccttatgattcaagtgcaccatattcatctcaatatattgctacaacttattataataattggttattctattatatttttgcacattcgtttttaaatcaacatgaaaagaaaaacagtgtagatgctcagtttaatatgttgaaacaacaaatgaagcctcatgagaaactttatactgttactgtaaagactaaacaaggaaagcgtgtcgttgttgtacctaaaaaacaatatgacaaaattgaaaaaggaaaacacattaaagttaaaaatggtgttgttcagtaa

SEQ ID NO: 5044 - DNA, 141 bp, Staphylococcus epidermidis
ttgcgagacgcatttattgcactagaacgactcatacttgtacttgaagaagttgaacctctagatgcagaagctgcactgctacttgaactagaacttgccgaactggaactactcgttcctcctgacgttgttgcatga

SEQ ID NO: 5045 - DNA, 381 bp, Staphylococcus epidermidis; identical to SEQ ID NO: 4109

SEQ ID NO: 5046 - DNA, 759 bp, Staphylococcus epidermidis
atggctattttaacagcaaatcaattatcaaaagtatatggtcacaaacaaaaatatcgagctttaaataatataagtttttcagttgaaaaaggggaatttgtagctgtcatgggtccttctggatcaggtaaaacgactttactcaatgtgttaagttcaatagatactatttcaggaggaactgtagaagttgaaggtaaagaaattaataaactgagccacaaagaagtggcaaattttcgaaaacaacatctcggttttatttttcaagattatagcgttttacccacattaacagtaaaagaaaatattatgctaccactctcagtacaaaaattccataaatatgaaatggaacaaaattataaagaagtggctgaggcattaggtatttataacctgggaaataaatatccaagtgaaatttctggcggtcaacaacaacgtacggcggcagcccgggcattcgtccataaaccaacaattattttcgcagatgaacctactggcgcattagattctaaaagtgctcaagatttgttacaccgtctagaagatatgaataaacaatttaattcaaccattatgatggtgacacatgatccttcagccgctagttacgctgagagagtcattatgttgaaagacggtgatatacactcagaaatctaccagggtaacgattcaaaacaaacattttaccaagaaattatgaaacttcaaaccgcattaggtggtgtcagtcatgacatttaa

SEQ ID NO: 5047 - DNA, 1881 bp, Staphylococcus epidermidis; identical to SEQ ID NO: 4111

SEQ ID NO: 5048 - DNA, 192 bp, Staphylococcus epidermidis
atgaaattcaaagaattaatcaaacaatcatatgaggatttaaaaaacttaacaattaattggtttaacgtactcagtttaactgtaatcatatttattttaagtaacattgtcacaccgcttattggtatacctgtgggtttactcggtggtgcatatatcctaaagagacgtgaagagaaaaataaataa

SEQ ID NO: 5049 - DNA, 2046 bp, Staphylococcus epidermidis
ttgacaaataataatagaataaaaagatttagcattagaaaatacgcagtgggagtagtatcaattattacaggtgcaacaattttcatcggagggcaacaagctcaagcagctgaaacttcagtgcaacatgcggatgcacacccagaagactcgcaaacaacacaacaattaaaaaatgataaggtagaagaaacgttaaaagcttcaaaacaaggtaatgctgatagtcaacaagtacaaacaattgatcaatctaaaacaaatcaaaacaaccaacattctgtagctgaaagtgcacaactgaaaagtgatgagacagctaatcagtcaaaaaaagaagaaggtagctcagtaaaacaagacgtccaaccgtctaaaaatgtaaatcaacaagacgtagctactcaatcaaatgagagagaaaataatgacataaaagatgaaggtcaaacttcaaagacgagcaatcaacatatccagagttctaacagtcataatcaatcaacaggaacaaaagacagctactcagaagaaatcgaccaaccattagtgaaattacaaaagccgtctaatgattctacatatcaaacacaatcaaaaacaaaacaagatagttctaaacaactccctcaagaaaaaacaacaaaacgtcaaattcaaacaactgaaaatgaacagacaactaaagttgattctaaaaaagctaatgacactcaaaatgttgaaaaacatactcaagagcctaaaaatgatacatcaacatcacaaaaaaatcatcaacaagtagctacaaaagaacaatctaatagaagtacaacaagggagacgcaaaagcaatcagcaaatgctaatcaaaatcatcagtctacacatcaagcacagttcaaaaaccaatatccagtagtatttgtccatggtttcctaggctttgcaggtgataatcaatttagtttagctccaaaatattggggtggtacaaaatacaatattgacagaaatttaactaatgagggatacaatgtacatgaggcaaatattggtgcttttagtagtaactatgatcgcgcagtagaattgtattactatgtcaaaggaggacgtgttgattacggtgcagcgcatgcagctaaatatggtcatcatcgctatggtcgaacatacaagggcatcatgcgtgattgggaacctggcaaaaaaattcattttataggtcacagtatgggtggtcaaaccattcgtcaaatggaagaattcttaagaaatggtaaccaagaagaaatagaatatcaacgtcaacatgggggtactatatccgatttatttacaggtggtaaagataatatggttgcttcaattactacacttggcacaccacataatggtacacctgctgcagataaaattggcacacgtaaacttgtaaaagaaacgattaatcgtattggtagattaagtggtggtaaagatgtagatatagatttaggtttttctcaatggggattaaaacaacaaccaaatgaaagctacattgattacgcggaacgtgtatccaaaagtaagatttggaatactgaagatcaagctgttaatgatctgacaacgcaaggtgctgaaaaaattaatcaacaaacaagtctaaatcctaatattgtctacactacttatacagggtcagcgactcacacaggacctcttggtaatgaattacctaattctagtgaaattcttttgttgaacttaaccagccgtattattggtaaagatgcaaacaaagaaattagaccgaatgatggtgtagttccagttatatcatcacaacatccttctaatcaagcctttaaaaaagttgatgatcatacaccagctactgataaaggtgtttggcaagtgagacccgttcaacatgattgggaccatttagatttagtaggtatggatgcatttgatttaacacatacaggtagagaattaggtcaattctatctaggtattatggataatatcatgagaatcgaagaagcagacggtattacaaataaataa

SEQ ID NO: 5050 - DNA, 1197 bp, Staphylococcus epidermidis; identical to SEQ ID NO: 4114

SEQ ID NO: 5051 - DNA, 687 bp, Staphylococcus epidermidis; identical to SEQ ID NO: 4115

SEQ ID NO: 5052 - DNA, 1119 bp, Staphylococcus epidermidis; identical to SEQ ID NO: 4116

SEQ ID NO: 5053 - DNA, 630 bp, Staphylococcus epidermidis; identical to SEQ ID NO: 4117

SEQ ID NO: 5054 - DNA, 570 bp, Staphylococcus epidermidis; identical to SEQ ID NO: 4118

SEQ ID NO: 5055 - DNA, 540 bp, Staphylococcus epidermidis; identical to SEQ ID NO: 4119

SEQ ID NO: 5056 - DNA, 396 bp, Staphylococcus epidermidis; identical to SEQ ID NO: 4120

SEQ ID NO: 5057 - DNA, 360 bp, Staphylococcus epidermidis; identical to SEQ ID NO: 4121

SEQ ID NO: 5058 - DNA, 162 bp, Staphylococcus epidermidis; identical to SEQ ID NO: 4122

SEQ ID NO: 5059 - DNA, 840 bp, Staphylococcus epidermidis; identical to SEQ ID NO: 4123

SEQ ID NO: 5060 - DNA, 720 bp, Staphylococcus epidermidis
atgagtattgaatggttatcagagaaattaagcgagcaaggcatagaactatctaatacgcaaaaagagcaatttcaaaaatattataaattacttgttgaatggaacaaaaaaatgaatttgacaagtattactgatgaacatgatgtttatttaaaacatttctatgattcaatagcgcctagtttctattatgattttaacggtcaattaagtctttgtgatatcggtgctggtgcaggttttccaagtatacctttaaagatagtataccctgaattgaaagtaacgattgtagattctctaaataaaagaatacaatttctaaatcatttagctgcagaactaggtcttgaagatgttagttttgtgcatgatcgagcagaaatatatggcaagggtgtctacagggagtcttatgatattgttacagctcgtgcagtagcgagattgactgtcttaagtgagttgtgcttacctttagtaaaaaaaggtggacagttccttgcacttaaatcatcaaaaggtgaagaagaattgcaagaagcgacgtttgctattaacattttaggtggtaatgtgaaagagactcatacttttgaattacctgaaaatgccggtgagcgacaaatgattattattgataaacgtagacagacatcaaaaaaatacccaagaaaaccaggtacgccaaacaaatctccactagttgaaagttaa

SEQ ID NO: 5061 - DNA, 1878 bp, Staphylococcus epidermidis
gtggttcaagaatatgatgtagtagtcattggtgctggtcacgccggtattgaagcaggtttagcttcagctcgtcggggtgctaaaacgctgatgttaacaattaatttagataatattgctttcatgccatgtaatccatctgtaggtggtcctgcgaaaggaatcgttgtacgtgaaatagacgctttaggtggacaaatggcaaaaactattgataaaactcacattcaaatgcgtatgcttaatacaggtaaaggtccagctgttagagctttacgtgctcaagcagataaagtattatatcaacaagaaatgaagcgtgtacttgagaatgaggataatttagacatcatgcaaggtatggttgatgaactcattatagaagataatgaagttaaaggtgttcgtactaatattggtacagaatatcgttctaaagctgtcattattacaacaggtacattcttacgtggagaaattatactaggaaacttaaaatattctagtggccctaaccatcaattaccatctgtaactctagcagataatttaagaaaattaggatttgatatcgttagatttaaaacgggtacaccaccacgtgtaaatgcgagaaccatcgattattctaaaactgaaatccaaccaggtgatgatataggtcgagcgtttagttttgaaacaaccgaatttattttagatcaattaccttgttggttaacttatacaaatggagatacacatcaagtcattgatgataacttacatttatctgctatgtattccggtatgattaaaggtacaggtcctagatattgtccatcaattgaggataaatttgtccgctttaacgataaaccaagacatcaacttttcttagaacctgaaggacgtaatacgaatgaggtatacgtgcaaggattatctactagtttacctgaacatgttcaacgtcaaatgttagaaaccattccaggtcttgaaaaagcagatatgatgcgtgcgggttatgctattgaatatgatgcaatcgtgcctactcaattatggccaacgttagaaacaaaagcgatcaaaaacttgtatactgcaggtcagattaatggaacatcaggatatgaagaagcagcgggacaaggaatcatggcaggtattaacgctgctggtaatgttttaggtacaggtgaaaaaatactcagccgttcagacgcatatattggtgtacttatagatgatttagtcactaagggtacaaatgaaccgtatcgattattaacttcacgtgcggaatatcgattattactacgtcatgataatgctgatttacgtcttactgatatggggtatgaattaggtttaatatcagaagaacgctatgcaagatttaatgaaaaacgtcaacaaatcaaagatgaaatacaacgacttaccgatgtacgtattaaaccaaatgaacatacgcaagcaattattgaagctaagggtggttcaagattaaaagatggcatattagcgattgatttattacgtcgtccggaaatgaactacgaaacaattttagaaatcttagaagaatcacatcaacttcctgaagcggttgaggaacaagttgaaattcaaacaaaatatgaaggttatatcaataaatctttacaacaagtagaaaaagttaaaagaatggaagcgaaaaaaattcctgaggatttagattatagcaaggtagatagtttagcatctgaagcacgcgaaaagttagctgaagttaaaccattaaatattgcacaggcttcacgaatttcaggtgtgaatccagcagatatctcaattctacttgtttatttagaacaaggtaaacttcaaagggtgaaacaataa

SEQ ID NO: 5062 - DNA, 1380 bp, Staphylococcus epidermidis
atggattttgatacgattacaagtatttcaacaccgatgggtgaaggtgctattggaattgtgagattatctgggccacaagctattgaaatcggagatatcttatataaaggaaagaaaaagttatctgaagttgagacgcatacaataaattacggtcatattattgatccagaaacaaatgaaacagttgaagaagtcatggtgtctgtattacgtgcccctaaaactttcacacgagaagatattattgagataaattgccatggtggtattttaacaattaatcgtatattagagttaactatgacttatggtgcacgtatggcagaaccaggtgaatatacaaaacgtgcatttttaaatggtcgtatagatttatctcaagcagaagcggttatggattttatacgttccaaaactgatcgagcttctaaggttgcgatgaatcaaatagaaggacgtttaagtgacttaatcaagaaacaacgtcaatccatattagagatactcgcccaagttgaagttaacattgattatccagagtatgatgatgtagaagacgcaacgacggacttcttactagaacagtctaagcgtattaaagaagaaatcaatcagttacttgaaacaggagcacaaggtaaaataatgagagaagggttatctacagttattgtaggacgtcctaatgttgggaagtcttcgatgctaaataaccttattcaagataataaagcaattgtgactgaggtcgctggtacaacaagagacgtgttagaagaatatgtcaatgttagaggtgtcccgttacgacttgtagatactgcgggtattagggatactgaagatatcgtagagaagattggtgtagaacgttctaggaaagctctaagtgaagcagatttaattttatttgtgcttaataacaatgaacctctgacggaagatgatcaaactttattcgaagtcattaaaaatgaggatgttattgtaatcattaataaaacagatttagaacagcgattagatgttagcgaactaagagagatgattggtgatatgccacttatacaaacatcgatgcttaaacaagaaggtattgatgaattagaaatacaaattaaagatttattctttggtggcgaagtacaaaatcaagatatgacttatgtatctaattcacgtcacatttcattgttgaaacaagcgagacaatcaattcaagatgcgattgatgctgctgagtctggtatcccaatggatatggtacagattgatttaacacgtacttgggaaattctaggagaaattattggagaatcagcgagtgatgaattaatagatcaactatttagtcaattttgtttaggaaaataa

SEQ ID NO: 5063 - DNA, 348 bp, Staphylococcus epidermidis
atggaaaaagcatatcgtattaagagaaattcagactttcaagcgatatacaagaatgggaagtctgttgcaaatagacaatttgttgtctatacctataaaaatagagatttaaaacattttcgcttaggaataagtgtctcaaaaaaactgggcaacgctgttacaagaaatagaattaaaagagcgataagagagaattttaaagtgcataagcaaaatattatcgctaaagatattatagttattgcgaggcaaccagcaaaagatatgaatacactggagattcaaagcagtttagagcatgtgcttaaaattgcaaaagtgtttaataaaaagattaagtag

SEQ ID NO: 5064 - DNA, 138 bp, Staphylococcus epidermidis; identical to SEQ ID NO: 4128

SEQ ID NO: 5065 - DNA, 138 bp, Staphylococcus epidermidis
atgaactatgtatatgacaatttattattaaaattggtgaagaaaaaaattgcttatattaaatcacaacaagtcattttcaatcgttatattcgtaaattcatcttgctttataaaaggtattttgttatattgtag

SEQ ID NO: 5066 - DNA, 1356 bp, Staphylococcus epidermidis
atgtcagagaaagaaatttgggataaagttttagaaattgcccaggaaagaatttcaaacactagttatcaaacgttcataaaagatacgcaactctactcacttaaaaatgacgaagccattatattagtaagtctgcctttcaatgcgagttggcttaatcagcgatattcagaaattatgcaggctattatttatgatgtcatcggttatgaagtgaaaccacattttatttctgaagatgaacttgcatcctacaacaatgtaaatacacaagaagttcaagaaccccaagtacaacattcttctatagatgataagacttggggaaaagaacaatttaatatgcacaatacattcgatacatttgtcattggacctggtaaccgtttcccacatgctgcaagtttagctgttgcagaagcaccggcagaagcttataatccattatttatatatggaggcgtaggtctaggtaaaacacatttaatgcatgcaattgggcaccatgttcttagcaacaaacctaatgctaaagtcatttacacttctagtgagaaattcacaaacgaatttattaaatcaatacgtgataatgaaactgaagcatttcgtgaaaagtatcgtaaaattgatgttttattaattgatgatattcaattcattcaaaataaagaacaaacgcaagaagagttcttccatacttttaatgaattacatcaaaataataaacaaatcgttatttcaagtgatcgtccaccaaaagaaattgctaagctggaagaccgtctacgttctcgttttgagtggggactaatagttgatatcacaccacctgattacgaaacaagaatggcaatattacaaaagaaaattgaagaagaaaatcttgatattccgccagaagctttgaattacatcgccaaccaaatccaatcaaatattcgtgaacttgaaggcgcattaactcgacttttagcgtactccaaattacaaggaaaacctattacaaccgaactcactgcagaagcgttaaaagatatcattcagtcacctaagtctaaaaagattacaattcaagatatccaaaagatagttggtcaatattatagtgtaagaattgaagattttagtgccaaaaaacgtacaaagtcaattgcttacccacgacaaatagctatgtatctatctagagaattaactgatttttcattacctaagataggtgaagaatttggaggtcgcgatcatacaacagttatccatgcccatgaaaagattgcaaatgatatcaagtctgatcctacatttaagcaagaagtagaaaacttagaaaaagaaattagaaatcagtaa

SEQ ID NO: 5067 - DNA, 1134 bp, Staphylococcus epidermidis
atgatggaattcacaattaaaagagattattttattaatcaacttaacgacacattaaaggctatctcacctagaacaactttaccgattttaacaggtatcaaaattgatgctaaagaaaatgaagtcattttaactgggtcagattcagaaatatcaatagaaatcactattccaaaacaagttgatggtgaagaaattgttgaaattacagaaacaggatcagttgtacttcctggtcgtttcttcgttgatattattaaaaaacttcctggaaaagaagttaaattatcaactaatgaacaattccaaacgttaatcacatcaggtcattcagaatttaacttaagtggcttagatcctgatcaatacccattattacctgaggtatcacgagatgacgctattcaattgtcagttaaggtactaaaaaatatcattgcacaaactaattttgcagtgtccacctcagaaacacgaccagtacttactggtgtaaactggcttatacaagataatgaattaatatgcacagcaacagattcacaccgcttagctgtaagaaagttacagttagaagatgaatcagaaaataaaaatgtcatcattcctggtaaagctttatctgaattaaacaaaattatgagtgacagcgacgaagatattgatattttctttgcttctaaccaagtgttattcagagtggggaatattaatttcatctcacgtttacttgaaggtcattatccagatacgacacgtttattcccagaaaattatgagattaaattaggaattaacaatggagacttctatcatgcaattgatcgtgcatctttattagcacgtgaaggtggaaataatgttattaaattaagtacaggtaatgaattagttgaactttcatctacttctcctgaaattggtactgttaaagaagaagttaacgctaatgatgtagaaggcggaaacttgaaaatttctttcaactcaaaatacatgatggatgctttaaaagccattgataatgatgaagtagaagtagaattctttggtacaatgaaaccatttatcttaaaaccaaaagatgatgattctgtaacgcaattaattctgcctattagaacatattaa

SEQ ID NO: 5068 - DNA, 237 bp, Staphylococcus epidermidis; identical to SEQ ID NO: 4131

SEQ ID NO: 5069 - DNA, 1116 bp, Staphylococcus epidermidis
atgaaacttaatacactccaattagagaattatcgtaactatgaacaggtgacattagattgtcatcccgaagtgaatatccttattggtgagaacgcacaaggaaagacaaatttacttgaatcaatttataccttagcgcttgctaaaagtcatcgtacgtcaaatgataaggaactcatacgtttcaagtctgattatgctaaaatagagggtgagctaagttatagacatggtacgatgccgcttacgatgtttataactaaaaaaggtaagcaagttaaagtaaatcatcttgagcaaagcagactaactcaatatattggacatttaaatgtcgtcttatttgcacctgaagatttaaatatcgttaaaggttcaccacaaatacgtcgacgattcatagatatggagttaggacaaatatctgctgtctatttgaatgatttagctcaatatcagcgtattctaaagcaaaagaacaattaccttaaacagttacaaattgggcagaagacagatacaacaatgttagaagtcttaaaccaacaatttgttgaatatgcactgaaggttacgttacgtcgagagcactttataaaggaattagaaacacttgcacaacccattcatgcaggtatcacaaatgatcaagagacactgacactcgattatgttccaagtttgaagttaagtaattatgaagccaatcaatctgagttaattgaagaagtattagcattgttaaatgacaatttacaaagagaaaaagaacgaggcgtatgtctctatggcccacatcgtgatgacttaagtttcaatgtaaatggcatggatgctcaaacgtatggttcacaaggtcagcaacgtacaactgcgctgtcaattaagttggcagaaattgaattaatgaatattgaagtaggagaatatccaatcttacttttagatgatgtcttgagtgagcttgatgactcacgtcaaacacatttgttaagtacgattcaacataaagtacaaacatttgtgacaactacgtcagttgaaggaatagatcatgaaataatgaataacgctaagttataccgtattagtcaaggtgaaatactaaagtaa

SEQ ID NO: 5070 - DNA, 1932 bp, Staphylococcus epidermidis
atggtgaatacattgtcagatgtaaacaacacagataattatggtgctggacagatacaagttttagaaggtctcgaagcggttcgtaaaagaccgggtatgtatattggttcaacttcagaaagagggttgcaccatttagtatgggaaattgttgataatagtattgacgaggcattagcaggttatgctagtcatattgaagttgtaattgagaaagacaattggattaaagttactgacaatggccgtggtattcctgttgatattcaagaaaagatgggacgccctgctgtcgaagttatcttaactgtacttcacgctggaggtaaattcggaggtggcggatacaaagtatctggcggtcttcacggtgttggatcttcagttgttaatgcactctcacaagatcttgaagtttatgtacatcgtaatggcacgatttatcatcaagcctataaacaaggtgtgccacaatttgatcttaaagaaattggcgatacagataaaacaggtacagctattcgattcaaagccgataaagaaatctttacagagacaacagtttataactatgaaacacttcaaaagcgtatacgtgagcttgctttcttaaataaaggtattcaaattactttaaaagatgaaagagaagaggaagttagagaagactcatatcattatgaaggcgggattaaatcctatgtagatttattaaatgagaataaagaacctcttcacgatgaacctatatatatccatcagtctaaagacgatattgaagtggaaattgcacttcaatataacagtggatatgcaaccaacttattaacgtatgcgaataatattcatacatacgagggtggtacgcatgaagatggctttaaacgtgctttaacacgcgttttaaatagctatggtacgcaaagtaagattattaaagaggataaagatagactttcaggtgaagatacacgagaaggtttaacagcagtcgtatcaattaaacatggcgatcctcagtttgaaggacaaacaaaaacaaaattaggaaactctgaagtacgtcaagttgttgatagattattttctgaacactttgaacgtttcttatatgagaatccatctgtaggacgcattattgttgaaaagggtattatggcttcacgcgcacgtgtggctgccaaaaaagcacgtgaagttacgcgtcgtaaatcagcattagacgtttcaagcttaccaggtaaattggcagattgttctagtaagaaccctgaagaaagtgaaattttcttggtagaaggtgactctgccggggggtctactaaatctggtcgtgattcaagaacacaagccattttacctttaagaggtaaaattttgaatgtggaaaaagcacgtttagatcgtatcttaaacaataacgaaattcgtcaaatgattactgcatttggtacgggtattggaggagaattcgatatatcaaaagcacgttatcataaaatcgtaatcatgactgatgccgatgttgatggtgcacatatacgtacgttattacttacattcttctatcgtttcatgagacctttaattgaagcgggctacgtttatattgctcagccgcctttatataaactaacacaaggaaaacaaaaatattatgtatttaacgatagagaactagacaagttgaaacaagaattaaacccgtcaccaaaatggtcaattgcacgttacaaaggtcttggtgaaatgaacgcagaccaattatgggaaacgactatgaatcctgaacatcgctctatgttgcaagtgagacttgaagatgcaattgatgcagaccaaacatttgaaatgttaatgggcgatgtagtagaaaatcgcagacaatttatcgaagacaatgcagtttatgccaacctagatttctag

SEQ ID NO: 5071 - DNA, 2682 bp, Staphylococcus epidermidis
atggctgaattacctcaatcaagaattaatgaacgaaatataaccagtgaaatgcgtgaatcattcttagactatgctatgagtgttatcgtttctcgtgcattacctgatgttagagacggattaaagccagtacatcgtcgtattctttatggtttaaatgaacaaggtatgacgcccgataaaccttataagaaatctgcacgtatagtcggggatgtcatgggtaaatatcaccctcatggtgattcttcaatttatgaagcaatggtaagaatggcccaagactttagttatcgttatccacttgtagatggtcaaggtaactttggctctatggatggtgacggggcagccgcaatgcgttataccgaagcacgtatgactaaaataacattagaacttttacgtgatatcaacaaagacacaattgattttattgacaactatgatggtaatgaaagagagccgtcagtcttacctgcacgtttccctaacttactagtaaatggtgcggcaggaattgccgtaggtatggctacaaatattcctccccacaatttaactgaagttattgatggtgtgctcagtttaagtaagaatccagacatcacaattaatgagctgatggaagacatccaaggtcctgattttcctacagccggtttagtactagggaaaagtggtattcgtcgagcttatgaaacaggtcgtgggtcaattcaaatgcgttctcgtgctgaaatagaagaacgtggtggtggccgtcaacgtattgtcgtaacggaaatacctttccaagtcaataaagcgcgtatgattgaaaaaatcgcagagttagttagagataagaaaatcgacggtattacagatttacgtgatgaaacaagtttgcgtacaggtgtaagagtagttattgatgtacgtaaagatgcaaatgcgagtgttattttaaataatttatataaacaaactccattacaaacatcatttggtgtgaatatgattgctttagtgaatggtagacctaaactaatcaatttaaaagaagcacttatccattacttagaacaccaaaaaacagtggttagacgacgtactgaatataatcttaaaaaagcaagagaccgtgcccatattctagaaggtttacgaatagcactagatcatattgatgaaattatcacaacaattcgtgaatcggacactgataaaattgcgatggcaagtttacaagagcgttttaaactaactgaacgtcaagctcaagcaattttagatatgcgtttaagacgtttaactggattagaaagagataaaatagaatctgagtataatgaacttctagaatatattaaagagttagaagagattttagctgatgaagaagtactattacaattagttcgtgatgaattgactgaaattaaagaacgtttcggcgatgaacgtcgcactgaaattcaattaggtggtctagaagatcttgaagatgaagacttaatccctgaagaacaaattgttattacattaagtcataataactatattaaacgtttaccagtatctacatatcgttctcaaaatcgtggtggtcgtggcatacaaggtatgaacacgttggatgaggacttcgttagtcaattggtaacaatgagtacacatgatcatgttctgttctttacgaataaaggtcgtgtatataaactcaaaggttatgaagttcctgagttgtcacgtcaatccaaaggcatacctattattaatgcgattgaactcgaaaatgacgaaacaataagtacgatgattgcagttaaagaccttgaaagtgaagaagattatctcgtattcgcgacaaaacaaggtatcgttaaacgttcatcattaagtaacttctcccgtattaacaaaaacggtaaaattgcaattaactttaaagaagatgatgaattaattgcagtacgtctaacaacaggtaatgaagatattcttattggaactgcacatgcatcattaattagattttctgaatctacattacgcccattaggccgtacagcagcaggtgtgaaaggtatttctctacgtgaaggggatactgtcgttggtcttgatgttgcagattcagaaagtgaagatgaagtattagtagttactgaaaatggttacggtaaacgtacacctgttagcgaatatcgtttatcaaatcgtggtggtaaaggaatcaaaactgcgacaattaccgagcgtaatggtaacatcgtttgtatcacaactgtaaccggtgaagaggatttaatggttgtaactaacgctggtgttattattcgtcttgacgttcatgatatttctcaaaatggacgtgcagcacaaggtgtacgccttatgaaactcggagatggtcaatttgtttctactgttgctaaagtaaacgaagaagacgataatgaggaaaatgcagatgaagcgcaacaatctactactactgaaacagcagatgtagaagaggtagtggatgatcagacaccaggcaatgcgattcatacagaaggtgatgcagaaatggaatctgtagaatctcctgaaaatgatgatcgtattgatatcagacaagattttatggatagagtgaatgaagatatcgagagtgcttcagataatgaagaagatagtgatgaataa

SEQ ID NO: 5072 - DNA, 816 bp, Staphylococcus epidermidis
atgaaaacgttagattctgttaatattcctataagaaaagacgaaacacataaaggtgactatggtaaaattttattaatcggtggatcagccaatatgggtggcgcaatcatgcttgctgcacgcgcttgcgtttatagtggaagtgggctcattactgtagcaacacacccaaataatcatgctgcgctacattctcgttgtcctgaggcgatggttatagatattaatgatactaaaatgctcacaaaaatgattgaagcaactgatagtatccttattggcccaggtcttggagtagatttcaaaggtaataatgccatcacgtttttacttcaaaatatacaaccacatcaaaatttaattgttgacggagatgctataacaatattcagtaagttaaaacctcaaattcctacatgtcgtgttatattcaccccacatcaaaaggaatgggagcgtttgagcggtatacctattgaagaacagacatatgaacgtaaccttgaagcggtagaacgtattggcgcgacagtagtattaaaacaacatggtacggaaatctatttctgcaatgatgatgtctataaattacctattggcacacctgctatggctacaggtggtatgggtgatacacttgcgggtatgattacaagcttcgtaggccaatttgataattttaaagaagctgttacaagtgcaacttacatgcatagttttatcggtgaaaaattatctgacacaatgtatgttgttccaccttcacgtctaattagtgaaataccgtatgtgatgaaacaacttgaaggttaa

SEQ ID NO: 5073 - DNA, 1287 bp, Staphylococcus epidermidis
atgttagacattcgtttatttagaaatgaacctgagaaagtgaagagcaaaattgaattaagaggcgacgatcctaaagttgtcgaccaagttttagaattagatgaacaacgccgtgaattaatcagtaaaactgaagagatgaaggcgaaaagaaataaagtgagcgaagaaatagctcaaaagaaacgtaataaagaagacgctgatgatgtcattgctgagatgcgtcatttaggtgatgaaattaaagatatcgataatcaacttaatgaagtagataataaaattagagatatcttaattcgtattcctaacttaattaatgaagatgtacctcaaggtgattctgatgaagaaaacgttgaagttaaaaaatggggtacgccacgtgattttgaatttgaacctaaagcgcactgggatttagttgaagaattaaaaatggctgactttgaacgtgctgctaaagtatctggtgctcgtttcgtatacttaactaaagatggcgcattacttgaacgtgctttaatgaattacatgttgacaaaacatacaacgcaacatggttatactgaaatgatgacacctcaattagtgaatgctgatacgatgtttggaacaggtcaattacctaaatttgaagaagatttatttaaagttgaaaaagaaggcttatatacgattccaactgcagaagtacctttaacaaacttctatagagatgaaattattcaaccaggtgtactacctgaattatttacagctcaaactgcatgtttccgtagtgaagcaggatcagctggtagagatactagagggttaattcgtttacatcaatttgataaagttgaaatggttcgtattgtacaacctgaagattcttgggatgctttagaagaaatgacacaaaatgctgaagctattcttgaagaattaggtttaccataccgtcgtgttatcttatgtactggcgatattggtttcagtgctagtaaaacatatgatttagaagtttggttaccaagttacaatgattataaagaaatcagttcttgctctaactgtactgatttccaagcacgtcgcgcaaatatcagattcaaacgtgatgctgcttctaaaccagaattagtacacacattaaatggtagtggtttagcagtaggtcgtacatttgcagccatcgttgaaaactatcaaaacgaagatggtacattaacaattcctgaagcattagtaccatttatgggtggcaaaactaaaattgaaaaaccaatcaaataa

SEQ ID NO: 5074 - DNA, 984 bp, Staphylococcus epidermidis
ttgaattggcaacgtaaatgtatactaactactttgttggttttaagtagtttatttttagtattttcgactatcacatatgcgagtgaacgtgattttaaagacagtcttaaaatcactacacataacgtgtatttcttacctactgctatctaccctaattggggacaatctcagcgcgctgatttaatttcaaaagcagattacattcaaaatcaagatgtcgtgattctaaatgaattatttgataaaaaagcttcaaaaagattgttaacacgtctacattcacagtacccttatcaaacacctatcgttggtaaaggtacagaaggttggcaaaatacttctggtacttatagaaaaattaaaaaagtaagtggtggcgttggtattgtgagtaaatggcctatcgtacaacaagaacaacatatttataaaaaaggttgtggggctgatatggcaggtaataaaggctttgcctacattaaaattaataagaatggcaaataccaccatattatcggaacacatctacaagctgaagatccaacatgctttaaaggaaaagataaagacattagacagagtcaaatgagtgaaattaaacagtttatcaaagacaagaatatccctaaaaatgaacccgtctatatcggtggtgacttaaatgtcattaaagattcagatgaatatcaacaaatggcaaataacttaaatgtttcattacctactcaattcgatggtaatgcatatagttgggatactagcagtaatagtattgcgaaatataattatcctaaattagaacctcaacacttagattatattttattagatcgtgaccatgcacaaccaagctcatggcataatgatacacatagagtgaagtcaccagaatggtccgtgaaatcttggggaaaaacatacaaatacaatgattactcagatcattacccactctcaggctatgcatcaaatgaatag

SEQ ID NO: 5075 - DNA, 690 bp, Staphylococcus epidermidis
atgactcaccttacgtttaaacaaggtgtgaaagagtgtattcccacgttacttggttatgcaggtgtaggactatcgtttggaattgtggcagtctcccaaaatttcagtgttttagaaattattttattgtgtctgattatttatgctggtgcagcccaatttattatttgtacattagtgattgcaggcacccctatttctgcaattgtgcttacaatacttatcgttaactctcgaatgttcttattaagtatgactttagcacctaattataagcaatatggattttggaatagggtagggcttggaacgttattaacagatgaaacttttggcgttgctataacaccatatgttaaaggtgaaaaaattaacgatcgatggctacacggactaaatattactgcttacttatttactgtttcctgtgtaatcggtgccattttcggagagtatatttcaaatcctgatgcgctcggcctagactttgcaattaccgcaatgtttatttttttatgtatatctcaatttgaagggattaagaaatcacgattgagaatatatattgtactcattgtatgtgtgattgtgatgatgcttcttctaagttcaattctaccttcatacctagcaattttaatagccgcaattgttgctgcattgttaggggtggtgatggacaaatga

SEQ ID NO: 5076 - DNA, 330 bp, Staphylococcus epidermidis
atgacgacagatttacatacattagtacttattattttatgtggcgtggtcacattactcgttcgagttattccatttgttatgatatcgcgtgtcaacttaccagcaattgtaattaaatggctttcttttattcctatcactttatttacagctcttattatagatggtgtaattcaacaacatgatcatgcatttggttatacgcttaatttaccttatattattgcaatcgtgccaactgtgatgctcgctattttcacacgtagtctaacagtgacaattctcggaggtatatttgtcattgcttgcttacgtttaatcttttaa

SEQ ID NO: 5077 - DNA, 969 bp, Staphylococcus epidermidis
atgacgaattacacggttaatacattagaactaggtgagtttataactgaatctggtgaaacgattgatcatttacgtctacgttatgaacatgtaggacttcctggtcaaccccttgtcgttgtttgtcatgcacttactggcaatcatttaacatacggtacggatgcgcaacctggctggtggcgagaaatcattgatggtggctacattccagttcatgattatcaatttcttacattcaatgtcattggaagtccatttggttcgagttctaaattaaatgatgacaacttcccagaacatttaacattgagggatatagttagagctattgagttaggtatacaagcattagaatttaagaagattaatattctcattggaggcagtttaggtggcatgcaagctatggaattgctttataatcgtcaattcgaggtggaaaaagcaatcatattagccgctactgataaaacgtcctcctatagtcgtgcttttaacgagattgcaagacaagctatacatataggtggtaaagaaggtttaagtatcgcacgtcaactcggcttcctcacgtatcgatcgtctaaaagttatgatcaacgttttacactagatgaagtagtgagctatcaacaacatcaaggtgataagttcaaagaatatttcgatttaaattgttatttaacactgctagacgtcttagatagtcatcatttagatagagggagagatgatgttgatgaagtctttcaatcattggaaacgaaagtactaactatgggctttattgatgatttactttatcctgatgatcaagtaagagctttaggagaacgttttaaatatcatcgtcatttcttcgtaccagataatgttggacatgatggttttcttctaaattttaatgattgggcgcctaatttatatcatttcttaaatttgaaacaattccgacgtaaatag

SEQ ID NO: 5078 - DNA, 912 bp, Staphylococcus epidermidis
gtgttttcaaaaatacaacctaaagcaactattttagcagttatttcattattagtagtcgctttagtaacacatgtattacctgttctcggcttgattttatgtttatttgcaacgattcctggtattgttttatggaatcgttccatacaatcattcggaattagcgcattagtaacagttgtacttacaacattattaggtaatacatttgtcttaagtatgatggtcttaatcttattattaagtgcgattatcggacaattacttaaggaaagaacatctaaagaacgaattctttatatttcaacagcttcattaagtttagttacacttattggatggatgttattacaaacattcgataaaatcccgacggcagctgtattaattaagccttttaaaaatgcaatgcatgaggctttcttaacaagtggaatcgattcaaactatagacagattcttgaggaaagtttccgacaaatgacggtccaactccctagttttctaattatagttattttcatttttgtcttaattaatctgattattacatttccaattttacgcaaatttaaagtagcaacacctatttttaaacctttattcgcatggcaaatgagccgtaatttactatggttttatcttatagtacttatttgtgtcatgattgcaagtgaaccaagtacgttccaaagcatcgtgttaaactttgatgttgtgttatcattagtgatgtacatccaaggattaagtgtcattcacttctttggtaaagctaaaagatggccgaacttcgcaacaattcttgttatggtagtagggacacttcttacaccggcaacgcatattgttggattacttggggtaattgatttatgtattaatttaaagaaaataataaaaaaatga

SEQ ID NO: 5079 - DNA, 1968 bp, Staphylococcus epidermidis
atgaaccgtcaatccactaaaaaagctttgctcataccgtttattttaatggtactcactgccatagcacttgtcgtcgtgtggtttatttttaaccaattagtagcaggtattgctacagctatactcattgtgatgattattattagtggcgtgttattgagaaaagcatttctaaaaatggatagttatgtggatgatttaagtggtcacatctcggcaagtagtaacaaggcgattaagcacttgcctatagggatgattgtgttagatgaagataatcacattgagtggatgaaccaatttatgacagatcacattgaaacgaatgtgatttctgaaaatgtcaatgaagtcttccctaacatattaaaacaactggaaaaagttcaagaagtagaaatagaaaacaacaattattactatcatgtacgatattcagaaaacgagcattgtttatacttctttgatatgactgaaactgaacgtacaaatgaactatatgaagattccaagccgattattgcaacaatatttttagataattacgatgaaatcactcaaaatatgaacgatacacaacgttctgaaattaactctatggtgacacgtgtgattagtcgttgggcacaagattacaatatttacttcaaacgttacaactcagatcaatttgtagcttactttaaccaaaaaatattggctgaactagaagattctaattttgaaatcttaagccaattaagagagaagagtgtgggttaccgcgcacaactaacattaagtattggtgtaggtgaaggcacggagaaccttattgatttaggtgaattatcacaatctggtttagacctcgcgttaggtcgtggtggtgaccaagttgcaattaagaatatgaacggcaatgtaagattctatggtggtaagactgaccctatggaaaaacgtacgcgtgtacgtgctcgtgtgatttcacatgccctcaaagatattcttactgaaggcgataaagttatcgttatgggacataagcgaccagatttagatgctataggtgcagctatcggagtttcgcgctttgcatcaatgaataatttagaggcatttatcgttcttaatgattctgatattgatccgacattacgtcgtgttatggatgagattgataagaaaccggaactaaaagaacgctttgtaacatcggatgaggcttgggatatgatgacttctaagacgactgtcgttgttgtagatacacataaacctgaaatggtcttagatgaaaatgtcttaaataaagcaaatcgcaaagtagtcattgatcatcatagacgtggcgaaagctttatttcaaatccattacttgtgtatatggaaccttacgctagctcaactgctgagctcgtaacggaattactagaatatcaaccaactgaacagagattgactcgtttagaatcaactgttatgtatgcaggtattatagtagatacaagaaactttacgttaagaacaggttccagaacatttgatgctgcaagttatttacgtgcacatggcgctgatacaatcttaacgcaacatttcttaaaagatgatgtcgatacgtatatcaatcgttcagaattgataagaacagttaagatacaagatcaaggtgtagccattgcacatggttcagatgataaaatttatcatcctgtaacggttgcacaagctgccgatgagttgttaagtttagaaggcattgaagcatcttatgtagtagctaaacgtgaagacaacctgattggtatctcagcacgttctttaggttccataaatgttcaattaacaatggaagcgttaggtggcggtggccatctgacaaatgctgcgacacaaataaaaggtgcgacaatagatgaagcaatagaacaattacaacaagcaattacagaacaaatgagtaggagtgaagacgcatga

SEQ ID NO: 5080 - DNA, 447 bp, Staphylococcus epidermidis
atgaaagtaattttcacacaagatgttaaaggtaaaggtaaaaaaggcgaagttaaagatgtaccagtaggttacgcaaataacttcttacttaaaaataaatatgctgtagaagcaactcctggtaacttaaaacaattagaacaacaaaataaacgtgccgaagcagatagacaacaagaaatcgatgatgcaaaagcacttaaagaacagttaaaagatatcgaagttgaagtatcagctaaaacaggtgaaggcggcaaactatttggttcaatcagtacgaaacaaattgccgaagcgctaaaaaaacaacatgatattaaaatcgacaaacgtaaaatggacttaccgcatggtattcatgcactaggatatactaatgttccagtgaaattagacaaagaagtcgaaggtacaatccgtgtgcacactgtagaacaataa

SEQ ID NO: 5081 - DNA, 1401 bp, Staphylococcus epidermidis
atggatggaatgtatgagcaaaatcaaatgccacatagcaatgaagctgaacaatctgtcttaggtgccattattatagatccagaactcattaatactactcaggaagtcttgcttcctgagtcgttttatagaggcgcccatcaacatatttttcgagcaatgatgcacctaaatgaggataataaggaaattgatgttgtcacattgatggatcaattatcaagtgaaggtagcttaaacgaagcgggtggccctcaatatcttgccgaactatcgacgagtgtaccgacaacgcgaaacgttcagtactatacggatatcgtttttaaacatgcgttgaaacggaaacttattcaaaccgctgatagtatagcgaatgatggctataatgatgaattagaattagatacgattttaagcgacgccgaacgacgtattttagaactatcttctacaagagaaagtgatggttttaaagatattagagatgtcttaggacaggtatatgaaaccgcagaagaactcgaccaaaatagtggtcaaacaccaggtattccaactggttatcgtgacttagatcaaatgactgctggttttaaccgtaatgatttaatcattctagcggcacgtccttcagtaggtaagactgcctttgccttaaatattgcgcaaaaggttgccacgcatgaagatatgtatactgtcggtatcttctcacttgagatgggcgccgaccaattggcaacacgtatgatctgtagttctggtaacgttgattccaatcgtttaagaactgggacgatgactgaagaagattggagtcgctttacgattgcggtaggtaagctatcacgaactaaaatcttcatagacgatacgccaggtatccgtatcaatgatttacgttctaaatgtcgtcgactcaaacaagagcacggtcttgatatgattgtgattgattatctacaattgattcaaggaagcggatcacgtttctcagataaccgtcaacaagaagtttcagagatttcacgtacacttaaggcgattgcacgtgaattagaatgcccagttattgcactgagtcagttatcacgtggcgttgaacagcgacaagacaaacgtcctatgatgagtgatattcgtgaatctgggtctatagaacaagatgccgacattgtcgctttcttatatcgtgatgattattataatcgtggtgaaggtgatgaagatgatgacgatgctggttttgaaccacagacaaatgatgataacggtgaaattgaaatcatcatcgccaagcaacgtaacggtccaacaggtactgtgaaacttcactttatgaaacaatataataaatttacagacattgattatgctcatgcagatatgtcataa

SEQ ID NO: 5082 - DNA, 1284 bp, Staphylococcus epidermidis
atgtcatcaatcgtagtagttgggacacaatggggagacgaaggtaaaggtaaaataacagactttttagcagagcaagcagacgtaattgctagattttctggtggtaacaatgcgggacatacgattcaattcggtggaaaaacttacaaattacacttagtgccatcaggcatcttttataaagataaattagctgtaatcggtaacggtgtagttgtagatccagtcgcattattaaaagaactagatgggttaaatgaacgtggtatttcaactgacaatctacgcatctcaaatcgcgcacaagtcattttaccttatcacctagctcaagacgaatatgaagaacgtcgtcgtggcgataataaaattggtacaacaaaaaaaggtatcggcccagcatacgtagataaagcacaacgaatcggtattcgcatggcagacttattagaaaaggaaacattcgaacgccgacttaaagaaaatattgaatataaaaacgcatactttaaaggcatgtttaacgaaacttgtccaacattcgatgaaatctttgacgaatattatgctgcaggtcaacgtttaaaagactatgtgacagacacagctaaaattttagacgatgcaaatgtggctgatgaaaaggtattattcgaaggtgcacaaggtgtcatgttagatatcgaccatggtacatatccattcgttacatctagtaatccagttgcaggtaacgttacagtaggtacaggtgttggccctacatcagtgtctaaagtgattggtgtatgtaaatcatatacatctcgtgtaggtgacggtccattcccaactgaactttttgatgaagatggccaccatattagagaagtgggtcgtgaatatggtacaactactggacgtccacgtcgtgtaggttggttcgactcagttgtattacgtcattcacgtcgtgtaagtggtatcacagatctttcaattaactcaatcgacgttttaacaggattagacacagttaaaatttgtactgcttacgaattagatggtgaaaaaattactgaatacccagcaaacttagatcaattaagacgttgtaaacctatcttcgaagagcttccaggttggactgaagacattacaggttgtcgtagtttagatgaacttcctgagaatgcacgtaattacttagagcgtatttcagaattatgcggtgtccatatttcaatcttctcagtaggtccagaccgcgaacaaacgaatttattagagcaactttggtag

SEQ ID NO: 5083 - DNA, 702 bp, Staphylococcus epidermidis
atggctagaaaagttgttgtagttgacgatgaaaaaccaattgctgatattttagaatttaatttaaaaaaagaaggttacgacgtatattgcgcttatgacggtaatgacgcagtagatttaatctatgaagaagaaccagatatcgtcttacttgatatcatgttacctggtagagatggtatggaagtgtgtcgtgaagtgcgtaaaaagtatgaaatgccgattatcatgctgacagcgaaagattctgaaattgataaagttttaggccttgaattaggtgcagatgattacgtaactaaaccatttagtactcgtgaactcatagcacgtgtgaaagcgaacttacgccgtcattattcacaaccagctcaagaagtaagtggtgcgacaaatgaaattacaattaaagatattgtgatttatccagatgcatattcaattaaaaaacgtggagaagacattgaattaacgcatcgtgaattcgagctattccattatctttctaaacatatgggtcaagtcatgacacgcgaacacttactacaaacagtgtggggttacgattatttcggtgatgttcgtactgtggacgtaacaattcgccgtttaagagaaaaaattgaagatgatccatctcatccagaatacattgtgacacgtagaggcgttggatacttcctccaacaacatgattag

SEQ ID NO: 5084 - DNA, 1833 bp, Staphylococcus epidermidis
atgaagtggcttaaacaactacaatcccttcacacgaaactcgttattgtttatgtactactcattattattggtatgcaaatcatcggtttgtattttacgaatagtttagaaaaggaattactcgataacttcaagaagaacataacacaatatgcgaagcaattagacgttaatattgaaaaggtttataaggataaagataaaggttcagtcaacgctcaaaaggatatccaagaccttttgaatgaatatgcgaatcgtcaagaaataggagaaatacgctttattgataaagaccaaatcatcatggcaacaaccaagcagtctaaccgtggtcttatcaatcaaaaggtcaacgacggttcagttcaaaaggcgctctccttagggcaaacgaatgatcatatggttcttaaggattacggaagtggtaaagaacgtgtttgggtatataatataccggttaaagtcgataaacagacaatcggtgatatatacatagaatcgaaaattaatgatgtatacaatcagctgaacaacattaatcagatattcatcgtagggacagcgatatcactattcattacagtgatactaggattcttcattgcacgaacgattactaagccgataaccgacatgcgtaaccaaaccgtcgagatgtctaaaggtaactacacgcaacgagtgaagatatacggtaacgatgaaatcggtgaactcgcacttgccttcaataacttatcgaaacgtgtccaagaagcacaagcgaatacagaaagtgagaaacgtcgtctagattctgttatcacgcatatgagcgatggtattcttgcgacagatcgccgtggacgtgtacgtattgcaaacgacatggcgctgaaaatgctcggtctcgcgaaagaagatgtcatcggctactacatgcttggtgtccttaacttagaaaatgaattctcattagaggaaattcaagaaaatagtgattccttcttgttagatattaacgaagaagaaggcattattgcacgcgtaaactttagtacgattgtacaagaaacaggtttcgtgacaggttacattgccgtactacatgatgtcactgaacaacaacaagtcgaacgtgaacgtcgcgaattcgttgcgaatgtttcacacgaattacgtacaccactgacatcgatgaatagttatatcgaagcacttgaagaaggcgcttggcaagataaagaactggcaccatcattcctatctgtcacacgcgaagagactgaacgtatgattcgtttagtgaatgatttacttcaattatctaaaatggataatgaatcagatcaaattacgaaagaaattatcgacttcaatatgtttatcaacaaaattattaaccgtcatgaaatggcagcgaaagatacaacattcgtacgcgaaattccgcaacaaaccatctttgctgaaatcgatccagacaagatgacacaagtatttgataatgtcattaccaatgcaatgaaatattcacgtggcgagaaacgtgttgagtttcatgtgaaacaaaatgcactttacaatagaatgacgattcgtattaaagataatggtattggaataccgattaacaaggtagataaaatatttgatagattctatcgtgtagataaagcacgtacacgtaagatgggtggtacaggacttggtctagctatttccaaagagattgtcgaagcacataacggtcgaatttgggctaacagtgtagaaggacaaggtacgtcaatctttattacacttccttgcgaaatcattgaagacggtgattgggatgaataa

SEQ ID NO: 5085 - DNA, 1338 bp, Staphylococcus epidermidis
atgaataacaaagaacatactaaatcaattattttagtcctactcgtcttgatgagtatcgttttgacatacatggtctggaacttttctccagacctttcaaatattgataacacggataatagtaaaagtgataagcctaaaccacttactaaaccaatgactgcagaaatggaaggaacaatcacaccatttcaaatcgtgcattctagagatgataaatctcaaggaacagtagcatcaggtgcagtcttagataagatgattcaacctttaaagaatcaagaagttaaatctgtatcacatctgaaaagggaacataaccttgtcatacctgaactaagtaacgactttattgtcctagatttcacttatgatttgccactttcaacatatttaagtcaagtactcgatatcgatgcgaaagtgccgaataactttaattttgatcgcctccttatcgatcaagattataataaccacgtcgtactatatgcgattagcaaagaccgtcatgaagtagttaaacttaagacaaccatgaaagggaataatgttgataaagcttttaaaagtatcgaacctgacatgcaaccctatacggaaatcatcacgaataaagatacaatcgacaaagcaacacacgtgtttgcaccaagcaaaccgaaagacttaaagacgtatcgcatggtcttcaatacgattagtgttgaacgcatgaactcaatactatttgatgattcaacaatcgttcgtagctctcaaagtggtacgacaacatacaacaacaatactggcgtcgccaactacaacgataaagatgaaatgtatcattataagaatttatctgaagatgcgaaaagttcaagcaacatgcaagaaaccatcccaggcacatacgagtttataaatagtcatggtggcttcttaaatgaagattatcgcctatttaagacagataatagaacggggaaactcacatatcaacgattcctcaacggttacccaacgtttaataaacagaacttcaatgaaatccaagtcacatggggagataaaggtgtttacgattatcaacgttcgctacttaagacggacgtcacactgaacagtgaagaatctaaatccgtccctaccgttgagtcagtgcgttctgcattagccaaccatcctgatattgattttgaaaaggtaacgaacattgcgattggttatgatatggacgacaaggcaaacaacgaagatattgaagttcaacgtaactgtgaattaataccacgttggtttgtagaatacgatggcaattggtatgcctataaagatgggaggcttgaataa

SEQ ID NO: 5086 - DNA, 792 bp, Staphylococcus epidermidis
atgaactggaaactcacgaagacacttttcattttcgtttttattcttgtgaacatctttttagtcatcgtttatattgataaagtgaataaatcacaagttaatgactcggaaaaggtaaacgaggtcaactttcaacaagaagaaattgacgtgcccaaggatgtcttgaatcaaagcgtgaaagatactgaacttgaacaaattactgcccgttcaaagaatttctcaagttatgcgaaagatcattcaagcctgcaaacgtctgattccgataaaacacttgaaggagatattgataaaggcgttcaagtgagtgataagaacttacaagatatcaaagaatacattgcaaagaaaatctttaacggtaaagagtatcaattaagtgatttaactaaagataaagtcacttacgaacaaacgtataaagattatccaattatgaataatagtaaagcacgcctaacgtttaatttgagcgatggcaaggcgacaagctataaacagacagcgatggatgatatacaagtagctaaaggttcaaatagcacgaagaagcaagtcatcacgccacgtaaagctattgaagccctttattacaacagatatctaaaacaaaatgatcaagtgcttgacgcacgcttaggctattattcagttgtaaaggaaacaaacgttcaattactccaacctaactgggaaattaaagtaaaacataaaggcaaggatgaagttcaaacctattatgtagaagctacaaatcataatccgaaagtgattgattattag

SEQ ID NO: 5087 - DNA, 801 bp, Staphylococcus epidermidis
atgagtcgcttgatacgtatgagtgtattagcaagtggtagtacaggtaacgccacttacgtagaaagtgagaaaggtagcctacttgtcgatgtaggtttaactggtaagaagatggaagaacttttcagccaaatcgacagaaacattaaggatttaaatggaattttagtgacacatgaacacatcgaccatattaaaggtcttggtgtcttagcacgtaaatataaacttccgatttacgcgaatgagaatacatggaaagcgatagagaagaaagatagtcgcattccaatggatcagaaatttatctttaatccatatgaaacgaaatcacttgcaggatttgatatagaatcatttaacgtgtcacatgacgcgattgatccacagttctacatcttccacaataactataagaaattcacgatgattactgacactggttacgtttcagatcgtatgaaaggtatgattcaaggtagtgatgtctttatgtttgaaagtaatcacgatgtcgatatgttacgcatgtgtcgttatccatggaagacgaaacaacgtattttaagtgatatgggtcacgtatccaatgaagacgcaggccttgcgatgagtgatgtcattacaggtaatacgaaacgtatatacctctctcatttatcacaagacaataatatgaaagacctcgcacgcatgagtgttggacaagtgctcaacgaacacgatattgatacagagaaagaagtattgctttgcgataccgataaagcacaagccacaccgatttatacactataa

SEQ ID NO: 5088 - DNA, 480 bp, Staphylococcus epidermidis
atgaagattactatcttatcagttggaaaactaaaagaaaaatattggaagcaagccattgcagaatatgaaaaaagattaggaccttacacgaaaatcgaattaatagaagtaccagatgaaaaagcatctgaaaatatgagcgacaaagaaatagaacaagtcaaagaaaaagaaggccaacgcctactcaataagattaaaccccaatccacagtaataacgttggaaatcaaagggaaaatgttgtcttcagaaggactcgctaaagaactacaaacacgcatgacacaaggtcaaagcgactttacatttgtcatagggggctccaatggtttacaccaagacgtcttacaacgcagcaactacgctttatctttcagcaatatgaccttcccacaccaaatgatgcgcgtcatattgatcgagcaaatttatcgcgcatttaagatcatgagaggcgaagcatatcataaatga

SEQ ID NO: 5089 - DNA, 234 bp, Staphylococcus epidermidis
atggaacatattaacaaagataaaaatgatgaaaaaagtaaagagctagataaaagattaggaattaatggttattacaaaactgatttagatttagagattgaaaaagaactactagaatcgccaaatgaatccagtagttcagtagctaaacgtatacgtataataagtatgattcctttaattattttattaattttagcatttattcggataatcagaactttcatatag

SEQ ID NO: 5090 - DNA, 1509 bp, Staphylococcus epidermidis; identical to SEQ ID NO: 4157

SEQ ID NO: 5091 - DNA, 1320 bp, Staphylococcus epidermidis
atgattaatttatacgataacttaaatagtcaaacgcttcaattatataaaacatttataaatgcgaatattaagtctacaactgtcgttgttaatgataatggattcttacccagtgatgtattgtcgccttataaatttttttctggaaactcaatcgaaaatgaaagacctctttacttcaacgatgttccagtcccgaaatattgggaaattgaaggttccaatcaatcagctgtgattaaggataaggataaaataagaggcaaaattttatatcaaaagggatatcgtgatagagtggtggcttcagtagaatggtttaataaaaaggaacatgttcaattcatagattattataaccaacatggttttcgatatgcccaattagtcatggatgataatcaaaatcaaataatgaaacgttactttgaccaaaataataatgaatttttagtggagaatcttgttactaaggatttaatattaagatggaataataaagatatattctttgataatcgtatctcgtttttatcgttcttttttgaaaaagcaaatttatctataaaagatatagtgcttaattcatttgcaacatcatttctgtttttgtatagacaacgggattttaacatgaagtgtagaatattttggcaagaaaaaattaaagatgatttacctgaaaacatgaaaattgctctaaaaaatatagataacttgaaaattttaattcctgataaaaaagaatattatcgtgtaatggattctgtagaaacttcatatcgacataaaattgaaaatagtggttatgtgtacgaattcttgaaagtaaacaaatataataatgaagcacttataataactaattctgataatattccatatgtagaatatattgctagagagaatcaaaatgtcacatttcacattgcatctaaaactgaaatgtcttcaagattattacaattaggtggaatacaaaatataaatttatacccaaaaagtactgaggaaactatcttaaatttatgttgtaaatgcgatatttatttagatataaataaagggaaagaaatatttgaaagtatgtatttagcatttgcacatgaaatgattataattgcttttgaagaaactattcacaatagacaatttgtccatagtagtaatatatacaaattagataattactatgatttaagcaatgcaataaatcagataagtaatgataaaactttattttctgatagattaaatatgcagttaagatctgccaattcagtttcaattgaatcatttctaaataaaatgaagtaa

SEQ ID NO: 5092 - DNA, 504 bp, Staphylococcus epidermidis
atgaatacaatcaaaagtacgatacacacagaagcgatatttagcgatgatgaacaacaccgctacttactcaagaaaacatgggatgaaaagaaagctgcatgcacagtgataacgatgtatcctcatttagatggtgtattatcactcgatctcacaactgttctcatcctcaaccaattagcaaactttaaacaatatggcgctgtatatctagtgaatctattctctaatatcaaaaccccagaaaacctcaaacatatcaaagagccttttgataaacatacagacattcacttgatgaaagcgattagtgagagcgagacagtcattctagcctatggtgcctatgcgaagcgtcctatagttgttgaacgtgtggcacaagtaatggaaatgttaaaacctcataaaaagaaagtcaaaaaactcataaacccagcaacaaatgaaattatgcacccactcaatcctaaagcacgtcaaaaatggatattgaaataa

SEQ ID NO: 5093 - DNA, 312 bp, Staphylococcus epidermidis
atgaaaatcaatcgatacatcacaagaggcattagtgaacaactatctctagaccttcaaatcatactttggaatatggtaaaagaaagagataaccactctcataccgattacctacacattttcaaactacaagaagatgataatatgttgtcagttacgcatgaacaagaacaacccgcatacaaattggaatatcactatacaaactatgtaaaaaaacaaaatgcattacctaagaaagtctacgttattcgtgaagatgacgtagacactttttattatatgatgcttttacccgaagaatactaa

SEQ ID NO: 5094 - DNA, 318 bp, Staphylococcus epidermidis
atgacccacctattccaactatctaataacgaagcttgggaatgtgaagcgctggaggaagcagcagaaaatattctaccggaacgttttattaatgattctccactggtacaactcacactcgagacttatacctactataatgatgagctacatgagctaagtatctatccatttctaatgtatgccaataaccaactcatcagtattggttatctggatcattttgatatggactttctgtaccttacagatactcaaaatatcattattgatgaacgtcatttactaaaacaaggaggtcaggaccatgaataa

SEQ ID NO: 5095 - DNA, 1629 bp, Staphylococcus epidermidis
atgcaacaatttaaaacaaaacgtgtcggtatctatgtacgtgtatcaacagaaatgcaaagcatagaaggatttagtatcgacggacaaattaatcagattaaagaatattgtgagttccatcattttgaagtcaaagatatctatgccgaccgtggtatttcaggtaaatctatgaatcgacctgagctccaacgtatgttgaaggatgcgaaagaaggctatatcgactgtgttatggtctacaaaacaaaccgattagctcgtaatacatctgatcttctcaaaattgtcgaagatttacacaaacaaaatgtcgaatttttcagtttatcagagcgtatggaagtcaatacttcttctggtaaactcatgttacaaatacttgcgagtttctcagaattcgaacgtaataacattgtcgagaatgtatttatgggtcaaacgagacgtgcacaagaaggctattatcaaggcaatttgccgctgggctatgacaaaatacctaatagtaaacatgaactgatgattaatcaacatgaagctaatattgtgaaatatatattcgagtcctatgccaaaggacatggctatcgtaaaatagccaatgcattaaatcacaaaggctatgtcactaaaaagggtaaaccttttagtattagttctatcacatatatattagctaacccattctatatcggcaaaattcaatttgcgaaatacaaagattggagtgaaaaacgtcgtaaagggcttaatgataaaccagtgatagctgaagggaagcattcccccattattaatcaagatttatggaataaagtacaaatacgtaaaaaacaagtcagtcaaaaaccccaagtccatggcaaaggaacaaatctgcttacaggcattattcactgtccccaatgtggcgcacctatggcagcaagcaatacaacgaatacacttaaagatggaaccaagaaacgtatacgttactattcatgtagtaattttcgcaacaaggggtccaaagtatgttcggcaaacagtgtaagagctgatgtgattgaagattatgtgatgaagcaaatactcgaaatagtcaaaagtgataaagtcattcaacgcgttgtagcacgtgttaatcaagaaaataaagttgatggcgctgcacttcatcacgatattgcttataagcaacaacaatatgatgaagtacaaaccaaactaaataacttgattaaaaccatagaggataatccggacttaacatcagtaatcagaccaagtattcaaaaatatgaaaagcaactcaatgacattacgaatcaaatcaaccaactcaaaaatcaacaaaatgaagataagtctttatttgatgccaaacaaatcagtaaactattacaacacatctttcaagatattaagcacatggaaaaatctcgactcaaagcattgtacctatcagtgattgatcgtattaatattagaaaagatggtaatcataaaaaacaattctatgtcacactcaaacttaataacgaaatcattaaacaacttttcaataataaacaactcgacgaagtgcatctcagcacttcgtctttatttttgccccaaacactatatcttactatttag

SEQ ID NO: 5096 - DNA, 1350 bp, Staphylococcus epidermidis
atgaaacaagtcataggctatttacgtcaaagtacgatgaaacaacaatctcttgcagcacagaaacaagctatcgaagcaatagccgaaaaacatcatattcaacatatcaacttttatagcgacaaacaatcaggacgcaaagataatcgtagtgggtatcgacaaataacaaaattaattcaacaaggacaatgtgacatattatgctgttatcgtcttaataggttgcatcgtaatttgaaaaatgcattaaaactcatcaaattatgtcaaacatatcgcgttcatatcttaagtgtgcatgatggttattttgatatggatcaagctttcgaccgattcaagcttaatatttttatcagcttggccgaacttgaatcagataacattggagaacaagtcagaaatgggcttcaagaaaaagcaaagcaaggtcgattgattacaacccatgcgccctttggttacgaatatcacaacggaacattcatcatcaatcaaaatgagtcaccaacggtaaaggctgtattcaattattacattaaaggtcatggttataagaaaattgcacagttattagaagaagataacacgtatatcaatcgacaaccctatcaagttcgtaacattatcatcaatcctaattattgtggtcgtgtcaacaatcaatatggccaattcgacaatatgtttccttctattgtttccacaagtatatatgagcaagcgcagagacttcgattgcaaaaacaaaccaaacagacatcttcggataatcaactcaaacaaaaaatcaaatgcccatgttgtaatgcaacacttacaaatatgaccgttagaaaaaagaatcatatattacgttactacgtctgtcctaaaaacatgaatgcttcacgctttgtttgtgattttaaaggcgtcaatgcacaaacacttgaagataaagtattagaagtgtgccgagacttttatcaaaatcaacgcatccacacaaaaattaaaggtgcgattgacaaacgcatcaaaagacaaagaaacatagaaaaacatcacacattgactcaagaacaactgatagaaaaattggcacaaggcatcattgatacagaaacgttcagagaacaaacgcaatcattacgtcaacaacggcaacgcactacattcatcaatgagcatcaaatacaacacaccattcaaaatattattcaaaaacgtttcacgttaaacatattgtacccctatattgagaccattcacattactaaagataaaaatcttataggaatctatttcaaaaatgaaccactcaatatcgtcaatcaaaccatgcaatcatcgattgcataa

SEQ ID NO: 5097 - DNA, 1788 bp, Staphylococcus epidermidis
atgagttacacattgtttgaaattggcccatttgctttagattccttcggttggaaagaaacgataccacctaaaaaagatggtgacagtgaaaaagtggttagaatggctagccctattattgttaatgcaagattttctgatccaattactggtgttgaaaagttgattattactaacaacaatggtaaaaaagacatttttgagtctgatatcttaacaacacgaaacttaccttctttaattaaatatggctacagtgttaacgagaagtatattagatcattgagttatgccttgcaattgatgcgagatagattaccactttctgaattatatgagggtgtaggtatactagagacaccttttggctacttgatatcgctagataaagttctcaaatctattcaatttaatcagtcctcaccttcataccctattgtagatagtgcttatgacttaactcctaaaggtacatttgataattggtttaacatgtatattgacgaggttaaaggtcatcttcttttagaattggcagtcatatttgggatttctgccttagtgacaagttttctgaagcataaacatgaaatcgaatttgcaggaattctctttagttttacaggtcaatcttcaaccggtaagtcaaccgcagctgctttagctgtatcagtcgctggtaaccctaccaaaggtaatgaaactctttttagaagttggaatgccacacgtaacgcacttgaaggttatttgagtaacaattatggcgttcctatagtatttgatgaactttcatctacgacacttaaagataccacgggtttgttatattccatcgctgaaggtcaaggtcgtcaacgttccaatgtacacggagaagttaaagcgcctaagaattggggtacatctgtgatttcaacctcagaatacagtatatttaatgattctgctcaaaatgatggtttacgtgtgagaaccatcgagattaatgaacaattcactacaaatgggaccaatgctgacaatattaaaaaagctgtagcactaaactatggtcatgttttaccgttagtagctaaatatcttataaatcgtgaagatgaagtcattcaatggttttacaaggaagtagattggtttgaagctaaattgaaagacgataaaagcaacacaggcaatcgtatgtttaagcgttatgcagtcattacaacatctgcgaaaatattaggtcgtgttttatctacagatattgatatcgctaaaataagagactactttattgattatcatactcatacagtctctgaacgctcattagctgataaagctatcgatgtcatcattcaatttgtagcacaaaacagaggtaagttttcagatgaaggtgctttgaaaaatatgtttgagaactatggattaatctcattaaaagatgaccatatcgaagtaaaaatgattgcgaacgtttttaaacatatgctaaacaatcatcaatttcaagatgttaataatgttgtcaacgccttaagagataaaggtttcatattagctgaccgtggacgccaaacaactaaaagaagtgtcaaagataatagcggtaaaaaacaatcacttgtattttaccatctaaaattagatgtagagtttgcgtctatcctcggattaactaaagataagtcgttacttcaaaattggacaccgtcaaatgataacaaagctgcgaaagaactttttaaatccgctaatgaggggataggaccttcaggagttcacgaagatttctga

SEQ ID NO: 5098 - DNA, 297 bp, Staphylococcus epidermidis
atgacttacaatcaaaaagatgattttaaagagttgaaaagaagaattttaggaattgtgttcgatttacctgaggggcaaacgtttacatttcatgatctgaacagtcgtgcaaatgtacaatgctcaaaagctgtacaacaaaatgtcggacgttggttcgcgtactttgtaaaacatgcgccacgtgttccatttgttattattggtaaaaatactcatggacacttggtttatcttaaaacagggccaaatccatataataacagcaacacttcgaaaggaggtgattgctaa

SEQ ID NO: 5099 - DNA, 1584 bp, Staphylococcus epidermidis
gtgtatgattttttagaatatttacatcgttattgtgtaaaatcgattaataattgggaggctgttgcagatatatcatgcaaagttgtacgtgaaaaagttagtaaaggttattatgttaaacaagatagcgttgtaattgatgataatgatataccttcaattattaaaataagtggaaattatgtagcagcagatatattagttactagatatttagatggaatgggtgaatttataaaggtatcagaattagatcagtcgagctattacgaatggtttatgtttgttgaagaaactagaagaatatttagaggtacagaaatagtttatcgatttttaaaatatctatttacgcatacctatgaacataaaaacgaagaacaaaaaatagaaaaatatatgaagaatattatcatagataatcaatttagaggggggcatagtaatgatatagttcgtttagatatgaaagatgataatgtgttattttataattttgatatatacgatacaaatattctttatgaaaaaatagacgaggaaaaattacttagaattttagatgaaataagtaatactgacaattacaaaacgctatttaacattgtaagtgagaaccaaaagaaattttggaaatcaaatattaagccaatagtaagtgaatgtttagaagatataaatacgataccatttgatttatatgtttatgtaaataagtatataagtaataaaatatttgactgtgataattatttaattactaaaaatgaggttgtggatttttattttaatcatggtagtgactttaataatttcaagatgggacagaaatggacaaagtctaaatttaagcaggaaaataaacttaaaatacacgaatatattattgcagtaacttatgtgaatttattaaatcattcatatatgaaatatatcaatgctgaaaattactatgaccctagcaaaaaaataacaaaaggaatgaaaaataattatcataaatttacagattcattcagtgattttgtagaaatggtggacgatataacatggagaatccgtgattcatttgattatattggaggattaaaaaacaaagaatttaacgaagatgagaatgaatatatcgaacaattaattcaatttgttatattatctaaattcggctatatgaatgtagaaaatcactttgattatattgagaacttaaatacgcttaataatgaattaacgactatattaaaaagtgagttcgcgcacatttcaaatgatatgtataataatttattcagtaatttgtttgatgttgtaaatacatggaaaaaggattactcaaataacttttataataatactcagaatactataactacagaaaagttagacataatatctcgatttataaaacaatatgataaaccagttgaccgagacaaacatggtaaacgagttaaagcagaagtgtttgaaggtataagtgattttcataggcgtgtaaaagaaggatttgataataatgatgtgctattacaattaagattagaaatgagcgtacatgaaaatgataaatttactagttaa

SEQ ID NO: 5100 - DNA, 933 bp, Staphylococcus epidermidis
atggacttaaaaaaatttgaagaactatataaagattataatgatgatgatgtaatagaacaatttgccatatataaaataaaagatgaaaagcaagtaatggaaattactgataaaaagctaaccagtgaagataaacaagtttttcagagaatagctaatttaagttatcaatttaatgtagtaaaggaaatgtatgattactatctttatgattttcaagtaattactgattatatcaaagataaaagaaacctaaataataagtttaaatctgttgactttgtcaacctatattttttacatttcttatctactgcaaggactttttatcaatatactgaaaatttatttaagtctataggtaagaaagaatttgagaaatggaaaaataatatatcaaatatttatgataataatttttcttatagattatgttatcaaatgaggaattttacacagcatcatggtttggcaattacgaatattaaagagaaattaaatttagattctaatggtaaagaaataaatgactatcaattattcattgatccatctatattactaaatactaactataattggaagaattcaattaagagcgatttagaaaatcataatggattaattgatttttatcaattaataatagattatgacaagtgtataaaagatatacttttgtattcatatatagggttaatagataagtatagcactgaattaaaccaattaatgacaaaagctatggcaatagaaggagaggcaggtataccttttttaagaaaagctaagaagaaagaacttagagaatattataaaaatattgaatttacggaattacaaggaagtaaagcaataaatgatatatttaatatgatgtgtgatttatatactcaactcaatacatctaaaatttgtttcaatagatga

SEQ ID NO: 5101 - DNA, 117 bp, Staphylococcus epidermidis
atggaaacttcagttcttatccctacgaatgatatttcacgacatgtaaatgatattgcagaaacaattcccgatactgaattcgatgaattcagacattatcgtggcttaatataa

SEQ ID NO: 5102 - DNA, 1254 bp, Staphylococcus epidermidis
atgtcaaaattaattttggcggtaaatgctggtagctcatctttaaagttccagctaattaagatgcctgaagaaaaactagtaactaaaggtgtgatagaacgtattggtttaagcgattctatcttcaccattcatgttaatggcgagaagcttactgatatcagagatatccataatcatgaagaagccgttaatataatgttagatagttttaaagaacatgaaatgattaaagacatcactgatattcaaggaacaggtcatcgtgttgtacacggtggtgaaactttccctaaatcagttgttgttactgatgaagtagaatctcaaattgaagaattaagtgaattagcacctttacacaatccagctaatttaatgggaattagagcttttagaaagttattaccagaaatcccacacgttgcagtgtttgatacttctttccatcaaactatgcctgaacaagcttatttatatagcttgccatatcattactatgaagactatggcatacgtaagtatggtttccacggtacaagtcataaatatgtatctcgtagagctgctcaaattgttggtagaccaattgaagatttaagaattatttcttgtcacatcggtaacggtgcatctattgcagctatagatggtggagaatctattgatacatctatgggattcacaccacttgctggtgtaacgatggggactcgttcggggaatcttgatccagcattaataccattcattatggaaaaaacgggtaaaacagctgatgaagttttagaaatacttaataaagaatcaggattattaggtcttactgggacatcaagtgatttgcgtgatttaactgaagaagctaaacatggacgtcaacgttcccgtgttgctctggatttatttgcttcaaaaattcacaaatatattggctcttatgcagctagaatgcatggtgtagatgttattgtatttactgcaggaataggtgaaaattcacatattattcgtggtaaagttttagaaggacttgagtttatgggtgtttattgggatcctaagaagaatgaaagtttacatggtgaagaaggttatattaactatccacattcacctgtaaaagtacttgttgtacctactgatgaagaagtaatgatatctcgtgatgtgattaaatatggtaaacttaatgataatacacccaaaaaagaagaatttgataccaacgaaagtatcgaagtgaattaa

SEQ ID NO: 5103 - DNA, 948 bp, Staphylococcus epidermidis
atgtctgaagaaaatactattatggaacgtctatttcataaattagatgataaagctaaaacgttaaacaaagaaaatggacagagttttatcgaaaatttagggttagctatggaagatatttatacaaaccaaagagaacttttagaacaagcaacgcttcaagatagaaggaaagcttttcaatttgcatatttaagtttattacaagaagaaaatattcaagctaatcatcagatcacgcctgactctataggactcattctcggttttcttgttcaacgctttttagaacataaaaaggaaatgcacattgtagatattgcaagtggggcaggtcatctaagtgcagctgtgaaagaagtactttctgataaaacaattatgcatcatctgatagaggtagatccagtgctatcacgtgtaagtgtgcatttggctaattttttagagataccgtttgacgtttatcctcaagatgcgattatgccattaccattggaagaggctgatgtcgtgattggagatttcccaataggatactatcctttagatgaacgtagtagagaaatgaagttaggctttgaagagggacacagttattcccatcatctgttaatagaacaatctattaatgcgctaaaaggggcaggttatgcatttttagttgttcctagtcatctctttgaagatgataaagtgaaacagttggaaaatttcattgctacagagactgagatgcaagcatttttaaatttacctaaaacattatttaaaaatgaaaaagcacgtaaatctatattgattttacaaaagaaaaaatcaggcgaaactcgaccagttgaagtcttattagccaatatccctgattttaaaaatcctcaacaatttcaaggtttcatttctgaattgaatcagtggatagtcacaaatcatacaaaaaaatag

SEQ ID NO: 5104 - DNA, 495 bp, Staphylococcus epidermidis
atgactcaaattacatttaaaaataatcccattaaattatcaggttctgaagtgaatgaaggtgatatcgcaccaaatttcacagtgcttgataatagtttgaatcaaattactttagatgattataaaaacaaaaagaaattaattagtgttataccatctattgatacaggagtatgtgatagtcaaactcgaaagtttaatgaagaagcttcagcagaagatggtgtagttttaacgatatcagtagatttacctttcgcccaaaaaagatggtgtgcatcaagcggattagataatgtaattactttaagtgatcataaagatttatcttttggtcgaaattatggacttgtgatggatgaattacgcttacttgcacgttcggtatttgtgttaaacgaaaacaataaagtagtatataaggaaattgtcagcgaaggtacgaattaccctgattttgaagctgcattaaaagcatacagaaatatttag

SEQ ID NO: 5105 - DNA, 765 bp, Staphylococcus epidermidis; identical to SEQ ID NO: 4534

SEQ ID NO: 5106 - DNA, 1224 bp, Staphylococcus epidermidis
atgcaatatgatcatttattagttagatatggagagcttacgcttaaaggtacgaatagaaaaatgtttgttaatcaacttaaagataatgtgaaacgcgcgcttattccattaagtggttatcatgtcaaaggaaagagggatagaatgtacatagaattatcccctgaagcagacataaatgaaatcattcaacgcttatctaaagtttatggtataaaatcaattagtccagttataaaaattgataaaaacgaagagaaaattaatcaatcagcaatacagttatctcatgactttgaaaaaggttcaacttttaaggttgatgtaaaacgcgttgacaagtcatttcgattggatacgtacgaattgcaacgtcaagtcggtggagcaatactaaaagaaaataataatataacagtgaatgttaaaaatcctgactatgaaattaaaatagaagtaagaatggatgctatttatatttatgaaaaagtaatcgctggtgcaggtggactgccagtcggtacaggtggtaagacattacttatgttaagtggtggtattgattctcctgtagcgggaatagaagtaatgaaacgtggtgtaactgttgaagcaatacattttcatagtccaccgtttacgagcgaaaaagctaaagataaagttatcgaattaacaagaattctagcggaacgtgttggtcctatcaaattgcatctcgtgccatttacagaaatacaaaagcaaattaataaagttgtacatcctcgttatacgatgacttctacaagaagaatgatgatgcgtatatctgataaagttgtacatcaaataaatgctaatgctatcgtaaatggagagaatcttggtcaagtagcaagtcagacgctaaagagtatgtacgctattaatcatgttacagctacacctgttttaagacctctattaacgttagataaagaagacattattaagaaagcgaaagaacttggtacatttgaaacatctattcaaccctatgaagattgttgtacaatatttactccgaaaaatcctgtaactgaaccggactttgacaaagtaataaaatatgaaagtgtatttaattttgatgaaatgatagaaaatgcagttgaaaatattgaaacattaacaatagatcaaaattataaaagtgcgaaagaacaatctacagattcattgattaaagatttattctaa

SEQ ID NO: 5107 - DNA, 1140 bp, Staphylococcus epidermidis; identical to SEQ ID NO: 4532

SEQ ID NO: 5108 - DNA, 1695 bp, Staphylococcus epidermidis
atggtgttatttatcatattagcaatattagtagttattttaattgctattggcgtattgttttatatgcgctcaaacaaaagaaatttaattgaaaaaacagaagagcgtaagaacgaaattgaacaattacctttagatgataacctaagaaaacttactggtttaaatttaaaaggtgaaacaaagactaagtatgatgcaatgaaaaaagacaacacagaaactacaaataaatacttagctccagtggaagaaaaaattcaaaatgctgaagagttgttagagaaatttaaattcacggcagcacaaactgaaattgatgatgctcacgaattaatggatcaatacgaagagaattaccagcatcaagtaactcaagtggacgacattataaacttacataaagaaaatgaagcattgtatgaaaagtgtaaagttgactatcgtgaaatgaaacgtgatgtattagccaatcgtcatcaatttggtgaagcagctgaaccacttgaaaatgaaatcgaaaattatgagcccaagttaaatgaatatgagaatttaaaaagtgaaggtaattatgttcaagctcataatcacattgctgctttagaagatcaaattaaaaatttaaaatcttatatggatgaaattccagaattaattcgagaaactcaaaaagaattaccaggacagtttcaagatttaaaatatggatgtagagacttaaaggttgaaggctatgatttagaccatgtcaaagtcgatggtacaatacaaagtcttaagacagaattaagttttgttgaaccaatgattagtcgattagaattagatgaagctaataataaacttgaaaatattaatgataaattagatgaaatgtatgatcttattgaatatgaagtaaaagccaaaaatgaagttgaagaaacgaaagatatcattactgatgacttatttaaggccaaagatatgaactatacattacaaaccgaaattgaatatgttcgtgaaaactactatattaatgaatcagatgctcaaagtgtaagacaatttgaaaatgaaattcaaagtctcatctcagtttatgatgatattttaaaagaaacttctaaatctgcggtacgttacagtgaagtacaagataatttacagtaccttgaagatcatgtatctgtgattaacaaagaacaagataaacttcaaaatcatcttatccaattacgcgaagatgaagctgaagcagaagataatttattgagagtgcaatctaagaaagaagaagtttatcgacgtttattagcttctaatttaactagcgtcccagaacgttttattatcatgaaaaatgaaattgataatgaagtaagagaagtaaatgaacaatttagagaacgtccaattcatgttaaacaactaaaggataaagtagcaaaaattgttattcaaatgaatacatttgaagatgaagctaacgatgtacttgtaaatgctgtatacgcagaaaagcttattcaatatggtaatagataccgtaaggaccatcatcatgttgataaaagcttaaatgaagctgaacgattatttaaaaataaccgatataaacgtgcgatagagatagctgaagaagcattagaaagtgttgaacctggtattaccaaacatattgaagagcaagtgattaaagaatag

SEQ ID NO: 5109 - DNA, 471 bp, Staphylococcus epidermidis
atgacaaagaatattccaacaaattacaaactgatatcaaaacaacttgctaatttaatcgaagatgaaaagaatttaattgcaatattaagcaatacttctgcccttcttaacgatacaattgatcaaattaattgggtaggtttttaccttattgaaaataacgaacttattcttgggccatttcaaggtcatcctgcttgtgtacatattgctattggtaaaggggtttgtggcactgccgtttcatctggtgaaacacaacgtgttaaagacgtccatcaattccctggccacatagcttgtgacgcaaatagtcaatcagaaattgttattccattacatcaaaacggcaagattatcggagtattagatattgacgctcctataaaaaacagattttcacaagatgatcaagaaggacttgaatccattgtaaaaactttagaaaaacaactcaatcaaatttaa

SEQ ID NO: 5110 - DNA, 603 bp, Staphylococcus epidermidis; identical to SEQ ID NO: 4528

SEQ ID NO: 5111 - DNA, 747 bp, Staphylococcus epidermidis; identical to SEQ ID NO: 4527

SEQ ID NO: 5112 - DNA, 441 bp, Staphylococcus epidermidis; identical to SEQ ID NO: 4526

SEQ ID NO: 5113 - DNA, 1164 bp, Staphylococcus epidermidis; identical to SEQ ID NO: 4525

SEQ ID NO: 5114 - DNA, 1596 bp, Staphylococcus epidermidis
atgagtcataagatattagtatcagacccaatttctgaggatggtttacaaagtattttaaaacatccagaatttgacgtagatatacaaacagatttatctgaaaatgatttagtaaatatgatttcaacttatgatgctcttatcgtacgaagtcaaacccaagtaacagagcgaattattaatgctgcaacaaatttgaaggtcattacaagagctggtgtaggtgtggataatattaatatagaagcagcgactttaaaaggtattttagtaattaatgctcctgatggtaatacaatttctgctacagaacattcagtagctatgttgcttgcaatggcacgaaatattcctcaagcacaccaatctttacgtaacaaagaatggaatcgtaaagcatttagaggggttgaactttatggcaaaaccttaggtgttatcggtgctggtaggattggtttgggcgtcgctaaacgcgcgcagagtttcggtatgaaaattttagcgttcgatccttatttaacagaagataaagcgaagtcattagatattcaaattgcaactgttgatgaaattgccgaaaaatccgactttgtaacagttcacacaccattaacacctaaaactcgaggaattgttggttcatctttctttaacaaagctaaacaaaacttacaaatcataaatgttgccagagggggtattatagatgaaactgcacttattgaagcattagataataacttaatagatcgtgcagctattgacgtatttgaacatgaacctcctactgattcccctctcattcaacatgataaaattattgtcacaccacatcttggcgcctctactgtagaagcgcaagagaaggttgcagtctctgtatctgaagaaataattgaaattctaactaaagggaatgttgagcatgctgtgaatgctccaaaaatggatttaagcaaagttgataaaacaactcaaagctttataggtttaagtacaactattggtgagtttgctattcagcttctcgatggtgctccgagtgaaattaaagttaaatatgctggtgacttagcgcaaaatgacactagtttaattacaagaacaattataacgaacatcttgaaagaagatttaggtaatgaagtcaatattattaatgcattagcaatacttaaccaacaaggtgtcacgtataatatagaaaaacaaaagaaacattctggctttagtagttacattgagctagaactagttaatgatcaagataaaatcaaaattggcgcaacggtattcgcaggttttggcccaagaatagtacgtattaatgattactcacttgattttaaacctaaccaatatcaattagtaacatgtcataaagataaacctggtatagtaggacaaacaggcaacctattgggaagtcacggaattaatattgcgtcaatgactttaggacgtaacgatgctggtggagatgctttaatgattctttctattgatcaacaagcaagtgaggaagttataaaaattttaaatgaaacaagcggattcaacaaaattattagcactaagttaacaatttga

SEQ ID NO: 5115 - DNA, 1125 bp, Staphylococcus epidermidis
atgaaggctatattatttgatgtagatggcgtatttttaagtgaagaacgatgttttgatgtttcagcaattactgtagctgaacttttatcgagtccagattttttaaattgtgacatagatattcattttgatggtaatttaactgaaaatgatataaacaaaatacgtagaaacgtatttaataatgaccgaatattaaatcaactaaagtcacttggtttaaattcaaattgggatatgctatttattgtatttagtattcatttaattgataaagctaaacaattaaaaccatcattacgagatcaattacttgatgaattattgtttaccaaagagactttaaaggaaatagcaaaggatttaactgataaaacgataaattatagcttaccttacgatgtgatagcttcgtttagaaatggtaaagatgctatttacgaagatttggaagtttacgctaaaaatcaattagaacttaacaacactagtttatttaaattgaaaagtgctttatggacattagcaaaagatatatatcaagaatggtatttaggaaaagctttatttaatcaagttgaatataaaaaagatattcaagattttaagaaaggtttcatttatgatgaggtcattcttaaacctatagaagaaattcaattattacttcaaaatctaatagaagcgggatatcaaattgcgatagcaactggtagacctcgaactgaaacaattattccatttcaatcattgggattaaaatcttattttaaagatgaacatatcgtaacggcaagtgaggtgttgctagcagagaaacaatttcctcaatatcaacctttaggaaaacctaacccgtttagttacatcgctacgttaaatggaaattataatgaccaatatgaacgatatgcgacaaagcaagaagatatcgtaaataaagatgaggtttacatagtaggcgactctttagctgatttattaagtgcgaagaagataggggctacgttcattggtactttaactggtttaaaaggtaaagctgctcactctgaattagttgcaaatggagcagatcatgtagtagaggatataactaagattcgaaaaattctattatag

SEQ ID NO: 5116 - DNA, 1437 bp, Staphylococcus epidermidis
atgttacctgtagcagttctgccagcagccgcaattattgtaggcataggtcatgttttagatgctttaaatatacttcctcaagctgcactctttttcacaagtgttgggaccactatattagagcaattaggtatattatttgctattggtgtagctatcggtatggctaagaagaatgatggcgcagtagcattagcggcagcgttaggattttttatagttacagtagtactatctccagaaaaattagcaactttgttacaaattaaagaatctaaaattgatttagcattcagtcaaatgaataatggaaatgtgtttgtagggattattataggtttgattgctgcatatagttataacaaatttagtgaaacgaatttacctatggccttatcattcttcagtgggaaacgacttgttccaatcatgacagcattcttttgtacaattttagcgattattttattattgatttggcctccagtttataatgggatagttacttttggtaagtggattgttggtatgggtccattcggtgcattattatatggtttttttaatagattgttaatacctactgggttgcatcatgcgctcaataatgtattttggtttgatactgctggaataaatgacataggtaaatttcaaagtggtaaaaatgccattaagggaattactggcagataccaagcaggatttttccctgttatgatgtttggtgtaccggcagcagctttggcgatgtatcatactgcaaagacgaatcaaaaaaaacaagtttatgcttggtttttagcaagttcagtttcggcattctttgtgggtgtaactgaacccatagagtttgcattcatgtttgtagctccagttttatttgttattcatgctgttttaactggattatcattatttatagcagcaatgtttcattggacagcaggattttcatttagtgcaggtcttatagattatgtgctttcattggttaatccgatatctaatcaaccttggatgttattattgcagggtgtagtcttttttattatctattacgttatctttagagttgtcatacaagtctttaatttaagtactataggtaggggagataatgaacttatcgatccaacatcaaatgatacttctgaaatggaagtattacagaacaaaaccactacaagtaaatattatcaaaacgcaaaacgtattttagacggattaggtggtaaagaaaacattattagtttaaatcattgtgcaacaaggcttagattggagcttaaagataattcgattatagatgagcagaaaattaaaaatgctggagctattggtataactcaaaatgggcaccattatacccaagtgattattggaacacacgtacaacaagttgccaatgaaatggatcaccaaatgaattag

SEQ ID NO: 5117 - DNA, 624 bp, Staphylococcus epidermidis; identical to SEQ ID NO: 4521

SEQ ID NO: 5118 - DNA, 1239 bp, Staphylococcus epidermidis
atgtcagaacaagaaaagaatcaacaccactatcgtaattcttcacagaagcgacacacttttccatggattaaaacaattattgttgcaataatcgctggaattattggagcacttctcgtcttaggtattggtaaactcctaaataaaaatggttttaacaatgaaggtgctactgttcatcaagtttcaaatagtcatggtggcaatcagctagatggtaaaagtaatcaatacaaatcagtacatgacatgattaaagacgtttctcccgcaattgtcggcgtgataaacatgcaaaaatctacaaaccttgatgatttattcaacggtaaggcatctaaatcaaaagaagcgggaattggttccggtgtgatttatcaaataagtgatggttccgcatatatcgttacaaataatcacgttgttgatggtgcttcggaaattaaagttcaactacataattcaaaacaagtagatgccaaattaataggtaaagacgccctaacagatattgctgttctaaaaataaaagatacaaaaggaataaaagcaattcaatttgctaattcgtcaaaagttcaaacaggagatagtgtttttgcaatgggtaatcctctaggattagaatttgcaaattctgttacatcaggaattatttcagctagcgaacgtacaattgacgccaatacttctgctggtaatactaaagttaatgttttacagacagacgctgcaataaatcccggtaattcgggtggtgcattagtggatattaacggaaatctcgttggtatcaattccatgaaaattgcggcagcacaagtagaaggtataggttttgctatacctagtaatgaagttagagtgaccatcgaacaactcgttaaacatggtaaaatcgaacgcccttcaatcggtataggtcttataaatttaagtgatattcctgaaaactatcgtaaagaactacatactcataaagacaaaggcgtttatgtagctaaagtagacagtgaaaatgccattaaaaagggtgatattattactggaatagatggtaaacaaataaaagatgatacagatttaagaacttatttatacgagagcaaaaaatcaggtgaaacggttactctaaaagttatcagagatggtaagacacaagacattaatgtaaaattaaaaaaacaagcatctgcatctgaatcatctcaatcacaaagtcaatttgctcaataa

SEQ ID NO: 5119 - DNA, 1266 bp, Staphylococcus epidermidis
atggctaatgctttaatagaagatttaaaatggagagggttaatttatcaacaaacagatgaagagggtatcgaagaattattaaataaggaacaggtcactttatattgcggcgcagatcctacagctgatagtttacatattggtcacttgttaccttttttaacattaagacgcttccaagaacatgggcatcgtcctatcgtcttaattggtggaggtactggtatgataggagatccttctggaaagtctgaagagcgcgtgttacaaacagaatcacaagttgaagctaacgtcaaaggcctgtctaatcaaatgcatcgattatttgaatttggcagtgataaaggggcaaaattagttaataataaagattggcttggtcaaatttcgttgattagttttcttagagattatggtaaacatgttggcgttaactatatgctaggaaaagattctattcaaacacgtttagaacatggtatctcttatacagaatttacttatactattttacaagctattgattttggctatttaaatcgtgagttaaattgtaaaattcaagtaggcggatctgatcaatggggtaatattacaagtggtattgaattaatgcgacgaatgtatggacaaactgaggcatatggcctaacaatcccattagtaactaaatcagatgggaagaaatttggtaaatcagagtctggagctgtgtggttagatcctgaaaagacaagtccatatgaattttatcaattttggattaatcaatctgacgaagatgtaattaaattcttaaaatattttacttttttagaaaaagaagaaattaatcgattagaacaatcaaaaaatgaagcgcctcacttacgtgaagcacagaaagcactagcggaaaatgttacgaaatttattcatggtgaagcagctttaaaagacgctatacgtatttcaaaagcactgtttagtggagatttaaaatcattatctactaaagaacttaaagaagggtttaaagacgtacctcaagtaacgctatctacaaaaacgacaaatatagttgaagcacttattgaaacaggtattgcttcatctaaacgccaagcacgtgaagatgtaaacaacggtgcaatatatattaatggtgaacgtcaacaatcagtcgattatgagttaagtagtaaagaccttattgaagatgaaattacaataattcgacgaggaaagaaaaaatatttcatggttaattaccaatcataa

SEQ ID NO: 5120 - DNA, 906 bp, Staphylococcus epidermidis
atgcatttcaacaagtatcaaatactaactacagataaatatactaaatttgaacatttatataagaaggtcaaacatatatgtgtcgtaatttttttggtggtttttttgattggttttattatactgttgtcattagtattatacttccaacaactaactaaagatgcttcgtcaataagtgatcgagagttgaaagcaaaaatccttcatatacctggcgatgagctaataaatcataataatcaaattttagaagaatatgatcattcacaaaatacactcatagttggaccgaaccatgtaaattcaaatattatacatgcacttacagcctctgaagatacattattttataaacataacggtattatgcctaaagcacttttaagggcgatgcttcaagatatcacaaattcaaaccaatcttctggtggtagtactatcacgcaacaattagtaaaaaatcaagtgctctcaaataaaaaaacttatagtcgtaaagcaaatgaaattatcttggctacacgggtcgaaaatttattatcaaaagatgaaatcatatatacgtatttaaatatcgtcccatttggtcatgactacaacggtgccaatataactggtatatcgtctgcttcatatagtctgtttggtatacctgcaaaagatttgaatattgcacaatcagcttatctcattggcttactgcaaagtccatacggctatacgccttatgacgaacacggcaaagtaaagccttaccatcttttaaaattgagcatgaaacgtcaacaatacgtacttaaacgtatgcgtgttgaaggaaaaatttctaaacaacaatacgaaaacgctaaaaaatacaatattaaacagcacttgctgaaacaatcgaaagacgaataa

SEQ ID NO: 5121 - DNA, 1668 bp, Staphylococcus epidermidis
ttggcacaattatcagatttagaaatagcaaacttatcaaaacttaaaccaataagtgaaattgcaagaaaagtagggattactgaggatgctttagaaccatacggccattataaagctaaaatagatattaatcagatacaagaacaggagaaaaaagggaaagtcgtattagtaactgctatgagcccaacaccagctggtgaaggaaaatccacagtaactgtaggtttagcagatgcatttaacaagttgaatcataatgttactgttgcattacgagaacctgccttaggaccaacttttggtattaaaggaggcgcaacaggtggtggttatgctcaagtacttcctatggaagatattaatttacattttaatggtgattttcatgcaattactactgcaaacaatgcactttccgcatttatcgacaaccacctacatcaaggaaatgaattgggaattgatcaacgaagaattgaatggaaacgtgttttagatatgaatgatcgtgcgttacgtcatgttaacgtaggattaggtggtacaactcacggagtacctagagaagatggttttaatataacagttgcgtcagagataatggctattttatgtctaagccgaaatatcaaagatttaaaagaaaaaataagtcgaattaccattggttatacacgtcatcataaacctataacagtttctgatttgaaagtagaaggtgcattaactttaatacttaaagatgcgattaaaccaaatttagttcaaacaattgagggaactccagctcttgttcacggaggcccttttgccaatattgctcatggttgtaactctatattagcaactgaaactgctagaaacttatctgatattgttgttacagaagcaggatttggttctgatttaggtgccgagaagtttatgaacattaaagctcgtgaagcaggtttcgatccatcagcagttgttgttgtagcaacgattcgtgctttgaaaatgcacggtggtgttgcaaaagaccaacttcaacatgagaacatagaggctgttgaagcgggacttgttaatcttgaaagacatgtgaataatattaaaaaatacggtgtcgaaccaatagtagctttaaatgcatttattcatgacacaccttctgaaacagcgtgtgtgaaacaatgggctaaagataatcaagtgcgtattgctttaacagaagtatgggaaaaaggtggagaaggtggaattgaacttgctaaccaagtgttcgatgtaatgcaggaacctcaaaactttaagcatttatatgagttaaaacaaccactcgaagctaaaattgaaacaattgttaaagaaatttatggaggttcaaaagtaaatttcagtagtaaagcacaaaaacaattaaagcaatttaaagagaatggctgggatgaatatccgatttgtatggctaaaactcaatattcatttagtgatgatcagacattgttaggtgccccgaatgattttgaaataacaattagagaacttgaagccaaaacaggcgctggattcatcgttgcattaactggtgctataatgactatgcctggtttaccgaagaaaccagctgcactaaatatggatgttactgatgatgggaaagcaataggtcttttctaa

SEQ ID NO: 5122 - DNA, 990 bp, Staphylococcus epidermidis; identical to SEQ ID NO: 4516

SEQ ID NO: 5123 - DNA, 1092 bp, Staphylococcus epidermidis; identical to SEQ ID NO: 4515

SEQ ID NO: 5124 - DNA, 1224 bp, Staphylococcus epidermidis
atggaacattataatcgtgataatttcgagaaaagccatacaagcgaagaattgtatcatcgcacatctcgttcacaatctaactcattgaagcgtaaggattttgtagttagtttcatagcaagtgcgatagtaggttctgctgttggattgtactataaaaataaaatatataaaaaaacggatgaattgaaagaaaaagaacaagatttacgcagtaaagttgaaaactatagacaacgagcggaagatacagtggtttctgttaaatctaaagttgagcaattaaaatatgattccaaagataatatccatgcagatgaattacaagctcaaaaagctgctattcaacgcgaaacagacttagcggatgaatcaccggaagcgcaagcaattcaagaagcaaaaaaagaaacaaaacaagtggatgatgtgagaccatcagcaacagaattagcagctcaacaaaatgctattcaacacgaaacagacttagcggatgaatcaccggaagcgcaggcaattcaagaagctaaaagtgaagttgattcaaacaataaaacatctacgacgcacatagatagtgagaaagaaccttctgctgaagaaattgcaattgctcaaacggcagttaaagaagaagcacgcaatcatgatttagcaaacccttctgcaagtggagaagatactaaaagtaagtcagaaactgaaacagaaaaattagctgcagcggcaaaagcaaaaaaagatagaataaataataataatgaagttgctagtaacacgaaaaatctaatgcaagaagaagctataaaagcttcaaataactctgatgttccaaatcttgtaactaatttaaatcaatctcaagcatcagatactaattcagttgcttatcgcttagcacaggcagcaaaagaaaaaagatctaagctcacaaatggctctaaagaaacacaacttacagaagcgttgttaaaagaaccatcaattgctaaagctcaaacaaaattgaagcgtatccctacacttattactgaatctaaaaaacattcaaataatccgcacagccaaaaaaattcgaatcagactaagaatataacagcaactaaagaggattccaaaggcaaacagcaacatacacctaaccaaaacaaacgtaataaacaacaaaaagtagaaaaaactagtagcaaaattgaaaaacgaacatttaatgattaa

SEQ ID NO: 5125 - DNA, 492 bp, Staphylococcus epidermidis
atggattggattttaccaattgcaggaatcattgctgcgatagcgtttttaattttatgtatcggtatcgtcgtggtacttatttctgttaaaaagaatttagactatgtggctaaaacactagatggtgttgaaggtcaagttcaaggtattactcgtgaaacgactgatttacttcataaagtgaatcgcttaactgaagatattcaaggtaaagttgatcgtttaaattctgtagttgatgctgttaagggcattggagactcagtacaaaacttaaatggatctgtagatagagttacaaactcaattacgcacaatatttctcaaaatgaagataaaatttctcaagttgtacaatggtcaaatgttgcaatggaaattgctgacaaatggcaaaacagatacaatcgtagaggaagtgcaaactacaaaacaaacactgtagcagatgatgcaaatcatagctacaattcacgtgttaataaataa

SEQ ID NO: 5126 - DNA, 1314 bp, Staphylococcus epidermidis
atgacacactatcattttgtcggaattaaaggctcaggcatgagttcattagcacaaatcatgcatgacctcggtcatgaagtacaaggttcagacatagaatcatacgtttttacagaagttgcattaagaaataaagggattaaaattttaccttttgatgcaaataatattacaaaagaaatggttgtcatccaaggtaatgcatttcctgataatcatgaagaaattgttagggcacatgaattaaagcttgatattataaaatatcatgactttcttggtcatgttataaatcaatatacatctgttgctgttacaggtgcacacggtaaaacgtctacaactggtttgttgtcacatgtgatgaatggagataaaaagacatcattcctaatcggtgatggtacaggtatgggactaccaggaagtgactattttgcttttgaggcttgtgaataccgtaggcacttcttaagttatcatccagattatgcaattatgactaatattgattttgaccatccagattattttaaaaatatcgatgatgtttatgatgcattccaacatatggcgttaaatgttaagaaaggaattattgcttggggtgatgatgaatatttacgtaaattagatgtagatattccggtttattattatggctttaaagaaacagatgacatctatgctaaaaatattcaaattactgaaaagggtacgcaatttgatgtatatattaaaggcgaattttatgatcaattcttatccccacaatatggaaatcacaacattctaaacgcacttgctgtaatagcaattagttatttagaaaacatgaatgtagaaaatattaaagaagcactgataacatttggtggtgtaaaacgtcgttttaatgaaacaaaagtatcaaatcaagtattagtagacgattatgcacaccatccaagagaaattagtgctacaattgagacagcgcgaaaaaaatatccgaaaaaagatgttgttgccgtttttcaaccacatacgttctcaagaactcaagcatttttaaacgaatttgctgagagtttaagtaaggcagaccaagtatttttatgtgaaatattcggttcaataagagaaaatacgggagatttaactatagaagatttaatcaatcgtattgacggctcgacgcttatagatgaaaatagtattgacgtattagaaaaatttgataacgctgtaattttatttatgggcgctggtgacattcaaaagttactaaaagcttattttgaaaaattaggcgtaaaaaatgatttttaa

SEQ ID NO: 5127 - DNA, 3510 bp, Staphylococcus epidermidis
atgagctggtttgataaattatttggcgatgacaacggttcgaacgacgatttgttacgcaaaaataaaaatagacgtcagtctcagcaaacaaaacaaaataatcaagactcattactgcctcaaaataatgatatttatagtcgaccaagaggtaaatttagatttccaatacaagtttctgaaaatgaatatacgcaaaaaaatgaaaattataatgaacataaccaagaagaaacaaacgatataatgagatcatataaccagcatgataatcctgaatttgattcttctggtaaaagacatcgacgccgacgccaagcgtattcaaaacacgatcaatctaagattacacaacaaaagcaatttgcagataacaattatacaaataataacagtgtttttaatcaaaacgacaataagaaatcttcacaacaacgtaaatcaatacaatctgaaaatatcaaaaacaaagcaaacactaagaatacgtcgacatctcctgaatttacatatttaaatcatagttttaaatcaagcgaggtaccctcagcaatttttggtacaaaaaaacgaagaccgattgagaatggtgtcataccgccagaacataaggaattaaatgataaagagactgttcaacaggatgaagtctcgcattcaacgaaatcaatagatgcatcaaaaaatgtttctaatagtaacgataacaatattgaaaaaaatcaacagaaaaaacaacaaacaactgctcaaactgagtcatcatcagaaaatatgcataatgttgaaaagtcaaattatcaaactactaagcgtaaaacaccaaattactctaaagtagataatacgattaatattgaaaatatctatgcttcacaaattgtagaagaaatcagaagagaaagagaacgtaaagttctacagaaacgacgttttaagaaagccttacaacaaaaacgtcaacaaaatcaacagtcagaagaggattcaattcaaaaagctattgatgaaatgtatgctaagcaagcccaacattacacaggcgaaagttcattggatttagaaaatgaaagtaatcaagattcgtcatctaatagtctagagaaacaatcaaatagcagcaacattgacaataaagaagcccaaaataacacacctttatttaactacgaagaaattaacttagatacgacatcagatgtatataaagttaatgaagaagaaactgaatctaaaaatgatgaagatttagtatcatcaaatcattatcattctaatgatgatgcggaagtagaagatgccgaatatcacgaattagatgataaccgacaacaaaaccaaagtaactctcaagacgatataattagttcaaaatcaagtacttcaaatatgtatgataatgcaatcagtgcaagtgtagataataacactgaaagagctaaatcaaatgaagataaaaatgatacagaaattacacacttagatggaacaacaagtgcaaaagttagtgacgagataattgaatctaatacaaacaatcatttagaacaagataagaatgtaaaattaaaaaatgtaaattcatcaaaatcttcaaattctgatacaggtcaaacaagaaaacaacgttttggtggtagtagaccgtttaatgttttaatgacaccatcagataaaaagagaatgatggatcaaaaccacaaaaaagtaagtgttccagagcttaaacctgaaaaacaagcgaatgcaaatcatagaaaagacagcgaatctaataaatctgaagaatttaaacaaatcaatactaatagagaaaccgattctaatagttatgaatctaatggcatagagcatgatatgaattcatcaagtgatgagcacgtatatgaaacaccatccaaacaacaggatgagcaaatacaaaagctacaagatgattttcattttgaaaacgcaaatcatgctaaaattaacaattcaaatgaaactggcaatcaaagtaatataagtcattcaaaacggtcacaatattcaacaaatgaaagtaaaaatattgatacacaaacttcaaattcaagtacatcaaatcaaaattttcaacgtattcgtaaaggaccgaatattaaattgccgagttatcaattattggaagccccagaaccacatgaaaaagatcaagattggatagataataaaaagcaagaattaaacgacgcattatattatttcaatgtgcctgcggaagtgaaaaatgtaacagaaggaccgagtgttactcgattcgaattatctgttgaaaaaggtgtcaaagtatcaagaatcacggcattacaagatgatataaaaatggctttagctgctaaagatattagaattgaagcaccaattccaggtacaagtttagtaggtattgaagtgccaaatcaaaatcctactaaagtgaatttaaggtcaattattgaatcacctaaatttaaaaatacagagtccaaacttacagttgcaatgggttatcgaattaataatgaacccttattaatggatatcgctaaaacgcctcatgcacttatcgctggtgctacagggtcaggcaaatcggtatgtatcaatagtatcttaatgtctttactttataaaaatcatccagaagaattgcgtttattactcattgatccgaaaatggtagaacttgcaccgtataacgatttaccacatcttgtatcacccgtaataacagatgtaaaagcagctacacaaagtttaaaatgggctgttgaagaaatggaaaaacgttataaattgtttgctcaatatcatgtcagaaatattactgctttcaataaaaaagcaccttatgagcaaagaatgcctaaaattgttatagtaattgatgagttagctgatcttatgatgatggcaccacaagatgtagaacaatcaattgcacgtatagctcaaaaagctcgagcttgtggtatccatatgttagttgctacacaacgaccatcagtgaatgtaatcactggtcttattaaagctaatatacctactagaattgcatttatggtttcatcgagtgttgattctagaacgattttagacagtggtggtgctgaaagattattaggttatggtgatatgctttatttaggtagcggtatgaataaacctatacgtgttcaaggtacatttgtttcagatgacgaaatagatgaagttgttgactttattaagcaacagcgtgatcctgaatatttatttgaagaaaaagaattattaaagaaaacacaaactcaagcacaagatgatttatttgatgatgtatgtgagtttatggttgaagagggacatatttctacttctcttatccaaagacatttccaaattggttataacagagcggcaagaattatcgatcagctagaacaattaggatatatttcaggtgctaatggttctaaaccaagggatgtttatattacagaagcggatttaagtaaagaataa

SEQ ID NO: 5128 - DNA, 597 bp, Staphylococcus epidermidis
atgaacttattttacaatcctaaaggtgttggagatgttgcatttattcaaattgaaccttcagttggtccttttgaatatgaacaaaaacatggtgtggtagaaatcaaaaaagaaaatgaggtagtaggttataatatatttaatgtgtctaataatgtgacaataaatgataatggacatattaaactaactactgaattaatcaaagatttacaacaactgattactgaagcaggttttgattatcaacttgatactgatgtatcgcctaaatttgtagttggttacgtagaaactaaagaaaaacaccctaatgcagacaaactaagtgtgttgaatgtaaatgtcggtactgaaaaacttcaaattgtttgtggggctccaaatgtagaatctggtcagaaggtcgttgttgcaaaagttggggccgttatgccaagcggaatggtaattaaagatgcccaattacgtggggtagattctagtggtatgatttgctcaatgaaagaattaaatttgcctaatgctcctaaagaaaaaggaattatggtacttaacgatgactatgatattggtcagacattttttgaataa

SEQ ID NO: 5129 - DNA, 855 bp, Staphylococcus epidermidis; identical to SEQ ID NO: 4509

SEQ ID NO: 5130 - DNA, 312 bp, Staphylococcus epidermidis; identical to SEQ ID NO: 4508

SEQ ID NO: 5131 - DNA, 1086 bp, Staphylococcus epidermidis
atgactattgataactcaaaaacattggaacgaattaaaatattaacagagcttcatggagcacctggttttgaagatgaagtgagaagttatatgaaaagtgaaatggaaccatacgtggataagtttattcaaaataagatgggtggtttctatggtataaaaaaatcaaataaagaaaacgcatctcgagttatgatagcagcacatatggatgaaataggttttatgattactcatattaatgataatggaatgattcaatttacgaatttaggtggcgtggctaatgatatttggcaaggacaaagattaaaaataaaaaatagatacggtaaagaaatcataggtgtagttgctaatattcctaaacattttagaacaggaaatgaaagcatacctcaaatcaaagatttaatgctagatattggtgcttcttcatcagaagaagtgcgcaatcggggtgtagaggtgggcgatacaatagttcctcacacaataatgactcagttgtcaaaaaacagatacagcgcgaaagcctgggacaatcgatatggttgtgtcttagctattgagatattagaattattaaaagacgttcaactagatgttgacttatatgttggtgccaatgtacaagaagaagttggacttagaggagctaaagctgccgcaaagcaaattgatcctgatattgcattcgttgtcgattgctcccctgcaaatgatatcaaaggtaaacaacaactttctggtgtgttaggggaggggactttaattcgtatcaaagatggtactatgatacttaaaccattatttagagattatctccttaagctagcagaagaaaatcagattgcatatcaatattatatatcaccaggtggtacagatggtggggagattcataaagaaaatgaaggtataccaacagctgttattggagtatgtgcgcgttatattcatagcactgatgcggtctttgatattagagattatttttctgcacgtcacttgctaaaagaaagtattattcatttaacaagtggacaaattcaacaattacaatatggaaaggaattttga

SEQ ID NO: 5132 - DNA, 315 bp, Staphylococcus epidermidis; identical to SEQ ID NO: 4506

SEQ ID NO: 5133 - DNA, 651 bp, Staphylococcus epidermidis; identical to SEQ ID NO: 4505

SEQ ID NO: 5134 - DNA, 792 bp, Staphylococcus epidermidis; identical to SEQ ID NO: 4504

SEQ ID NO: 5135 - DNA, 849 bp, Staphylococcus epidermidis
atgacaaaagtttttataaatggtgaatttgttaatgaagaggatgctaaggtttcatacgaagatcgaggctacgtgtttggggacggaatctatgaatatatacgggcatatgatgggaaattgtttaccgttaaagagcattttgaaagatttttaagaagtgctgaagaaataggactagatttaaattatactattgaggaattaattgaattagtacgccgattattaaaagaaaataatgtagtgaatggcggtatttatatacaagctactcgtggtgctgctcctcgaaatcattcatttcctacaccacctgtaaaacctgttattatggcgtttacaaaaagttatgatagaccttatgaagaattagaacaaggagtttatgccattacaactgaagacattagatggttacgttgtgatattaaaagtttaaatttattaggaaatgtattagctaaagaatatgctgttaaatataatgctgcagaggctatacaacaccgaggtgatattgtcactgagggtgcatctagtaatgtttacgcaattaaagatggagtgatatacacgcatccagttaataattttatattgaacggaattactcgccgtgtcataaaatggatagcagaggatgaacaaataccattcaaagaagaaacatttacagtagaatttcttaaaagtgctgatgaagttatcatttctagtacttctgcagaagttatgccaattacaaaaattgatggtgaaaatgttcaagacggacaagttggtactataacacgacaattacaacaaggatttgaaaagtatattcaatcgcatagtatttaa

SEQ ID NO: 5136 - DNA, 1410 bp, Staphylococcus epidermidis
atgtggaaagaaaaggttctagagtacgaaaatcaaatgattgaagatcttaaaggtttattatctatagaaagcatcagagatgattctaaagccactgctgatgcacctgtgggaccaggaccgagagaagctcttgattacatgtacaatttaggtaaaagagatggtttttcaacgcatgacgttgatcatatagctggtagaattgaagctggtaaaggagaagatgtattaggtattttatgtcatgtcgatgtagtacccgcaggcgatgggtgggattcaaacccattccaaccagtagtgacagacaatgcaattatagccagagggacactggatgataaaggacccaccattgctgcctattatgcagttaaaattttaaatgagatgaaggtagattggaaaaaacgtatacacattattatcggaactgatgaagaatcagattggaaatgtacagacagatatttcaaaacagaagaaatgcctgccttaggttttgctccagatgcagaattcccagctatacatggtgaaaaaggtataacaacctttgatttagtacaaaatgaagtgacggaagatacagatgaacctgactatgagttattaaaatttgaatctggtcaaagatacaatatggttcctgattatgctaaggcagaagtgctcgtcaaagaaaatatgacagatgtcattcaaaactttgaaaactttttacaacaaaatcaactacaaggtgaaagtacagttgacagtggtattttaatattaacaattgagggtaaagcagttcatggcatggatccatctttaggtgttaatgcaggattgtttttacttaaatttttagcaagtcttaatctaaataaaagcgcaaaagatttcgtagaattcaatgagcgatacttatttgaatctcactttggtgaaaaaatgggtatgaagttccatactgatattatgggaaatgtcactactaatatcggggttatcagttatgataaagaaaaagcaggccgttatggtattaatctaagatatcccgaaggatttaaatttgaagacgcaatcgatagatttagaagtgaaattaatgaactaggttttaatttaaaacttggtaaagttcaaaaaccacactatgtcgataaaaatgatccatttgtaaaaacacttgtaaacgcatatagaaatcaaacaggtgatatgactgaaccatatacgattggtggaggaacatatgcgagaaatttagataagggtgtcgcatttggtgcgatgtttgcagattcagaagatttaatgcatcaaaaaaatgagtatataactaaaaagcaattgatcaatgcaacaagtatttatttagaagctatttacgctttatgtgtggaggattaa

SEQ ID NO: 5137 - DNA, 429 bp, Staphylococcus epidermidis
atgggaaaaagtactaatttatttaaaattgcattaggcattggtggtgcaatttctgctgtagcattatcacgtaaagaaagtcgagataaacttaaacaagaatataataaatataaagaaaatcctgaatcatataaatctagcgctaaagatttagcaactcaaataggtaataaagctaatgaaacacttcaagaagttaagaagaaccctaaagattatgttgaacgtatcaaaagtaatcctaaagaatttttagaagaagaaaagtctaaaattattggcaaaaatgatcagacacaagatgatattgaagaaggaaaatttgatgctgaaggcggcgcaactgtcaataacaatttaagagttgttactgaagatgacttaaaaaataataaaaatgcattacaagataaaaaagaataa

SEQ ID NO: 5138 - DNA, 693 bp, Staphylococcus epidermidis
atgagattagataaatttctagctaatatgggtgttggaacgcgatcagaagttaaacagttactcaaaaaaggatctgttaaagtcaaccaaaatatagttaagttacctaaacttcatgttaatcctaattctgatgagataatggtaaatgatgaagtagttagttatatcgacaaagtgtatatcatgttaaacaaacctaaaggttatatttcagcgacagaggatgagttgcatcctactattattgatttgctacctgaatatgcacatttaaatatttttccggtcggacgtttggacaaagatacagaaggattactccttgttacaaatgatggacagtttaatcatgaagtaatgaatcccaataagcatgtttcaaagacttatgaagtctattcaaaacacccaataactcaattcgatattgataaatttaaatccggaatagaattatcagatgggaaattaaagcctgcaattttaaagaaagttgatgattatgtatcacatgtcaccatttacgaaggaaaatatcatcaagttaaaagaatgtttcatagtatcgaaaatgaggtattagaattgaaacgcataaagattgctcaactagaactagatcataatttagatttgggtagttatcgtttgttaacacaaatagattttgataatcttaagaactaa

SEQ ID NO: 5139 - DNA, 1662 bp, Staphylococcus epidermidis
atgagtgaaagtaaagaaatggttcgtggaacctttttaattacaataagtattttaattacaaaagtattaggtgtcttatttattattccgtttactgctttaataggtggacaagccaacatggcaccttttacttatgcttatgcaccatacaatatagctatagctatagcaacagctggtgttccgcttgccgcgtcaaaatatgttgctaaatataatgcactgggtgcatataaggtcagtcagaagttttataaatcaagttttgtagtcatgagtattacaggaattgtaggtttcctagttttatatttattagcaccatacatagctgaactaaccttatcacgtaatactcatggtaatagtggatggacagtagctgatatcacttggattattagaataataagtatggtagttatatttattccagttctcgcaacttggagaggaatatttcaaggatacaaatcgatgggacctactgcagtgtcagaagttacagagcaaattgcaagaattgtatttattttagtaggtagttatttaacgctcaatgtatttggaggtacagttcttcaggcaaatggtattgcaacgtttgcagctgcaataggtgcaatcgcaggaatacttacattatggtattactggattaaaagaagaaaaaatattaaaaaaatggtcgactcagatacagcgaatctaaatgtttcatacgggaaaatgtataaagaaattattgcttatagtataccgtttgtcatagtaagtttgaattttccactatttaatttggtcgatcagtttactcataatggtgcgcttaaccttgtaggtgtcaaacctggtttgcaagatatattctttaacatgttaaacatgtctacaaacaaaatagtaatgattccaacatcattaagtgctggatttgctgtcagtttaataccatttataactaaaacctatgaagaaggtagatatgcagagatgcatcgacaaattagaacttcgattggagttttaatgttcattactgttccagctagtattggtatcatggcattagcgcaacctttgttcacagtattctatggttttgatccagttgttcacggtcacgatccaaatttcgatggaagtagattattattttattatgctcctgttgcaattttaatttcattattaagtgttacagcatcaatgttacagggtatcgataaacaaaaactaacagtttttgttattttaggatctgttttaattaaactgattctcaattatcctttaattatgttattacacacacctggcgctgtattaagtacagcaatagctttattatttgcaatttgttgcaatttctatattcttaaaaaatatgcaaactttaaatttagttacagttggatacatttagctaagattattctaatttcaatcatcatgatgattggggttgaggtgattttcttcattttaagattattcttggaaccaactagatttaattacttgattattgttgcaattggtgtcattgtgggagcaatcatttatggtggtattacaatcaagactaaattagctgatgaatttttaggtgatattcccgctaaaataagacgtaaagtgaagatgttgcgatga

SEQ ID NO: 5140 - DNA, 1263 bp, Staphylococcus epidermidis
atgtatcaaacaattgttatcggaggtggcccaagtggggctatggctgcggttgctgcaagtgaaaaaaataaatcagttttattaatcgaaaagaaaaaaggtcttggacggaaactaaaaatctcaggtggtggtcgttgcaacgtaactaatagacttccatatgatgaaatcataaaaaatattccgggtaatggtaaattcctatatagccctttttcagtttttgataatctttctattataaatttttttgaaacccgtggagtcaaacttaaagaagaagatcatggtagaatgtttccagtttcaaataaatctcaagatgttgttgatgtgcttattaaccaactcaaagaaaatcatgttgaggttaaggaagaaacaccagttgtcagtgtttcgtatgaccataattttaaagttaaaacacaaataggtgaatttgaaagtcacagtttaattattgctacaggcggtacatcagttcctcaaaccggttctactggagatggttacaaatttgcaaaatctctaggtcattctataacagaattattccctactgaagtgcctatcacttcatcagaaacttttatcaaatcaaatcgcttaaaagggttaagtttaaaagatgttaatttatcggtcttaaagaaaaatggtaaaaaaagagtaagtcatcaaatggatatgatattcacacattttggaattagtggtcctgctgctcttagatgtagtcagtttgtttataaagagcagaaaaatcaaaaaaagaaaaatatccatatgcaattagatgtttttcctgaactaaacgtagatcaactatctcaaaaagtgagaaaaatacttaatgcagaaccagataaatatattaaaaatagcttgcgaggattaatagaagagcggtatttattgtttattctcgaacaatctggtattaatgatgaaatgactgcacatcatttatcaaatcaacagtttcaaacttttattaatcttctaaagacttttacctttacagtagatggcacacttccattagacaaagcttttgtgacaggcggcggtatttctttaaaagaaatagaaccaaaaactatgatgtctaaattagtgccaggattatttttatgtggcgaagtcctagatattcatggatacactggaggttataatataacaagcgcattagttacgggtcatgttgctggaatgtttgctggtgaatttaaaatagatcaaaacaaataa

SEQ ID NO: 5141 - DNA, 7797 bp, Staphylococcus epidermidis
ttgattgctaaaacaaatgaaaggcagagtacgattaatactgacaatgaaggcactatagaagaaaaacaaaaagcaattcaaagtttgaatgatgctaaaaatttagctgatgaacaaattacacaggctgcttctaatcaaaatgtcgacaacgccttaaatataggtataagtaatatcagtaaaatacagactaatttcactaaaaagcaacaagctagagaccaagtaaatcaaaagttccaagaaaaagaagctgagttaaattcaacacctcatgcaactcaagatgaaaaacaagatgcgttaactagattaacacaagcaaaggaaactgcactcaacgacataaatcaagcacaaacaaatcaaaatgtggatacagcacttactagtggaattcaaaatattcaaaatacacaagttaatgttaggaaaaagcaagaagccaaaactacgattaatgatattgttcaacaacataaacaaactatacaaaataatgatgatgctacaactgaagagaaggaagtcgcaaataatttagttaatgcatcacagcaaaatgtaattagtaaggttgataatgctacaacgaataatcaaattgatggtattgtgagtgatagtagacaaagcataaatgcaattacacctgatacatcaattaaaagaaatgctaaaaatgatattgatattaaagcagctgataagaaaataaaaattcaaagaataaatgatgctacagatgaagaaattcaagaagcgaatcgtaaaattgaagaagctaagattgaagcaaaagataatattcaacgcaatagtactagagatcaagtaaatgaagcgaaaactaatggaataaataaaatagaaaatataacaccagcaactactgtgaaatctgaagctagacaagcagtacagaataaagcaaatgaacagattaatcatattcaaaacacgcctgatgcaactaatgaagaaaaacaagaggcaataaatagagtaagtgctgaattagcaagagttcaagcacaaataaatgcagaacatacaacccaaggtgtcaaaactatcaaagacgacgcgataacttctttatctcgaattaatgcacaagttgttgagaaagagtctgcaagaaatgcaatcgaacaaaaggcaacacaacaaacgcaatttattaataataatgataatgctacagatgaagaaaaagaggtcgccaacaatttagttatcgctacaaaacaaaaatcattagataatattaactccttatcttcaaataatgatgttgaaaatgctaaagtagcaggaataaatgaaatagctaacgttttaccagcaaccgctgttaagtcaaaagcaaaaaaagatattgatcaaaaactcgcgcaacagattaatcaaattcaaacgtatcaaactgctacaactgaggaaaaagaagcggctattcaattggcaaatcaaaaatcaaatgaagcaagaacagcaattcaaaatgaacatagtaacaatggtgtcgcacaagctaaatctaacggcattcatgaaattgaattagttatgccagatgcgcacaaaaaatctgatgctaaacaaagtatcgataataaatataatgagcaaagtaatactatcaacactacaccagatgcaacagatgaagaaaagcaaaaagcattagataaattaaaaatagctaaagatgcaggatacaacaaagttgatcaagcgcaaacaaaccaacaagtatctgatgcaaaaactgaggctatagatacgataactaatattcaagcaaatgttgcaaaaaaaccatccgctcgagtggaattagattcaaagtttgaggatttaaagcgtcaaatcaatgcaacgcccaatgctacagaagaagaaaaacaagatgcaattcaaagattgaatggtaaaagagatgaagttaagaatctaataaatcaagatagacgtgacaatgaagttgaacagcacaaaaatattggacttcaagaattagaaacgattcatgctaatccaactagaaaatctgatgcgctccaagagttacaaactaaatttatttcacaaacagagttaattaataataacaaagatgcaactaatgaagaaaaagatgaagccaaacgacttcttgagattagtaaaaataaaactataacaaatatcaatcaagcgcaaactaataatcaagttgataatgctaaagataacggcatgaatgagattgctaccataataccagcaacaacaattaaaacagatgcaaaaacggctattgataaaaaagctgagcaacaagttacaatcatcaatggtaacaacgatgcaacagatgaagaaaaagcagaggctagaaagctggttgaaaaagcgaaaattgaagccaaatctaatattacaaatagtgatactgaaagggaagtcaatggtgctaaaaccaatgggttagaaaaaataaacaatattcaaccatcaactcaaactaaaacaaatgctaagcaagaaataaatgacaaagctcaagaacaattaatccaaattaataacacgcctgatgcaaccgaagaagaaaagcaagaggcaacaaatagagtcaatgctggattagcacaagcaatacaaaatattaataatgcacatagtactcaagaagtaaatgaatctaaaacaaatagtattgctacaatcaagagtgtacaacccaatgtgatcaaaaaaccgactgctataaatagtttgactcaagaagctaataatcaaaagacgttaataggtaatgatggtaatgctactgatgatgaaaaagaggctgcaaagcaattagtgacccaaaaattaaatgaacaaattcaaaaaattcatgaaagtacacaagataatcaagttgataacgtaaaagcacaagctatcactgcaattaaattgattaatgcaaatgcacataaaagacaagatgccattaatattttgactaatctagctgaaagtaaaaaatcagatataagagccaatcaagatgcaactactgaagagaaaaatacggcaatacaatctatagatgatacgttggcacaaacacgtaacaatattaatggtgcaaatacaaatgcgttagtggatgagaatttagaagatggtaagcaaaagttacaacgtattgtgttgtcaactcaaactaaaacacaagctaaagcagacattgctcaagcaataggtcaacaaaggtcgacaatagaccagaaacaaaatgctacaacagaagaaaaacaagaagcccttgagagacttaatcaagaaacaaatggagtcaatgatagaatacaagcagctttagcaaatcaaaatgttacagacgaaaaaaataatatattagaaacaataagaaatgttgaacctattgtaattgtaaaaccaaaggctaatgaaataattagaaaaaaagctgcggaacaaacgactttaataaatcaaaatcaagatgcgacactagaagaaaaacaaatagcacttggcaaattagaagaagtaaagaatgaagcgttaaatcaagtatcacaggcacactcaaataatgatgtgaaaatttcggaaaataatggaattgctaaaatttctgaggtccatcctgagactataattaaacgtaatgctaaacaagaaattgaacaagatgcgcaaagtcaaattgatactatcaatgcaaataataaatcaactactgaagaaaaatcagccgctatagatagagttaatgttgctaaaattgatgctattaacaatattactaatgctacaactacacaattagttaatgatgctaaaaatagtggtaacacgagtattagccaaatattaccaagtacagcagtcaaaactaatgcattagcagctctagctagcgaagctaaaaataaaaacgctataatagatcaaacaccaaatgcgacagcagaagaaaaagaagaagcaaataataaagttgatcgtcttcaagaagaagcagatgctaatatcctaaaagcgcacactactgatgaagttaataatattaaaaatcaagctgttcaaaatattaacgctgttcaagttgaagttatcaagaaacaaaacgttaaaaaccaattaaatcaattcattgataatcaaaagaaaattattgaaaatacgcctgatgcaacactagaagaaaaagctgaagctaatagattgcttcaaaatgtactaacttccacatcagatgaaattgctaatgtagatcataacaacgaggttgatcaagctttagataaagctagaccaaaaatcgaggcaattgtaccacaagttagtaagaaacgagatgctttaaatgcaatccaagaagcatttaattcacaaactcaagaaatacaagagaaccaagaagctacgaatgaagaaaaaactgaagcattaaataaaataaaccaattacttaatcaggctaaagtaaatattgatcaagcacagtcaaataaagatgtagataatgcgaaaacacgtagtattcaagatatagagcaaattcaaccacatccacaaacaaaagcaaccgggcgtcacagattaaatgaaaaagctaaccaacaacaaagtactattgcaactcatcctaattcaacaattgaagaaagacaggaagcaagtgcaaaactacaagaagttcttaaaaaagccatagctaaaatagataaaggtcaaaccaatgatgatgtagaaaagactgtagtaaacggaatagctgaaattgaaaatatattacctgctactacagttaaagataaagctaaagctgatgtaaatgctgaaaaagagcagaaaaacatacaaattaatagtaatgatgaagcaacgactgaagaaaaattagttgctagtgacaatttaaatcacgttgtcgagacaacaaatcaagctattgaggatgcaccagataccaaccaagtgaatgtagaaaagaacaaaggtataggtacaattagagatattcaaccacttgtagttaaaaaacctactgccaaatctaaaattgaaagcgcagtagaaaaaaagaaaactgaaattaatcaaacacaaaatgcaactcatgatgaagtaagagagggtttaaatcagttaaatcaaattcatgaaaaagccaaaaatgatgtaaatcaatctcaaactaatcagcaagttgaaaatgctgagcaaaatagtttagatcaaatcaataacttcagaccagattttagtaaaaaacgtaatgcagtagctgaaattgttaaagcgcaacaaaacaaaattgatgaaatagagcaagaatttagtgctacacaagaggaaaaagacaatgctttacaacatttagatgaacaggttaaagaaatcattaattctataaatcaagctaatacagataatgaagtagataatgctaaaacttctgggttgaataacataactgaatacagaccagaatataataaaaagaaaaatgctatattaaaattatatgatgtttcagatactcaagaagctataattaatggttatcctgatgcaactgaagatgaacttcaagaagctaatagtaagttaaataaaatacttttagatgcaaaaaaacaaattggtcttgcgcacacaaataatgaagttgatgatatttataatgaagtttcccaaaaaatgaaaactattttaccacgtgtagatacaaaagcggtagcacgttctgtacttaatgcacttgctaaacaattgattaaaacttttgaaaatactgcagatgttactcacgaggaacgtaatgatgcgattaatcatgtaaaagaacaattatctttagtattcaatgccattgaaaaagaccgaaaggatatacaagttgcgcaagatgaattatttggattaaatgaattaaatagtatatttatcaacataactcaaaagccaactgccagaaaagcaattagtggtatggcgagtcaattaaacaactctatcaataatacgccatatgctacagaagaagaacgacaaattgcactgaataaagttaaggcgattgttgatgatgcaaatgaaaaaatacgagaagctaacactgatagcgaagtacttggaacaaaatcaaacgcaataacattgttacaagcaatcagtgcggatgtacaagttaaaccacaagcatttgaagaaatcaatgcacaagctgaaattcaaagagaacgtattaatggaaatagtgatgcgacaagagaagaaaaagaagaagctttaaaacaagttgatacattagtaaatcattcatttattacaattaataatgttaataaaaatcaagaagtttatgatactaaagacaaaacgattgaagctattcataaaatcaaaccaatatcaactatcaaaccacaagcattaaatgaaatcactattcaactagacgctcaacgtgatttaataaagaataataaagagtctacagttgaagaaaaagcctcggctatcgataaattaattaaaactgcagcaagaatagccgaagcaatagataaagctcaaacaaatgaagaagttaaaaatattaaaaaacaaagtattgatgaaatttctaaaatactacctgttattgaaattaaatcagctgcaagaaatgaaattcatcaaaaagcagaagttattcgcggattaattaatgataatgaagaagcgactaaagaagaaaaagatatcgcattaaatcaattagacacaactctaacacaagcaaatgtttcaattgaccaagcattaacaaatgaagctgttaatagagctaaagaaatagcaaattctgaaattaataaaatttctgtcattgccattaaaaagcctgaagctatagcagaaattcaagaactagcagataaaaaattaaataaatttaaacaaagtcaagaagctactattgaagaaaagcaatcagctatcaatgaattagaacaagctttaaaatcagctattaatcatattcatcaatctcaaaataatgaatcagtgagcgctgcattaaaagaaagtatatctttaatagactcgattgaaattcaagcacataaaaaattagaagctaaagcatacattgatggatatagtgacgataaaattaatgacatatcttctagagcgactaacgaagaaaaacaaatatttgtaagtaaacttaaagcattaatcaatcgtgcacataaacagattgacgaagctgaaacatttgtttcaattgaaacaattgtccgaaactttaaagttgaagcggataaattaaactcaattgtacgtaaaaaagctaaagcatcgaaggaaattgaattagaagcagaccatgtaaagcaaatgataaatgcaaatttaagtgctagtactagagtgaaacaaaatgctcgtacattgataaatgaaattgttagtaacgctttaagtcaacttaataaagtaaccacaaataaagaagttgatgaaatagttaacgaaacgattgaaaaacttaagtcaatacaaataagagaagataaaatattgagtagtcaacgttcatcaacatctatgacggaaaaatctaatcaatgttatagttccgagaataatacaattaaatctctaccagaggcaggaaatgctgataaatcactaccattagcaggagttactttaatatctggtttagcaatcatgtcctcacgtaaaaagaaaaaagataaaaaagtaaatgactaa

SEQ ID NO: 5142 - DNA, 3285 bp, Staphylococcus epidermidis
atgaatctatttagaaaacagaaatttagtattagaaaatttaatataggtattttttcagcattaatagctacagtcgcatttttagctcatccggggcaagcaacagcatcagaactggaaccttctcaaaataatgacactacagctcaatctgatggagggttagaaaacacatctcagtctaatcctataagtgaggaaaccacaaatacattatctgggcaaacagtaccttcatctactgaaaataagcaaacacaaaatgttcctaatcataacgctcaaccaattgcaataaatactgaagaagctgaatctgctcaaacagcatcttataccaatatcaatgaaaataatgatacgagtgacgatgggttacatgttaatcagccggctaaacatcatattgaagcccaatctgaagatgtaacaaatcacacgaactcaaatcattcaaattcatcgattccagaaaataaagctacaacagaatcatcaagtaaacctaaaaaaagagggaaaagatcattagatacaaatagcggaaatgacacgacaagtacaactcaaaatacggatccaaatttaagtaatacaggtccaaatggcattaacactgtaattacatttgatgatttaggaattaagacaagtactaatcgctctcgacctgaggtaaaggtagttgatagtctaaatggctttacaatggttaatggtggtaaggtcggtttattaaatagtgtgttagaacgtacaagcgtgtttgatagtgccgatccgaaaaattatcaagcaatagataatgtcgtagccttaggacgtattaaaggaaatgatccgaatgatcatgatggtttcaacggtatagaaaaagaattttcagtgaaccctaattctgagataatattttcatttaatacaatgactgctaaaaacagaaaaggtggaactcaattagttttaagaaatgcagaaaataatcaagaaattgcttcaactgatattcaaggaggcggcgtatatcgtttattcaagttacctgataacgtacataggttaaaagttcaatttctacctatgaacgaaatacactcagattttaaaagaattcaacagctacatgatgggtatagatactattcttttatagatacaattggtgttaattctggttcacatctatatgtgaaatcaagacaagttaacaaaaatgtaaagaatggtaaagaatttgaagttaatactcgtatagagaataatggtaacttcgctgctgctataggtcaaaatgaacttacttataaagtaacactaccagaaaatttcgaatacgttgataattcaactgaagtttcatttgttaacgggaatgtgcctaattctacggtaaatccgttttcagttaatttcgatagacaaaatcatactttaacgtttagtagtaatggtttaaatttaggaagaagtgctcaggatgttgctagattcttgcccaataaaatactaaatattagatacaagcttagacctgtcaacatctcaacgccacgtgaagtgactttcaatgaagcaattaaatataagacattttctgaatattacattaacactaatgacaatactgttactggtcaacaaacacctttcagtattaatgtcatcatgaataaagacgatttatcagaacaggtcaataaggatatcatcccatcgaactatacacttgcttcttataataaatataataagttgaaagaacgtgctcagactgttctggatgaagaaacaaacaatacaccttttaaccaaagatactctcaaactcaaattgatgatttgttacacgaattacaaacaacactaataaatcgtgtgagtgcttcgagagaaattaatgataaagctcaagaaatgactgatgctgtatatgatagtacagaattaactactgaagaaaaagatacattagttgatcaaattgaaaatcataaaaatgaaatttctaataacattgatgatgaacttacagatgatggtgttgaaagagtcaaagaggctggattacatactctagaaagtgatactccacatccagtaacaaaaccaaatgcacgacaagttgtgaataacagagcagatcaacaaaagacgcttatacgtaacaatcatgaggcaactaccgaagaacaaaatgaagcgattagacaagttgaggcacattcatctgatgctatcgccaaaataggtgaggcagaaacagataccactgtaaatgaagctagagacaatggtacgaaattaatagctacagatgttccaaatccaactaaaaaagcagaagctagagcggcagttaccaacagtgcaaattcaaaaattaaggatatcaacaataatacacaagcaacattagacgagagaaatgatgctatcgcacttgttaatagatcaaaagatgaagcaattcaaaatattaacactgcacaaggtaatgatgatgtcactgaagcacaaaataatggaacgaatacgatacaacaagtaccattaactccagtgaaaagacaaaatgcaatagcaactatcaatgctaaagcggatgaacaaaaacgtttaattcaagcaaacaataatgcaacgactgaagaaaaagctgatgcagagcgtaaagttaatgaagcagtcataactgcaaatcaaaatattaccaatgcaactactaatagagatgttgatcaagcacaaacaactggaagtggtatcatatctgctattagtcctgcaacgaagattaaagaggatgcacgtgcagcagtagaagctaaagctattgcacaaaatcaacaaattaattcaaataatatggcaacaactgaagaaaaggaggatgcattaaatcaagtagaagcacataagcaggccgcaatagcaactatcaatcaagcgcagtcaactcagcaagtttctgaagctaagaataatggcataaatactattaatcaagatcaacctaacgcagttaagaaaaataatacaaaaacaatattagaacaaaaaggaaacgagaaaaagtcagcaatagctcaaacacctgatgctaccactgaagagaaacaagaagctgtcagtgctgtttcgcaagctgttaccaatggcattacccatatcaaccaagcaaattctaatgatgatgttgatcaagaacttagtaatgcagaacaaattattactcaaactaatgtcaatgttcaaaaaaatctcaagccagacaagcattga

SEQ ID NO: 5143 - DNA, 312 bp, Staphylococcus epidermidis; identical to SEQ ID NO: 4496

SEQ ID NO: 5144 - DNA, 2418 bp, Staphylococcus epidermidis
gtgttgaattataatcataaggaaattgaaaaaaagtggcagaattactgggaagaaaataagacctttaaaacgaatgataatttaggacaaaagaaattttatgcattagacatgtttccttatccatctggtgctggtttacacgtaggtcatccagaaggatatacggcaacggatatcatctcacgatataaaagaatgcaaggttacaatgtattacatcctatggggtgggatgcttttggtttgccggcagaacaatatgctttagatactggtaatgatcctcgtgaatttacacagaaaaatattcaaactttcaaaagacaaattcaagaattaggatttagttatgattgggatagagaagtgaatactacagatcctgaatattataaatggacgcagtggatatttattcagttgtataataaagggttagcttatgttgatgaagttgctgtcaattggtgtcctgcattaggtactgttttgtcgaatgaagaggttgtcgatggggtatcagaacgtggcggtcatcctgtttatcgtaagcctatgaaacaatgggtactcaaaattacagaatatgctgatagattactagaagatttagatgagttagattggcctgaatcaattaaagacatgcaacgaaactggattggacgttcagaaggtgccaaagtaacatttaaaattgagcaatctgaccaaaatattgaagtgtttacgacacgaccagatacaatctatggtacttctttcttagttttaagcccagaacacccacttgtgaatgaaattacgacaagtgataaagaacaagaagtcaaattgtatcaaaatgaagcatcaaaaaaatctgatttagaacgtacggacttagctaaagaaaaaacaggtgtgtttactggagcatttgcaattaatccgctctctggcgataaattacctatttggatagcagattatgttttatcaacttacggtactggtgcagtaatggctgtgcctggacatgatgagcgagatcatgaatttgctacgaagtttaatttaccaattatcgaagttatagagggtggcgaagttcaaaaatatgcatacacaggcgaaggaaaacacattaattctggagaattagacggtctagaaaatgaagcggcaataagtaaagcgatagaattgcttgaatctaaaggtgctggtgagaaaaaagtcaattataaattacgtgattggttatttagtaggcaacgttattggggagaaccaattcctattatacattgggaagatggatcaatgactacagttcctgaagatgaattgcctttactacttccagaaacagatgaaattaagccatcaggtaccggtgaatccccacttgcaaatatagatgcgttcgtaaacgttatcgatgaaaagacaggtatgaaggggcgccgagaaaccaatacaatgcctcaatgggctggcagttgctggtactatttacgttacattgatccacataacgaaaaaatgatagcagatcctgaaaaattaaagcattggctacctgttgatttatatattggaggcgtggaacatgcagtacttcacttattatatgcaagattctggcataaagtgttatatgacttaggtgttgtaccaacaaaagaaccattccaaaaactatacaatcagggaatgattttaggcgaaggcaatgaaaaaatgagtaagtctaaaggtaatgtgattaatccagatgatattgttgcatcacatggtgctgatacattacgactatatgaaatgtttatgggacctttagatgctgcgatcgcatggagtgaaaaaggtttagatggttctagaagattcttagatcgtgtttggagacttatcattactgatgaaaattcaatcaataaaaaaattgtagattctaacaatcattcacttgataaggtttacaatcaaactgtgaaaaaagtaacagaagattttgatacacttagttttaatactgcaatcagtcaattaatggtgtttattaatgagtgttataaaaccaatgaagtttacaaacctcatatcgaagggtttgtaaaaatgttagcgcctattgcaccacacattggtgaagaattatgggatcgattagggcatgaaaataccattacttatcaaccatggccaacatttgatgaaagtttattagtagatgatgaagttgaaatcgtagttcaagtcaatggtaaagttagagcaaaaatcaatattccaaaagatttatctaaagaagaaatgcaagacttagccttgtctaatgataatgttaaaatgagtattgaaggaaaagaagttaaaaaagttattgctgtacctcaaaagctagttaatatagttgctaaataa

SEQ ID NO: 5145 - DNA, 1215 bp, Staphylococcus epidermidis
atgaatatacctaaatcagtatggtggctagttataggtatggcacttaatataaccggcgccagttttttgtggcctttaaatacaattttcatgaaggaagaacttcataagagtttaacaattgcaggtatcgttttgatgattaattcatttggaatggttgtaggtaatttgttaggtggttctttgtttgataaacttggtggttacaaaacgattttaataggtacatttacgtgtttatgtagtaccacattactcaacttgtttcatggctggccatggtatgcaatttggttagtactacttggatttggtggtggaatgatagttcctgctatttatgcgatggcaggtgccgtttggcctaatggaggaagacaaacttttaatgctatctacttagcacaaaatataggggttgctttaggcgcggcattaggaggttttgtggctgaatttagtttcaattatatttttatggcaaacctcattatgtatgtactttttgccatcgtggcgattacacagttcaatttagagattaatgctaaatttaaaccacaagattcgatagatttaaaaagcaaagaaaataaaaaacgatttactgctatgatgctagtatgtgcaatgtttgcaatttgttggattgcatatattcaatgggaaacaacgatagcttcatttacacaatcaattaatatttcaatgtctcaatatagtgtattatggacaatcaatggaattatgattttagtagctcaacctttaataagaccaattattatcttattaaaaggtaatttaaaacatcaaatgtttgtaggtattttaatttttatgagttctttcctagtgacgagttttgcaaatcactttgctatatttgtagttggcatggtcattttaacttttggagaaatgtttgtttggcctgcagtaccaactatagcaaatcaacttgcaccagttggaaagcaagggcaataccaaggatttgttaattcagcatctacagtgggtaaagcatttggaccatttattgggggtatacttgtagatacatttaatatgagtatgatgtttattgggatgattatattattaagttttgcactgttatttttaagtttctatgataaagtgttacccaagaattttaaaaatcaacatcaatcaagaagacgacgaaatcagaatggtatttaa

SEQ ID NO: 5146 - DNA, 954 bp, Staphylococcus epidermidis
atgggtaactatttcccgtatgcctttgaagataaacgctatcacacatggaactatcatttaaaaaacaagtttggtcagaaaatatttaaggtcgcattagacggaggttttgattgcccaaatagagatggtactgtagctcatggaggttgcacattttgttctgcagcaggaagcggtgactttgcaggtaatagagctgaaccaattgaagttcaattcaaaaaaataaaagaacgtatgcatgaaaaatggagtgaaggtcaatatattgcatactttcaggcgtttacaaatacgcatgcacctgttgaagtactaaaagaaaaatatgaacctgtcttaaaagaagatggcgtcgttggtttatcaatcgcgacaagacctgattgtttgcctgatgatgttgtagaatatttagctgaacttaatcagcgcacttacttatgggtagaattgggcctacaaactgtgcatcagtcaacttccgatttaataaatcgtgctcatgatatgcaaacatactatgacggcgtaacaaaattacgcaaacataatataaatgtttgtacgcacataatcaacggcttaccaggtgaaaattatgacatgatgttggagactgctaaagaagtcgctcagatggacgttcaaggtattaaaattcatttattacacttgctaaaaggaacgcctatggttaaacaatatgaaaaaggtatgctcgagtttatgagtcaacaagattataccaatcttgtttgtgatcaacttgaagtattacccccagaaatgattgtgcacagaatcactggagatggacctatagatctaatggtcggaccaatgtggagtgttaataaatgggaagtattaaatgaaattgataatgagcttgctagacgaaactcctatcaaggtaaaatgaacaagcagagtatacaatcatga

SEQ ID NO: 5147 - DNA, 564 bp, Staphylococcus epidermidis
atgaaactagaacgtattttacccttctctaaatcgttaattgattctcatattaatcataatagtattgtaattgatgcaacatgtggtaatgggaatgatactgcttattttgctcaacatgttccaaatggacttgtctatggattcgatatacaagaacaagcaattttgaatacgcacaaaaaaacaaaagattattcgaatgtaaaattaatccaatctggtcatgaaaatgctaaattgcacattcccgcccaacatcacggttgcatagatgctgctatttttaatttaggttatttaccgaaaggtaacaaagaaattgtcactaaacctgaaacaacaattatggctattaatgaaatctttgatatcttaagtattgaaggaattattatattagttatatatcacggtcatgaagaaggtaaagtagaaaaagaagcactacttgaatttttacaaaactttgatcaaaataaagctcatatattgcaatatcaattcataaatcaaaagaataacgctccttttatctgtgctattgaaaagcgtaattaa

SEQ ID NO: 5148 - DNA, 402 bp, Staphylococcus epidermidis; identical to SEQ ID NO: 4491

SEQ ID NO: 5149 - DNA, 828 bp, Staphylococcus epidermidis
atgtggaagtgggaaacagaaaatgacgcaaaaggcgttgttgtcattgctcataatattttagaacatacaggtagatatgcatatgttatcacgatgttaagacgaaatggttaccacgttatcatgggcgatttaccgggacaagggcaaacttcacgagctcaaaagggacaaatagatgattttaatacgtatcatgaaaatatattagagtggataaaaatagctaatgaatataaaattccaacatttgttttaggtgtgggactaggtggtctcatcattttaaatctgcttgagaaaacagaattacctattgagggtatcttgttattttcacctatgttagaactaaagagagactataaagggcgcaaaaataaattgatttctaatgttggtaaaatttctaaagatactagatttaaagttggtataactcctcaagatttaacacgtaatgatgaaattattgaagaaacagcaaatgatggactaatgcttaaaaaggtaacatatagttggtataaccttataaatgaaaagatgaaagaaacaatggatcatatcagagatattaaacctatttcagcattgataatgtttggtaccaatgataaaattttagaaactcaatctattaatgaaatgaaagataaattaaagtcgaaagagatgtactttaaagtttgggatggattatatcatgaaatacataatgaacctgaacgcgatttggtgatgagatatgttctatcatttttaaataatagtgtaaatactatgggttttatagtaaatgaagaggaaattgaagacatttaa

SEQ ID NO: 5150 - DNA, 1002 bp, Staphylococcus epidermidis
atgtccttatttaaagattttttcattgcgttatctaatcatacatatcttaataaaatagctaaaaagatgggacctcaaatgggagcaaatcgtgtagtcgcaggaaatacgattcatcaattaattgagactatacaatatttaaatgattataatatttcagttactgtcgactcattgggtgaatttgttaatactagagaagaaagcattaaagctaaagaagagattttagaaattatcgatgcaatatataacaataatgtaaaggcacatatgtcagtcaagataagtcaacttggaagtgagtttgatttaaatcttgcttatgaaaacatgagagaaattttacttaaagctgataagaatgggaagatgcatattaatattgatacagagaagtacgatagtctttctaaaattcaacatattattgatagattgaaaggtgaatttaaaaatgtgggtacagtcgttcaagcctatctgtatgaagccgatgatataattgataaatatcctgaattacgtttgagacttgtgaaaggtgcttataaggaagatgcgtcaatcgcttttcaatcaaaagaagaaattgacgcaaattatattagaattattaaaaaacgactactaaattcaaagaactttacatctgtggctacccatgacaatgaaataatcaaccaagtcaaacaatttatgaaagaaaatcatattggcaaagataaaatggaatttcaaatgttgtacggttttcgcacggaattagcacaaaaaatagctaatgaaggttatttttttacagtttatgtaccatacggtaatgattggtttgcgtactttatgagaagactagcagaacggcctcaaaacttgtcattagctataaaagaatttactaaacccaaaatcttaaaaaaggtaaccttgggtataggtatatttgcaactttattgacgtctcttattcttggcattaaaagacataaaaaataa

SEQ ID NO: 5151 - DNA, 930 bp, Staphylococcus epidermidis
atgaaatacggagatgatgatatgtctattcccattataattgatactgatcctggtatagatgatgctacagcaattagtatcgcactttcacaccctcaatttgacgttaaaatgatatcaactgtgaatggtaatgtaggtattgagaaaacgacagcaaatgcattaaagctaaaaaggttttttaatagttctgttcctgtacatagaggggcatcccaaccattgattaatgacatctttgaagctacatcaattcatggtgagtctggtatggatggttacgagtttccacaaataaatcaagatgatttaacatcaattcatgcagttgaagcaatgagaaatctattagtaaatactcaagaacctttaaccttgattgccataggtccactaacaaatatcgctattcttttaactagttatcccgaagttcaaccatttattaaggaaattgttttaatgggtggtagtaccggtagaggtaatgtaacgcctttagctgaatttaatatatattgtgatccagaagctgctcaaattgtatttaactctggattacctttgactatgattggtcttgatttggctcgtgaagcattgtttactcaccattttgtaaaagacttcaaagatacaaatgcaacttcaaacatgttatataatttatttcagcactataagagtgaagattttgaaataggatttaaattatacgatgtattcactatattatatttgttggatccagaagcctttaatgtcaaggaggcgtatactcaaatagaattaaatggcaactttacaaggggagccacagtggtagactttaatatggagcatcccaattgtacagttgttttaagtcctgttgaaagacagtatgaggatttattcttaaacgccctttcttattgtaaataa

SEQ ID NO: 5152 - DNA, 1203 bp, Staphylococcus epidermidis; identical to SEQ ID NO: 4228

SEQ ID NO: 5153 - DNA, 1239 bp, Staphylococcus epidermidis
atgaacaaatttataaaatattttttaatattattatcttttggtctcctcgttgttccaattatttttgctactcaattatatcaaagttcagaatcggcatttgagtcatctcaaaacactaaagattctcaacgaaagtctactttaagagattcaaaagttgatcctgaaaaacaacctatatcaattttattcttaggtatagacgataatgaaggtagagaaaaaaacgggcaaagtgtagaacattctaggtcagatgctatgatattatctacttttaatcagaaaaagcatcaaataagaatgcttagcatacctagagatactatcagttatatacctaaagttggctattacgataaaataacacatgcgcatgcatatggtggacctcttgctgctatggactcagttgaagcaacaatgaatgtaccggtagattattatgtgcgtattaatatgaaagcctttgttgaagcagttgatgaattaggtggtatatattatgacgtaccatataacttaaatgaacctaacagtgatgatactggtagaattaaaataaaaaaaggataccaaaagctaaacggcgaccaagcattagctgtagctcgaactagacaccatgattcagaccttaaacgtggtcaaagacaaatggaacttattaaaatattgttccaaaaagctcaaaatttaaaatctatagataaacttgacaatgttattagtattgtagggaaaaatgctaaacataatttaactcaaaaagaaattaagtctctagccaaaatgtatcttggtggtagtactgaaattaaaacatcacaacttaaaggtaaggatgactacttaaatgatatatactattaccacccaagcgtaaaaagtattatggaatattcaaatcttttacgtaatgatttagatttatctaaaataacaaacaaaaacgatttcttagatcaaagagtcattaaacgatatggttcactcgtacccttaacagaattagatgaagacttattgcgtaagaaccaaaaggaatcgactgatagtcagaaagagtctgattcttcatcacaaaataatgatgaagaagatcaaactaacgaacaaacagaccaaaataccttaaacggaaacgaacagtacccaaatcaacaagacaacaatcaaaccaatggtgaaaatggtatgataaataatgacaattatccttacgcacaataa

SEQ ID NO: 5154 - DNA, 471 bp, Staphylococcus epidermidis
atgagtcgtaaaacatatgaaaaaattgctaatattaatggtatgttcaacgtacttgaacaacaaatcattcatagtaaagatatggcattatttagaaatgaatttttctatgtaaaccatgaacacagagaaaattatgaagcgcttttgatctactacaaggatagtttagataatcccgttgtagatggcgcatgttacattcttgcattacctgaaatatttaataaggttgatgtgtttgagtctgatttaccttttacctgggtttatgatgaaaatggactttctgatacaatgaaaagtatcagtgtgccccttcaatatcttattgcagccgctttggaagtgactgatgtaaatatatttaagccttcaggttttactatgggtatgaataattggaatattgcccaattacgtattttttggcaatactgcgctatcgtcagaaaagaggctttataa

SEQ ID NO: 5155 - DNA, 132 bp, Staphylococcus epidermidis; identical to SEQ ID NO: 4231

SEQ ID NO: 5156 - DNA, 423 bp, Staphylococcus epidermidis
gtgtttcaaatagcaaaaaacgaaacgatgctagatgattgctttgaaataagaaagtgtgttttcgtcgaagaacaaggcgtaccactcgaaaatgaatttgatcaatatgaagattactcattccatatagtgggatatataaatggtgttcctatggcaactgctagaattagacctttaaatactcatgtttgtaaaattgaacgtgtagcaatcatcaagtggtatcgtggtcttgggtacggtaaaaatttaatacatgctattgaaacaattgcaaaaaaacaccaatacaatgaactcactatgaatgctcaattacaagctcgagacttttacttaaaactaggttactcaccttttggtaaagtattcttagaagaaaatataaaacatattagtatgaataagtttttataa

SEQ ID NO: 5157 - DNA, 4008 bp, Staphylococcus epidermidis
atggcgaaaaaattcaattacaaattaccgtctatggttgctttaacgttatttggcacagcttttactgcacatcaagcaaatgctgctgaacaaccacaggatcagtctaatcataaaaatgtattagatgatcaaactgccctcaaacaagcagaaaaagctaaaagcgaagttacacaatcaactacaaatgtatctggtacacaaacatatcaagaccctacccaagttcaacctaaacaagatacacaaagtactacatatgatgcatcattagatgaaatgagtacttataatgaaatttcatcaaatcaaaagcaacaatctttatcaacagatgatgcgaatcaaaatcaaacgaattctgttacaaaaaatcaacaagaagaaacaaatgatttgacacaagaagataaaacatccactgatacaaatcaattacaggagacacaatctgtagcaaaagaaaatgagaaagatttaggagctaacgcaaataatgaacaacaagacaagaagatgactgcaagtcaaccttccgaaaatcaagcaattgaaactcaaactgcttctaatgataatgaaagccaacaaaaaagtcagcaagtaacttctgaacaaaatgaaactgttacacctaaagtatcaaatacaaacgcatctggttataattttgattacgatgatgaagacgatgatagctcaacagaccatttagagcctatctcattaaacaatgtgaatgctacatctaaacaaactacttcatataaatataaagaaccagctcaacgtgtaacaactaatactgtaaaaaaagaaacggcatctaatcaagcgactatagatacaaagcaattcaccccatttagtgcaactgctcaaccgagaacagtttattctgtatctagtcaaaaaacatcatcattaccgaaatatacaccaaaggttaattcttcaataaataactatattcgtaaaaagaatatgaaagcaccaagaattgaagaagattatacgtcatatttccctaaatatggctatagaaacggtgtgggacgtcctgaaggtatcgttgttcatgatactgcaaatgataactcaacaatcgatggcgagattgctttcatgaaacgtaattacacaaatgcattcgtacacgcatttgttgatggcaatagaattatagaaacagctccgacagattacttatcttggggtgcaggtccatatggaaatcaacgttttatcaatgttgaaatcgtccatacacatgattatgattcatttgcacgttcaatgaacaactacgctgattatgctgcaacgcaattgcaatattataatttaaaacctgatagcgctgaaaacgatggaagaggaacagtttggacacatgctgctatctctaacttcttaggaggtactgatcacgctgaccctcaccaatatttaagaagtcacaattatagctatgcagaattatatgacttaatttatgaaaaatatttaattaaaacgaagcaagtagcaccttggggcacaacatctacaaaaccgtcacaaccttctaaaccatcaggaggaactaataataagttaactgtgtctgctaatcgtggtgttgctcaaattaaaccaacaaataatggcttatatacaactgtttatgacagtaaaggtcataagactgatcaagtacaaaaaactctatccgttactaaaactgcaacattaggaaataacaaattctatttagttgaagactacaatagcggtaaaaaatacggttgggttaaacaaggtgatgttgtttataacactgctaaggcaccagtaaaagtgaatcaaacatataatgttaaagcagggtcaacactttacacagttccttggggtacaccaaaacaagttgctagcaaagtatctggtactggaaatcaaacatttaaagcaactaaacagcaacaaattgataaagcaacgtatctttatggtacagtgaatggtaaatctggttggattagtaaatactacttaactacagcatctaaacctagcaatccaactaaaccttcaacaaacaaccaattaacagtgactaacaatagtggtgttgctcaaatcaatgcaaaaaatagtggcttatatactacagtttatgacactaaaggaaagacaacaaatcaaatccaacgtacattgtcagtgacgaaagctgccactcttggtgataaaaaattctatcttgttggtgattataatactggtacaaattatggttgggtaaaacaagatgaggtcatttacaacacagctaaatcacctgtaaaaatcaatcaaacatacaacgtcaaacctggtgttaaattacacacagtaccttggggcacatataatcaagtggctggaacagtttcaggtaagggcgatcaaacttttaaagcaactaaacaacaacaaattgataaagcaacatatctttatggtacagtgaacggtaaatctggttggattagtaaatactatttaactgcaccatcaaaagttcaagctttgtctactcaatcaacaccagcacctaaacaagtacaaccatctacacaaactataaatcaaattgctcaagtgaaagctaataattctggaataagagcatctgtatatgataaaacagccaaaagtggtacgaaatacgctaaccgtacattccttatcaataaacaacgtactgaaggtaataacacgtatgtactacttcaagatggaacaagtaatacaccattaggatgggtaaacattaatgatgtgacaactcaaaatatcggaaaacaaactcagtctataggtaaatattcagtaaaacctacaaataatggtctatattctattgcttggggtactaaaaaccaacaattactagcacctaatacgctagctaatcaagcatttaatgcttccaaagctgtttacgttggtaaagatttatatctatacggtacagtcaataacagaacaggatggattgctgctaaggatttaatccaaaacagtactgacgctcaatcaacaccatataattatacttttgttatcaataatagtaaaagttatttctatatggatccaacaaaagcaaaccgatattctttaaaaccatattatgaacaaactttcacagtcattaagcaaaaaaatattaatggcgttaaatggtactatggtcaacttttagacggtaaatatgtttggataaaatcaactgacttagttaaggaaaaaattaaatatgcatatactggaatgactttaaataacgcgataaatatccaatctcgtcttaaatataaaccacaagtacaaaatgagcctttgaaatggtcaaatgctaattatagtcaaattaaaaatgctatggatacaaagcgtttagctaatgattcatccttaaaatatcaattcttacgtttagatcaaccacaatacttgtcagcacaagctctcaataaattattaaaaggcaaaggtgtacttgaaaaccaaggcgctgcatttagccaagctgcacgtaagtatggtctaaatgaaatttatcttatctcacatgctttagtagaaacaggtaatggaacttcacaacttgctaaaggtggagatgtttcaaaaggtaaattcacaactaaaacaggtcacaaataccataatgtctttggaattggtgcatatgacaataatgcacttgtagatggtatcaaatacgctaaaaatgctggatggacttctgtctctaaagcaattattggtggcgctaaattcattggaaattcatacgtgaaagcaggacaaaatacgctatataaaatgcgttggaatcctgcaaaccctggtacgcatcaatatgcaactgatattaattgggcaaatgtcaacgcacaagtattaaaacaattttatgataaaattggtgaagtcggtaagtacttcgaaattccaacatataaataa

SEQ ID NO: 5158 - DNA, 420 bp, Staphylococcus epidermidis
atgtataaacaacttgaaaaacttatcacactgacaaataatgatttgaatttagttaatagacgctttggtcaacgaactgacattacttctgaacaattagagttactacgtattttatataattatgatcgtttatctcaatacgatttaactatgaagattagtagggaacaatcaattgtatcaagatggattaaaaagttagtccaaaaaggttatatcatgagtcaacaatctcatgaagatttacgatgtaaagaactgatattaactgaagaagcaagggctttaattcagcaaatcaacacggcaagatgcgagttaattgaagcgagatgtcaatgtctatcttcagacgaaattgcaagtttaaatcaattattaaacaaacttaatagtagacacattttcatctga

SEQ ID NO: 5159 - DNA, 1008 bp, Staphylococcus epidermidis
atgacagccatcaaagatagggattattttttcgataatgctcgagcaatattgatatttctagtcgtattaggacatttattacagccttatacatctgaagataaatttttacaagctttatatttattaatatatagctttcatatgcctacctttctgtttatctcaggctattttgctaagaatttagataaacctaactatttagaaaaaattgcaaaaaaattacttcttccttatgtaatattttttgcgtttttctcactttattactatttcactggtaaagaagatgcaattcaattagacccatttaatccggtttttgcattgtggtttttactcaccctttttttctttcacgttgttttagttatagtgagaaggtataatccgtatattgtattattcatatccatacttgtttctgtattagctggtttctctggcaatatcgatagttatatgagtatatcaagaaccattgtgttcttccctatcttctttataggacatttggttacacaatcacatacggaaaaacttagaaataaaaaatggatccccatttcaataatcattctgattaacttctttataggatacacaatccatcctattaatggagattggttattaggaagtacaccttatacttctttagaaagtaacggggaggatgtttatagtcctctaaaacgcttattactctatatcattatacttttaactatgtgtgcatttctaaatctaatgccacaaactaagcgtatttatacatatataggacagcgcacaatgtttgtttatttattacacggtatcgttataggagtcattcgcgggtttgatctatatccatttaaggatcagatttctatctttacctatctttatttatttatcagtgcgagtgtgattgtattaatattatcttcaaaatgggtttgcaaatggacgaatccgttcattaatttaaaaaggccttctcaatttaaaaattaa

SEQ ID NO: 5160 - DNA, 1185 bp, Staphylococcus epidermidis
atgaaattatcattaaattcaagttcaaaatttttaagagcgcctagtattcgtcaattttctaatagaattaaagcgattgacgattgtgttaatttaacaattggacaacccgattttcctatgccagatgtggtcaaaaatgcttatatcaaagcaatcaaaaacgataaaacaagttattctcataacaaaggtttatttgaaacacgacaagctattagccaatattttaaacgaaaatataatttcctttatagtgaggaagaaatcatcgttactaatggtgcgagtgaagcattagatacatcgttaagaagcattattgagcctggcgatgatatacttattccaggaccgatatacgctggttatatcccattagttgaaactctaggtggaaatccagtatatatagataccacacaatcagattttaaagtaacacctgaactgattgagtcgcatctaacgcataaaactaaagctatacttctaaattaccctaccaacccaacaggtgtaatactcgaacgctctgaagtcaaaaatatagtagacacacttgtaaacaaacacatttttataatcagtgatgagatttatgctgaaaatacgtttaaaggacaacatacatcttttgctgaatttccagaaattcgagatcaattattacttataggtggtttgagtaagtcccattctgcaacaggtattcgaatcggctttttacttggtcctgaatatttaattgaaaaattaacctttatgcacgcttacaattgtatttgtgcaaatgtaccagctcaaattgcttgtactaccgctttaaatgaagggataaatgcctctctatacatgaatcgtgattatatcgaacgtcgtaattacctgaaagaaaaattagaatcattaggcttcgaattaactgctcaacctgaaggtgcattttacatcttccctagtattaaaagatttacggaaaacgattttgaattttgtgttgatgtgttggagaaagcacacttagctatggttcctggttcttccttcaccgatattggcaaagggtatattcgaatttcatatgcttatgatatggaaacattaaaaaaaggaatgcatcgattagaaaattatttacagcaacattatccagagcaaatgaccactccaactaaataa

SEQ ID NO: 5161 - DNA, 819 bp, Staphylococcus epidermidis
atgactagacagtgggaaacacttagagaatatgatgaaattaaatatgaatttttcgaagggattgccaaagtaacgattaatcgtccagaagtaagaaatgcatttactcctaaaacagttgctgaaatgattgatgcattttcacgtgcgcgtgatgatcaaaatgtatcagtaattgtattaactggtgaaggggacaaagcgttttgttcaggtggagatcaaaaaaaacgtggacacggtggttatgtaggtgaagatgatattcctcgtttaaatgtattagatttacaacgtttaattcgtgtgattcctaaaccagtaatagcaatggttagaggctatgcaattggtggaggaaatgtacttaatgttgtttgtgatttaacaatcgctgcagacaatgctatttttggacaaactggaccaaaagtaggctcatttgatgctgggtacggttctggctacctagctcgtatagttggccataaaaaagcaagagaaatctggtacttatgccgtcaatataatgcacaggaagctttggatatgggcttagtgaatactgtagttccattagaacaagttgaagacgaaacagttaaatggtgtaaagacatcatgcaacactcaccaactgctttacgtttcttaaaagcagcaatgaatgctgatactgatggtttagctggtttacaacaaatggctggagatgcgactttactttactatactactgatgaagcgaaagaaggacgtgacgcgtttaaagaaaaacgtaatcctgattttgaccaattccctaaattcccataa

SEQ ID NO: 5162 - DNA, 804 bp, Staphylococcus epidermidis
atgttacattataatttttatgaatctaagaaccaaagtaaacaattattagtgatgttgcatggttttataagtgatgctactacttatcattcacatatagaacgcctcgtagaacatacaaacgtgctcacaattgacttgcctggccatggcttagatacttcatctatggacgaagtgtgggatttcccgtttattacacgtcaaattgatgaagttttaatacaatatcaaacatatgatgtgtttcttctaggttactctatgggtggccgggtggcactttattatgctatacatggtaatgaaacgctatcagggttgctcttagagagtacttcagcaggtattcaaaatgagacggataaagtagaacgtgcccaagtggatgctgcacgtgcaaaagtacttgaaattgctggtttagatatttttgtgaatgattgggaaaagttaccactttttcgttcgcagtataatctagcacctgagatacgtcaaagtattcgcaataatcgcatgaatcaagatgctaataaattggccaaagcacttcgtgactatggtactggtcatatgcctaatttatggccacatctatcatcgatacgcattcctactttaattttagtaggggaaaaagataaaaagtttgttcagataggacaacaattagagaatcacttacaagatagtcataaagttcaaatttctaatgtcggacatacaattcatgtggaagatagtacggaatttgatacaataatattaggttttttaaaggaggagcaaaatgactag

SEQ ID NO: 5163 - DNA, 1671 bp, Staphylococcus epidermidis
atgaatcatagtgaagctttaactgaacaagtattttcatttgcttcagagctttatgcttatggtgtaagagaagtagtaattagtccaggttcacgttcaacaccattagcacttgctttcgaagcacatccaaatattaaaacatggattcaccctgatgagcgaagtgctgcattttttgctttaggtcttattaaaggtagcgaaaaacctgtagcaattctttgtacatctggaacagctgccgcgaactacacacccgctatagctgaaagtcaaattagtcgtttgcctctcgtcgttttaacgagtgacagaccgcatgaattgcggagtgtgggtgcacctcaagcaatcaatcaggtaaatatgtttagtaattatgtgaactttcaatttgatttgccgattgctgatggaagtgaacatacaatagatacaattaattatcaaatgcaaattgcaagtcaatatttatatggaccacaccgaggaccgattcattttaatttaccatttagagaaccactaacaccagatttagatcgtgtcgatttattaacatctgtaactaaaacgttacctcattatcagaaatcgatttcggtagatgatataaaagacatattacaagaaaaaaatggtctcatcattgttggagatatgcaacaccaagctgttgatcaaatattaacgtattcaactatatatgatctgccaatcttagcagatccccttagtcagcttcgtaaagagaaacatcctaatgttataaccacttatgatttattgtatcgagcaggattaaatttagaagtagactatgtcatacgtgtaggtaagccagttatttctaaaaaattaaatcaatggttgaagaaaaccgatgcgtatcaaattattgtgcagaataatgatcaaattgatgtatttccgacaccacctcatatatcttatgagatttcagcaaatgattttttccgttcattaatggaagaaccacttgttgaacgaaaaaaatggttacagcaatggcaatcacttgaacaacaagcacgcattgaaataagtgattacttaaagcatgcgacagatgaagcggcatatgtggggagtttaattcaaaaacttacaaaagaagatacattatttgtcggaaatagtatgccaattagagatgtcgataatttactatttgatagtgaggcatctgtatacgctaatcggggtgccaatggaatagacggagtagtttcaactgcgctaggtatggcggcacataagaatgtgacattgcttattggtgatttatctttttatcatgacatgaacggtttattaatggccaaattaaatgaacttcatattaacattgtattagttaataacgacggaggaggtatcttttcatatttacctcaaaaacgatcggctacaaaatattttgagcgattatttggaacaccaacaggcttaaactttgaatatactgcactgttatatggttttacatttaagcgttttgataatttgactgactttaaatatgctgaattatctaaaatgggttctcacatgtatgaagttatgactaatagagatgaaaatttgcatcaacaccaaaatttatatcagaaattgagtgagattgttaatgttacattataa

SEQ ID NO: 5164 - DNA, 1371 bp, Staphylococcus epidermidis
gtgaaaaaaatggatgtgaatgtagacgaacaggcaatcgtcgataagttatatgaaagtacaaaagattgggtttcagttgaagttgaattaaataaaactatgaaacctagtgtgttgtttcatttaactgaaaaagatgctggggaccgtttttacatgcgcttaaatgataattattcttcgtattttggatatcatgctattcataggtttaaaaacgactttgagaataagcaatccatttttaaggactgggaaaaattaaaaaataatattgaacttattcatccacataataaatatcatcatcttagattgtgtggcggttttcaattttcgagtcacaaatcagatgatgaatggagagaatatggtttaaaccattttgttttacctaaagtattaatttctaatgaaggtacgcgtacttatctaacttatacaacaaagcgacaagattttgatttacaagcatttaaaactttagtggcacattttgaacaaacaaccatggataaccctgaggaagcacttggagatgtgacgcgtatggaagatatttataaggatgattggcgtgatctcgtaaaagaagcgattgatacgattgacgacaataaaaaaatcgttctcgcacgtcgtcgtttagtcaaatttgataaaaaaatcaatattccatatgttttaaaccgggctcttgaaaatgaaaaaaatagttatatatttttattagaagctaatcagtcaatattcttttctcaaacgcctgagcaattaatcaaagttgaagatggtgttttatctacaaaagctgtagcaggtaccattaaacgtacacataatgagcaaatagataataagaatatagaggcatttcttaaagataagaaaaatttaggagaacatcgttttgttgttgagagcatcttaaatgatattgagccttttgtacaggatgtagagtacaatgaaacgcctaatattttaaaaaatgatcatatgtatcatttatatacggaaatcaaagctaatttaaatgacaaatcatacattggtttaatcgatcgtttacatcctacacctgcgttaggtggctaccctaaagaagaagcgcttgattttattgagaataaagagtttggtactcgaggtttatatggcgcgccggtaggctatattgatgtttatgatgattgtgaattcattgttgctatacgttctatgctaattaaagaacaacaagcgactttatacgctggatgcggcattgttaaaaattcggatcctgatagtgaagttgctgaaactgcagttaaattctcaccaatgatgaacgccttaggagtagataataatgatgaatcatag

SEQ ID NO: 5165 - DNA, 939 bp, Staphylococcus epidermidis
atgtcagatcaatatcaacaatattccactgttaagaagtactggcaattgatgagacctcatactttaacagccgctgttgtccctgtactcgttggtactgcagcagctaaaatatatttactcggtagcgaagaccatctgaaattcagtcttttcttagctatgttgcttgcatgtttgttaattcaagctgcaacaaacatgtttaatgaatactatgactttaaaaaaggtcttgatgatcatacctctgtgggtattggtggcgctattgtacgtaatggtatgagtcctaaacaagtaatgaatttagcaattgctttttacatcattgcagcacttttaggtatctttttagcaatacaaagctcattctggattattccagtaggcatagtttgtatggcaattggctatctatataccggtggccctattccaatttcatggacaccttttggtgaactactttcaggattatttatgggtatgattatcatactactttcatttttcatacaaaccggtaatgttcaaggatatgccgtatggttaagtattccaatagtcatcacaattggtttaatcaatatgggtaacaatattcgtgaccgtgttaaagacaaggctagcgatagaaaaactttgcctatacttttaggtaaacgtgcttcagttatttttatggcaataatgtatgccatcgcatacatcattgtcatcattacagccttttttaaacctgcgggatcactattttacttgttagtcttattatcattcccaatgcctattaaagcagtgagacgttttaataaaaatgatacacctgaaacaatgatgcctgcgatggctgcgacaggtaaaacgaatacattctttggtttattgtatgcattaggaatctatattagtgcacttttaggtgcaatctaa

SEQ ID NO: 5166 - DNA, 558 bp, Staphylococcus epidermidis
gtgattagaaaagcgaaaacgagtgataatcgacagattgcagagttatgttaccttatttggagagatatggaattagatattaccaaggaaataactaaagatcgtattattgaagcgatagaattaagtattgtgaatgtgagatatcggtcgttttatgagcatatttggatatatgagaaagacggggttgttgctggatgtgtaattgcgtatcctgggaaagaggaaatggattttgaacaacaatggcttaagttaccacttgaagaagatatccttcagttaggtacaccattacctgaaaaagaatcatacgatgatgaaatatatatagaagcagtagtaacgactccaaaatatcgaggacaaggtattgcaacacaacttttaaagtatgtaatttccactcatgcacatgaaaaatggggattgaattgtgattatgataataataaagcacgccatctatatcacaaattagggtttaaagaggatgcgacaattcgtttatatggccatcaatattttcatatgacattgaataataagtaa

SEQ ID NO: 5167 - DNA, 216 bp, Staphylococcus epidermidis
atgaaagttaacaaaacaatttatattatagtagcattgattttaggtggtctgggcgtgcataaattttatgccgaccaagttggacaaggtattctacatctcgtctttttctggactggcattccaagtgttgtcgcaatcattcatgctatcattgttatttttactaaaaaagcagatgaatacggctacataacttttgataaaaaataa

SEQ ID NO: 5168 - DNA, 159 bp, Staphylococcus epidermidis; identical to SEQ ID NO: 4244

SEQ ID NO: 5169 - DNA, 369 bp, Staphylococcus epidermidis
atgtatatggcatggtctttatggacggaaaagccttcaaatatcgaagaaatagaacctatgtcagctaaaaagcagattttatttgctttatctgtttctttattaaatcctcatgcaataatggatactgttggtgttatcggaacgagtgcttcagtttatgatggttatgacaaagttgttttttcattggctacaatttctgtatcttggatttggtttgtctttttagctattttaggaagaattacaggaaaaattgataaaagtggtaagtatatcgttattttaaataaagtttctagcgttattgttattattgtaggattaattatattaaaaaatattgttggaattttaagttag

SEQ ID NO: 5170 - DNA, 126 bp, Staphylococcus epidermidis; identical to SEQ ID NO: 4246

SEQ ID NO: 5171 - DNA, 342 bp, Staphylococcus epidermidis
gtgattgcgttattatttgattggtttgttatttttagtagtattttaatttctgtaacttttaataacattttgatctatcttgtagctattatattaattggtagtagaatgagagcatttgataatttaatgcatgaagcttgtcatcgatctttatttacaaataagttttggaataaatggataacttgtttatttgttgcatttccagtatttactagttatacagcatatcgaaatgctcatcattgtactggattttttaaaactacattgcctggcttttatagtgtagttaaagatatttttacaccgaactatgaaaggaaagagagttag

SEQ ID NO: 5172 - DNA, 237 bp, Staphylococcus epidermidis; identical to SEQ ID NO: 4248

SEQ ID NO: 5173 - DNA, 252 bp, Staphylococcus epidermidis; identical to SEQ ID NO: 4249

SEQ ID NO: 5174 - DNA, 174 bp, Staphylococcus epidermidis; identical to SEQ ID NO: 4250

SEQ ID NO: 5175 - DNA, 576 bp, Staphylococcus epidermidis
atgacacatttacccgaaacgatttatgttatacgaaaaggtgatatggtaatacgacctaaatatgatgaatatcagcagacaaatggtactgaaattatcagatttgatcaaactcgcaaagaaagtccatttaaagtacagggaattatcgaaagatcatgtaaattttatggtaataattatattagtaaaaaagcagaaacgaatcgtattactggaatctctagtaaaccacctattttacttacgcctctttttcctacttacttttttccaactcactcagaccgtcaagaagaaaatatatggattaatatgcattatattgaaaatgttaaagaacttaaaaatcgtaagagtaaaataatttttgcgaatggtgattcgttaacgctcaatgtatcatttcatagcttgtggcatcaatatacgaatgcaatcatctattattacatggtagataagcaatcacgaatgaaatctaacaaccctgaacaacccattgattataatcagtcctctctaaatattttcgaggcgctttcacgctactctctttttgaagaaaattag

SEQ ID NO: 5176 - DNA, 171 bp, Staphylococcus epidermidis
atgacagtgaacgatttaggcgttgaactcgtcattgaagaagcactcagaaatgcaagaaaagctaaacttaaactcttaattgacgaagcgctcatcaataaaaacgagaacgattttattcaatatactaacgaatttaaacaattggaggcatttttaagtgaataa

SEQ ID NO: 5177 - DNA, 987 bp, Staphylococcus epidermidis
atgaaatttattagcaacaataatattaatgatccttccctcaatttagcaatggaagagtatgttcttaaaaatttaccttctgaagaaagttattttttattttatattaacagaccgtcaattattgttggaaagaatcagaatacaattgaagaagttaaccaagcgtatattgataaacatcaaattgatgtagtgagacgtatttctggtggtggggctgtttatcatgatactgggaacttaaattttagctttatcacagatgatgatggtcatagctttcataattttaaaaagtttacgatgcccattgtacaggccttacaatcaatgggagttaatgctgaaatgactggacggaatgatatacaagtagggcaagctaaaatatctggaaatgctatggttaaagtaaaaaatagaatgtttagtcatggtacattaatgctgaattgtgatttaaatgaagttcaaaaggcattaaaagtgaatccagctaaaattaaatctaaaggcgttaaatctgttagaaaaagagttgccaatattgaggaatttctagaacagccaatagatatagaagaattcaaacaaattattcttaaaactatttttggtgaaaatgaagttgaagaatatatattaacagaagaagattggaaaaatattaagcaattaagtaatgaaaagtatcgtacgtgggaatggaactatggcagcaatccaaaatataatattgagcgtgaagagaaatttgaaaaaggttttattcaaataaaattagatgtaaaaaaaggaagaattgaacgggcaaaactatttggagatttcttcggcgaaggtgatgtaaccgaacttgaacatgcgttagtaggttgcttacatgattttgaacatatagaagaggcacttcaaaattatgatttctatcactactttggggatatagataagtatgaaattataagattgatgtcctaa

SEQ ID NO: 5178 - DNA, 186 bp, Staphylococcus epidermidis; identical to SEQ ID NO: 4297

SEQ ID NO: 5179 - DNA, 603 bp, Staphylococcus epidermidis; identical to SEQ ID NO: 4298

SEQ ID NO: 5180 - DNA, 1506 bp, Staphylococcus epidermidis; identical to SEQ ID NO: 4299

SEQ ID NO: 5181 - DNA, 1359 bp, Staphylococcus epidermidis
atgtcagttttaagtcagctgcttaaaaaatctagccctcaacaagggattatactctattatctatttgccatcgtcgttgcatttttattattaaatttgccatatgttcataaacaaggggttgaggttaatccaattgatacactttttgtagctgtatcaggtattagtgttacaggattatcaccaattactatagtcgacacatactcaacctttggtcaaattatcatacttattattttgaacatcggtggtataggtgttatggctattggaaccatgctttgggttgttttaggcaaacatattggaattagagagcgacaactcattatgttagataataatagagatactatgagtggaacggttaaactgattttagaaattgtaagaacaatttttattattgagtttataggtgcactcttactcgcgttctatttttatcgggataatcctgatttaaaaaacgcattaatgcaaggcatttttgtgtcagtatctgctacgactaacggtggtcttgatattactggtgaatctttagttccctatgcaaaagactattttgtacaaacaatagtaatgttcttaattgtgttaggatctataggctttccagttttgttggagttaaaagcatatataaagaatcgagtaactaattttaggttctcattattcacaaaaataacgacaacaacgtacttattcttatttttattcggcgttattgttgtattaatattagaacatagcaatgcatttaaaggattgagttggcatcaatcattattttatgcattgttccaatcttcaacgacgagaagtgcaggtttgcaaacgatagatgtgtcacatttcagcgacgcaacaaatattgtaatgggattattgatgtttataggatcatctcccagttctgtaggaggcggaatcagaacaacaacatttgctattttaattttgtttgttattaattttaataatactggtgacaaaacaggtattaaaattttcaacagagaagtacatattatggatgtacaaagatcatttgccgtatttactatggcgtcattaattacatttattagcatgattattatatctgccactgaacaaggcaagttgtcctttttacaaattttctttgaagtaatgtctgcgtttggtacatgtggtttaagcttaggtgtgacaagcgatgtcaacgacattaccaaggttgtattaatgatattaatgtttataggtcgtgtaggccttatttcattcattattatgttagctggacgtaaagaacccgaaaaatatagctatcctaaagaacgtatacaaattggatag

SEQ ID NO: 5182 - DNA, 1833 bp, Staphylococcus epidermidis
gtggataacaataaaaaacaagtcataccacgcagtcaatatcgacgtaaaagacgtgaatactttcataacgaagagcgagaagagcgcataagacgtgagaaaatagagaaggaaaatcaagctaaaagagaacaacatcaaactaaagtcaatgaggaacgtgttaaagataatttgagaaaagcaagaatagagaagctaacacaagaagaaatacatcaacaacgtgatgataaaagttataaacaaaaaactttaaatcaaaataatcaaatgaataaatcaaaagacgacgataataaaattggagaagaaagtctacatgatgtgcgagttttaagtgacacctccactttaccgcatcaaagtaagtcaaaacagttgaatgataatcaatcaaatgaaaatcaatatcataataaagtaattgaatcctcagaaaataagtcaataaaagactatgatgattttggaaacgaaagtaaacaacatactaaattgatttcaaaggaatccatgttaggcgtaaattctaatcatactgagcaagattcaagaagtacacaaccatattcttcaaaacatagctattcacaaccagaagataaagacaacgatactactcaacaagcgcaatttcttaaaaaagaagacaaacaacgtaacagagccgaaaatataaaaaaagttaatgaattgaaacaattggtgataggtttctttaaagaacactggcctaaaatgttaattattatcggtattatagtattacttttaatattaaatgccatattcactacagttaataaaaatgatcatacaaatgatagtgcatttaacggtacagctaaaaatgaaacaacagcgatgaaaattgctgaaaactctgttaagtcagttgtaactgtcgagaatgatttgtctaatgacacgactgtgtctgataacaaaaatgaatctgataatgagataggatcaggtgtcgtctacaaaaaagtgggcgactctatttatatttttactaatgcacacgtcgtcggtgatcaagaaaaacaaaaagtaacatatggtaatgataaatctgtgacaggtaaggtaattggtaaagataaatggtctgatttagcagttgtaaaagctaaagttgctgacgaaaatattaaaccaatgactatgggggattctaataatattaaattggctgaacctattttagttataggcaatcctctaggcacagactttaaaggaagtgtttctcaaggtattgtgtctggactcaatcgtcatgtacctgtggacattgataaaaatgataattatgatgctttgatgaaagcttttcaaattgatgcgcctgtgaacccaggaaattcaggtggtgctgtggtcgatagagacggtagactcataggtatagtttctttaaaaattgatatgcataatgtagaaggaatggcttttgcgatacctattaatgatgtacgtaagattgcgaaagaattagaacataaaggtaaagtgaactatcccaataccgaaatcaaaatcaaaaatgttggtgaccttgacgattctgaacgtaatgcaatcaacttaccagctaaagtgaatcatggtgtattaatcggtgaagtgaaagaaaatggtttaggagacaaagcaggtttaaaaaaaggtgatgtaatagtagaattagatggtaagaagattgaagataacttacgatatagacaagtcatatatagtcattatgatgatcaaaaaacaattactgctaaaatttatcgaaatggtgcggagaaaaatattaaaatcaaattgaaataa

SEQ ID NO: 5183 - DNA, 807 bp, Staphylococcus epidermidis
atggatccgagtttgattttaccttatttatgggtacttttagtacttgtatttttagaaggattattagcagctgataatgcaattgtaatggcggtaatggttaaacatctaccacctaaacaacgtaaaaaagcacttttttatggcctattaggtgcattcatttttagatttattgctttatttttaataagtattattgcaaacttctggtggattcaagcagctggtgctgtttacttaatctatatgtctattaaaaatttatggcaatttttccatcagtcaaatgaaaaacatcataaagaaacaggagacgaacatcacttcgatgaaacaggcaacgaaaaagaagtgagccctaaatctttttggggaacagtatttaaagttgaattcgccgatatcgcgtttgcaattgattcgatgcttgccgcattagccatagccgttacattaccaaaagttggcatacattttggtggtatggatttaggtcaatttattgttatgttcctcggtggaatgataggtgtcatcctgatgagatttgcagcaacttggtttgtagaattgttgaataaatatccaggacttgaaggtgctgcgtttgcaattgtaggttgggtaggtattaaacttgttataatggtacttgcacatcctgatattggcgttttaccagaagcatttccacatagtgctttatggcaaacaatcttctgggtagtattagttggcttagttttaataggatggttaacttcagcaattggtaacaagaaaaaaggtaatcaaaaataa

SEQ ID NO: 5184 - DNA, 1563 bp, Staphylococcus epidermidis
atgaatttaaaagaagaaatagagtcaagaaagacatttgccatcatttcacaccccgatgctggtaaaacaactttaactgaaaaattgttgtatttcagtggagcgattcgtgaagctgggacagttaaagggaaaaagacgggtaaatttgcaacaagtgattggatgaaggtagaacaagaacgtggtatctcagttacaagctctgtaatgcaatttgattatgatgattataagataaatattttagatacgcccgggcatgaagatttttcagaggatacgtatcgtacattaatggcagtagatagtgcagttatggttattgactgtgcaaaaggtatagaaccacaaacattaaaattatttaaagtttgtaaaatgcgaggtatccctatttttacattcatcaataaattggatagagtagggaaagagccatttgaattacttgatgaaatagaagaaacacttaatattgacacttatccaatgaattggcctgttggtatgggacaaaatttctttggtattattgatagacactctaaaacgattgaaccatttagagatgaagaaaatttattacatttaaacgaagattacgaacttaaagaagaacacgcgataaaaaatgatagtgcatttgaacaagcaattgaagaaatgatgcttgtcgatgaagcgggtgaagcatttgataatgaagcgttactgaacggtgaattaacacctgttttctttggatcggcattagcaaacttcggcgtacaaaatttcttaaatgcatacgttgatcatgcgccaatgcctaatgcgagacaaactaaagaagaggttgatgttagtccattcgacacagatttttctgggtttatctttaaaattcaagccaatatggatccaaagcatcgtgacagaattgcatttatgcgcgtggtaagtggtgcgtttgaaagaggaatggatgtaaccttacaaagaactaataaaaaacaaaaaataactcgttccacatcatttatggccgatgataaagaaactgttaatcatgctgtagcaggcgatattattggtttgtatgatacaggtaactatcaaataggcgatactttagttggtggtaagcagaaatatagtttccaagagttaccacaatttactccagaaatatttatgaaggtttctgccaaaaatgtaatgaaacaaaagcattttcataaagggattgaacagcttgttcaagaaggtgcaattcaatattataaaacgttgcacacaaatcaaattatcttaggtgctgtgggtcaattacaatttgaggtgtttgaacaccgcatgaataatgaatataatgtagatgtggttatggaaccagttggacgtaaaattgcgcgttggattgaaaatgaagaagatattaaagataatatgaatacttctagatcaattttagtaaaagatagatacgaaaattatgtattcctatttgaaaatgaatttgcaacgcgttggtttgaagaaaaattctctgatattaaactgtatagtttattataa

SEQ ID NO: 5185 - DNA, 174 bp, Staphylococcus epidermidis
atgttagctattccagaacttttttggtccattgagttatccaaagagttagatgcaaatcagctatatgaggaattagtgatgcaattattcaatttgttgactgaagttgaagcagatacattggcaagtaatataactgatttgattagaaatgaatccaaaggagaatga

SEQ ID NO: 5186 - DNA, 1485 bp, Staphylococcus epidermidis
ttgaatgcaagtgcgttgttcaaaaaaattagagtaaaaaatgtaattggtacattagatatacaggtggacgatattaccactgactcacgtacagctaaagagggaagtctatttgtagcatctaaaggatatacggtagatagtcataaattttgtcaaaatgtagtagatcaaggttgtggtattgttgttgtcaatagagaactcgaacttaaaggtaatgtgacgcaagtcgttgttcctgatactttacgtgttgcaagtctattggcacatgaattatacgagtttcctagtcatcaactgacgacatatggtgttacggggacgaacggtaagacatcgattgcaactatgattcatttaatttatagaaaattgaataaaaatagtgcatatctaggtacgaatggatttcaagttaatgaaacaaaaacaaaaggtgcgaatacaacaccagaaacagtagcattaacaaaaaagatcaaagaagcagttgatgccaatgcagaagcaatgacgatggaagtttctagtcatggattagccttaggtcgacttagaggcgtagagtttgacgttgctatcttttcaaatttgactcaagatcatttagacttccacggaactatggaagcttatggacatgctaaatcgttattatttagccagttaggtgaagatttgtctaaagaaaaatatgttgtattaaataatgatgatgacttctccgattatttagcaagtgtgaccccctatgaagtatttacatatggtattactcacgaagcacaatttatggctaaaaacattaaagaatcattgcaaggtgtagaatttgaattttgtactccatttggaagttttccagttaaatctccttatgtaggtaggtttaacatttcaaatattatggctgctatgattgcggtttggagtaaaggaacaaatttaaatgaaattattaatgctgttactgagcttgaacctgtagaggggcgcttagaagtacttgatccatcacttcctatagatttgattatagattatgcacatacagctgatggtatgaataaactgattgatgctgtaaaaccatttgttaaacaaaagctaatctttttagtaggtatggctggggaaagagatttaacaaaaacacctgagatggggagagtagcatgtcgagcagattatgttatttttactccagataatcctgctaacgatgaccctaaaatgttgacagctgaattagctaaaggtgcaacgcataacaattatatagagtttgatgaccgtgcagaaggtattagacacgcgattgatattgctgaaccaggtgatacagttgttttggcctcaaaaggtcgagagccttatcaaattatgcctggtcatgttaaagtcccacatcgcgatgacttaattggcttaaaagcagcatatcaaaaatttggcggtggacctcttgaggattaa

SEQ ID NO: 5187 - DNA, 1176 bp, Staphylococcus epidermidis
atggttactcaaaataaaaagatattgattattactggatcatttggtaacggtcatatgcaagtcacgcaaagtattgtcaaccaattgaatgagatgaatctcaatcatttatcagtcattcaacatgatttgtttatggaagctcatccaattatgacttctatatgtaagaaatggtatatcaatagctttaaatattttagaaatacatataaacgattttattatagtcgccctaatgagctcgataaatgtttttataaatattatggattaaataaactcatcaacttacttattaaagaaaagcctgatctcatattattaacatttccaacacctgtgatgtcagtattgaccgaacaatttaatataaatatccctattgcgacagttatgacagattatcgcatgcataaaaattggattacaccatattcacaaagatattatgtagcaacaaaagatactaaagatgatttcattgaagctggtgttcctgcttcatatattaaagtgacgggcattcctattgctgataaatttgaagaatctattgataaagaagaatggttatcacaacaacatttagacccttcaaaacctactatattaatgtcagcaggtgcatttggtgtttcaaaaggctttgactatatgattaataatatcttagaaaaaagtccaaattcgcaagtggtcatgatttgtggacgtagtaaggaacttaaacgttcattaaaagctaagttcaaagataatccaagtgtaaaaatattaggatatacaaatcacatgaatgagtggatggcatcaagccaactaatgattaccaaacctggtggtatcacaatttccgaaggacttagtcgttgtattcctatgatttttttaaaccctgcacccggtcaagaacttgaaaatgcatattactttgaaagtaaaggatttggaaaaatagcagacactccaaatgaggcaattgatattgtttctgacttaacaaataacgaagagactttaaaggttatgtcatctaaaatgctagaatcaaaggtaggatattctactagaaagatttgtaaagatttattagatttaataggtcactcatctcaaccggatgaaatctatggaaaggttcctttgtatgcaagattcttcgtcaagtaa

SEQ ID NO: 5188 - DNA, 1212 bp, Staphylococcus epidermidis
atggaaaggttcctttgtatgcaagattcttcgtcaagtaattactcaagtaacagaaactttgttatgatgttggtaattctgtttctgatggaatttgcaagaggtatgtacatactaagttatataaactttttacctacagtgacctctatcgcaatagcaatcacatcatttgctttttccattcactttatcgcagatgctgcaacaaattttgtcatcggctttttacttaaaaaatttggtccaaaattagtacttacatctggattcttacttgcttttataagcttgtttttagtgatatggttcccggcatcaccattcataattattttcagtgctattatgttaggaattgctgtgagtccgatttgggttatcatgttatctagtgtagatgaaagaaaccgcggcaaacaaatgggttatgtctacttttcatggttgctaggtttattggtaggtatggttatcatgaacttgcttattaaattccatcctactcgttttgcatttttgatggccttggttgtgcttattgcctgggtactatactattttgttaatatcaacttaacaaattacaatactaaacctgtgaaagcacaattaaagcaaattgtagatgttacacaacgtcatcttattctatttccgggtatcttgttacaaggagcagctatagcagcacttgtacctattcttccaaaatatgcaacgcaagttgtgaaagtatcaaccgttgaatatacagtagcaatcattattggtggcataggctgtgctttctctatgttatttttatcaaaaatcatcgacaataatagcaaagggtttatgtatggagttatttttagtggctttatactatatacaattcttatattcgggctatctacaattacaaatatatatatagtttgggccataggactttttattgggctaatgtacggtatcctcttaccggcttggaatacctttatggctgggcatattaatcctaacgaacaggaagaaacatggggcgtgttcaacagtgttcaaggcttcggttcaatgataggcccactagtcggaggtctaattactcaatttactaataatttaaataataccttttacttttcagcgatgatttttcttgcccttgcagtattttacggatattactttattaaaacaaacagaagggttaaaccttaa

SEQ ID NO: 5189 - DNA, 510 bp, Staphylococcus epidermidis
atgattttaggattagcattggttccgtcaaagtcatttcaagatgaggtgaatgcttatcgcaagcgatatgacaatcattatgctcaaataatgcctcatatcacgattaaatctcaatttgaaatcgatgatcatgattttaatttaattaaaaatgaagtgaaaaatcgaatttctagtattaaaccagtagaagtacatgctacaaaggcatctaatttcgctccaatcagtaatgttatatacttcaaagttgctaaaacagagtcattagagcaattatttaatcaatttaatacagaagatttttacggtacagctgaacatccttttgtacctcattttacaattgcccaaggtctaacaagtcaagaatttgaagatatatatggtcaagtaaaattagcaggggtagaccatagagaaataattgaagaactatcgttacttcaatatagtgaaaaagaagacaaatggactattattgaaacttttacattaggataa

SEQ ID NO: 5190 - DNA, 753 bp, Staphylococcus epidermidis
atgtcggagtttaaagtaggtaagattaataaaaaaataatacatagtgatattttaaatagagatgtaacattatcggtttatttacctgaggattatacaaacttatttaaatatcagttgattttttgctttgatggtttagatttttttagatttggtagaatacaacgcatagaacagttacgtgaagaacaatcaatacaacgtgcaattatagtaggattccattacgaagatgttgaaaaacgtagggaagaatttcatccttcaggaagtcgttctaatttaaccattaaagcaatgggaaaagaaattcttccttatatcgatgcgacatttccaacttataaagtaggtaatacaaggttacttattggagatagtttagcaggaagtatcgctttaatgactgcaatgacttacccaactatttttagtcgagttgcgttattgagcccaatgtataatgaaaatattaagaaaaaaattgatacatgtatgaataaaggtcaattgacgatatggcatgccattggtttagaagaagcagattttattttaccaactaatggtaaaagagctaactttttaacacctaaccgcgaattaaatcaactgattaaagaagataatattgaatatttctataaagaatttaacggtggacatcattggaaatcatggaaaccattgctaggagatattctcttacaatttttaggtgatccaataaatggaaaatatgtttaa

SEQ ID NO: 5191 - DNA, 1086 bp, Staphylococcus epidermidis
atgttcaataaggtttggtttagaacaggaatattttttattatgctgttcatactcatcaaactatttatggaagtgcatgaagtatttgctccaatagctactatcattggttcagtcttccttccatttttaattagtggatttctcttttacatatgtttaccttttcaaaacatattagaaaagtggggctttccacgttgggctagtataacaacaatattcataggattaatagctatcatcgctattgtggtatcatttatagcacctatcattatttccaatattaataacttaattaaacaaacaccatcattacaaaaagaagccgaacaattaattaatttctcgttaagacaaatggataaattaccagatgatgtcacacatcgtattaataaagcggttaaatccatgggagatggcgcaacgtctattttatctaattcagtgtcatatattacgtctttcatctcaactgtatttttattaataatggtgcctttcttcctgatatatatgctaaaagatcatgaaaaatttatcccagcaatcggtaaatttttcaaaggagaacgtaaagtttttgttgtagatttattaaaagacttaaacttcactttaaaatcatatattcaaggtcaagtgacagttagtatcatcttaggtattattttatatataggttatacgattataggattaccatatacacctttattagtattattcgccggcgtagctaacttaataccatttttaggtccatggttatcttttgcaccggcagcgatactaggtattattgatggcccttcaacttttatttgggtatgtgtcgtaacattaatcgcacaacaacttgaaggtaacgtgataactcctaatgtaatgggtaaatcattaagcattcacccattaactattattgtggttatacttgcagctggagatttaggtggattcacactcattcttgttgcagttccattatacgctgtaatcaaaacattagtgagcaacatttttaaatatcgtcaacgtattgtcgataaagcaaatagtaatgttaaagattaa

SEQ ID NO: 5192 - DNA, 771 bp, Staphylococcus epidermidis
atgttaaatctagaaaataaaacctacgtcattatgggtattgcgaataaacgtagtatcgcatttggcgtcgctaaagtattagatcgattaggtgctaaactggtatttacatatcgtaaagaacgcagtcgtaaagaattagagaaattattagaacaattaaatcaatctgaacatcatctctatgaaattgatgtgcagaatgatgaggatatcattaatggtttttctcaaatcggaaaagatgtaggccagattgatggtgtttatcactcaatcgcatttgccaatatggaagatttacgaggtcgattttcagaaacatctcgcgaaggtttcttacttgcacaagaaattagttcatattcacttactctcgtagctcatgaagccaaaaaacttatgcctgaaggtggaagtattgttgcgacgacttatattggtggtgaggcagcagttcaaaactataatgttatgggtgtagctaaagcaagtttagaggcgaatgttaaatatttagctttagacttaggtgaagataatattcgtgtcaatgctatttctgcagggccaattcgtactttaagtgctaaaggtgtaggtggatttaatacaattcttaaagaaattgaagcgagagcgccgttaaaacgcaacgttgatcaagaagaagtaggtaagacggctgcgtatttattaagtgatctttcaagtggtgtaactggagagaacatccacgttgatggtggattccacgcaattaaataa

SEQ ID NO: 5193 - DNA, 372 bp, Staphylococcus epidermidis
atgtcatctgacacaaacggtttagcacatacaaaatggaattgtaagtatcacatagtctttgcaccaaaatatagaagacaagtgatatatggaaaaatcaaaagagatattggagtgattttacgtcaactatgtgaaagaaaaggcgtagaaataatagaagcagaagcatgtaaatacccagttggtgttgttgaagatcaaatatactatttcaatgaagataatattgataacgttatatttgagggctattctgatcaagatgaaacaagatttcaagaattatttaaagagatgatgggtaatttggatgaagatattaaacgtggtactgttcaacaaaaagatagttacggattgatttaa

SEQ ID NO: 5194 - DNA, 174 bp, Staphylococcus epidermidis
ttgggacggaattatgatgaagtgattcataccgttaattatttaaaagacaaagaggttcaattgatgattaccagcttccctaggatggatgaagtcattggcaagccattactgtatatagaaagccatgcgctatgtgtatggttcagaaaaggttttaccgttatctaa

SEQ ID NO: 5195 - DNA, 177 bp, Staphylococcus epidermidis
ttgataggtgtctatggaactgcagctgataactcccaattagacttaatatttaatagaaatgttcaagtgaaaagtggacaagcgccagttattcatatgatgccaaaactttatgacatgattaaaataaagtctttgatccaacagaaattatcactcatactatgcctttaa

SEQ ID NO: 5196 - DNA, 129 bp, Staphylococcus epidermidis; identical to SEQ ID NO: 4315

SEQ ID NO: 5197 - DNA, 2259 bp, Staphylococcus epidermidis; identical to SEQ ID NO: 4316

SEQ ID NO: 5198 - DNA, 291 bp, Staphylococcus epidermidis
gtgaatggtaagaaaagtaatcaaaataatgaaatgcaaaaagtgaagctttcttatactatgccgattaaagataaaatgaacacagttgatgcatatgaaaatcttatttacgatacattaattggagaacaaacaaaatttacgcattgggaagaattaaaaattcttggaaatttattgatgatattgaaaatgtatggaaacaagaatagccacagtttcctaattatgcctttggatgctatgggcctaaagaaagtgaaaaattacttagtgaagacggattga

SEQ ID NO: 5199 - DNA, 180 bp, Staphylococcus epidermidis; identical to SEQ ID NO: 4318

SEQ ID NO: 5200 - DNA, 195 bp, Staphylococcus epidermidis
ttgaaagagtctggattaacgaacgtaaaagggttaatgcgaataattatagaaaaaccatttggtgatgatttaaaatctgcaaaaaaattaaataatcaaataagtaagtcttttaaagaagaagaaatatttggaattggtcactatttaagtaaagaaatgattcaaaatattgaacgtctacgattttga

SEQ ID NO: 5201 - DNA, 306 bp, Staphylococcus epidermidis
ttgtttcaaaaaggatactttgaaaattcactaacaattattggcagtggtttaaatgagttaactactgatgaatttagagaaaaagtcaaaaatgctattcaaaataatattgaaaactcaaaggaaattggtgcgtttttaaaacgtttattttataaacaacaggacgctaatagtaaagatagctaccaaaaatttttggaaatgagtttagaactagatgataagtttgacctaaaagaaaatcgattgttctatcttgcaatgtcccctaaatttttggagttgcaacaaaccacttga

SEQ ID NO: 5202 - DNA, 204 bp, Staphylococcus epidermidis; identical to SEQ ID NO: 4320

SEQ ID NO: 5203 - DNA, 264 bp, Staphylococcus epidermidis; identical to SEQ ID NO: 4321

SEQ ID NO: 5204 - DNA, 624 bp, Staphylococcus epidermidis; identical to SEQ ID NO: 4322

SEQ ID NO: 5205 - DNA, 1845 bp, Staphylococcus epidermidis; identical to SEQ ID NO: 4323

SEQ ID NO: 5206 - DNA, 1386 bp, Staphylococcus epidermidis
atgtctaacgaaactgaaatgaaagacaacgttcgtgaagacgtatatgataaagaattatttgatctattattagatcaaaatgatatagatgaattcagaaaagaatttttagaattacataactatgaacaaagtgaatactttgaagatacggatgatgaaaatagacaaaaaatatttgagtttttatcacccaaagaagtagcaaatttctttgatcaattagactttgatgacgatgattatgagagcctttttgataatatggacgctacctatgctagtcatgtcttagaggaaatgtcttacgataatgcagtagatattttaaatgagttatctaaacctaaagtggcgagtttgctaacattaatgaacaaagataaagctaatgaaatcaaagctttattacattatgaagaagatactgccggcggtataatgactacggagtttatctctttaaaatcaactacacctgttaaagaagcgttaattcacgtaaaagaacaagcgcctgatgctgaaacaatatatgtcatattcgcagtaaatgaagatgaacaacttgttggtgttctatcacttagagatcttattgtagctgagaatgatgcatacattgaagatgttatgagtgaacgtgtcatcagtgctaatgtcggtgatgaccaagaagatattgctcaattaatgagagactatgattttatagctgttccagttgtagattatcaaaatcatttactaggtattattactattgatgatatcctggatgttatggatgaagaagcaagtgaagactactcacgattagctggggtatctgacatagattctacaagtgactcagtgtttaaaacggcgagtaaaaggttaccatggctcattgtattaacatttttgggtatgattactgctacaatattaggtagttttgaagatactttatctcaagtggcattacttgcagcatttattccaattataagtggtatgtcaggaaattctggtacacaatcattagccgtttctgtccgtaatatatctactggggaaataaatgaacagagtaaatttaagattgcattgcgagaagcgggaagtggtttattatctggtattgtatgtgcagttatccttttcctaattattgtcgtcatattcagacaaccgttattagctttaatagtaggtggaagtttgacatgcgcaatgacagtaggtacattagttggttcaatgattcctttagtaatgaacaaatgtaaaattgatcctgctgttgcaagtggtccttttattacaacaattaatgacattgtgagtatgcttatttatttcggattagctacatcattcatgtcatacctaacataa

SEQ ID NO: 5207 - DNA, 855 bp, Staphylococcus epidermidis
atgattttaacatatcaaattgtacagtcagaaccagtgaaaacttttttgaaaaatcaagattattctaaacgcacgttgagcgccattaaattaaatggcgctttactattaaacggttcacctgtaactgtcagacatgttatgaacaaaggtgatagattagaagttcattttccatgtgaaacaccaagtgagaatttgattccatacgataaggaattagaagtcatttatgaggatgcgtatttgataattgtaaacaagccacaaatgcaaaattgtgcaccttctagagaacatccccatggcagtttagtagaacaagtgcttgcttattatacaaaaaaaggcgaaaaaataaatcctcatattgtgactcgacttgatcgaaatacttcaggtttagttgtatttgctaaatttgggcatgtacatcatttgttttcaaaggtgaaatttaaaaaagaatatgtcgccttagcctatggccatacacaatcttcaggtgttattgaagcgccaattgcaaggcggagtgatagtatcattaaacgagaagttaatgataaggggaagtatgcaaaaacagtctatcaaaagcttatgcaaaatgagactgctagtttatgtaaggttaaattgcttactggaagaacgcatcaaattcgagttcactttgagtatattggacatccattaattggtgatgatttgtacggtggaaatcatccttgcgttcatggacaagcgttacattgctgttcagttgaatttatccaccccatatatagatctcattacctaataaatgttgactacaaacaattaattaaattattcaacatggtataa

SEQ ID NO: 5208 - DNA, 810 bp, Staphylococcus epidermidis
atgcgttatacaatccttactaaaggtgattcaaaatcgaatgcattaaagcataaaatgatcaatcatatgaaagattttcaaatggtagaagatagcgaaaatcctgaaattgtcatttcagttgggggagatggaacgttactacaagctttccatcaatatagtcatatgttatccaaagttgcttttgtcgggatacacaccggtcatttaggattttatgcagattggttacctcatgaagttgaaaagcttattattgaaattaataattcggagtttcaagttattgaatatccacttttagaattaatagtcaggtataacgataatggttatgaaacgagataccttgctttaaatgaagcaacaatgaaaactgaaaatggctcaacattggttgtagacgtcaatataagaggtaaacatttcgaacgatttagaggagatgggttgtgtatatctacaccttcgggttcgacagcttataataaagctttaggtggtgcgctcatacatccatcacttgaagcgatgcaaattgctgaaattgcatctattaataatagagtgtttagaacagtaggctcgccattagtacttcctaaacatcatacgtgtttaattacgccggtaaatcacgatacgattagaaccacaatcgatcatgttagcattaagcacaaaaacgtcaatgcaatacagtatagagttgctaatgagaaagtgcgttttgccagatttcgtccatttccgttttggaaaagggtacatgactcatttatttctagtgatgatgaacgatga

SEQ ID NO: 5209 - DNA, 636 bp, Staphylococcus epidermidis
atgaatcagtgggatcaatttttaacgccatataagcaagctgttgatgagttaaaagtaaaacttaaaggattaagaaaacaatatgaagtgggagaacataattcaccaattgaatttgtgactggaagggtaaaacctatttcaagcgttatagacaaagcgaacaaaaggggtatcccttttgattgtttacatgaagaaatgtacgatatagctggtcttagaattatgtgtcaattcgtggatgatattgacatagttgttgatatattaagacaacgtcaagatttcaaggttatagaagaaagagattacattcgaaatacaaaagcaagtggctatcgttcttatcacgtgattattaaatatcctattgaaacactaagtggacaaaagcacatcttggctgaaattcaaatcagaaccttagcaatgaacttctgggctacaatcgaacatacattaaggtataaatatgatggggcatacccagatgagattcaacatcgtttagaaagagcagcagaagcggcatatttattagatgaagaaatgtccgaaattaaagatgaaattcaagaagctcaaaagtattacacgcaaaaacgtgctaagaaacatgaaaatgattaa

SEQ ID NO: 5210 - DNA, 348 bp, Staphylococcus epidermidis; identical to SEQ ID NO: 4328

SEQ ID NO: 5211 - DNA, 591 bp, Staphylococcus epidermidis; identical to SEQ ID NO: 4329

SEQ ID NO: 5212 - DNA, 384 bp, Staphylococcus epidermidis
atggaacacggtgatattatgtctaaaacaccatatgagttgattggtcaaaaagccttgtatcaaatgattgatcatttctatcaacttgtcgagaaagattctcgtatcaatcatttattcccaggcgatttcaaggaaaccagtcgaaagcagaagcaatttttgacacagtttcttggaggtcctgacttatatacccaagaacatggtcatcccatgttaaaacgaagacatatggaatttacaattagcgagtatgaacgtgatgcatggcttgagaacatgcatactgctattcaacacgccaaacttcctgcgggtgtaggcgattacttgtttgagcgattaagacttactgcaaatcacatggtaaattcctaa

SEQ ID NO: 5213 - DNA, 798 bp, Staphylococcus epidermidis; identical to SEQ ID NO: 4331

SEQ ID NO: 5214 - DNA, 1809 bp, Staphylococcus epidermidis
atgagtcaacaattaacaagagaagaacaggaacgtaaatatcctgaatatacatgggatttaacaactatttttaaaagtgatgaagcatttgaagaagcttttaaaagtattgaagctaaaataggtgaagaagaaaaatttaaaggtcatcttggagaaagtgctgaaacattatatgaagcgctaagtcttgaagacgagttaggtacaaaattagaaaaggtatatgtatacgcacatttaaaacaagatcaagatactgcaaatgataaatataccggtttagaagcgcgtgcacatcaacttgttattaaatatagctctgcatggagttttttagtacctgaaattttacaactagatgaagctactattcaatcttttatcgattctaataatgatttaaaacgatatgaatttgatttgaaattgattaatgagaaacgtccacatatattagatgcgaatacagaaaagttattaacagaagcacaagacgcactttcaacgccttctaatgtatatggaatgttcagcaatgcagatttagaatttgaagatgctatagataaagatggtcaagcttatcctttaacacaaggtacatttatcaagtatttagagtctgatgatcgtgagttaagagcttctgcttttagaaatgtttataaagcatacggtgcgcataataacacgctaggtgctactttagctggtgaggttaagaaaaatgtatttaatgctagaactcatcattatcgttcagcacgtgaaagagctttaagtaataatcatattccagaagctgtttacgataacttaatcaaaacggtccataaatacttacctttattacacagatacacgaagcttagacaagagttactaggtttagacgatttaaaaatgtatgatctttatacacctcttgttaaagatgtcaaatttgaaatgccatatgaagaggcaaaatcctggatgttaaaagcacttgaaccaatgggagaagaatacttaaacgtggttaagaaaggtctagataaccgttgggtcgatgtatatgaaaataaaggtaaacgttcaggtggatattcatccggtggacatttaactaatcctttcattttacttaactggtcagacactgtttctgatttatatactttagtacatgaatttggtcactctgcacatagttactttagtagacagaatcaaccatcaaatttaagcgattatacaatctttgtcgctgaggtagcatcaacttgtaatgaggctttacttagtgactacatggacaaacatttagatgatgaacgacgtctattgttacttaaccaagaattagaacgatttagagcaacactattccgtcaaacaatgtttgctgaatttgaacataaaatacatcaaatagaagaagctggggagccgttaacgccaaatcgtatgaatgaagaatatgctaaactgaacaaactatattttggtgaagcagtagaaactgacgatgatattagtaaagaatggtcacgtattcctcatttctatatgaattattatgtatatcaatacgcaactggttatagtgcagcacaaagtttaagtcatcaaattttaactgagggtcaacctgctgttgaacgatatatcaatgaattcttaaaaaagggtagctcaaactatccgattgaaatattaaaaaatgcaggtgttgacatgacaacacctcaaccaatagaggaagcttgtgaagtattcgaacaaaaattagatgcttttgaaaagttaatgaaagcttag

SEQ ID NO: 5215 - DNA, 987 bp, Staphylococcus epidermidis
atgttaatggcaatcaatcagcaaggtcagaaaattttagcgcaacatgcaaacaaatttgataaatatcaatgtcctcactgtaagtctgaggtgatactcaaacaagggatgactttaatagctcactttgcgcataaaacacgttttaatcaccgctgttcaaagtcagaatcagttgaacattatgaagcaaagttatatttagcaagaatttataaagcattgaattttaacgtggaaattgaaccttattacaaagaagttttgcaatatccagatattgtgatcaatcaagaaaatgcaattgaagttcaattttctaaaataagtatcagtaaaattattcgccgaacaactggtttaaagcgaataggtttgaatgtgatttggattattaaagatgttcctttgaaatataaatacgttaaattatcaccatttcaaagtgcttttattcatccaattaatagaacattagtaacatgggattccaaaaagtttgtattaatattatatagtcaacttcaacatgtaggcggtaaaaattttgttgctcaaagaaaagttttaaaatttgaggatataataaatatgacttttcaatcaaataatgttcccaattttaggttatctgcttctaatatacaacgttatataaactattgtagaaagcgccacagtgttttagaacctacactcagtgccatgtatcaattaaatatgtatgattctgatgtaatttgtaaattaggatatgttgtaccacatcaaatatatttaataacgcatccaatagaatggcaattaaaatatttgttgctaagaagaacattaaatgacaacgaattatgtaaacaacttcttagtcaagtgaagtttagggtgtttgcaacgtttcaatacgacaaacgtcaaatattaagtactattttgcgtgaatttgattatttatatgaacacgaaagcttaaacgtgcaaaagtag

SEQ ID NO: 5216 - DNA, 723 bp, Staphylococcus epidermidis
atgagaatagaacgtgttgatgatacaacagtaaaattgtttataacatatagtgacattgaagcacgtggttttagtcgtgaagacctatggagtaaccgtaaacgtggtgaagaatttttctggtcaatgatggatgaaattaatgaagaagaggattttgtagttgaaggtccactttggattcaagtacacgcttttgaaaagggcgtggaagtaacaatttctaaatcaaaaaatgaagatgctatgaatatgtcagatgatgatacaaatcatcaatttgatgatcaggtaaatgaattattggctcaaacacttgaaggtgaagaaagtttagaagatttatttgaacaacgtaaacaacaaaagaaaaaccatcaagataaacaacaaagacgtgcgcataagccatcaaatgtgagaaatattatagtgaagtttgacgatttagagcaagttatcgactatgcttatcataataatcaaaacactgatgaatttgaagatttattatatatgattgataataaatattattactcaattcattttgatgattcagtttcacaagagatgattaacgatagttatagtcagttattggagtttgcatatccaactgataaaacaaatatttatttaaacgactacgctaagattattatgagtcacaatgttacttctcaagtacgtaaatactttactgatacaaacgaataa

SEQ ID NO: 5217 - DNA, 1500 bp, Staphylococcus epidermidis
atggctatgtctgacaaaaaagacgtcgtgttaatcggtgctggtgtactaagtactacatttggttctatgttgaaaacgattgcacctgattgggacattcatttatatgaacgtctagatcgtcctggtattgaaagttcaaatgaacgtaacaatgcaggaacaggacatgcagctttatgtgaattgaactatactgtacaacaacctgatggttcaattgatattgaaaaagctaaagaaattaatgaacaatttgaaatttctaaacaattctggggtcatttagttaaatcaggagaaattcaaaatcctaaagaatttattaatccattacctcatattagttttgttcgtggtaaaaataacgttaaattcttaaaagatcgttatgaagcgatgaagcaattccctatgttcgataatatcgaatatactgaagatattgaagaaatgagaaaatggattccattaatgatgaaaggccgtgaagataagggctacatggcagcgagtaaaatagacgaaggaactgacgtaaactacggtgaattaactcgtaaaatggctcaaaatcttaaaaactcaccaaacgttgaagtgcaatacaaacatgaagttgttgattttgaacgtttgtctaatggtaaatggtcagttaaaattaaaaatctaaataatggacaagtattcgaacatcaaactgattatgtgtttatcggtgctggtggtggcgcaattccattattacaaaaaactggcattccagaaagtaaacatttaggtggattcccaatcagtggtcaatttattgcttgtacaaatccgcaagttattgaacaacacgatgccaaagtttatggtaaagaaccacctggtacaccaccaatgacggtacctcacttagatacacgttacattgatggtgaaagaacattattatttggaccatttgcaaacgtgggacctaaattcctaaaacatggttctaacttggatttattcaaatcaattaaaccatataacattacgactttacttgcttctgcagttaaaaacttaccattaattaagtattcatttgaccaagtcatcatgacaaaagaaggttgtatgaaccatttacgtacgttctatcctgaagcacgtgatgaagattggcaagtttatacagctggtaaacgtgtacaagttattaaagatactgaagagaatggtaaaggatttatccaatttggtactgaagtggttaattctgaagaccactcagttattgcattactaggcgaatcaccaggagcatcaacttcagtatcagtagcactagaagttttagagaaaaacttccctgaatacgcgaaagactgggaacctaaaatcaagaaaatgattccttcatatggtgaatcacttattgatgatgttcaattaatgagaaaaatacgtaaacaaacatctaaagatcttgaattaggattctataataaagcaaaataa

SEQ ID NO: 5218 - DNA, 819 bp, Staphylococcus epidermidis
gtgaaggataataatgaagtattaaagttatttatagtttcagattcaattggagaaacagcgcaacggatgattcatgcgacgctgacacagtttccagatttaactcaagtagaaattaagaaatttccatatattaaggacgaacaagaatttttaaatgtcttacaattagctaaagaacagaatgcaattgttgcaacaacattagtgagtgagtcatttaatgcattaggtcatcagtttgcaaatgaacatcaaattccctatgtagattacatgtctgagttaattagcataattaaacaacatacacacgctaaaccattaatggaaagtggtgcgttgcgtaagcttaatgatgagtattttaagcgtatagaagcaattgagtattcagtgaaatatgatgatggtaagcattttacagatattggagaagcggatgctttaatagtaggtgtatcacgtacctctaaaacgccattaagtatgtacttagctaataaaggatataagattgcaaatattcctttagtccctgaagtggctattccagataatgtatttcaacaaaagaatttaaaggtatttggattaacagcaagtcccaattatatcgcaaatatacgacgtaatcgtgcagaaacattagggctatcttcagaatctaattacaatagtttagagcgtatcaaaaaagaattatcttatgctgaagaagtttttagaaaattaaatgcaacggtaattaatacagaatataaatcgatagaggaatcggcattttatattgaaaagtttttagctaaacgttaa

SEQ ID NO: 5219 - DNA, 2628 bp, Staphylococcus epidermidis
atgacacaattcgtttatgcatttaatgaaggaaatatagctatgaaagacttacttggtggtaaaggtgccaatctttcagagatgaagagactcggactaccagtaccagatggttttacaattacgactgaagcttgtattacatatttaaaacaaaatgaagaactacctacagaagtaaagacacaattaattgatcatttagcagctttttctaaacgaacaggaaaagccttttcctctgatgataacttgttattagtatcagtacgtagtggtgcaaaaatttccatgccaggaatgatggatacaattcttaatttaggacttaatgatgataatgtaaaaaagcttgttgacaaaacaaatgatgcacgatttgcatatgattgttaccgtcgtttactacaaatgtttggagaggttgtttatggtattccaatgacagctttcgatacatattttaatgattttaaaacaaagcatcgttatcaaaatgatgctgaaattccggcagaaggactacaaactatatgtgaaaaatataaagaaatctatgtagaagaggcatataaaccttttccccaagaaccgttaaagcaattagaagaagcaattgaagcagtatttaaatcttgggataatgatcgtgcacgtgtatatagagatttaaatgatattccacatgatattggtacagccgtaaatattcaggaaatggtatttggtaatagtggtgaaaatagtggtacgggtgtagcatttacaagaaatccagttactggagaaaatcatttattcggagagtacttacttaatgctcaaggtgaagatgttgttgcaggcattcgtacccctaaggatattgacactttaaaacaacaaatgccagatgtacatcaagagtttgttgatgtaaccaaacaacttgaaaaacattacaaagatatgcaagacatagaatttacaattgaaaatggtaaactttatttattacaaacacgtaacggaaaacgtactgctaaagctgcaataaaaattgctgtggatttagttcacgagcaattaattacacgtgaagaagcagtatcaaaagtagaagtaaaatcaatagaccaattattacatcctaattttaatgaagaatcattaaagcaagcgacagtggtttctaaaatgggcttaccagctagtcccggtgcagcaacaggaaaagtagtcttctctgctgaagaagcaaaacttcaagctgaaaatggtaataaagtagtgttaatgcgaccggaaacatcacctgaagatattgaggggatggtagcaagtgaaacaatcgtaacaactcatggtggtatgacatcacacgctgctgttgtagcaagaggaatgggcaaatgttgtgtgacaggatgttcgaatgtagagatagatacagtgaacaaaacagtatattatcctgaaggtgaattacatgaaggggatatcgtttctgtagatggttcagctggtgatttatatttaggagcaattgaaacagtcaatgctgaacatagtgaagagttcgatcaatttatgacttggtctgaagagattgcaagactgcaagttagaatgaatgctgaaacaccacaagatataaaagctggatataattttggttctaaaggaataggtttagttcgtactgagcacatgttctttggccctgaacgtttaatagaaatgcgccgttttatcttagcttcaaatcatgacgaacgtgtacaagctttagaaaaaattaaaacataccaagtagaagattttgaaacaattttcagattatctcaagatagacctacgattgttcgtttacttgatccaccgttacatgagttcttaccatcatctgaagaagatataaacaatgtttctcaacagctgaatgtatcttcagagttcttacgcaagcgaatcgttgacttaaatgaggtcaatccaatgcttggtcatcgtggttgtcgtttggctgtgacttatccagagttatatgagatgcaagttgaagctatcattgaaagtgttattaagcttcaaaaagagggcataacgtgcctaccagaaattatgattcctctcgtgtcaacagtagaagaatttacaactttaaaagaacgattagttaatacaattacacatttagaaaaagaatcacaacaagatatacaatatatgataggtactatgattgaaacgcctagagcatgcttgattgcgaatgaccttgcgaaacattgtgatttcttcagttttggtactaatgatttaacgcaattgacatttggtttctctagagatgatgcaggaaaattcataaatgtgtatactgaaaataacattttacagcttgacccattccaaactttagatagagaaggtgtaggacgactaattcaattagctgttgaacaagctaaaaatacaaatccagagataaaaattggtgtatgtggtgagcttggtggcgatgcaaaatcaattcgtaaatttaaccaatgggaaattgattatgtttcatgttcaccatttagagttccgggtgcaattttagctacagctcagagtcaagcggaggaaagcgagcgataa

SEQ ID NO: 5220 - DNA, 1596 bp, Staphylococcus epidermidis
atgaataaatcaaatttactagcacctgagaattataatattgttacagaaatagaaaaatatgcctcagaagatcataaaaaagccattatttacaaggataacgagcatgaaaatatttctgtaagttataaagaacttatcagtaatgctaataaagtagggaatgtattcctcaatcatgggctaaaaaagggagataaagttctcatcatgatgccacgtgcaatcgttacatatgaattatatattgcagcattgaaactagggatagcgattgttccaagttcggaaatgttacgaacaaaagatttacaatatcgaattactcacggtgagattgatgcagttatttcatttgattctctaactaaagaatttgaaaacgttaaagaatatgaccaattaaaaaaatttatagtagctggtcacaaagaagattgggtttcaatagaagatgaaaaagaaaaagtaagtgatgaccttaaaggcgcagatacaacacgagatgatttggcgattctttcttatacatcaggtacaacaggcaatccaaaagcagtaacgcattcacatggatgggggtatgcccatttacaaatggcaccaaaacattggttatgtatacaagagaatgatcttgtatgggcaactgcagcaccagggtggcaaaagtgggtgtggagtccatttttatctgtattagggatgggagcaacagcatttgtctataacggtcgtttccaccctgaaacatatctcgagttacttcaaaattatcaaattaatgttctatgttgtacaccaacagaatatcgtatgatggctaaacttagtcatttagaacagtacaatttagagtatttacacagtgcggtgtctgcgggtgaacctttaaatcgagaagttgttgaacaatttaaacgtcattttaatattactgttcgagatggatatggacaaaccgaaagtacattgttgatcggatttctaaaagatactgaaccacgtatgggttctatgggcaaaggtatacctggtagttttgttactgtcattgacgatgatggtaaagaggttggtccaaatgttaaaggtaatatcgccgtgcctttagacttaccggctttatttaaaggttactttaaagatgaagcacgcacaaaagcagcttcaacaggtgattattatgttactggagaccaagctcatattgataatgatggttatttctggttcgaaggtcgccgtgacgatattatcattagttcaggatataccattggacctttcgaggtagaagatgcactaacaaatcacgcagctgttaaagaatgtgcagttgttgcaagtcctcatgacattcgtggaaatattgttaaagcatttatcatcttgcaagatgattatgaagcaagtgatgagttaatccaagaattacaagtattttgtaaaaatgaagtagcaccgtataaatatccaagagcaattgaatttgttgaacatctaccaaaaacaaattcaggtaagatacgtcgtgttgaattacgtgacgcagaaataaaaaaatataaacaacaagattcatcacattaa

SEQ ID NO: 5221 - DNA, 447 bp, Staphylococcus epidermidis
atgttaattagcgatacaaataaaacatatataatagaagaaactagtaattcattcacaattgaaaagaataatgatcagcagcactacgaagtattagaatcaatcaacagcttatctaatgattcattttgtgtgttaaatcacttattcgtcaatggaggtaatgaagaggtttttgagtcacggtttttaaagcgaaatcaacatttgcaagatgtgcctggttttaaagcgttaagatttcttagaccggtagtcaaagggagacattacattatcatcacgctatggaacagtagacaagctttctatgattggcaaaattcacaagcatatgcgcaaactcataaaaaacgtggaactcaaaaaggtgttgatcatcgtatagtcaatagagatttatcctataatataagaatagagttagaaagtcttaataactaa

SEQ ID NO: 5222 - DNA, 219 bp, Staphylococcus epidermidis
gtgagtttttatcattttatacaaaatttcgttggtgatgaaacacctctaggtaaactagccacatgtattaaccaagatgaagatttacctatggaagaaacaacagcacataatatattaaactattttaatcagttaaattattttgatgacgattgtattgaagctgtaaaacgctcactatcactatatgaacaaagtaaagtagccctataa

SEQ ID NO: 5223 - DNA, 1176 bp, Staphylococcus epidermidis
atgaatcaaactttagttcaacatctacgtgaaaaagagcaaagaatgaaagaaataagacgttacttacatgaaaatcctgaattatcattcgaagaaaatgaaacatctaaatatattgcaaacttttataaagataaggattgtttagttgagacgaatgtgggtcctaatggaattaaagttaccatcgcaggtaaacatccaggaaaaactatcgctattcgtgctgactttgatgcgctaccgataaaagaagaaacagaattaccttatgcttctaaaaatgagggagtcatgcatgcttgtggtcatgatgcacatactgcgtacatgctaatacttggagaaacattaattgaaatgaaagatcaattgagaggtaatgtcgtgattatacatcaacctgcagaagaaatgccaccgggcggtgcgaaaggtatgatagatgacggcgtattagaaggggtggaccatgttttaggtgcacatgtgatgagtatgatggaaacaggtaaaatatactatcgtgaaggttttgttcaaacgggacgcgcttattttagacttgttgtgaaaggtcagggtggtcacggctcatccccacatacatcgaatgacgctattgtagcaggtgcgcattttgtaacgaccgcacagaccattgtttcaagacgcttaaatccgtttgaaacgggtgtagtcacaataggttccttcgacgggaaaggacaattcaatgtgattaaagatacaataacaatcgaaggtgatgtacgtgcactgactgatgatacaagagacaatattcagaatgaaatgacacgactagtcagaggattagaagagatgttcggagtgatttgtgattttgaatttaaaaaggattatccagctctttacaatgatcctgaatttacttcttatgtagcaacaactttaaaaaatgctaagctggatgacataaaagcaatagatatttgtgagccgcagccaccctcagaagatttcgcgttttatgcgttagaaagaccttcaacatttatttattcgggtgcagcaccagaagatggacctatgtaccctcaccatcatcctaagtttaatatcaatgaaacatctatgcttgtagttgcagaggcagtgggtacaattgtattagattatttgaaataa

SEQ ID NO: 5224 - DNA, 1719 bp, Staphylococcus epidermidis
atgagaagaaaacgcgattcatacgattatgtcatcattggtggcggtagtgcaggttcagttcttggtgcacgcctttcagaggataaagataaaaatgttttggtattagaagctggacgtagtgactatttctgggatttatttattcaaatgccagcagcattgatgttcccatcaggtaatcgtttttatgactgggaatatcaaactgacgaagaaccacatatgggacgtagagtagatcatgcgagaggtaaagtattaggtggctcaagttctattaacggtatgatttatcaacgaggtaacccaatggactatgaaggatgggcagaacctgaaggaatggacacatgggactttgcacattgtctaccatacttcaaaaagttagaaacaacatatggtgcagcgccatacgataaagttagaggccatgatggtccaatcaaattaaaacgtggaccagctactaatccattatttaaatcattctttaatgcaggtgttgaagcgggctatcataaaactgcagacgttaatggatacagacaagaaggttttggaccatttgatagccaagtacatcatggacgtcgtatgtctgcttcaagagcgtatctacgcccggcattaagacgtagaaacttagatgttgaaacacgtgcattcgttacaaaattaatttttgatgaaaataatagtaaaaaagtaacaggcgtgactttcaagaaaaatggtaaagaacatactgttcatgcaaacgaagttattttatctggcggtgctttcaatacaccacaactattacaattatcaggtattggtgactcagaattcttaaaatcaaaaggtatagagccacgtatgcatttaccaggtgttggtgagaacttcgaagatcacttagaagtatatattcaacataaatgtaaacaaccggtttcactacaacctagccttgatgtcaaacgtatgccgttcatcggtttacaatggatttttgcacgtaaaggtgcagcggcgtctaaccactttgaaggtggtggctttgtaagatcaaatgatgatgttgattatccaaacctcatgttccatttcttaccaattgctgtaagatatgatggtcaaaaagcaccagtagcacatggttaccaagtacatgttggaccaatgtactccaactcaagaggtagtttgaaaatcaaatctaaggatccatttgaaaaaccaagtatcgtgtttaattacttatctacgaaagaagacgaaagagaatgggttgaagcaattagagtagcaagaaatatcctaaaacaaaaagctatggacccatttaatggtggcgaaatttcaccaggaccacaagttcaaacggatgaagaaattctagattgggtacgtaaagatggagaaactgcattacatccatcttgtagcgcgaaaatgggacctgcatctgacccaatggcagtagtcgatccattaactatgaaagtacatggtatggaaaatttacgtgtcgttgatgcttcagcaatgcctagaacaacaaatggtaatattcatgcacctgtattgatgttagctgagaaagcagcggacattattcgtggtagaaaaccgcttgaacctcaatatgttgactattataaacatggtattgatgatgaaaaagcaggtgcaatggaagatgatccattctaccaatattaa

SEQ ID NO: 5225 - DNA, 1491 bp, Staphylococcus epidermidis
atggaacttgtagataaattatcaaatcgtcaatatattgatggagaatgggttgaaagttcaaataaaaacacaagagatattataaatccttacaatcaagaaacaatcttcactgtagctgaaggaactaaagaagatgttgaaagagcaattttagctgctagaagatctttcgaagacggtgaatggtcacttgaaacaagtgaagtcagaggtaaaaaagtgagagccgttgctgataaaattaaagaaaatagagaagagttagctaaattagaaacattagacactggtaaaactttagaagaatcctatgctgatatggatgatattcataatgtgtttatgtattttgctggtttagctgataaagatggcggtgaaattatcaattcacctattcctaatgctgaaagtaaagtagttaaagaacctgtaggtgttgttactcaaattacaccttggaactatccattacttcaagcatcttggaaaattgcgccagctttagcaacaggttgctcattagttatgaaaccaagtgaaattactccgttaacaacaattcgtgtatttgaattgatggaggaagttggtttccctaaaggaacaattaatttagtacttggtgctggatcagaagtgggcgacgtgatgtcaggtcatgaagaagtcgatttagtttcatttacaggtggtattgaaacaggaaaacacatcatgaaacaagcagctaatcacgtgactgacgttgcattagaattaggcggcaaaaatcctaatattatttttgatgacgctgattttgaattagctgtagaccaagcacttaatggtggatatttccacgctggtcaagtgtgctctgctggttcaagaatcttagttcacaatgatattaaagataaattcgaaaaagctcttatcgatcgtgtaagcaaaatcaaattaggtaacggttttgatcaagatactgaaatgggaccagttatctcaacagcacaccgcgataaaattgaaggttatatggaagttgcgaaaaaagatggagcaacaattgcaattggtggtaaacgccctgaacgtgaagacttacaagccggattattctttgaacctactgtaattacagattgtgatacatcaatgcgtattgttcaagaggaagtctttggaccagttgtgactgtagaaggatttgctgacgaagaagaagctattcgcttagcaaatgattcaatttacggtttagcaggtgctatatttactaaagatattggtaaagcacaacgtgttgcaaataaattgaaacttggtacggtttggattaacgatttccatccatactttgcacaagcgccatggggcggttacaaacaatcaggtatcggtagagaattaggtaaagaaggattagaggaatatttagtaagtaaacacattcttacaaatactaatccagaaccagtggattggttcagtaaataa

SEQ ID NO: 5226 - DNA, 567 bp, Staphylococcus epidermidis
atgatggattataataacaatgacagtcaatatatcgaagaagctaaagatttagttatcaactcaatcggtgaaaccatggatttgtatggtatcaaccgtagtgtaggtaacttgtatggcattatggtttttgaaggaagtatgacacttgatgaaatgcgacaacaactgcaaatgagtaaacctagtatgagtacaggtgtaaaaaaactacaagaatacgatatcgtcaaacaacaattcacgcgtggtagccgaaagcaacattttattgcagagaaagatttcttcactttcttccgcaacttttttactaaaaaatgggaacgtgaaattgacactaatatggaagcaattgaagatgcagaaaatatcattcacccacttcttgaaaagaatgatatagatgaggaagttaaaaaacaagcaataaatgtaaaagcgcagttagaccactctaaaatatattacaagtggctcgctcaattaagtgaagctctagagtcaggagaaatttttaactatttcccaattccagatgaacaacatcatcatgatcaataa

SEQ ID NO: 5227 - DNA, 1623 bp, Staphylococcus epidermidis
ttgaaaaaggaaaaagttatggactggacgaccttcataggcgtagtcattgtgttactttttgctgttatacctatgatggtttttccgaaagcaagtgaaataatcattaccgatatcaatagtgccatttctaattcaattggatcggtatatctctttatgggactggctatattttgttttgttttatacatagcatttggtaagtatgggaatgtcacgttaggaaaagcgactgacaaacctgaatttaataatttcacatgggcagccatgttattctgtgccggtattggttcagatattttatattggggtgttattgagtgggcattttattatcaagtacctcctaacggtgcaaaatcaatgtccgatcaagcacttcaatatgcaactcaatatggtatgtttcactggggacctatagcctgggcaatatatgtgctaccagctttgccaatcggttatttagttttcgttaagaagaaacccgtctataaaattagtcaagcttgtcgaccaattttaaaaggacatacggataaattattaggaaaaatcgtagatattttatttattttcggtttgctcggtggtgctgcaacatcactcgctctaggcgtgccgatgatctcagctggtattgaacgattgactggtttagatggatctaatatgattttacgttcaatcatcttactaactattacagttattttcgcaatcagttcttacacaggtttgaaaaaaggtattcaaaaattaagtgatgttaacgtttggttatcatttttattattagcatttgtattcatcgtaggtccaactgtgtttattatggaaactacagttacagggttcggtaatatgataaaagatttcttccatatggcgacatggatggaaccatttggtggcataaaaggtcgtaaagaaacgaatttccctcaagattggacaatattctactggtcatggtggctcgtttatgcaccgtttattggattgtttatcgcgcgtatctcaaaaggacgtacacttaaagaagttgtattaggaacaatatgctatggaacattaggttgtgtgttatttttcggtatttttggtaactatgctgtatatctacaaattactgagcaatttaatgtaataagctatttaaacaattatggtacagaggcaacaatcatagaaataatgcatcaactaccattctcgacaattactattatcttattcttaatatcagctttcttattcttagcaacaacattcgattctggttcatatattttagcagcagcgtcacagaaaaaagtgataggagaaccgttacgtgctaatcgtttgttctgggcgtttgcgttatgtttactaccgttctctttaatgctagttggaggagaacgtgcattagaagtattgaaaacagcatcattacttgctagtgtacctttaattgttatatttacgctaatgatgatttcgttcttaattatactcggacgagatcgtatcaagttagaaagacgtgcagataagcataaagaaattgaaagacgttctctaagaatagttcaggtcaaagacaaacctgaagacgataacttataa

SEQ ID NO: 5228 - DNA, 1299 bp, Staphylococcus epidermidis
atgttattgtttatcatagaaatcataatcatgattctagcgatattattaggattaagaactgctggtgcactgggatgtggcatctttgctatagtagcgcagcttatcatgatatttggattccagttacctccaggttcagcaccagtgacggcagtgttaatcatattatctattggtatagcaggtggtacgttacaagccactggtggtattgactatttagtatacattgcatcacgtgtgattgaacgctttccaaaatcaattatatttatagcgccaatgattgtctttgtctttgtttttggaattggtactgcaaatatagctctttcacttgaacctatcatagcgaaaactgcacaaaaagcacgaattcagcctaaacgcgcattaactgcttcggtacttacagccaatttagccttactttgtagcccggcagcttctgctacagcttatattatttctgtattagcagggtatgaaatatcgatgggcaagtatttaagtattgttttacctacagctttaattagtatgttaatgcttagtacattttgtacatttgtaggacgaaaagaacacgtgcgtgatgagtcagaacgtttagttcagatgccagaagtcgaaatcaaaaatgacttttcattaaaagtaaaaataggtgttatctcattcctattatgtgtcatgggtattttaacgtttggcatatttcctaatctcatgccgcaattcaatgtgaatggagatgtagttaaagttgagatgactgaaattgttcagttctttatgtatctcagcgctacaatcaatttattattaataaaaatcaatacttctgatattctgtcatcgaatattacacaatctgcaatgggagcactttttgcagttcttggcccaggttggttaggtgcaacaatatttaatgctccacataacttaaaaatattgaaaaatgatattgggtcaattattagtgaagtaccttggcttgttatcatacttgtttctgtagttgcaatgattgtcatttctcaaacagctacagcatcaattatggtgccgatagttatgagtttaggtatacctcccatctattttgttgcgatggtacaaacattaaatgtgaatttcgttattccagctcaaccgacactattatttgctgtagaactagatgaaacaggtagaacaagacctacgagctttatgataccaggattttttgttataacagtatccgtcattacaggatttgttattaaaaccattttaggatattaa

SEQ ID NO: 5229 - DNA, 537 bp, Staphylococcus epidermidis; identical to SEQ ID NO: 4723

SEQ ID NO: 5230 - DNA, 1851 bp, Staphylococcus epidermidis
atgactactctagaaacatcattaactcgattaatcacaaaagatccaactatattaaatgaaaatgcaaataaagatagtaatacattctcaacaatgcgagatttaacagctggaacggtatcaaagtcttatgcactcgatcatttacttccaaagcatgttgctcatgcacatcaatcgggagatattcattttcacgacttagattaccatccatttcaaccattaaccaattgttgtctcatagatgcaaaagatatgttagagaatggctttgagataggcaatgctaatgttacaacacctcaatcaatacaaaccgcttcagcacaacttgtacaaatcattgcaaacgtttcaagcagtcaatatggaggttgtactgtcgatcgtgttgacgaattactaagtaaatatgcacaaatgaacgcacaacatcacagggaagtagcgaatgatttcgttcaacctgacaaaattgagaattatgtggatacacaagtaactaaggatattggtgatgcaattgaaagtttagagtatgagattaacacactatatacttccaatggacaaacgccattcgttactttgggatttggtttaggaacagatcaattaagtcgaaaaattcaacaagcaattttacatacccgtattaaaggtctcggtaaagatagggttactgcaattttccctaaacttgtattttcgataaaaaagggggttaactttagtccagaagatcctaactatgatattaaacaacttgcattggaatgttcaacaaagcgcatgtatcccgatattttaaattacgataaacttgtggaactgcttggtgattttaaagcaccgatgggatgtcgttcatttttaccaagttggaagaatgatgaaggtcaattggaaaataatggacgatgtaacttaggtgtagtgacgttgaacgtaccgagaattgcaatcgaagcagatggtgacatgcagcagttttgggatatctttgaaaaacgcatgcaattattacatgatgcacttgtgtatcgaattcaaagactacaagatgctattccagataacgcgcctattttatataaaagtggtgcatttaaaaataaactcacttcagatgataccgtcgattcattatttacaaaacaacgcgcaacgatttcaatggggtatatcggtttatacgaagcggcaacattattttatggaccgaattgggaacacaatcctgaagctaaaacattcacactagacatattaagagaaatgaaacgttatcaagtagagtggacgaaacaatatgatatttggttcagtatatacagtacacctagtgaatcactaacagatagattttgccgattggacaaagaaaaatttggatctattccagatgttactgataaaggatattaccaaaattcattccactatgatgtgcgtaaagatgtaacgccgtttgaaaaattagattttgaaaaagactatccttactatgcaagtggtggattcattcattattgtgaatatccaaagttaaatcataatctgaaagctttagaagcagtatgggattatgcttatgataaggtaggttatttaggtacgaatattcctattgatcactgttatcgttgtggctatgatggagattttgaaactactgctaacggatatagatgcccacattgtggtaacactgatcctaaaacggttgacgttgtaaaaagaacatgtggttatttaggaaatccagttcaaagacctgttattgaaggtcgacaaaaagagatatgtgcaagagtgaaacacatgaaggaacctcgttcatga

SEQ ID NO: 5231 - DNA, 306 bp, Staphylococcus epidermidis; identical to SEQ ID NO: 4721

SEQ ID NO: 5232 - DNA, 600 bp, Staphylococcus epidermidis
atgagtgaatcaaatcatattacatggcatgactcagaagttacgaagaaacaaagacagcataaaaatggacacaaaagtgctgttatatggtttacagggctatctgggtcagggaaatcaacggtctctgttgccttagaaaaagaattatttaatgaaggaaaacaaacataccgtttagatggtgataatgtgcgtcatggtcttaataaaaatttaggatttagtcctgaagatcgttcagaaaatattcgacgcattggagaagtagcaaaattaatggtagacgctggagccttaacagttactgcttttatctccccatataaagaagacagagaaggtgttagagcattactagaggataatgagtttatagaagtatatacaaaatgtagtgttgaggaatgtgaaaagagagatccgaaaggattgtataaaaaagcacgttctggggaaatacctgaatttacaggtataagtgcaccttatcaaacacctgaaaaccctgaaatcactatagatactgaacacgacactattgaacactcagtggaacaaattatacgttatcttaaagaacaccaatatatttaa

SEQ ID NO: 5233 - DNA, 1179 bp, Staphylococcus epidermidis
atgtctaacaatgaaacaataaccaattatacaattaaacctcatggaggagaactcatcaatcgtgttgttgaaggaaacgaacgtgaacgtttgattgaggaagcattaaaatttaaaccgattactttaaatccttggggaatatcggatctagagctcataggtattggtggatttagtccccttacaggatttatgaacaaggaagactacactaaggttatagaggaaacacatttaagcaatggcttagtttggagtattcctatcactttacctgtaacagaatccgaagcagataaacttgaaataggtgatgatatcgctttatatggtgaagatggtcagttatatggaacgcttaaattagaagaaaagtacacatatgataaagaaaaagaagcgcgcttggtatacggaactactgaagaagctcatcctggagttaaaaaggtttatgaaaaaggtaatatatatttaggtggtcccattaaactattaaatcgtccaaaacatgacgcgttttcaaattatcatctggacccttcagagacgagacaattatttcatgatttaggttggaaaactgtcgtaggttttcaaacgagaaatccagtgcatcgagcacatgaatatattcaaaaatcagcactagaaattgttgatggtctacttttaaatccactagttggtgaaacaaagtcagacgatattccagcggatgtacgtatggaaagttatgaagtgatattaaaaaactattatcctgaagatagagcacgtctagtcatttatcctgctgcaatgcgctatgccgggccacgtgaagcgatacttcatgcaactgtccgtaaaaattatggttgtacacattttattgtgggaagagatcacgctggggtaggcgattattatggtacttatgaagcacaagagctgattactcaatttgaagatgagttaggtattcaaattttaaaatttgaacatgccttttattgcgaagcttgtggtaatatggcaactgctaaaacatgtccgcatgacgcttctcaacatttacatttaagtggtactaaagtaagagaaaaactgcgtaatggcgaatcattgccaactaaattttcaagaccagaagttgccgaagttctaattaaaggtttgcgagaaaaataa

SEQ ID NO: 5234 - DNA, 897 bp, Staphylococcus epidermidis
atgcgcaaagtattaattttcgcaattgcgggatttttagcacaacttgttgatgggtcattaggcatgggatttggcgcttcatcgtcatcaatattattaacttacggtatagcaccggcagtagtgtcagcaaccgttcatttttctgaaattgcaacaacagctgcatctgggacatcacattggagatttgataatgttcataaaccaacaatgttgaagttagctatacctgggtcaataagcgcctttatcggtgcaggtgttttgacatttattcatggtgattatattaaaccattcattgctttattcttgttaagtatgggattttatattttgtatcaatttctatttaaacgtgcacatgaacatcatcatcatgtgggaaatttgagtagttttaaagtaattccacaaggttttgtggcaggatttttagacgcaatcggtggtggtggttggggaccggttaatacgccgctcctgctttcaagtaaaaaaattcaaccacgatatgcgattggaacagtctcagcaagtgaattttttgttacgtcatctgccgctttaagtttcattatctttttaggagtcactcaaattaattggtttgctgtaattgctttaagtctcggtggaatggtagcagcacctatttcagcgtatttagttaaagtgttacccattaacattcttgcaatttgtgtcggtggtttaattatttttacaaatagtaatgcattattaagctattttgtaaaagataacactatttcaaatacagttcgattcattattattcttgcaattattattttgcttgtttttcaagtcgttcgaaacaagaaattgtctttttcttataagaaaagcgtaaacaaatataattaa

SEQ ID NO: 5235 - DNA, 612 bp, Staphylococcus epidermidis
atgaatatgcccttaatgattgatttaagtaacaagaaagtcgtcattgtaggtggaggtaaagtggcaacacgtcgtgctaaaactttattagcttatacaaaacatattcatgttgtaagtccaacaattaccgatacattacaaaaatatctagaaacgaagcaaatcacttatgaaaagaaacacttcgaaccacaagatgttgagaatgctgatgtggtcatcgcggctactaatcaatctgatgttaacaacgatgtgggggcagctttgtctaagaacgtattatttaatcatgcaggacaagcagacctaggtaatataacgttccctaatttcttaaaaagagataaattaacaataagtgtatcaactgatggtgcaagtcctaaattaggtcaacgaattattaaagatttaaaagatacatacaataaagactattcaatgtatattcagtttttatatgaaagtagacaatatattaaatcacttaaaattgagccatctgataaacaagcgttactcgagcaaattttgtcagacaaatatttagatgagaagaagcaacaagatttcatccgatggctaaaatcacaagtcaaatga

SEQ ID NO: 5236 - DNA, 780 bp, Staphylococcus epidermidis; identical to SEQ ID NO: 4716

SEQ ID NO: 5237 - DNA, 1719 bp, Staphylococcus epidermidis
atggttaatacaaataatcatatttcggaagaattagataaaaatcttgatgaaatggaatttttaaaagcaaatagtgactttttgcgtggaactattgaacaaagtttagctaatccaatcactggatccattacacaagatgatgcaaaactgctaaagtttcacggaagttatatgcaagatgacagggatttaagagatgagcgtcgtaaacaaaaacttgagcctgcatatagttttatgattcgagttcgtgtacctggggggaaagcgactcctgaacagtggattgctatggatgatatttctaatcaatatgcaaatcatacgattaaattaacaacacgccaagcatttcaatttcatggaattcttaaacgtaatttgaaacaatcaatgaaaaatattaatcatgcagtacttgattctattgctgcatgtggagatgttaatcgtaatacgatgtgcaatcctaatctttatcaatctcaagtacataaggagattaatgattatgcaacgcgtataagtaatcacttacttccaagaacaaatgcatatcatgaaatttggcttgatggtgaaaaggttttagattcgagtgaagaaaaggaacctatttatgggaatacgtatttaccacgtaaattcaaaataggtattgcagtaccaccatctaatgatattgacgtctattctcaagatattggtttaatcgctatcgttgaacaagatgagttaattggatttaatgtgactatcggtggcggtatgggtatgactcatggtaatactgaaacatatcctcaacttggacgtctcataggttttatacctaaggaaaaagttgtagatgtatgtgaaaaaatacttacaatacaacgtgattatggtaatcgtgaaaatcgaaaaaatgcacgttttaaatatacagtagaccgtctaggagaaacttgggtgactgaagaattaaaccgacgattaggttgggaaattaaagcgccacgtgatttcgaatttgaacataatggtgatcgattaggttggattgaaggtgttaataattggaacttcactttatttatacaaaatgggcgtgtgaaagatactgaagactatttgttaaaaacagccttaagagaaatcgcagaaatccatactggagatttcagattatcacctaatcagaacttagttattgcaaatgtttctcctgagaaaaaggaagaaatacaagctattattgataaatataaattaacagatggcaaaaaatatacaggacttagaagaaattctatggcttgtgttgctttcccaacgtgtggtttagctatggcagaatctgaaagatatcttccttcactaattacaaaaattgaagatttattagatgagtctggtttaaaagaggaagaaataacgattcgtatgacaggttgtcccaatggatgtgcgagaccagcgctagcagaaatagcctttatcggtaaagcacctggtaaatataatatgtacttaggtggtagttttaaaggcgaacgtctaaataaaatatataaagagaatatcgacgaaaatgagatattagaaagtctacgtccattgttgttgcgttatagtaaagagcgtcttgacggagaacactttggggactttgtaattcgtgacggtgtgatagccaaagttcatgatggtcgcgattttcatagttaa

SEQ ID NO: 5238 - DNA, 1845 bp, Staphylococcus epidermidis
ttgaacttaagtgttaccaatagtccttttacggaagggcaagctaaacaaatcaatgaattgcttcacactttatcacctaaccaacaagtatggttaagtggctatctgatggcaaatcaacaatcaaatacatctacagattctgtagaacaacataacttagatgacaatacagaagcgatgctacatgaaaaggaaccttcagttgagccggaagctagatcgataacaattttatatggatctgagtctggtaatgcgcaaggacttgcagaaatatttgaacaacgtttatctgatattggaaatgacgttacgctcaaatcaatggatgactttaaacctaagaatttgaagaaagtagaagatttatttattatcacatctacacatggcgaaggagatccaccagataacgctgttgaattacatgaatacatccacggacgtaaagcgccaaaattggatggggtgagattttcagtattagcattaggagatcaaacctatgaattcttctgtcaaactggtaaagattttgataaccgtttggctgaattaggggcagaaagactttatcatcgtaccgattgcgatgttgattatgaagaagacgctgaaaagtggatggccaatgttattaatacgattgattcaacaccagctggtactgaaagtgaacaagttgttagcgaatctataaaatcagcaaaagaaaagaaatatagtaagtctaatccttacgatgctgaagtattgatcaatattaatttgaatggtagaggttcagacaaagagacgagacatattgagttattacttgataattttggtgaggaatatgaaccgggagattgtgtagttgtcttgcctcaaaatgatccagctatcgtagacttacttattagcacattaggttggagtccagaaacacaagttttaattaacgaggatggagatactttaaatcttgaagaggcattaacatcgcattttgaaatcactaaattaacaaaaccgttaatagaaaatgctgcgatattttttgataatgaagagctttctgaaaaaattcaagataaagaatggattcaaaactacgttgagggaagggatttgattgacttattaaatgacttcgcaacgacagaactacaacctgaaaatttacatcaattattaagaaagttaccacctagagagtactcaatatctagtagttataaagcaacaccagatgaagttcacattactgttggagcagttagatatcaagcacacggtcgggaacgttcaggtgtttgttcagtacaatttgcagagagaatacaagagggcgatacaattcctatctatttaaaacgaaatccgaattttaagtttccgcaagatgaatcaacacctgtgattatgataggtcctgggacaggtgttgcaccgtttagatcctatatgcaagaacgagaggaactaggttttgaaggaaatacatggttattctttggagatcaacacttcactacagattttctgtatcaaacggaatggcaagaatggcttgaagatggaactttatcaaaattagatgttgctttttctagagatactgataaaaaagtgtatgtgcaacataaaattgcagaaaatagtgaacaatttaatcgatggattgaaaatggcgctactatttatgtatgtggtgatgaaagtaaaatggcaaaggatgttcatcaagcgattaaaaatgtgttaatcaaagagcaaaacctatctgaaacagatgcagaagaatacttaaaacaaatgaaaagagataaaagatatcaaagagacgtgtattaa

SEQ ID NO: 5239 - DNA, 732 bp, Staphylococcus epidermidis; identical to SEQ ID NO: 4713

SEQ ID NO: 5240 - DNA, 120 bp, Staphylococcus epidermidis
atggcagactctttaataatttcttttacattagtttatagtggcttcattcaaaatattacaaatgaaacaagattattttattctttaatccaagaagaatataggcatttattttaa

SEQ ID NO: 5241 - DNA, 471 bp, Staphylococcus epidermidis
atgagtatttatgatattgcggtaaagaattatgatggctctacctatatactaaaaaggtataaagggaaagtgctcattatcgtaaatactgcaacgaattgtactttgaatgatcaatttaataaattagaaatgctttataaaaaatatcataagtatggtcttgagattttgagcttcccttgcaatgattttaataatcaggagccaggattaatcaaagatatttatcgagtatataaatataagtttggtattactttccccatccatgctaagattaatgttaatggagagcatgaacaccctttgtacacattattaaaatgtaaacaaccaggattatttggttcgcaaattaagaattttactaaatttgtagtagatcagggaaatattgttaaacgatttttaccttgtgataatcctaaccaaatggaaaaattaataagacaattattaaaataa

SEQ ID NO: 5242 - DNA, 1344 bp, Staphylococcus epidermidis
atgaaacaatatgatgtagtatttttaggaagtggtcatgcagcttggcatgctgcgttaacattaaagcaaagtggtaagcaagtagctgtagttgaaaaagatactatcgccggtacatgtactaactatggttgtaatgcgaaaattttattagagggaccttatgaagtgcttgaagaagccaaacaatatcctaatattattgatagtcacaatttagaagtgaattggaagaatttaatgcattacaaagaacaagtcattaatcctatgtctgaaaccctcacatcgatgtttgaacaacagggaattgatgtaatcatggggaaaggtaaacttgtagatgctcatacaatagaggtaaataatacaactttacaatcagattatattgttatagcaactggacaacatagtcatcaattagatattgagggtaaagaatatacgcatgatagtcgggaatttttatcaatgcaatctttaccggatagtatcacttttattggagcaggtattatcagtattgaattcgcttctattatgatcaaatcgggtgtagaggttaatgtgattcatcatacaaatcaggcacttgaagggtttaacgaatcacacgtcaataaattaattcaaaagttaaaagatgaaggtgttaaattttactttagtgagaataccaagtcagttaaaccgaatgcgcaacgttttatagtagaaactgagtctggaaaaatgattgaaacagattatgtactggatgcaaccggtagaaaacctaatgttcagcaaataggtttagaaaaagtgggtatacaatttagtgatagaggtattgaggttgatgattatttaagaacaaatgtgaaaaatatatacgcaagtggggacgttatcaataaaatgattcctaaacttactcctacagctacatttgagtctaattatatcgctgcccatatccttggattgaatacagatgccattcagtatccaccaataccttcagtgctttattcattgcctcgtttatctcaaataggtgtcacagttagcgaggctaagaaagatgatacgtatatgattaaagatataccattcggaagacaaatggtatttgagtatcaaaacgaaacagaagctgaaatgtcaattgtattagatagtcacaaacgtttagtaggagcagagatttatggtaatgacgctggtgatttggttaatctcctagtctttatcattaatcaaaaacttactgcacaagacttaaataaaattatttttgcatttcctggagcttctagtggcgttatagatttattgaaattggcgatgatgtag

SEQ ID NO: 5243 - DNA, 441 bp, Staphylococcus epidermidis
gtgaaacaagaacaaatgaggttagcgaatcagctttgtttttcagcatataatgtaagtcgtttatttgctcaattttatgagaaaaagttaaaacagtttggtataacttattctcagtatttagtattactgacgttatgggaagagaatcctcaaacattaaattcaattggtagacatttggatttatctagtaatactttaacccccttactaaaaagacttgagcaatctggctgggttaaaagagaacgtcaacaatctgataaacgacagttgataattacgttaactgacaatgggcaacaacaacaagaagctgtttttgaagcaatttcaagttgcttaccacaagaatttgatacgactgagtataatgaaacgaaatatgtgtttgaagaactagagcaaacattaaaacatctcatagaaaaataa

SEQ ID NO: 5244 - DNA, 750 bp, Staphylococcus epidermidis
atgaaattctgccctcattgtggaaatccgataaaaaaggaacagtcattttgtaataaatgtggaaaacatttaaagacatcgacacaaagaaaaagtgaaaatcaaattgaacatatgcgtgaacagcaatcgtatatttctcgtgaggaaagacaacatcatgattcaacattttataaagaacaaaaacatactggttggctaattgtattatcaattatatttgtcttgttgatagcagcgctattgtatggtgcgtactatgcttacaatcattatattagtgatgagcaaagtcatcaaacaacacagtctcagcaatcaaatgaaagtgatcaaaatagggatcaatccactggtccaagcattgaggtttttagtgatgactttgatcaaggttatatgaagtcagcttcaacaagtggatatagaggtgtttataatggaatgacacgtgaagaagttgaagataaatttggaacatccaatggttctgtagaaagtttgaagtggagttacgaaaaatatggtgatttagctgtagcctacgatgataatgaagttgttagcgtaggtgtagcacctaatcatatttcagaagatcaatttttaagtatgtataatgaaccggatgatagaaattcaagccaactcatttatgatagtaacaaagataatgacttctctgtgttagctaatgttaaaaatggagatgttactgtcattgaaaatgtaaatcaaatttaa

SEQ ID NO: 5245 - DNA, 1326 bp, Staphylococcus epidermidis
ttgatttgttctaattgtggggcacatttagagaaggatgataaattttgtgttaattgtgggcagagtgtgttcgataatccaaagacaaaaactgaacataattttaatagtcaagatagacaatgtccaaagtgtcacaaagtagtaaatgtcgatgataagttttgtatcaattgtggtcattctcttcagcaaacattatcaaattcaaatgacaacatagcatcacatacatattcaaatacaaaacctgaaattgaaaatgaaactgcagatcatattcgattgacagaagaagccaagtatctatttaataacacaacgaaatcaataggtaggctagcagggaatgatgaaagtttaaaactaaatttgcgtgacatgttttctgaggtgtttaaatctcacaccaaagatgaagcggatgatgtatttattgctggaacaaagcgtacgacgccacatattaatgaagtttccgaggagtggggaagaccttgggtgttctcgcgtgtatttttagctttaggtatcactttactagcgttatggatattaacaaatatatttggtaatgccaatgccataccaggtatgatatttattggcgcactattagttcctatttcaggattaatcttcttcttcgaatctaatgcatttaaaaacattagtatctttgatgtaatgaggatgttctttattggtggtgtactatcactcattagtacaatgattttatatcaatttgttacatttagtactgaatcgcaatactatggaattatgactataacagatgcgttcatagtaggatttgttgaagagcttggaaaagcaactgttgttattttatttattaattatttaaaaacaaataaaatactcaatggattacttatcggtgctgctgttggtgcagggttcgcggtgtttgaatcagctggttatatctttaggtttggatttaatttatttgatggagttaataatattactgaaatcactatacaaagaggttggacagctttaggtagtcacctcgtttgggcagctattgttggtgctgcggcagtaatagtgaaagaaacaaagcatttcgaatgggcgaatatcatcgataaacgttttatatttttcttttttgtggcagtgacattacacggaatatgggatacggaaataacacttttaagtagtggttatttaaaatatatcttattaattatgattgcatggctatttatatttatacttatgaaagcagggctaactcaggtgaatcagttgcgtgatgaatacaatcgtttagaggaaaggtga

SEQ ID NO: 5246 - DNA, 1110 bp, Staphylococcus epidermidis
atgacaaatcaaaaaactgtgggtctagtcgtcgctccaggtgttactgaacgccttgcagaaaatctcatacaagaaatgcctaaaatgttatctacgcattatgatcatcagcaagaatggatttttgatttagttactgatccgcttactggttttgctgaatctgtagatgaaatttttgagaaagtagccgattatcacgataagagacaatgggattatgtgatagcaattacagatttaccgatgtttgctgacaaacaagtgatggcattagatattaatatggaaaatggtgcagctatattctcatatccggcatttggctggcgtccagtaaaaaaacgtttcaagcatgcgatttataatattattcaagaattaaatgaagctgaacaagaaagtcgtaattatgataataataatcaaatagagaattcagtaaaaaaacaatttccgctctctaaaatagacaaagaaacaatatatatgaaagaaacagactcttatcacttaagatatttatcaagttcacgttctagaggcatgtttcgccttgttagtggaatgacatttgcgaataatccattaaatatgatggcaagtttaagtaatatagtagctattgcatttactacaggtgcatttggacttgtatttacaacgatgtggcaaatggcttataacttttcaatgtggcgtttatttggaatttcaattattgcgattattggaatgctaatatggataatgatgtcacatgatttatgggaaccagttaataaaagcaaccataagcgtattacttggttatacaatcttacaacaataatgacattgatttttgccattataatttattatattattctttatttactattcttaattgctgaaatcgtattattgccatcaggatttttaggtcagcaagttggattaaaaggtcctgcaggcattgatttatatttaagtattccatggtttgcagcttcaatttcgacagttgcaggtgcaataggtgctggtttacttaatgatgaactcattaaagaaagcacatatggatatcgtcagcgtgtaagatacgaagaacaacgtcgataa

SEQ ID NO: 5247 - DNA, 1185 bp, Staphylococcus epidermidis
atgcaaacagtcggaattataccttcgccaggtatagcgcatcaacatgcaaaaaaaataattccaaatgttaaacagttattgtcaaagcggactaaacatagtcaatggaatttcgacatcaaagtcgatctcatgataggatctgcagaggatgtacatgaaagtgttgaaaaagcagcacaaattaaagaggaacatcagtgggattacgttgtttgcctgacagatttgcctagtatttcagataataaagtggttgtcagcgactttaatagtgacaaacatgttgcaatgctatcattaccgtcactaggttttattgatttgaagcgcaagctagttaaaacgatgacttcattgattgagcaattatattataaccaaccgaaagacaaaaatgcgccacatccttttgtacgcgtgaaggctgtagaacctgacgaagacgccacatcaaagcaacgatatattaatattttatttatcataagttggattcagttaattggtggactgacacgagcaaatcagccttggaaaaacatctttaattttaagaaaatcatttcagttgcctttgcaacaggaacttatgtctcaatattttcaatgccatgggaattaagcgtgatttattcaccgcttcgacttatcatattgatggtgattgctatacttgggatggctggatggctattctatgcgcatcaattgattgaaaagaaaactgctaaatctcagcgtgtatatcgatatatttataattcaaccacacttgttacactaagtttgattacactcataaattatgtcattttatatttattgttaatcatcagtattacactctttgtccctgtggaattatttaatagttggacgagtgcccaatcacaatttacgttctcaaattatatgagattgatttggtttgtatcatcattaggacttttagctggagctatgggatcaactgttgaaaatgaagagaaaatacgtcgtattacttattcttatagacaatatcatcgttataaagaagctgagcaagaacaaaaagaacaagaaacttctcgtgatgtatcacaacaaaatgtcgaacaacaaacttcaagtaaagatgaaaataatgaacaatatgaaggtaaaaaacaaggacatagagaggaggatgacgcatga

SEQ ID NO: 5248 - DNA, 1590 bp, Staphylococcus epidermidis
atgaattggatatcgattattttatttattatggtcgtaggtggcatttctttttatgcctatttgcaatcaagaaaaattaaaacgaatagttcagatggttattttatgggaggaaatagccttactggatttacagttgcctctacaattatcatgaccaatttgtcgacagaacaaattgttgggcaaaatggtcaaagctatgcacaaggaatggaagtaatggcttgggaggttacggctgccgtagcagttgtattgttggcctgggtctttcttcctaaatatctaaaatacggtgttaatacaatttctgagtttttggaattacgttatgatacatttactaaacgttttgtctccattttatttatctttacctatgtcgtatctttcttgcctgtagtattgtattctggttccctagtgttcaataaaatgtttaaagttgatgaactaggtgtaagtagttcaactgctgtcattattatttcatctattattggtataattggcattatttacttatttataggtggtttatcgttaagtgcttttagtgactcaatttatggcatggctttaattatagctgggcttgcgattacaatattaggtctaggtcaattaggagatggcaacttcctacatggcttcgacaaaatcgtgcaagacacacctgagaaattgaatggttttggtaaggtggactcggatgttgtaccttggccaaccctattcttcggtatgttctttaacaatttattcttctggtgcgcaaaccagatgatagttcaaaaagcactcgcagctaaaaatttaaaagaatctcaaaaaggtgcaatatatttaagcttatttaaagtgttcggaccattatttacagtcttaccaggcgtagtagcatttaactattttaatggtagtcttgataaatcagataacgcttaccctgcacttgtaacttcagtattaccagaatgggcattcggcttatttggtgcggttatttttggtgcaatattgagctcatttgttggctcattgaatagtacaactacactattaacactcgatttctataaacctatttttggaaaaaataaatcagataaacatattgctcgagtaggccatattgctactgtagtcattggagttattgttgtagcacttgcaccagtcatctcattatttcctagtggtctttatgcagtagttcaacagtttaatggtgtgtatagtatgccagtgctagctttgattttagtcgctttcttttctaaacgcacatctaaattgggcgctaaagtgacactcttcacacatataattttatacgctataatcagctttgtatttacagaaattaattatctatacacatttagtgtattattctttgtagatttaattattattttgatttttaacaaagttaaaccatctagtgagtttgatttaagcacgcaccaaccgaaagtagaaatgacgccatggaaatatcgttacgttgcaggtattattgttcttgctttagtagtagtaagttatattatcttctcaccactcgtgttggcaaaataa

SEQ ID NO: 5249 - DNA, 114 bp, Staphylococcus epidermidis
atggaaaaaatgtcgctattacaaaatgttctaaagcgcacaattcaatttaaaaacaaaaaagaagttttaaaatttatatttctgtctatatatgagttgtgcacgaaatga

SEQ ID NO: 5250 - DNA, 591 bp, Staphylococcus epidermidis
atgatacaacgtaaaggtgaattaatactttcatggattggcaatggattacatctgttgtatgtatttttaataggcatatttttcataatgacacaaacaagtgattttaaaaatgggatgattcaaggatttatagaagaaaatccgggggaatatgatttagcataccaaacttataatttgatgttaggtttaggtgttgtcttcattattatacttctcattttattaattgtatcaatagttgccgctattttaattggcaaaaatgcaaaagtatcaggaatattacttgttattacaggaatcattggtctctttttaagttttattgctggtgccttatggttaatagcaggtatcatgcttttagtacgtaaaccacaaacacaaaatggccaaatcaattctcaatatagtaatgacatacattcacatgttgtgccagaagaaaagaaacgtgaacaacaacaatataatatgaatgaaccacatattggtcaaacatcaacatctcatcatgatcacgcattgaatgatcaaaataaacgagaaaaccataatcatgataatcaaccatacaaatag

SEQ ID NO: 5251 - DNA, 2013 bp, Staphylococcus epidermidis
atgactttcaagattttgtggaaaatgattaaacaaaattttgttaatcaacgtcatatcattgttccatttattagcgtaataagtattttattcggtattgaatacatattgttatcgttaacaaccaacatttactttaatgagcatcatcctgaattaaaaatatctgcgattattggaatagtgtttatgacgatgttattattcatatttttaatttatgcaaatcactttgttatgaatcataggaaaaaggaatttgccttaaatatggctcttggtatggagaaaaaacatctaagactcatcatcttgattgaacttttcattcaatttattatatctgcaatattgagcattgttggaggttacttatttggtgagctcttttttatgttatttaataaaatagttaatacgcatcaacctcagttgtcagattatccatttgatgttttgtctatgaaaatcacattaaccatgctactcagtttgatgatcatattgtttgttattaacaattttaaaatatcatttaaaaactctttacagttattgcttaaaaataaaaataagacgcatgaaaagtcacgtgtacggttaataatatttttaattttaggattaatttttatagggattggctattatttagctataaaacctaacacggctatcggttccttggggattatattttttgcgattttgtcaacgcttatcggtacctatttgctctttgttagcttaggatcaatagttttagaaatgttacaaaaattagatcattattattataaacccaatcattttttctttattgcaggactcaaatcacgcgtaaaatctagtgcgattggtttagctacgatttcatttatgtgtacatttctgattgttacgttaagtatgacagtctcaacttatagaaatatggatcataggtttgaatttgcatttaaaaatgattacgcaggttattatattggtgattttcataaagatagcaaaattcaacgtaagatagaaaatttaaaaaaagatattcgccaagaagttccaactggtcaatttaaaatctatgcacgaggtatggttggagcggaattgcagggaggcttaaaacataaaaagctaaaaagacaaactgtatcgagtggtttatttaattttggaaataagcaaaaattcaactcttttatttctatatataataaaagtgattataataaaaacaataaaaaaataaaattagatgatgatgaaattgcaataagtacaagtgtgtcattatttaaaaaaatgaaaacgctcaatatattcgggaaaacatacagagttaaatatattgagtcgacaaatatggataacttactctatgcagatggtataactttaattgtgaatcaacaacaactgatggatcgtattgttaatgaatatcgtaatcacaatgatgaaaatttaatcatcactcctaatcaagtccaaactgccgttgaatttaatgtattaaaagaaaaggataagttgaatcatcgtattaagaaaataggtgttcaacacgatattgaatttcaagtgaaaaaacaaaacctattgatgtggaaacaagtcaactcaagtttaatttttgtaggaagtgttgtatctctagttttattgataggtatatttcttatgatgtattataaacaagtttcagaaggacatgaagatagagatgcatatataacgatgaaacaactaggactagatgaaaatttaatcaaaaaaacaattaataaacaagtaatatgggtatttctcattcctgtaattgttgcaatcatacatacgttagctgcttttcgtatcatatactctgtattaggaatcgttggtcaatatgacttgggactgtatgctacaagttatgtcggtgtgatagttgtatttattattttttattcaatgatgtactggattacttctagaatttattatacgatgataaacggtaagcattaa

SEQ ID NO: 5252 - DNA, 750 bp, Staphylococcus epidermidis
gtgttattagaggttaaaaatgtaaaaaaagtctatggcagaggtatgaacacgacaatggctttaaatcaaatgaaccttgaaattgatgaaaatgaatttgtagcaatcatgggcgagtcaggttcaggtaaatctacattactcaatttaattgctacttttgatcgtacaactgaaggattaataaagttagacgggttgccgcttaatcaattgaagaataaagacattgcacgctttcgcagagaaatgatgggatttgtgtttcaagattttaatgtgttgaatacgatgtcgaacaaagataatattttgatgcctcttgtacttgcaaatgaacgtccgaaaataatgcaaaaacgcttaacggaaataagtgaacaattaggaattgaagacttgcttgaaaaatatccgtctgaaatatctgggggacaaaaacaacggatagctatagcccgtgcgttgatagcacgacctaaattattattagctgatgaacccactggtgcacttgattcaaaaacctctaaaaaccttatgtgtttatttcgaaaaattaatcaaaagcatcaaactatattaatggttacacattcaaatattgacgcgtcatatgcgaaccgtgtcatcttcatcaaagatggtcgtttgtatcatgagatttatcgtggtgaagaatcgcaaacagattatcaaaagcgtattgccgatagtttggccatattgaatggagtaggtgactaa

SEQ ID NO: 5253 - DNA, 897 bp, Staphylococcus epidermidis
atgaagtttgcatatattcaatcgattcgtaatgagatttcaattattttaataattctattattttttgcacttatattttatgtgttttctttaccttttgatgcatacgtactagcaatcagtatcatattactattgatgtttgtacgttggtggataaagtatttaagttttaaaaagaatgaacatcttaaagataaagtagcatatttagaacatgagttagcacatgttaagaatcagcaaattgaatatcgtaacgatgttgaaagttattttttaacatgggtacatcaaattaaaacacctatcactgcctcacaattacttttggagagaaacgaggagaatgtagttaatcgtgttagacaagaaattgtgcacattgataattatacaagtctcgcattaagttatttaaaattattaaatgaagagtcagatatgacaattaccaaagtgacagttgatgatttgattcgcccgttgattttaaaatatagaattcagtttattgaacaaaagacgcaaatccattatgaaaaaagtgaggacattattttaaccgatgcacaatgggcttctataatgatagagcaacttttaaataatgctttaaaatatgctaaaggtaaagatatttggatagattttgatgttgccaatcaaactctacagattaaagataatggtattgggattagtaaagcagatattcctaaaatttttgataaaggatactcaggatttaacggtagattgaatgaacaatcaactggtataggtctatttatagtgcaacacattgcaaatcatttaaatatacaagtaactgtacaatcagaattgaatcaggggacagtattttttatacattttactaaagaaaaataa

SEQ ID NO: 5254 - DNA, 666 bp, Staphylococcus epidermidis
atgaagattttcattgtagaagacgatttagtgattgctgaaagtttagctaatgagctatctaaatggaattatgaggtgcatgtggttgataattttaaaaagataatggaagattttcgccgagtagaaccacaactcgtattattagatatcaatctaccaacacttaatggcttccattggtgccaagaaatgcgaaaagtatctcatgtgcctattatgtttattagttcaagaacagataatatggatcaaattctggctatccaaatgggtggcgatgattttatcgagaaaccatttaacttgtctttaacagtagctaaaattcaggcactattacgtcgcacttatgatttatcaatagctcgtgatgaaatagctgttaaaggttgtaaactaattgttgatgaggccaagcttagcaaggataatgaacatgttcaactttccttaacagagctacagatattaaaattgttatttcaaaatgaaaataaatatgtaagtcgtacagctttaattgagaagtgttgggagtctgagaattttattgatgacaatacgctcgcagtaaatatgacacgattacgaaaaaaattactttctatcggtgtcgatgatttaattgagacaaagaaaaatgtaggatacagggtttga

SEQ ID NO: 5255 - DNA, 180 bp, Staphylococcus epidermidis; identical to SEQ ID NO: 4698

SEQ ID NO: 5256 - DNA, 1470 bp, Staphylococcus epidermidis
atgaaatttatgaacaaaatgggtaagacgacgcttgcttcatcaatcgtagcagcatccgttttaagtacggtaaacgtatcatatgcttcaggtagctcagaacaaagtgctcaaactaagcaaacacaaaacgatgccattgctttcggcaacacaaaaaatccaaaaaatgtcatcttcatggttggcgatggtatgggaccttcttttaacactgcatatcgctattataaaaataagcctggtgctaagaaaatgactccaactgcatttgataaatatctaaaaggaacaaatcgtacttattctaatgatcctaaagaaaatgttacagactctgctgctggaggaacagcttttagtaccggtcacaaaacatataacggtgcgattagtgttgatacaaataaaaaaccaattaaatctgtgctagaacaagctaaagaacaaggaaaatccactggtttagtaactactgctgaacttactgatgcaacacctgctgtatatgctgctcatgtagattcacgcgacaaaaaagatgaaattgcacagcaattttataatgataaaataaatggcaaacataaagtcgatgtgatgttaggtggcggtgcaaaatacttcggtaaagaaaataaaaatttagcgaaaaaattcaaaaaagatggttatgatatcgtttctaataaagatgaattaaatcaatcatcaagcaagcaagttttaggtactttctcagaaaaagatatgccattacaaatagatgcacctcaatctaatccgttgctagtagacatgcaaaacagtgcactaaataaattaagtaaaaataataaaggattctttttaatggttgaaggtgcttcaattgataaagctgcccaccctaatgatatcactggtgtgatgtctgaaatgtctggtttcgaaactgcttttgataatgctattaattatgcaaagacacataaagatacacttgttgtagcaactgcagaccactcaactggcggtctatcaaccgcaaaaggtaaagattataaatggaatccagaggctattcacaagatgaaacattctggaatgtatatgacaaaacaaatcgctgatggaaaagatcctgaaaaagtgattaaagatggatacggcattgatttcccaaataaacaactcgataaagtgaaaaaagcagcagacgagcttcacaaattacaaaaagaaggtaaagatgacaaagacaaaaaagttgtagaacaaacaacaaaattacaaaatgcaattcaaaaaccaattaacgatgcttcacacacaggttggacaaccaatggccatacaggtgtagatgttaacacatatgcatatgggccaggttctaacaaattcaaagggaatatggaaaatacccaaagcgctaaaaacttatttgactttttcggaaacaatgtaacatcaaatcaaaattag

SEQ ID NO: 5257 - DNA, 1545 bp, Staphylococcus epidermidis
atgtctaaaattttactaactggtgcatcaggttatattggtaaccatctcaagaataaattaaaaaaagatcatgaagtgatagctatatccagaaatactcataataaaacggatgaagaaaatgtcacgtggaagtcagcagacttatttgatttggacgaaattacaaaagtaatgaaagatgtagatacagcgatatatttagtacactctatgatgccatcagcaaaattaacgcaggctagctttgaagatatggatgcattgttagcagataattttgcgcgtgcggctcaaaagcagggtgttaagcatattgtctacatgagtggtttaataccagaaaatgatgagctatctgcacatttaagaagtcgacttgaatgtgaaaaaattcttggtgattacggtataccagttagcacattacgtgcaggtttaattattggtgcaaaaggtagttcttatccaattcttaaacgactagttgagagattgccagcaatggttttgcctagttgggcttacaataaaattgcgcctgttgccattgacgatgtgatagatggtttagcagcattggtgaatcgaacacccaaagataacgaagcaattgatatcacaggtcctgaagtgatgaattataaaacgctgatacagcgcacagctaacgtacttgataagcgactgcctatgcttgatttacctattatacccattatcgtaagtcggtattgggtacaactgatttcaaatgtaccgaaagaaatggtatatccattaatgaatagtttaactcacgatatggtaccacatcgaaaacgcgttgtgtctaacttgtccgtaggaaatatcacctttgaagatagtgtgaaaagagcactaagagaagaacaaaagacttctaagaaaaagtcggattcgaaaaattctcaatcatttgggcgtatgcatcaagaaattaaagatgtacgagccattacacggtttaaaattccggaaggttattcgattaaagatgtgactaaagaatatgcaaaattcatcaataatatcacactacatatcgttaaaggtacgataaatgaacgagaatttaatatgaatttgcccttcattaataaatttattttaaaaatggaacgtgatgaagctgactctacagaagatatggtggtatataatattgtgggtggcgatttagcacattcaaatgatggtggaaatgcacgttttgaattccgaagaataagaaacaccaatgagggtattattgctttacaagaatatcaacctacattgccttggggagtatataaactaactcaagctaaagcacacaagactgttatgaatatttttaagaataaaatggcacgtttagcgcaacaaaaaaatgtgaaagatgaaacatatatgtctaatcgtgtaactattggagtaacagtagcatcagcgttcgttattggaagcgcagtagggttccaactttttaaaaagcatcaaatcaaaaagaacacaatgtcgaatgcagaattataa

SEQ ID NO: 5258 - DNA, 2334 bp, Staphylococcus epidermidis
atgaagattaacatatttggatataatatcttcgccaagggcggaacatcaagaagtaatattaacttagtgaaaagcttattagaaattggacatgaggtacactactttaattatcaggactataataaaagtgatatcacaaaactaattatttacgaaggtttgagcacaaagcttcttcatattcatcaatttaatagtggaaaagaacttgctcatggagacctacttataattactagagaaaccttctttaatcatgcatatctagttaaaaaattaaatagcaagattaagattgttggtgaaatacatggtccattggaatatattaatgagaatatagatttagcattagactgtattgattgcgttcgagtgagtacagctagaattaaaaatgaatttatagctaaatatgactatcatcgggtttttaatcaatacgtaaatgcacaacatatcgatttaaaatcagagccgataaatactaaacgaaattttttaattaaagcacgttttgaagatgaagttaaagatatttcatatattattaaattgtttaattacatcattaaaaaccaaattgttgacgatgctcaactttatttaataggatatggtccttcagaaatgctttacaaaaatttgataaattactatcatcttaatgattatattcatattaatgaaaaagaaccacagagttatatttatgtatctagttcgccatatgaaacgctcggctattctatattagaaacgattgcacagggtaataaagctctagtttactatggtgatgataacgtgttaaaggatatctatgcaccatatgaagcgatacgttttttaaccaaagatatgattaaagatagtaaaataattaaagactttctaaactataaatatagtcactgtgatcgacaaaaagattatcgacagttggaaagtacgtttaaatgcattaattatggacaggaatttttaaataatgttgaaactttctcttcatctcaacatgtaaaagtgaagaaaattcatcgacatctcggtagtgaaaaacaaatagatatagcaagtcgtttaaaagagagtcgttggatgaatttaattagaaaaaataaatatttatttaataaatgtaaaacgtactatgaaaaaagaacgcatatgagctatatcaaaaatttaaatcaaatacctgtagacgacgattcaatatttatagagtctttccatggcaagaattttagtggagatcctaaatatattgctctcgctattaagagacagtatgatcataaaaaaatatatgtgagttcaaccaattcacttgttgatatggaaatcaaacgttacggttttacacctgttcgatttggaagcgagaaatatattaaaacgtttagaaagtgtaagtatgtttttatcaatggtaactcgtgggataaagtgtacaagtcttcagatcagatatttattcaaacatggcacggttttccattaaagaaaatggttaatgatttaaatgaacaacatgaaagacaacaacaactagaggcattcataccacgcatgaaaaaatgggattacattttgacatcatcagatattaatacgacgttgttggaatctgcttttatgctaaataaaaatccaaatcttaaagttctagaatacggcgcacctaagaatgaatatttaataaataataataatttacaagagcgccagcagttacagcttaaatatatgtataagatagatgatgataaaaaatatatattatattgtcccacttggaggggaaatcaaagaaaagaagtcactcagattaatttaaaagatttacttaaatatttaccagagaattatgagattattgtgaaacttcatcctaatgaaagtcatttaagaaccagatataatcaaatagataatcgaattcactgttatttcaatgaacttgttgatattcaagaactgtatattctgagtgaatgtatgattacagattactcgtcgaccatttttgactatatacatttaaacaagccagtctttattcttcaagaagacgagcaacaatataaacaaagtgttggtttttattttgatttgtttgaagtgggtgattttcttaaagcctctttaaatgaacacatgttagctaaacaaatttgtagcactgattatataaattattcaaaagtggttcatcgtttgatgaaacaagatagttcgaaaagcagtgaaaagttaatggccgaaattcttggggaaccagaatatccaagttcatcaaactgcaaacaacagatttcttaa

SEQ ID NO: 5259 - DNA, 141 bp, Staphylococcus epidermidis
ttgttcaagaaccgcatctttgaaaggagtgttattaatatgaaaaaattagcagttattttagcattagctggtgcagcgttctatggtttcaaaaaataccaaaatcatgtaaaccaagctccaaacattgaatattaa

SEQ ID NO: 5260 - DNA, 936 bp, Staphylococcus epidermidis
gtgaaacgcacaacttctcataaagcaactactgtgtcgccaacttctaaagctaaaatatcaacaaagacacaacaatcaactaaaagtcatacaacttcagttaagaaaaacactacacaactaagtaaaacaaaatctccgtcaacgtcaacaaaatctaaaacagttcaatcctctacgacaaaggcacaacctactttatcgactcaagttagtacaactactaaagcaaagcaactttcaacgccaactacttctaaaactgatagcagtaaagctttagtaagtttagcatctacagaacgtaaaatagataaataccaatcgatgactcagttagaaaaagaaacaactgaaggtgtagattggagaaaagatacaaaaaacacagggaatcaagtactcattgtggctccacatggcggaagtattgaacaaggtacaacagaattaactaaagcattagcagataaaggtaattatgattattattcatttgaaggcattcgacctaaaaataactctgaattacatgtgacgtctacacattatgatgatccgacattaaatcaaatgattaaaaaccgtactgcaactatttcgattcatggcgcatcaggtactgagaagattatctatcttggtgggccccgttcagatttaagaaatgctatagagaagcaactcgtgggacgtggatttacagttaaagtcccaccagagtatctaggtggtcaaaataataaaaacttcattaatagagaagacaataacactggcgttcagttagaattaacgactgctttaagaaaagcattctttaaaaatggagatactagtacaaaaaatcgtaccaataaagaaaattggacaccaacaatggaagcatttattaatgcattatatgaaggtatcaatcaaacgtattcataa

SEQ ID NO: 5261 - DNA, 405 bp, Staphylococcus epidermidis
atgaaagtcaaaagtatttcacggttcttttcaatgaagaaagtgacgctaagtttcgttactttatttattggagtagggacaataggttcatacaatcagtttgctgatgcaagtacgaaaacgcaacaaacacatgtaactaagacatctccaactcaaaagacgacgtccaattttaaacgttcagttaaagatacgtctgttaaatctagagctacatcaacaaaaagagctacatcaaccaaaagagctatatcacccaaaacatcatcaactaaaaaaactacaatagcaaaaaaatctaccacagtaaataaaacgcgcacaacaaccaggactcagcctacattcgtaagagttcaacaacttcaacacgttcaaaaacaatacctacttctgtga

SEQ ID NO: 5262 - DNA, 168 bp, Staphylococcus epidermidis
ttgaattttaaagtatttctaattatcatttttcatgattttcttatttattatgaacacggttttatgtatagccgtttcaaagaacatgctgaacaatcatcacatttatttatattaaaatcacatttaaagccatttccaccatttcgatatacatatgattaa

SEQ ID NO: 5263 - DNA, 117 bp, Staphylococcus epidermidis; identical to SEQ ID NO: 3773

SEQ ID NO: 5264 - DNA, 132 bp, Staphylococcus epidermidis; identical to SEQ ID NO: 3774

SEQ ID NO: 5265 - DNA, 186 bp, Staphylococcus epidermidis; identical to SEQ ID NO: 3775

SEQ ID NO: 5266 - DNA, 939 bp, Staphylococcus epidermidis
atgaaaaattcatcaagagaatatcaccagattaatagccaaaaaaaggttttggtgatcggcagtgctgttattgatgtgattttaaatgttaatagtataccaagtagtggatcagacgaatttgcccactctgagaagacaatagtaggtggttgcgcatataatgtaggcgatatacttagtcagttcaaagctaattatgatttgatggtgcccgttggcgatggtcttaatggaacaattattgaaaataagttaaaaaaagaaggcaaaacttcattattaaataatatattaggtgataatggttggacgttatgtatcgttgaaaataatggggaacgcacttttttaacgatacctggagttgaaatgacttggaaaaagaattggtttaaagaaattgatcttaataagtatgattatatttatgtgtcaggttattcttttgaacctccttcagacgaagttttattagaagaatttagtcgtttaaacgagaaaactacaattatttttgacccctcaccaaggattaataaaatgaactgtgagagtataaggaagttgcttgaaataaacacaatagtacatgccaacgaaggtgaaatattacaattgagtagtgagaatcatgtgaaagatgcggcattagaagtaagtaaacagactaatcaacctgtgatagttacattaggcaacaaaggtactcttatagcaaataagtgtaaagttaagattttagagggggaaaaggttcctgtaactgatactataggcgctggtgattcacacacagcagcttttatagcaggtttgctagataaccaaagtattgaaaaagcttgtatatggggaaacgaagtagcatctaaaattgtgcaagaacgaggtggaaatacggatatattcaatcctatagataaagaatattaa

SEQ ID NO: 5267 - DNA, 1335 bp, Staphylococcus epidermidis
atggaaaaagaagaaatctttcttcctgaaagtgaaaaaaatgggaaacctatcgacttattttttatatggtttgcagccaatctaggtattctcgggatagtttatggcgctgtcatagtaagttacggattgagctttttacaatcaattttgattgctataataggatcgttatcctttgttctagttggttatataagtgtagctggtagagatagtggagctataacttttatgctctcaagagcaccatttggatttaaaggcaatcatatacctgctttaattggctgggtaggtcaagttggttggttatctgttaatgtttctacaggaactttaactcttctggctttattcaatacttttggttttaagactagtacatttctaattttgatgagtttagcgatttttgctgggctagttattatatctgttcttttttcacaaaaagtacttgtatcagtacaaacatttttcacatatgtatttggtgcattaaccttattagttataacaattttaattactaatactgattggaacgcccttttttctatgaaatctgggtcttggcttaaaggttttctacctgcattagcctttgtaatagtagggactggattgagttggactaacgcagctgcagattatagccgttttcaaaaaaaatcgaacagttctttatcaataatcactagtgttacagctggcgcgtttatccctttatttatcattataagtactggaattttattagctacttcagagccacaattagcaaatgcagaaaatccaatattattaattagcgaagtactaccaaattggatgacagtaatttacttaatatctgctttaggtggccttactcctatgtgttttttaggtttaaagtcctcaagattaattatgagtacttttgatttgaaagtaaaaaattctacagttattattattcattcaattattattattgccattcctatttatgtcttagtagtttccagaaattttctcgctttttttgaaatgtttttaggagttttgggtattggattagctgcttggtctgcaattttcattgttgattatgcaacattgagaaaaaatataggctatgaaaaaaaattggtttgcgatccccagtataatagtctgaatattaaaacagtaatggtctggagtatagcagtaatagtaggtgcattaataaacatttttacttcttcaagttttgatataattgtaacatttatggttagcggatttttatactatatatttaatatttctttaaatactcacagaaagaaggctaaaaaatga

SEQ ID NO: 5268 - DNA, 987 bp, Staphylococcus epidermidis; identical to SEQ ID NO: 3778

SEQ ID NO: 5269 - DNA, 1848 bp, Staphylococcus epidermidis
atgactaatttaagagaagatgttcgtaatatagcgattattgcgcatgtcgaccatggtaaaacaacattagtagaccagttgcttaaacaatcaggtatatttcgtgaaaacgaacatgtcgacgagcgtgcaatggactctaatgatttagaaagagaacgtggtattacgattcttgctaaaaatacagcgatagattataaaggtacgcgtatcaatatattagacacacctggacacgccgattttggtggtgaagttgaacgtatcatgaaaatggttgacggtgtcgtactagtggttgacgcatatgaaggtacaatgcctcaaactcgttttgttcttaaaaaagctttagaacaaaacttaaaaccggttgtagttgtgaataaaattgataaaccagctgctagacctgagggagttgtagatgaagtattagacttattcattgaattggaagcgaatgatgagcaattagacttcccagttgtttatgcttcagctgtgaatggaacagcaagtttagactctgaaaagcaagacgaaaatatgcaatccctatacgagacgattattgactatgtaccggcaccagtagataattcagatgaaccattacaattccaaattgctttactagattataatgattatgtaggtcgtataggcgttggacgtgtgttcagaggtaaaatgcgtgtaggtgataatgtatcactaattaaattagatggtacagttaagaactttcgtgtgacgaaaatatttggttactttggtcttaaacgtgaagaaattgaagaagcacaagcaggagacttaatagctgtttcaggtatggaagatattaacgttggtgaaacagttacaccacatgatcatcgtgacccattaccggtgttacgtattgatgaaccaaccctagaaatgacttttaaagtaaataactctccgtttgctggacgtgaaggtgattatgtaacagctcgacaaattcaagaaagattagatcaacaacttgaaacagatgtttctttaaaagttacacctactgatcaaccagattcatgggttgttgctggtcgtggtgaactacacttgtctattcttattgaaaacatgagacgtgaaggctttgaattacaggtttctaaacctcaagttattttaagagaaatcgatggtgtgttaagtgaaccatttgagcgtgtacaatgtgaagtgccttctgaaaatgccggggcagtgattgagtcattaggtgcacgaaaaggtgaaatgttagatatgatgacgaccgacaatggtttgacgcgtttaatctttatggtacctgcacgcggtatgattggttatactactgaatttatgtctatgacacgaggttatggaattattaaccatacatttgaagaatttagacctcgcgttaaagctcaaatcggtggtagacgtaacggtgcattgatttctatggaccaaggtcaagcaacatcttatgcgattattaacttagaagatcgtggtgttaactttatggaaccaggtactgaagtatatgaaggtatgattgttggtgaacataaccgtgagaacgatttaacagtaaatattactaaagcaaagcatcaaacaaacgtacgttcagctactaaagatcaaacacaaacgatgaatcgtcctagaattttaacattagaagaagcgttacaatttatcaatgatgatgaattggtggaagtaactcctgaaagtattcgcttaagaaagaaaatacttaataaatctgcccgtgaaaaagaagcaaaaagagttaaacaattaatgcaagacgaacaataa

SEQ ID NO: 5270 - DNA, 192 bp, Staphylococcus epidermidis
atgcaacaaaaaaaatctaaaggtattttctggatcttctcaatattggctgtcatttttttaactttatttagtttcgcattaggtgctgctaatgttccaatgatgattttaacatttatacttctcattgtaacatttggtgttgggttcagtgtgaaaaagaaatatcgtaaaaacaattggctttaa

SEQ ID NO: 5271 - DNA, 822 bp, Staphylococcus epidermidis
atggctttatatgattttgcaaaagggttgatactagaagcaggaaataaagtaaggttgatgatgcaagaagagttagacattaaaactaaatcgaacccaaatgatttagttacaaatgtggataaggcgacagagaattatctatatgaaacgattcttcataattatccagatcatcaggttattggcgaagaggggcatggtcataatctcgagtatttaaagggggttatttgggttattgatccaattgatggaacacttaattttgttcaccaaaaagaaaattttgccatctctattggtatttatcatgatgggaagccttatgcaggttttgtttatgatgtcatgaaagatgttttatatcatgcaaaggttggacagggtgcatttgaaaatacacataaacttgaaatgattcaaaatactgaacttaaaagaagtattataggtattaatcccaattggctgacgaaaccaatactcagtgatatttttagttcaatagtgaatgaggcaagaagtgcacgagcatatggtagtgcagcattagaaattataagtgtagcgaagggtcaattggcggcttacctaacacctagactacaaccgtgggattttgcaggtggattgttgattttgaacgaagtaggtgggataggaaccaacttattaggcgataaattagacttcaatcaaccgaattcaatattaatagcaaatcctagccttcatcgtgaaatattaaatcatcatttaaatcagcaaagagatacacttattacactccatgaaaaaaggtttggaaagagatag

SEQ ID NO: 5272 - DNA, 612 bp, Staphylococcus epidermidis
atgaccaaatatactttttcacctaaggattttaaagcttttgaagtcgaaggtttagaccaaagaatggaagcacttaatgactatgtcagacctcaacttcatcaattaggatcttattttgaagaatatttcactacacaaacaggtgaaactttttatgctcacgtagctaaacacgcacgtagaagtgtcaatccacctatcgatacatgggtagcttttgctcctaataaacgtggttataaaatgttaccacactttcaaatcggattgtttagaaatcagcttttcattatgttcggtatcatgcacgaaggtagaaataaagaagaaaaagtgaaaatatttgataaacattttgataaactgacatctttaccaagtgattatagtgtttctctagatcatatgaaaactgaaaagcactatatcaaggatatgagtaatgaagagttgcatgctgctatcgatagagttaaaaatgttaaaaaaggtgaattttttgttgccagaacattatcaccaaccgataaaagattaaaatctgataagtcttttctaaaatttgttgaggaaacttttgatgaatttttaaaattttatcaataa

SEQ ID NO: 5273 - DNA, 1347 bp, Staphylococcus epidermidis
ttgaattccaataataacaatcatgaacaacaacgaagtttagatgaaatcaataacaccataaacttcaatcataatgatagtgcaagtcaaaaatttctggcttttttaggaccgggattgcttgttgcagttggttacatggatcctggaaattggattacatccatgcaaggaggagcacaatatggctataccttgttattcgtaatcttaatctctagcttatctgctatgctgttacaaagtatgactgtaagattaggaatagcaactggtatggatttagcacaaatgacacgtcattttttaaataagcctgtagcaattatgttctggattattgcagaattagcaattatcgctactgatattgcagaagttataggcagcgctatcgcattagatttaatcttcggcataccattaattgtaggcgcattaatcactgtatttgatgtatttttattattattcatcatgaaatttggctttagaaagattgaagctatcgtgggaacattaatctttaccgtattggccatttttgtatttgaagtttatatttcttctccacatataatagatatgcttaatggttttgtgcctcataaagaaattattacaaaccaagggatactttatattgcactaggcatcataggtgctactattatgccacataacttatatttacattcttctattgtacaatctcgaaaatatgatagacacagtattcatgaaaaagcacaagcgattaagtatgctaccatagactctaatatacagctatccatcgcttttgtagtcaattgcttattacttacacttggtgcagcactattttttggaactaaaactgaagatttgggtggtttttatgatctttatttggctctaaaaacagaacctgctttaggtgcaacgcttggcggtattatgagtactttatttgctgttgcccttttagcttctggtcaaaattcaactataacgggaacgttagcaggccaaattgtgatggaaggatttcttaaattatccattccaaattggttacgtcgtcttatcactcggtctttagcagtgatacctgttatcatttgtcttatagtatttaaaggaaatactgaaaaaattgaacaattacttgtcttttctcaagtgttcttgagtattgctttgccattttcgttaataccgcttcaattagctacaagtaatcaaaatcttatgggtccttttaagaataaaacatggattaacatcatttcttggttactcataattgtcttaagtggacttaacgtatatcttatcattcaaacattccaagaattatga

SEQ ID NO: 5274 - DNA, 537 bp, Staphylococcus epidermidis
ttgaacagaaaagtagaaaaaagattagcgtggattgcaaatatcttgagcctattatttttaatttttggtattctatcgatatttgttattaataacacatcaaatcaacaacaatataatgaattaatgaagcagttttcaggtaataatcaagatatgtcatctgaaatgtttttagtttctcttattgcgtcattagtcattttaggtttttcaacgctattaggttttgttggtacaatggtaattgaaggtagaaaaaaccttgctgctagtttactcatagcagcggctatcgtaggtttatttacgactaatttaatcgcaatggttttatggatgattgctgcgattagactttttgcaaaaaaagataaaacagatgtaaatgaaaatgctacggctcaacttcgtcaaaaccattcaaagagccaaagtgattggaatcatcaacaaaaccaacaacagaaagatgcttgggatcctgaacaagaaatcaacaaacaaaaaaaggacgatccatatatatattaa

SEQ ID NO: 5275 - DNA, 1152 bp, Staphylococcus epidermidis
atgttaggagagcaatatacacaaattaagcgtccagcaaatcggctaactgaaaaaatattaggttggtttagttgggtattcttactcatattaactattgtttcaatgtttattgcgctcgtatcttttagtaatgatacgtcaattgccaatttagaaaacacacttaataataatgaactcgtacaacaaattttagccaataatgatttaagtacaactcaatttgtgatttggttacaaaatggagtttgggcaattattgtttattttattgtttgtttgctcatctcgtttttagcgttaatttctatgaatataagaattttgtctggttttctttttttaatagctgctatagtcacaattccgcttgtattgttgattgtaactctaatcattcctatcttattctttatcattgcaatgatgatgtttgctagaagagatagaatagaaacagtgccatcttattataatgaatatgatcaaccatactatgatgagagaggtttttatgaaccagagtcaagaaatgaacatggatataatgatgatgtgtatgaacctatgcatactaaaaaggaagatagaaatacaagacgtcaattcaatagaaatgctcagcaacaagattcctataatggtataactgataatcaacccgatgaagatacatcttccgatcaactttattcagacgaatatgtagataatgaagataaatattctcaatttccaaaaagagcagttgaaagtgaatatgcatctcaacaaactgaagatgaaccaacagtcatgtcaagacaagctaagtacaataaaaaatctaaaaatacggattttgaagatgcgcaacaggaacatatggaaggtaatcaatttgatgacgtaggagttgttgaaccacaaattgatcctaaagaactaaaagcgcaaagaaaaagagaaaaagcagaaatacgtgctaagaaaaaagaaaagagaaaagcatataataaacgtatgaaagaacgaagaaaaaaccagccaagtgctgttaaccaacgacgtatgaattatgaagaacgtcgacaaatgattaataatgaacaagaagatacagataataacttaaatcaacaggaagattcaaaaaaagaaaattaa

SEQ ID NO: 5276 - DNA, 1074 bp, Staphylococcus epidermidis
atgaagcgattttttcaacttatcatttctgctatagttattggtattttatgtttaatgattagtcattggtttaaatcaaaagataatacccactcaaatgagaagttatatgtttacaattggggagaatatattgatcctagcttaattaagaagtttgaaaaagaaacaggtatacaagtcgtatatgaaacctttgattcaaatgaagcaatggaagcgaaaattcgaaatggaggcacacactatgatgtagcttttccaagtgaatatactgttcaaaaattaaaaaaagctaaactgcttgagactttaaatcatgacaaaattccaaatatcagaaatttagacaatgattatatgaacttgtcatatgacccaaacaatcgatattcaattccatatttctttggtaccgtaggaattttatatgataaagagaaatatcctaatgaaacgttcgatagttgggacgatttgtatcattctcaattcaaaaatgatattttattagtagacggtgcacgcgagataattggaatgggattaaataaattagggtatagtcttaatgacaaaaatccgacccatattcatcaagcagaaaaagatttgcataatttagcacctcaagttagagggatagtaggcgacgaaattactatgatgcttcaacaaaacgaaggacatgttgcagtagtttggagtggcgttgctgcaccacttgtacaggaaaatactcgttataattacgtgatacctaaagaaggctctaacctatggtttgataatatggtgatacctaaaactgcacaaaataaagaaggtgcgtataagtttatgaatttcttactagacgcgcaaaatagtgcccagaatacggaatgggtagggtatgcaacacctaataaagcagctcgaagtaagttgcctaaaaaggtaagaaatgattatagattttatccatcaaatcaagaacagcaacggttagaagtctataaagatttaggtcaaacgtctctcagtgaatataatgaaagctttttaaattttaaaatgtctttaaaatag

SEQ ID NO: 5277 - DNA, 651 bp, Staphylococcus epidermidis
atgtcggtgatttttaatacagttgcagtggcacttttatctgcatcgattgctacagttataggtacatttggtgcgatcgctttatattacttacgcaacaaacggtttaaggttacgctattaacgatgaataatgtattaatggtatcttcagacgtagtcattggtgcttcttttttaattatgttcactgcaataggacatttcacaggtttaggtttaggattttcaacagtgctagcatctcatatagcgttctgtattccaattgttgttatcatcgtcttaccccaattatatgaaatgaatgataacatgttaaatgcagcaagagatttaggtgctaatgaatcacaattattaactagcattattatacctaatattatgccctcgattataggaggattctttatggcattaacatattctctagatgattttacggtaagcttctttgttactggaaacggatttagtgtattgtctgtagaagtttatgctatggctcgaaaaggtataagtatggagattaatgccatttctacaataatatttattgctattatgtttggagtatttggatattactttattcaacatatcgttaatcgtcagaaaaagatgaagcgaggtgttaatgaatga

SEQ ID NO: 5278 - DNA, 804 bp, Staphylococcus epidermidis
atgcataatatcaataaatggttactggttccttacttattatggatggttatatttattatcattccagtcattttacttgtttacttttcttttatagatattcatggtcactttagtttcacaaattatgagcaggtattttcaacaagatatttaaaaatgtttattgattcaatatggtatgccgctttaattactatgattaccttaataataagttacccagctgcgtactttatttcttattcaagatttcaaaatatactgcttatgttgttaattatccctacttggattaatttacttcttaagacctatgcatttattggtttgttggggcatgatggagttattaaccaagctctacatatatttcaaatacctaaattaaatttgttgtttacaagtggtgcatttttattggtggcgagttatatttatatcccatttatgattttgcctatatttaacagcatgaaagcaattcctaacaatattttgcaagcctctaatgatttgggcgcgagtacatttactacgtttcgtaaagtaatcgttcctttaacaagagaaggtattaaaacaggtgtgcaagtaacatttataccagctctttcactgtttatgattactaggttgattgccgggaacaaagtaatcaatgtaggtacagcaattgaagaacagttcttaactatacaaaattatggattaggttccactatagcactttttctcattatttttatggcctttttactcattattacaaaatcaaaatcatctaatgggaaggggtga

SEQ ID NO: 5279 - DNA, 1095 bp, Staphylococcus epidermidis; identical to SEQ ID NO: 4185

SEQ ID NO: 5280 - DNA, 540 bp, Staphylococcus epidermidis; identical to SEQ ID NO: 4186

SEQ ID NO: 5281 - DNA, 279 bp, Staphylococcus epidermidis; identical to SEQ ID NO: 4187

SEQ ID NO: 5282 - DNA, 1407 bp, Staphylococcus epidermidis; identical to SEQ ID NO: 4188

SEQ ID NO: 5283 - DNA, 1302 bp, Staphylococcus epidermidis
gtggcatttgaatttagattacccgatatcggggaaggtatccacgaaggtgaaattgttaaatggtttattaaagccggcgatacaattgaagaagatgatgtattagcagaagttcaaaatgataaatctgtagtagaaattccttctccagtaagtggtactgttgaagaagtgttagtagatgaaggaacagtggcagtagtaggagatgtcatcgttaaaattgatgcacctgatgcagaagaaatgcaatttaaaggtcatgacgatgatgaggattctaagaaagaagaaaaagaacaagaatcaccagtgcaagaagaagcttcatcaactcaatcacaagaaaagacagaagtagatgaaagtaaaactgttaaagcgatgccgtcagtgcgtaagtatgcacgtgaaaatggtgtcaatattaaagctgtaaatggttctggtaaaaatggacgaatcacaaaagaagacatcgatgcatacttaaatggtggtagttccgaagaaggttcaaacactagcgcagcatctgaatcaacttctagtgatgtcgttaatgcttctgcaacacaagcattaccagaaggcgacttccctgaaactacagaaaaaatacctgcaatgcgcaaagcaattgctaaagcaatggttaattctaaacacactgcacctcatgttacattaatggatgaaattgatgtgcaagaattatgggatcaccgtaagaaatttaaagaaattgctgctgaacaaggtacaaaacttactttcttaccatatgttgttaaagcattagtttctgcacttaaaaaatatccagcacttaatacttctttcaatgaagaagctggagaggttgtacacaaacattactggaatattggtattgctgcagatacggataaaggattattagtaccagtagttaaacatgccgatcgtaaatcaatattcgaaatttctgatgaaattaatgaactagctgtaaaagcacgtgatggtaaattaacttcagaagaaatgaaaggtgcaacatgcacaattagtaatatcggttccgctggtggacaatggttcactccagttatcaatcacccagaagtagctatcttaggaattggccgtatcgctcaaaaacctatcgttaaagatggagaaattgtagctgcaccagtgttagctttatcattaagctttgaccatagacaaatcgatggtgctactggacaaaatgctatgaatcacattaaacgcttattaaataatccagaattattattaatggaggggtaa

SEQ ID NO: 5284 - DNA, 978 bp, Staphylococcus epidermidis; identical to SEQ ID NO: 4190

SEQ ID NO: 5285 - DNA, 1113 bp, Staphylococcus epidermidis; identical to SEQ ID NO: 4191

SEQ ID NO: 5286 - DNA, 627 bp, Staphylococcus epidermidis
atgaattttaaaaagactgtagcaattgtcctaacgtcagcagtgttattagctggatgtactatagataaaaaagaaattaaaaaatatgatgatcaagtacaaaaagctatggaccaagagaaaaccgttaatcaagtaagtaaaaaaataaacgaattagaagagaaaaagcaaaaattatttaaaaaggtaaatgataaagatcaaagcacacgtaaaaaagcagctgaagatatagttgaaaatgtaaaacaaagacaaaaagaatttgaaaaagaagagaaggctctagataattctgaaaaagaatttaaacaagccaagcaatatcttgaacatgtagaaaacaaagcaaagaaaaaagaagttgaacaacttgatagtgctattaaagaaaaatataaatcacatgatgcttatgcaaaggcttacaaaaaagcacttaataaggaaaaagaactgttttcttatttgaatgaagataatgcaacacaatcggaagtagacggaaaatcgaaagatctttctaaagcatataaagaaatgaataataaatttaatgcttactcaaaagccattgagaaagtaaaaagagaaaaacaagatgtagaccaattaaaataa

SEQ ID NO: 5287 - DNA, 552 bp, Staphylococcus epidermidis; identical to SEQ ID NO: 4193

SEQ ID NO: 5288 - DNA, 219 bp, Staphylococcus epidermidis; identical to SEQ ID NO: 4194

SEQ ID NO: 5289 - DNA, 1683 bp, Staphylococcus epidermidis
atgaaacaactacattcaaatgaagtaggtgtatatgcacttggtggtttaggtgaagttggaaaaaatacctatgctgttgagtacaaagatgaaattgtaatcattgatgctggaatcaaattccctgacgataatctgttaggaattgattatgtaattcctgattacacttacttagaacagaaccaagataaaattgtcggtctgtttattactcatggacacgaagaccatataggtggtgtgcccttcctattaaaacaaattaatgtacctatttacggtggtccattagcattaggtctcattcgcaataaactagaagaacatcatttgcttagaacgactgaattacatgaaatagatgaaagtagcgtaattaagtctaaacattttgaaatttctttctatctaaccacacatagtattccagaagcatatggcgttatagtcgatacacctgaaggtaaaattgttcatacgggagacttcaaatttgactttactcctgtaggtgagcctgctaacatagctaaaatggctcaattaggtcatgaaggtgtgttgtgcttactatcagactcaacaaacgcactagttccagattttactttaagtgaacgtgaagttggacagaatgtcgataaaattttcagaaattgtaaaggtcgtattatctttgcaacttttgcttctaatatttatcgtgttcagcaagcagttgaagcagcaattaaatataatcgtaaaatcgttacatttggacgttcaatggaaaacaatatcaaaattggtatggaactaggatatatcaaagcgccaccagaaacgtttatagaacctaataaaataaatagtgtacctaaacacgagttactcattctttgtactggttctcaaggtgaacctatggctgcattatcaagaattgcaaatggtacacataagcaaataaaaattataccggaagacactgtagtatttagttcttcgcctattccaggtaacactaagagtatcaatcgtacaattaatgcgttgtacaaagctggtgcagatgtgattcatagtaaaatttcaaacattcacacttctggacacggttctcaaggtgatcaacaattaatgttacgtctgattcaacctaaatacttcctgccaattcacggtgaatatcgtatgcttaaagctcatggtgagactggtgttcaatgcggtgttgatgaagataatgtatttattttcgatatcggtgatgtacttgctttaacacatgattctgcacgaaaagcaggaagaattccttccggcaatgtacttgttgatggcagtggtataggtgatattggcaatgttgtcatcagagatcgtaaattactttcagaagaagggttagttattgttgttgtgagcattgactttaatactaacaaattactatctggccctgatattatttcacgcggttttgtttatatgcgggaatctggtcaattaatttatgatgctcaacgtaaaattaaaggcgatgtcatttctaaacttaacagcaataaagatattcaatggcatcaaattaaatcttcaattatcgaaacattacatccttatctttatgaaaaaacagctcgaaaacctatgattttacctgtgataatgaaagtaaatgaagataaataa

SEQ ID NO: 5290 - DNA, 660 bp, Staphylococcus epidermidis
atggataaagagtatgtcgtaattggactagggcgttttggtggtagtattgttagagaacttaacgcattagacatggatgttatggctattgatagagacgaaaatcgtgttaacgaatatagtgatatagcaacacatgcagttgttgctgatacaactgatgaggcagtaatgaagagtttaggaatacgtaatttcgatcatgttattgtcgctattggtgagaatatacaatctagtacactaacgacgttaattcttaaagaattaggtgttaaaaaggttactgctaaagcccaaaatgattatcatgctaagattttaaataaaataggtgccgatactgttgtgcaccctgaaagagatatgggaagacgtattgctcataatgttgctagtgctagtgtccttgactacttggaacttgctgatgagcattcaatcgttgaattaaaatctacagaaaaaatggcaggacaaacaattattgaattagatattcgagctcaatatggtattaacattatagcaattaaaagagctaaagaatttatagtctctccagaccctaacatcaatattgaaataggggacattttaattatgattggtcatgataatgacttaggtcgctttgaaaaaaatataagcaagtaa

SEQ ID NO: 5291 - DNA, 1017 bp, Staphylococcus epidermidis
atgatttacgcttatatcggtataacagtattatgggtatttttattttgttatattattatcgcctccattgattttggtgcaggatttttcgcattgcattctaaaatgacaggtaatgagaaaaaggttaatcatttaatccatagatacctcaatccagtttgggaagttacaaatgtctttttcgttttcttttttgtaggatttataggtttttttcctgattctgctaaatacttaggaacagttttattagtacccggatcaatagctttaattcttatttctatacgaagtagtttttatgcttttgaaaattatggtcaagatactaaactgccctggattgtattatatggtttaacagggctgttaattccagcctctctagcaactgctctaacaatttcagaaggtggttatatctatgagcatggcacacatattgatttagactggatacaattattattaagtccatttgcatggtctgtagtattcttagccattgtttcagttctttatatttcatcaggttttttaacatattatgctcataaagcaaatgatcaacctgcttatgatatgacacgacaatggcatattttttgggggccacctatgattgtgatttcattatttgttttcttatctcttagaattcaaaattctgatcactttagaactgctatttttaattattggtggatgtttgcaatcagctttatattttttataatagctggattactgactatatttaaaaagaaacacggtctagcttttatcatggttatattgcaaatgttatttgcattctttggctacggaatgagtaaacttccatatttactttatccgtttattaaaattacagactcccatgtcaatccggaaatgggattatcattagttattgtttttgttttaggtttacttttattaattccatcgttaatattattattaagattatttgttttcgacaaagcatatgtggaaggaaagaaataa

SEQ ID NO: 5292 - DNA, 1356 bp, Staphylococcus epidermidis
atggattcagtagaaatagctcgattgttgacgggtatgacacttgcagtacatatcatatttgcaacaattggtgttggtatgccacttatgtttgcaatagcagagtttattggcataaagaaaaatgatgcgaattatatcacattggctaaaagatggtcgaaaggctacacgataaccgttgctgttggagtcgttacaggtactattattggtttacaactttcacttgtctggccaacatttatgaaaatgggcggtcatgttatcgcattaccactattcatggaaacttttgcattcttttttgaagcaatctttttaagtatttatttatacacttgggaaagatttaaaaataaatggacacattttttcatatctatacccgttattataggaggttcattctcagcattctttattacatcagtcaattcatttatgaataccccagctggttttgaaattaaaaatggtcgtatggtaaatgttcagccattagaagcaatgtttaattcatcgtttatggttcgtgctttacatgtagttgcaactgcaggtatgacgatggcgtttatattagcagccatcgcagcgtttaaattattacgtcataatcatacagaagatagaacataccatacaaaagctcttaatttaagcatgattgttggattcatcaataccgttctttcgatgattgcaggagatttatctgctaaatttttacacaaagttcaaccagataagcttgcagcatatgaatggcattatgatacgcaatctcatgcgaatttagttcttttcggtgtattaaatgaaaaaacacatgaagtttcaggagcactagagattcccggattacttagttttttagcagataatagctttaatacaaaagttaaaggtttaaatgaatttcctaaaaatgaattacctcctatgatagtgcattactttttcgatttgatggtatcaatgggaatattctgttttatcatttcaggactatatatgttatttttaattgttaaaaagttacgtaaatatgtaactagtaatatgatgttatacgctatcttgttaactgatcctgcatcaatgttagcgatagaatttggttggttcttaactgaaatgggtcgtcaaccgtggattatacgaggatatatgcgcgtatcagaagctgctacccaggcggggggaatcacattagtaacgacgctattcggtttactatatcttttattactagttacttcggcttatgtactaattagaatgtttaaaaatcaacctgcttataaagatgtagaaaaagtgattaaagagagaggtgaaacaaaatga

SEQ ID NO: 5293 - DNA, 237 bp, Staphylococcus epidermidis; identical to SEQ ID NO: 4199

SEQ ID NO: 5294 - DNA, 1719 bp, Staphylococcus epidermidis; identical to SEQ ID NO: 4200

SEQ ID NO: 5295 - DNA, 267 bp, Staphylococcus epidermidis; identical to SEQ ID NO: 4201

SEQ ID NO: 5296 - DNA, 540 bp, Staphylococcus epidermidis; identical to SEQ ID NO: 4202

SEQ ID NO: 5297 - DNA, 1173 bp, Staphylococcus epidermidis
atgaaacttgctacgctaaataaaggcaaagaaacaaagtatttaaaccactatccattaatagatgaagaagatttatttgaacatgatcatcttaaagaaggtgatttgataacactggtgacagagcaacaacaatatatagctactggatatattggaagacaacataaaggattaggatgggtattgagttataatcaaaatgaagagattaacactttgttttttaaacgtttatttgaagctgcattagaagagcgacaatactatttcaacatagaaggtacaaatgcatttagattatttaatactgaaggtgacggtgtaggtggcctgacaattgataattataacggacatcttttaattcaatggtattcgaaaggaatatataaatttagatttcctatcttagaagcaatcaaagaggtatatgaatacacttcaatttttgagaaaatgcgttttaaaggtacttcctacactggtggctttgtagaaggtaatgctcctgaatttcctatcgttgtagaagaaaattttaccttttataatgtagacctaaacgatggtcttatgactggtatatttttagatcaaaaagaagttagaaaaaaattaagagatcagttttcagaaagacgacacgtacttaacttattcagttacactggagcgttttcagtaatagcagctgaaaatgcaaactcaacaacaagtgtagacttagcaaatcgctctagagggctaactgaagaaaattttggtttaaatggtattaatcctaaatctcaatatatttatgttatggatacgtttgatttttataattatgcaggacgacatggacatcaatacgatacaattgttattgatccacctagctttgcgagaaataagaaaaaaacattctctgttcaaaaagattataatttattaattgaaggagcccttaacattttatcgccaggaggtacattactattatgtacgaattcaagtgcattttctcttaaggcatttaaaaacgtaataaagaaaacattagcccaaaataatattgtatatgaaataaatgaagtaatggggttacctaaagattttaaaactcatcctcactacaaaccttcaaaatatttaaaagcagtatttgtaacaataaaacattaa

SEQ ID NO: 5298 - DNA, 1293 bp, Staphylococcus epidermidis
atgtcttttcttaggaaacacaccgaaattatatttagttatatcatcggtatcgtttcactttttacaggtctcattatttttattaacttacctttaatcaaacaatttaaaggtgacaaaaaggttgatacgcatgtgcataacgtatgggaattcctaaatgccttttttgccgagattataaaagtgatgagtaaatttattggtggctttccaattacaagtgccatagtaatcatcgtatttggtattctagtgatgctgttaggtcacactttatttagaactattaaatacgattatgacatttcaattttctttttagttattggcattatgtactttatcattacattattgctaatgacacaagtgtatggcttttttgctatcgtctttattattccttttacagttcatattggttacatagtttataaagatgagttgaaccaagacaatcgaaagaaccattatatgtggattattgtaacttatggaatgagttatcttattacccaaatttcgctatatggacgtattgacgcaaatgaaattgaatcaattgatattttaagtgtaaatacattcttcattattatgtggttattaggtcagatggctatatggaatttcttattcctaagacgttcattaccactcactaaagaagaattaggcgaagaggaacctgaactttcaagaactaataaaggcaatgtatctaatcaaactaaagttcacttaaaacaactacaaaataagacaaccgagtatgcacgtaagactagaagaagtgttgatttagataaaattagagccaaaagggacaaatttaagcaaaaaattaacagcatagtagatatacaagaggacgatattccaaattggatgaaaaaacctaaatgggttaaacctatgtatgttcaattgttttgtggtgtaattattctgttttttgcttttctagaatttaataatagaaacgcattattcttaactggtgaatgggagttatcacaaacacaatatgtagttgagtgggtaacattattattgctacttttcattattattatttatattgcaactacattaacttattatttaagggataaatattattatttacaactctttatgggcagtattttattctttaaatttcttacagaatttatcaatattatggtacatggattattattatcaattttcattacgccaatcttattattaatgcttattgcaatgattgttgcttattctttacagttgagagaaaaataa

SEQ ID NO: 5299 - DNA, 135 bp, Staphylococcus epidermidis; identical to SEQ ID NO: 4205

SEQ ID NO: 5300 - DNA, 1776 bp, Staphylococcus epidermidis; identical to SEQ ID NO: 4206

SEQ ID NO: 5301 - DNA, 576 bp, Staphylococcus epidermidis; identical to SEQ ID NO: 4207

SEQ ID NO: 5302 - DNA, 1404 bp, Staphylococcus epidermidis
ttgttacgtgttaaaaatttacgtttaaagtatccgaatggtgataggaaaatattcaataacttaaatcttgagattaaaaataaagaaaaagtgcttttactcggtccttccggatcaggtaaaagcacattacttaatgtattaagtggaatagtacctaatttaattgaacttccgatgaaatatgatgaattgaatattgatcatgatagtggcgttatatttcaagatccagataatcaattttgtatgccaaaagtatatgaagaacttgcatttgttttagaaaatagaaatattcctagaagtgagatggatcaagaaatcgaagacgcactaaagtctgtagaccttaatgttactcataaaacatatgtcaataatctaagtggtggcatgaaacagaagttagctattgttgaaacaatactacaaaaatcaaagacactttttttagatgagcctactgcaatgctcgacgtgaaagcaactgaagatttatggaagaaattaatcaatctttgggaagatcaaacagttttaattgttgagcataaggttgaacatatttggcaacatgttgaccgcgtattgttattaaattatgatggtgaaattgttgctgacgacaccccagaacaaatcttggatcattatgaagcgttattaactgaatatggagtttggcaccctagagcatggcacagtgcaccacgccccatcccattacctaatcaaacaaagaacctcttatttcattttgacgacgggcaaattattagaggtaagaagacacttttttcatccaaggagcttaaactgtattcaggtgaatggttaacaatcactggtaaaaatggtgctggtaaaacctctttactagaagctatgttacaactgattaaatatgaaggtgacatgttttatcgcgatcaattattatctaaaattaaacaagcggcaaagcatatgtatttggtatatcagaaccctgaattacaatttattactaattctgtttatgatgaagtgtatattcattataatcacttagatcctaagcatgcgaatgatgaaaccatggatctgttaaaattattacatttagatcaagttaaggatcatcatccttttgaaatatcaacaggtcaaaagcgtcgtttaagtgttgcaacagcattaagttcaaaggcagagattattttactagatgaaccaacattcggcctagatagtcataatacatttcaacttattaagttatttcaagaacgcgttaatcaaggtcaaacaattatcatggtgacacatgatccagaaattattaaacgatatccaacaagacgattacgcgtggaagatggatgtcttaaagaaatggaaggtgaacacattgtttga

SEQ ID NO: 5303 - DNA, 807 bp, Staphylococcus epidermidis
ttgtttgaaagatggaaaaaacgccacaccttcgttgatgatgtaaatattattactaagttacttttaggtatcgcattattctttttcattatatttatccataacttcgactttatgatttatatcgtcatattaatgtttatgttcttacttttatttaacggtacagaatttaaaataactgcaatatttattttagttacaaccctctttgccttgatgtcatcattatttatgattttatatggtgatggagaacatatgcttgtaaaatttggtattttgcaaataagtacagaaagtattgtacgaggtcttcatctatctatgagaacaattaccgtttcaatgtttggtatactaatcgcattgacttcacaaattgtaatgattttttatagtttaatgcaacatttaaaggtaaagccaaagtttgcttatgcttttatggcagcgattagaatggttccacttataataagttctcttattcaattaagacgttccctaaaaatgcgttatcaaatgatagatgcatctaactataaaggaatcaagcgtcttaaccatttagtcatacctttattaagtcaaaatattcgacgtgcacatcaactttcagttgcaatggagtctaaaggttttaaagatggtccgagaacatactactatcgggtaccattttcatataaagatatcgtatttattgcttgtatattaattatcattactttgtcatttgtcttatcatcataccttccaattactggtattcatgatgtccgttttggacaattagactaa

SEQ ID NO: 5304 - DNA, 1242 bp, Staphylococcus epidermidis
ttgaaagttttaatagttggagctggtggacgtgaacatgcattagcttctaaaatcaatcaatctccaattgtagataaggtttacgcgattccaggaaatgatgcaatggtcaatattgctgaagtgcacagtgaaattgctgaatcagatcatcaagctattttacattttgctcagcataacgcaattgattgggtaatcattgggcctgaacaacctttaatagatgggttagctgatttattaagaaatgcaaatattaaagtgtttggtccaggacaagatgccgctcaaattgaaggttcaaaattatttgccaagcaattaatggacaaatatcgtattcctacagcagaatataaagaagtaagttcacgtaacgaggcgttgcaatatgttgaaacttgtgatttaccaatcgtaataaagaaagacggtttagcagcaggtaaaggggttattattgcttttacgagagaagacgcattagaaggggtcaaaaaaatttatcaagaagaaaaagggaaagtcgttttcgaaagttatttagaaggagaagagttttctttaatgacttttgtaaatggagattatgcggttcctttcgactgtattgctcaagatcataagcgagcatttgataatgatcaaggaccaaatactggtgggatgggcgcatattgccctgtaccccacattgatgcatctgttcttgaacaaaccaataaggagattgctcaacctattgctaaagctatggcacaagaaggtcatgacttcttcggattactatatattggtgcaattttaacaaaagatggacctaaagttattgaatttaatgcacgttttggggatcctgaagcacaagtattattaacacgtttagaaagtgacttaatgcaactcattatcgatttggaaaattgccaacccattcattttaactggaaagatgaagctgttgtaggagtaatgctagcatctaaaggataccctggttcatatgaaaaagggcatgaaataagtggttttaatctagattctcattattatgtgagtggattaaagaaagaaggtcaatgttttgtgaattctggtggaagagttatcctagctataggggaaggtccaacagttgaaaaagcacaagcaaatgcatatgaacatgcacgacaaataaaaagtgataatcttttttatcgtaatgatattgggaataaagccatcactaagtaa

SEQ ID NO: 5305 - DNA, 1479 bp, Staphylococcus epidermidis
atgaaaaaagcaatattaagcgtttctaataaaagtggaattgtagagtttgcaaaagcattaactaatttagactatgaactgtattctacgggtggtacaaaacgtgtattagaagatgcgaatatcaatattaagtccgtgtcagaattaacacaatttccagagattatggatggtcgtgttaaaacactacatccagcagtccatggtggtattttagctgatcgagataaagaacatcatttagagcaattacgagaacaacatattgatttaattgatatggtagtagtcaacctatatcctttccaacagactgttgctcaacctgatgtaacagaaactgatgcaatagaaaatattgatattggtggacctacaatgttaagagcagctgctaaaaactttaaacatgttacaactatcgtacatccttccgattacaacgaggtaattgagagaattaaaaatcatcaattggacgaagcatatagaaaatcgctaatggttaaagttttccaacatacaaatgaatatgatcatgctattgttaactatttcaaagacaataaagaaacactaagatatggcgaaaatcctcaacaatctgcatattttgttagaacatctgatagcaaacatacgattgctggtgcaaaacaattacatggtaaacaattgagttttaataatattaaagacgcagatgcagcgctcagtttagtaaaaaaattcaacgagccaactgctgtagcagtaaaacatatgaacccgtgtggagtaggaattggacagtcgattgatgaagcatttcaacatgcatatgaagcggataatcaatcaatatttggcggaattatagcattgaatagaacggtagatgttaaattagctgaagcattacattctatctttttagaagtagttatcgcacctcaatttactgaggaagctttaaaaatattgacacaaaagaaaaatattcgtttattacaaatagatatgacaattgataacgctgaacaagaatttgtttccgtttcaggtggttacttagtacaagataaagataataaagatgtgactcgaaatgacatgactgttgctaccgacattcaacctacagaagcacagtgggaagctatgctcctaggttggaaagttgtaagtgccgttaagagtaatgcagtgatattgagtaacaacaaacaaacagttggtataggtgcagggcaaatgaatcgtgtaggttccgctaaaattgcaatcgaaagagcaatagaaattaacgataatgttgcgcttgtttcagatggtttcttcccaatgggagatacagttgaatatgctgccgaacatggtattaaggcaattattcaaccaggtggttcaattaaagatcaagattccattgatatggctaataaatatggcattacaatggttatgacaggtatgcgtcattttaaacattaa

SEQ ID NO: 5306 - DNA, 567 bp, Staphylococcus epidermidis
gtgaccaatatagcgatttttgcctcaggatcaggtagtaactttgaaaatattgtaaaacatatccaaacagggcaattatctggtatcaatgtaacggcactgtatacagataatgaaggggtaccctgtattgatagagctaaaaatttaaatattccaattcatattaacaagccaaaagacttttcatccaaatctttatatgaacagcatctacttaaattattatccagtgaggaagttcagtggattgtattagctggttatatgagactagttggccaagacttattacaagcttatgaaggacggatattaaatatacatccctcattattgcctaaattcaaaggtttagatgccataggtcaagcgttagaaagtggagatactgtaactggatcaactgtccattatgtagatagtgggatggatacgggagaaattattgaacaacagcaatgtgatataaaaccggacgatactaaagaacaattagaagatagagtaaaacatttagaatatgaactttatccaagagttatagctaaaatcattaaatag

SEQ ID NO: 5307 - DNA, 1032 bp, Staphylococcus epidermidis
atgtctaaagcatatgaggaatctggtgtaaatattcaagcaggatatgaagcagtcgaaagaataacaagtcatgttgaacgtacattgcgcaaagaagtattaggtggtttaggtggatttggtgcaacatttgatttgtctcaattaaaaatgaaagcgccagttctggtatcaggtactgacggtgtgggtacaaagttaaaattagcaattgactatggaaagcatgacacaattggtattgatgctgtcgcaatgtgtgtaaatgatattttaacaacaggtgctgaacctttatactttttagactatattgccacgaataaagtagtgccaagtactatagagcaaatcgttaaaggtataagtgacggttgcgaacaaaccaatacggcacttataggcggtgaaactgctgaaatgggagaaatgtatcatgaaggtgaatatgatattgctggttttgcagtaggagcggtagagaaagaggactatattgatggttcaaatgttgaagaaggacaagcaattattggtttagcttcaagtggtattcattcaaatggctatagtctagttagaaaaatgataaaagaatcaggagttcaattacatgatcaatttaatggtcaaacctttttagaaaccttccttgcaccaacaaaattgtatgtaaaacctattcttgaattaaagaaacatattgatatcaaagcgatgagccatattactggtggaggtttctatgaaaatattccgcgtgcccttcctaaaggtttatcagcaaaaatagatacacaatcattcccaacgttggaagtctttaattggcttcaaaaacagggcaacatttcaacgaatgaaatgtataacatatttaatatgggtattggatatacaattattgttgacaaaaaagatgttcaaacaacattaacaacgttacatgcaatggatacaactgcatatgaaattggtgagattataaaagatgatgatacacctattcatttattggaggtagaatag

SEQ ID NO: 5308 - DNA, 1485 bp, Staphylococcus epidermidis
atgtctaactactcaggattaaatgaagaatgtggcgttttcggtatttggaatcatcctgaagcagcacagttaacatatatgggtctacatagtttacaacacagaggtcaagaaggtgcaggtattgtagtttcaaatcacgaaacgctaaaaggtgaacgaggattaggcctattaactgaagcaattaaagacgaacatatgtcaaatataaaaggttatccacatgcgataggacatgttcgttacgcaacctctggtaataaaggcattgaaaatattcaaccatttttatatcacttttatgatatgagcgtaggtatatgtcataacggtaatttaattaacgctaaatcattacgtcaaaatttagaagaacaaggtgcgattttccattcttcttcggatactgaagtcattatgcacttaattcgtcgtagtaaggcgccgacatttgaagaggcattgaaagagagtttacgactcattaagggtggatttacttttgccatcctaacaaaagatgcgttgtatggtgcagtagatcctaatgctattcgaccattagtagttggaaaaatggagaacggtgcttatattttagcaagtgaaacatgtgcgattgatgttttaggtgctgaatttgtacaagatattcatgcaggtgagtatgttgttattacggatgaaggtatagaagttaagacttacacacgacaaacaacaactgcaatttcagctatggaatatatttattttgcgagacctgattcaacgattgcaggaaaaaatgttcatgcggtacgaaaggcatcaggtaaacgtttagcacaggaaaaaccagcaaaagccgatatggtaataggcgtacctaattcatcattatctgcagcaagtggttatgctgaagaaataggactaccatatgaaatgggactagttaaaaatcaatatgttgctcgaacttttatacaacctactcaggaattaagagagcaaggagtacgtgtgaaactgtcggctgttaaggatattgttgatggtaaagatatcgtacttgtagatgattcgattgttcgaggtacaacgattaaacgcatagttaaaatgcttaaggattcaggagctaaccgcattcacgtaagaattgcttctcccgaattcatgttccctagtttttatggtattgacgtatctacaacagctgaactcatctcagcaagtaagtctcctgaggaaattaaaaatcatattggtgcagattctcttgcttatttaagcgttgatggcttaatcgagtctataggacttgattatgatgcgccatatcatggcttgtgtgtagaaagttttacaggtgattatccagcaggactttacgattatgagaaaaattataaaaagcatttaagtgaacgtcaaaaatcatatatagctaataataaacattattttgatagtgagggaaatttacatgtctaa

SEQ ID NO: 5309 - DNA, 2190 bp, Staphylococcus epidermidis
atgtctaaatttatcgaaccaagtaatgaagagattaaacttgaaaaactttatcaagatatgggattaagtgataaagaatatgacaaagtggttgaaattcttggtagagaacccaacttcacagaagtaggaattttctcagtgatgtggagcgaacattgctcatataaacattctaaaccatttttaaaacaatttcctacgacaggagagcacgtattaatgggaccaggagaaggtgcaggtgttgtagatataggcgataagcaagccgtagtatttaaagttgagtctcacaatcatccatctgcaattgaaccatatcaaggtgcggcaactggagtcggaggtattattagagatattgtttcaattggtgcccgtccaattaatttactaaatagtcttcgttttggtgagttaactgtaaaacaaaatcaacgattacttaaaggtgttgtaagtggtattggtggatatggcaactgtattggtattcctactacggctggtgagattgaatttgatgaacgctatgatggcaatccattagtcaatgctatgtgtgtaggaatcattgatcatgatatggtccaaaaaggaacagctaagggtgttggtaattccgttatatatgtaggtttaaaaactgggcgtgacggtattcatggtgcaacatttgcatctgaagaacttactgaggaaagtgaaagtaaaagaccttcagtacaaattggagatccatttgtaggcaaaaagctaatggaagcaacattagaagcaattacttttgatgaactagtaggtatacaagatatgggagcagctggtttaacttcatcttcatctgaaatggcagctaaaggtggtagtggtttacatttaagacttgatcaagttccaacaagagaacctggaatttccccatatgaaatgatgctttcagaaacgcaagaaagaatgctgttagttgtagaaaaaggtacagaacaaaagtttttagatttattcaataaacacgaactagatagtgcagtaatcggtgaagtaacagacactgatagattcgtgcttacatacgatgatgaagtgtatgcagacattcctgtgcaacctcttgctgatgaggcaccagtgtatattttagaaggagaagaaaaggaatataatacatcaaaaaacgattacagcaatatagatgtacatgatacatttatcaagttattacaacacccaacaatagcatctaaacatcatttatatgaacaatacgatcaacaagtaggagcaaatacaattattaagccaggtttacaagcttcagttgtgcgcgtagaaggaacacaaaaagctattgcttcaactatagatggtgaagcacgttatgttttcaaccaaccttatgaaggtggaaaaatggttgttgctgaagcctatcgaaatttaattgcagtaggggcgacaccattggctatgactgattgtctaaactatggttctccagagaagaaagaaatctatcaacaattaatagattcaacaaaaggtatgtcagaagcttgtaaagtgcttcaaactcctgtagtttcaggaaatgtttcattatataacgagacacgtggaacctctatcttccctacacctgtcgtaggtatggttggtcttattgaagacgtgagctatctaaaagagtttaaacctaaagcaggagataagatttatttagttggtgaaacgcgtgatgactttggtggtagtcaattggaaaaattgttgtatggatcagttaatcatgagtttgaatctattgatttaagtgatgaagtttcaaaaggaaaattaatcaaacaggctattcgtaatggcattgcatctcatgtacaaacagttggtaagggcggcttattagttactttagctaaaattagtgcccattatgatttaggtatgcaagctcaattggatgttaccaatgcacaattatttagtgaaactcaaggacgatatattgttgttgttaaagaagggcaaactttggatatagatcaagctcaagaaattgggcatttaactcatcagcagttatttgatatatctaattcagacgtaaaaataaaagaaaacgtttcagatatcaaacaaaaatgggaaggggctatagttcaatgtctaactactcaggattaa

SEQ ID NO: 5310 - DNA, 672 bp, Staphylococcus epidermidis; identical to SEQ ID NO: 4216

SEQ ID NO: 5311 - DNA, 261 bp, Staphylococcus epidermidis; identical to SEQ ID NO: 4217

SEQ ID NO: 5312 - DNA, 705 bp, Staphylococcus epidermidis
gtgtcattgttatatgaaggtaaagctaaaagagtattcacgacaaatattgatggtcaattacgagttgaatataaagatgaagtaacagcaggaaacggtgcaaaaaaagatactatgattggcaagggtaagttaaataatcaaattacttctattatatttgattatttaactcataatcatattgacaatcactttattaaacaactttcacaaacagaacaactcgtccaacaagttgatattatacctttagaagttgttgttagaaacattgccactggttcgatcacaaaacgtcttggttttaaaaaggggcatacatttgaagaacctttagtagaattcttctacaaaaaagatgaacttaatgatccgcttattactgatgaccatgtaaaattactcggcatagcgaacgatgaagaaataacacaacttaaacaaatggcaaaagacattaaccaagtattaattcaattgatgaatgaaatgagtttgagacttgtagattttaaggttgaatttggtaaaaccaatggtggaaaaattttacttgcagatgaaatctctcctgacacttgtagaatatgggataaaaatacggatactaactttgataaagatgtatatagaaacaacactggctcgctgattgaaacttatcaaacatttttaaataaattggaggatcttaaataa

SEQ ID NO: 5313 - DNA, 1128 bp, Staphylococcus epidermidis
atgaacttcagtaaacttaaatttggcgcgacaataggaatcattggcggagggcagttaggaaaaatgatggctcagtctgcacaaaaaatgggttataaggtgattgtcctagatcctaatgaagactgtccttgtcgttatgtcgcacatcagtttattcatgcaaattatgatgatgagcaagctttaaatcagttaggtgaaaactctgatgttgttacttatgagtttgaaaatatttcgtctgaacaattaaaaaaactcactcagttatatcatattccccaagggtaccaagctattgaactattacaagataggctaaccgagaagcaaacattactagaagcaaatactcaaattgttccttttgtacaaattcaaacaaatcaagacttattaaaagccatagaaaaattaggctttccgttcatagtgaaaacacgttttggtggatatgatggtaaaggacaaattttggtgagaaatgattcggaattagacgaagcataccagctagttgagaagcaagagtgtgttgctgaacaatatcttgatattcaaaaggaagtatcccttacagtaacaattggaaatgaacaacaaacaacatactttcctcttcaagaaaatgaacatcaaaatcaaatattatttaaaacagtcgttccagcaagatctgataaagaaaatgaagcacgtaaggaagttgagaaaatcacccgcgcaattcattttgtgggaacctttacagtagaattctttattgataaagaaaacaacttatatgtaaatgaaattgcaccaagaccacataattctggacactattcaatagaagcttgtgattactcacagtttgatacacatattttagccataactggtcaaaaacttccgcaagctattgaattattaaagccaacagtaatgatgaatttattaggtcgcgatttggatttacttgaaaatgaatttagcagacatccagattggcatattcacatttacggtaagaaagaaagaaaacctgatagaaaaatgggacatatgactttactgacggatgatgtcaatcaaacagaacaatatatgttaatgaaatttgaagggagagacaagtaa

SEQ ID NO: 5314 - DNA, 483 bp, Staphylococcus epidermidis
gtgaaagtagcagtcattatgggcagttcctcagattggaaaattatgaaagaaagttgttcgatgcttgaagaatttgaaataccgtacgaaaagaaagtcgtttcagctcatcgtacgcctcaaatgatgttcaatttcgctagtcaagcacgccaaaatggttttgatattatcattgccggtgcagggggagcagcacacttacctggaatggtagcttccatgacaacattacctgtgattggtgtgccaattgaatctaaaagtctaaaaggattagattcattactatctatcgtccaaatgcctggtggtatcccagttgcaaccacagcaattggaaaatcaggtgctaaaaatgctgggatattagcggcaagaatgttaggaataacaaatgaatcagttcaaaataatttggaaaattatgaaaaatctttagtcgcaaaagtggaggaaatgcaaaatgaacttcagtaa

SEQ ID NO: 5315 - DNA, 861 bp, Staphylococcus epidermidis
gtggttgctaaaattttagatggtaaacaaatagcaaaagaatatagacaaagacttaaaaatcaagtcaatgacttaaaagaacatggttttactccaaaattatcagtcatattagttggtaatgatggtgcaagccaaagttatgtaaaatcaaagaaaaaagcagcagaaaaaattggaatgatatcagaaattattcacttagacgaatccacatcagaagaagtagttttaagcgaacttaatcgattaaacaatgacgatacagttagtggtattttagttcaagtaccattacctaaacaggtaagcgaacaaaaagtacttgaagctatcaatccggaaaaagatgtagatggtttccatccaattaatattggaaaattgtatattgatgagcaaacctttgtaccatgtacacccctgggtattatggaaattttaaaacacgcagatattaatttagaaggaaaaaatgcagttgttattggtcgtagtcatattgttggccaacctgtttcaaagttattgttgcaagctaacgcaactgttacgattttacattcacgtacaaaaaatatgaatgcacacttaaaacaagcagatgtgattgttagcgcagtaggacaacctggtttagttactaaagaaaatgtcaaaaaaggcgcagtaattatagatgttggtaatacacctgatgaaaatggaaaattaaaaggggatgtagcatatgatgaagtaaaagaaatagctagtgcaattactccagtaccaggtggtgttggtcctttaactattacaatggtacttaataatacacttcttgcagagaaattaagacgtggcttaacaaaataa

SEQ ID NO: 5316 - DNA, 318 bp, Staphylococcus epidermidis; identical to SEQ ID NO: 4222

SEQ ID NO: 5317 - DNA, 1125 bp, Staphylococcus epidermidis
gtgtcaaaatttaagtctttgcttctattatttggcacactaattttacttagtggttgttcaaatatagaagtttttaatgcaaaagggccagtagcaagcagtcagaagttcttgattatctattcaataatcttcatgcttgttattgttgctgtagtgctttccatgttcgctatttttatttttaaatatagctacaaaaagaatagcgaatctggtaagatgcaccacaattctttaattgaaacaatttggtttgtggtacctattttaatcgtaattgctttagctattcctacagttaaaactttatacgattatgaaaaaccaccggaaaaagacaaagatccacttgtcgtttacgcagtaagtgctggctataaatggttctttgcctaccctgatcaacatattgaaactgttaacacattaacaattcctaaagatcgaccagttgtattcaagcttcaatctatggatacaatgacaagtttctggattccacaattaggtggtcagaaatatgccatgactggtatgactatgaattggactttaacagctgatcaattaggtactttcagaggtcgtaactcaaacttcaatggtgagggattctctcgtcaaacatttaaagttcactctgtaagtcaaaatgattttgataagtgggtaaaagaggctaaaggtaagaaaactttaagtcaagatacttttgacaagcaactcttaccaagcacatctaacaaagaattaacatttagtggaactcatatggcgtttgttgaccctgcggctgatccagagtatatcttctacgcttacaaacgttacaactttgaacaaaaagatcctaacttcacagctgaagaggatttatacaaagatgtaaaagataaaccaatcaaacctgctcgtaaggttcatataacaaaccctaactatgaacgtcacggtatgaaacctatgattctcggcaacaatgaaaaatacgataatgagttcaaaaaagaagaggatcataactctaaagaaatggaaaaaatttctaagggagcaaaagacgaaaatgcgtctaaacttcacaaaaaagaacacgatgatcatggaggtggacattaa

SEQ ID NO: 5318 - DNA, 1989 bp, Staphylococcus epidermidis
atgaattttccatgggatcaactactagttaaaggaaattggatgattatctcagcacaaattgctgcgccattcttagtcatcggccttatagcagttatatcttatttcaaattatggaaatatctatataaagaatggttcacatccgtagaccataaaaaaatcggtatcatgtatttaatttctgccgtattaatgttcgttcgtggtggtatcgatgcgttaatgttacgtactcaattaacaattccagataacaaattcttggaagcaaaccactataatgaagtatttactacgcacggcgtaattatgattatatttatggctatgccatttatctttggtttatggaatgttgttattccattacaacttggtgcacgcgatgttgccttccctgtaatgaataacgttagtttctggctattcttcgctggtatgattttattcaacctatcatttattgtaggtggctcaccagctgctggttggactaactacgcaccacttgctggtgaattcagtccaggtccaggtgttaactattatttaattgcaattcaaatatctggtatcggatcgttaatgactggtatcaacttctttgttacgattctaagatgtaaaactccaacaatgaagtttatgcaaatgccaatgttcagtgtaacaacattcattacaacattaatcgttatattagcattcccagtgttcactgtagcacttgctttaatgactgctgatagaatttttggaactcagttcttcactgtagcaaatggcggtatgccaatgctttgggcaaacttcttctgggtatgggggcaccctgaagtttatatcgttattttgccagcattcggtatgtactcagaaatcatccctacttttgcccgtaaacgtttattcggtcatcaaagtatgatttgggcaactgcaggtatcgcattcttaagtttcttagtttgggttcaccatttcttcactatgggtaatggtgcgttaattaactcattcttctctatttcaacaatgttaatcggtgttccaaccggagttaaactatttaactggttgctcacattatacaaaggtagaattacatttgagtcacctatgctattctcattagcattcatccctaacttcttattaggaggggttactggtgtaatgcttgcaatggcatcagctgactatcaatatcacaacacttatttcttagtagctcacttccactatacattggttactggtgtagtatttgcctgcttagctggtttaatcttctggtatccaaaaatgatgggctacaagttaaatgaaacattaaacaaatggtgcttctggttcttcatgatcggatttaacgtttgtttcttaccacaattcattctaggtttagatggtatgccacgtcgtctatacacttacatgccttctgatggttggtggttactaaacttcatctcaactatcggtgcagtattgatggcaattggattcttattcctagttgcaagtatcgtttatagtcatatcaaagctccacgtgaagctactggagataactgggatggacttggtcgtactttagaatggtctacagcatcagctattccacctaaatacaactttgctatcactcctgattggaatgactacgatacattcgtcgatatgaaggaacatggtcgtcattatttagacaaccataactacaaagatattcatatgccaaacaatactccagtaggattctggatgggtatatttatgactattggtggtttcttcttaatcttcgaatctattgttccagcacttatctgtttagcaggtatcttcattactatgatttggagaagtttccaaattgatcatggttaccacatccctgcttcagaagttgcagaaactgaagctcgtttaagagaagctcgaattaaagaaagggaggctgtaagtcatgagtcatga

SEQ ID NO: 5319 - DNA, 606 bp, Staphylococcus epidermidis; identical to SEQ ID NO: 4225

SEQ ID NO: 5320 - DNA, 291 bp, Staphylococcus epidermidis; identical to SEQ ID NO: 4226

SEQ ID NO: 5321 - DNA, 603 bp, Staphylococcus epidermidis
atgggacgtcaggaacttaaaaaatgggacactagtgatattgattctagtgatattgattctagtgatattgattctagtgatatgtatgataaaaaacgtacttatacatcaaatgataatgaaaattcaaatcattcaagccatacagattattcaaatcaaacaaatggtgaatttaacgatcaaaaaacagaacaagatatgttacttcaaaatttacctgaagctgttcaaattaatttgaaatattttaataatttagaaattcgttgtattaaagatgtaatgaataaagcaaaagcaaatttcaacaagcatgtctcaattgaagaacgtgtgacttatgaagattgtgcttatgatattggagaagcattacgtcgtatcaagttgttaaatcgtcagaaaaacgaaaatgtatgtgaccttgcagcttatatgatgcaaacatttaaaaatgtatttgttgattatatccgaaaagaacaacaaaaagcatatttagtaaataagaaagaaaacaatttttctattgctaactttgagcctcaaaatgatatgcaagctatggcgaaaaaaatgtttatgaatcatatttag

SEQ ID NO: 5322 - DNA, 261 bp, Staphylococcus epidermidis; identical to SEQ ID NO: 2686

SEQ ID NO: 5323 - DNA, 801 bp, Staphylococcus epidermidis; identical to SEQ ID NO: 2687

SEQ ID NO: 5324 - DNA, 201 bp, Staphylococcus epidermidis; identical to SEQ ID NO: 2688

SEQ ID NO: 5325 - DNA, 558 bp, Staphylococcus epidermidis
atggctaaaattggttatgctcgtgtttcaacacaagatcaaagtttagatagccaaatcgatactttaaaaaactttggctgttcaaaaatatttaaagaaaaagtgagtggtcgaaaaacgaaaagatcagagttagacaaatgtctagagtatttacgtgaaggagatacattagttgtttataaacttgatcgtttaggtcgaacaacaaaacagttaatagaattggctcaatggttggaaaacaataacatcgaattacagattattgatatgaatatcaatactaaggatgcaatgggaaaaatgttttttacgatgatgagtgcctttgcagaactcgaagctaatcttttaagcgaacgtactaaaaaggggcttgcttctgcaagagctagagggcgcgtcggtgggcgtccaccaatgcctgatcataaaaaaagagaaattaagttcctatatgatgaacaaaaaatgactggtgaacaaatagccgaagctactggcgtaagtagatcaaccgtatatcgtgtggttaaagattcaaagtattaa

SEQ ID NO: 5326 - DNA, 228 bp, Staphylococcus epidermidis; identical to SEQ ID NO: 2690

SEQ ID NO: 5327 - DNA, 246 bp, Staphylococcus epidermidis; identical to SEQ ID NO: 2691

SEQ ID NO: 5328 - DNA, 333 bp, Staphylococcus epidermidis; identical to SEQ ID NO: 2692

SEQ ID NO: 5329 - DNA, 147 bp, Staphylococcus epidermidis; identical to SEQ ID NO: 2693

SEQ ID NO: 5330 - DNA, 120 bp, Staphylococcus epidermidis; identical to SEQ ID NO: 2694

SEQ ID NO: 5331 - DNA, 279 bp, Staphylococcus epidermidis
ttgaatgaaaatggaatgaaaagacgaactttaaataacttacctgttatcctagatgatcaaattcaggctgaagcaaaacataaaaatctttcagtcaatgatctttatatcaatatcattaaagactattattctaagaaattagagaatgaaatgagtattaatttgaactcagatttaaaagaaatattacttgaagttatgaaaaatcagatatatatgattgagttgttagaagatcaacaaaaaatttttcaatctatagaggaggaataa

SEQ ID NO: 5332 - DNA, 384 bp, Staphylococcus epidermidis; identical to SEQ ID NO: 2696

SEQ ID NO: 5333 - DNA, 774 bp, Staphylococcus epidermidis
atgagtgaacaaacgagtcctgctattaatttaatttctaattttaaagtggggagttcaaaggaagaaagttataagaaatttattgactatattagtactgaaaagaataagaaaaatgtaaaaaaaacagatatagaaggcaatctttttgatagatatcttgattacatgtcgatagataaattaaaaaagagacaaggatgtaacaaagaaaatgtaaaaaagagaacaactatgagctttaattctgagcatgaatttatcgaagaacaagagatgaatagattaaaagataagtttcaagaagcaaataaaaagaatcatgtcatgtatcaagatgttgtatcttttgataatcaatttcttaaagacaatcatttatttaatgagtcactagataaattagacgagcctaaaataaaaaaagccactcgtcgaatggttaatcaaatgattaaagataatcaaatggataaagaccatacattttggtgtgcaaatattcattatgacactgataatattcatattcatatagctacttccgaagagaagaatacacgaaaaattataaaagaaggaaaatttaaaggacaatataaaggtaaaagaactcctacaacgcttagaaatatgaaaagtacttttgctaactcaattaaccaagatattggactaatgaaagaatttgatgaattaaaaaaagagatgaaagataatgtcaaagagaaaataaaatacagaaaatataattcttactctttaaaataa

SEQ ID NO: 5334 - DNA, 345 bp, Staphylococcus epidermidis; identical to SEQ ID NO: 2698

SEQ ID NO: 5335 - DNA, 873 bp, Staphylococcus epidermidis; identical to SEQ ID NO: 2699

SEQ ID NO: 5336 - DNA, 750 bp, Staphylococcus epidermidis; identical to SEQ ID NO: 2700

SEQ ID NO: 5337 - DNA, 15522 bp, Staphylococcus epidermidis
atgcaatataacaatttggtggaaggatttgaacatatagtttcgagctggccaaataaagtggctattaagtttaagaataaatatttaacttataatgagttaaataataaagcgaatcaattagcttcttatttaaaaaaaagaaagattgaaaagggagtagaaatcccttttttattaaacagatctgaagatgtaatcattacaatgttagctattctaaaagtaggagcagcctttgttcctttatcaaaagaaactccgaaaagtagacaaaattatatattaaaacagatgaaatctccagtggttattactaagaaggaattattaaatagtgaaaacgaacctacttataatctcaaccaacatataaaaagcgaagatgtagcatatattatttttacttcaggaactactggtgctcccaaaggtgttatggtaagtcatggtaatattttaaactctatttatagccatgctgaggttttagatttaaataaaagtcataaaaattatttgcaatttgcagattacatatttgatgcttctattattgaaatattccctactttattgcatggacatacgttggttataacccctgaaaatgtacgtaaagatttaaatgaactttctaattttatactgaatgaaaacatagattgtgcaattattcctccggccatgttagataaagaagagcttttgtctttgaattatcttttagttgcaggagaaccttctaatacagaaatacttaatagttataaaaaacaaggaacaaaagttattaatggatacgggcctacagaattatctgtgtctgtatctctatatgaatataacatcggcgacacagctacaacaattggattcccacaaaagggtaataaattttatatattgaatgaaaataatgaattaattaagactaatgatgaaattggtgaacttatagtaagtggtaaacaattgtctcaaggttatttgaatgatttagcattaacaaaagaaaaatttgtttatttagactcaataaatgaagtagtatataaaaccggtgatttggtaaaacgaaataatgataaaagttatgaatttatggggaggaaagataaccaggttaaaattagaggatttagaatagaattacatgaaatagaatcgaacttacagaaaattgaagtaattaaacaagtagtgtgccataaaataggaggagatttggttgcattttacactagtgataatgaaattcaaacaaaatatttaagaaaatatttaagaaaaactctccccgaatatatgataccaaatttgttccgaagaataaaaaaaataccattaacatcaaatggaaaaactgacaaaaaaaaattggaaaaaatgatagaaagtagcaaaccacacagacaattagaatattcatctttgaatacaactaaagaaactattaaacgtatattgaatgtagttgaaataccagaagataaaaacttatttgaagttggtttgaattcaattactgctataaaaataggtcaaaaacttaaaataccagcttctattgtttttgagaaaaagaatattaaaggcatagagaattatctcaaaaacaaaagaagttttgagataattaaaaaaagaagtaatggtttagaattatcttatgcacaaaaaaggctcttatttttagatgaaatatacgaaggccttcctgttaataatctttcatgttcaattattttgagctcggatatagacgttgaaagaataaagaatgctataagagatgttatttcacgacatgaggttttaaggactaatataattaatggatgtccttacatagtaaacaaaaatattgatataactaattttgaagttaatgataataacttttttaaaaaagattttaatctttcttgtgagctcccaattagaataaatataaaaaatagtagactatcactttgtgttcaccatatagtattcgatgggctctcgctagaaatatttttaagagaagtaatgaaaatatataatcaaacagatttaccatctttagaaaaacaatattatgatttttctgagtggcataaaagtttaatagctaataaacattatatagagccccaattaaaattttgggaagaaattctatttgaatttgaagagctaaacctaccaattaaacgtaataataaaactaatattgaatctattttacaaaataataaagtggagattaatctatccaaggaaatgaagaaagaaataaaaagtaaggctcttaataataaaactacagaatttatagttttattaaatgcttattttctgacattatctttggttacaaatcaaaatgatataataattggaattcctttttctaatcgacattatcctgttacagaaagcttaattggaaattttgtaaatgttctacctttaagatttaagatccatccagagaaaacggttgaagataacttagaaagtttaacagaagcaatgatagaaacttctaaaaatcaagatgttccttttgaaagaatagtaaaaatgaaagaattaagccaacagtccacaaaaaaagggaacccaattttccaagcaacaatttccagtcaaaattttggacaacatgaactaatgaataataactttttcaattcaattaagatgaatattaattatcctatgacaaatttttatttatctatgtttttggaagaaaatcagattatatttagctattctgatgaggtgttagacgaaagttttgtaaagttattcgcaactaagttttttgaggtgcttagacaaactttgatgtttaatagaagaaatgcagatattatatttgataatcaaagcctcctcaataaaaacgaattaattaatactaaaaatgtacctaaagaaatatataaaagcactattcctcaagaatatgaagctcatgaaagcccttcatctgtattaggagacccaaaaagtagtattaatcacatttcatataaagaaaatattgaaaaaatagttaaacaagtattgtcaaccatcctagatattgaagaagataaagtatcaattaaagataatttcttttctttaggaggcgattccataaaagccataaaaatggcttctttgcttaaaaaaaagggattgaaaatctcgacaaggaaaattgtcgaaagtcaaacaatagaaagtttaattgaaataatacaaatggattcaaactcatatagcattgatacatctgtatcgaacggaaaagttacaccactaccaatccaaaaatggttttttaataaaaatcaccataaccctaattactttaatcagtcatatatattagaagctaataaaagttattcaaataaattagtaaacgacgtttttagagagttgataaagtatcatgatggtttaagaatcattatggattatgaaaataaaagtactgagcaattatctttttctacgtttatagagagtaaattttttctccaaacaaagaaaataaataaaaaagtattatacgaaaatgatattgctgagatttgtaataagttacaaaaagacattaatattgaaaataagtactctattatcgtaaatcagttagtatgcaaggaaaaaacttactttataatagtagttcatcatttagtgatagatgaagtttcttggtctattttaatagaagacttcttcgatttattagaactaccaactagcaaatggtccttacctgagaaaacttcttcaatcaatacttgggcaaaagaaatagaaaaggcaagtaaaattggagaatatgataatgaggtaacttattggaataatattactattgataagtatgagtttctagaattaaaaaaaacaagtaaagataattactattgtaatagtgattccataacattttcgttgactagtgaaaaaaccgaagatttatataaaaaaataagtatgtatccggaatttgatataaatagcgttttattatctgctttaagtaggtcagtaaaaagaacttataataaatgtaaaattaaagttatgatggaaggacatggtaggtataaaaatgtaagtaatttaagtatagacagaactgtagggtggtttacaactttatatccaatagaaattagttgtgagcataatttaatcgaaaaacatattaaagatataaaagtggggatggagatagtacctaacaaaggggaaaattttttatctttattaacttcaaaaaaattaaaagaggattttctgaaccaagaaatattcgaactttcttttaattatttaggtaatattaataataacgttaacaaaaagtacagcgtcttatccattccagatattaaaaatgtcggagactataatcaaaaagctgcattaatagaaattaattgttttacattaaataataaactaagtgtatctgtaaattattcgttaaatattagagataaaagcaaagttaaagaattagtcaatacttttaaatcagaaatagaacgtacatttgagtataggtctttaaaaattgatgataataggaaaaacgattttcaaaaaatagcaagtaaagtgagcaatggagaatttatttctaaattgacaccaatgcaatcgtcaatatttcaagaatatctacgaaaggccactcttacgaataattatactgtacaagtagtatttgaagttactggaaatgtatctttaaaattattaaaggaagctttcaaaaaagtagttgacaataatgaaatatttaaaatgcgttatctttataaaggtttaactgatatctatcaagttttgacaactgaatcaaaggcagatattgatgtgtaccatgaaagtgatgagaatgaaatatgggatatgctaaatgagacttccaaaaaatgttttaaacttgacgaagatgctttgataaaatttagctgttttgtaaaagaggataataaaaaaattatatcttttacttatcatcacatcatcatggatgggtggagtattaatgagtttatacaagaatttttgaaagttttaagaggtggagaattaaccaaaaagaaaactgatatcacacgatatgttaataccgttcataattataatatagaacaagtgaaaaattattggaaaaattatttgtatgaatatgaaaatagagctgttattccatcttttaatataggagaaacatatcatactgattttgttaaaataaaaaggtttaaaataattaatataattcacaagatccaaaatcttaaaaaaagtaataatagtttaagcgttaatgatttcatactaggctcctggggtatcgttttacaaaaattaacagattctaaagacgtagtttttggaactattatatcaggtagaaatagtgaaattgttgattttgttaatgtgattggattattaattgaacaagtacctataagagttaaaaataaaaataatacatttttggaaattatagagagagttaaccatgacttatcaactattccgactcataataatttatcaataagtgagataatgagtttagttaattctgttgtgccacaacatagagcaatcatagataattatccagatacttttaaaaagagacagaagatagataatgaaagtaccattgaatttaaaaattattacgagcaaaatagcattgattttggaattgattttactatagaaaataaggatttaattgtagaaatcaaatataataacaaaatttatagtgattatgacatatcaaaagttcaagatatctttaagaaggttattacagagggtacagaaagtcctaatattaaagtcgataaaattagtataatcgaggaagaggaaatgaatttaattacctcttatgaaaagggaccaatctctaaaaagaaaaacaactccatgttagaacaattttctaatattgtgaaaaaaaatcttaattcagtagctgtctcaggtgagaaattttcttggacgtataaagagttagatgactattctaattgtattgctaattcactgttgaaaaagaatgctaatcctaaagatagaatcgctctgaattttaataataaagaattaattttacctagtatattaggagtatggaaaattggagctgtatttgttccgttagatccggaggaatcaaaagaaaaaaatgcttttattatttcaaattcttcgtgcaaatttgtacttacagatttaaatgagaaaaatgattttgacgtacaaagtctcaacatttgtaatttaaaggaagagcataatacatcaaacaacatcgagtattcatgtacggatattgcttatataatttacacctcaggtagtactgggaatcctaaaggagtggaagttggattcagtgctttaactaattatatagagggtatgttagaaaaatctaatccatctgaaatgaaatcatctttagttatgtctaaggttaattatgatttgagttatactgcattgtttattcccctatatattggaggaaacattacctttattgagaaagaagattatggtaattcatataagatttctagattaattgaaaaaaataaagtaacttatatcaaaactactccgtctatattttcgtgtcttgagtataaagctttttcaaattgtgaaacgttaaaattaattatactaggcggagaaacaccaaattccaaaagtatattagaatttttagattttaatcctaatgttaaatttttaaatcattacggcccaactgaagcaacaattggttgtatatctggttacataaacccagattttctaaaaaaagaaaaagaatataatgatattgggactccacatacgaatgtaaagatttatatattaaattcagataaagagagagtccctataggaactaaaggagaaatatatatttctggagcatgtttatctaatggttatttgaataatagaacattgactaatgacaactttatttatagtaaaaaagaaatgttgtataaaacaggtgatatcggtagatttacaccaaatggtaccattgaatattgtggacgcctagatacacaaattaagcacttaggatacagaattgaattaacatcaatagaaagacaaattaaaaaagtagaacacgtacaaaattcaattgttttgcagttagaggagaatctcttaggtacattaatagtactagacaataatggatcattaatcgatgttaagaaaagaatacaagattcacttcctaaaatgatgtggcctgcaatatatttagaagaaagcgaaattccaattactttaaacgggaaggtagattataataaagcgagacttttattaaataaaagaagaagccaaaccccaaaatcaaattataaatatataaattcacctgactataaattgaatgttttctgttatataaaaaatatattggaaaatcaaaatttaaggttgcaagataatttctatgaaacgggaggtaattctttaacagctattaaattattgtctaaactaaaccaaaagtatgataaagatataagactaaaaagtttaataactagtgaaaattttggcgaatttattgataatattttaaatgaagatagcgattctacagttaatgttgaaaagaggaaaagggaagagttttatccaatttcttctcaacaaaaaagaatgttatctcttaatttaataaatacagataacaaagcatataatcttcctattatattagagattgaaggtataattgatatagaaagattcaaagactcggtggcaagagtggttcagaacaatgaaattcttcgtactaaatatgtagttaaaaatagtaatgtatatcagaaagtgttaaaagattttgatataactaaaaaaattattaaaactgataatcttcctcagaaagcagaattaacggaatatattgaaaattttaatctgctcaatgaaataccgattaaatataaagttttttatagtttttcacaacataaaaccatagtgttgtttaactttcatcatatttgtatggataaagtctcgtatgatttgtttttagatcaaataaagagggcttatgaaggagtgaaattaactgattcagagtatcaatataaagactacatagattttcaagaaaagtatttcctagaacataagaacagacttgtaaattattggtataagaagttatcatccttaagcttatctgaaggaacatttagtactttaattttaaattcagataaatttaatggagaaaactacgaattttatttagatgaaaaactcaatgaagaaataaatgtattttgcaaaaaatatcattttacaaaatatgaatttttactttcggcatttgtaataagccttattcgtttacaagataaaaaagaaattggtgtaattagtaattatcttggcagaagtaaagttgacttttacaatactatgggtatgtttaataatactattcctcattttttcaaaatagataatacgaaaaaagtactcgatgcaatgagaaaaataaaacatcaatttattgaggatatcgatcatggagaaatgcaatttgagaagattgttaagatgggaaaagaatgttttaagaaagatgttaattctatatctgatatatcttttttatatgaaacagaaagaacagaattagatattggaaatatgagagctaaacttattaagccaaatttaaaaacatcaaaatttaacatgactttgtcggtattagaaagtgctatgaaactattctgcacgtttgaggtaaaaaaagatgtttattctatagaaatgcttagagaaattgaaaaaaaatttaaaaaagttattaatgaaattattagttgtcagggaacagagagaaatgtagaaaggggtaaaaaagatctgtatactaacagtttattagaggattttgaaaaaaatgctagtctatatcctgataaagtttgtctaattgaagagaatgaaaatatcacatttagtaaacttaataataaagctaatggttttaagtattcttttgttaataacattgacgatgataaagttttattattattaccacccaaaaaagaagtatttgtagctattttagctatttggaaagccggaaagacttatatacctgtagatcctaaatacccggatgaatatataaagaatattctttttgatagtaaatctcattttgtaatcactgataaaagtaacaaagaaagacttgaaagattgaagtgcaaagccttattaattgattatgataatattattgaaatcccaaaaggtgaatcagtatacgattttaataaaccggcttatattacttatacgtctggaactactggaaaaccaaaaggtataatgattagtcataagtcactatctaattatatacattggagtcaagaaaactatttaaaaaatcaaataaacactatggcattttattcatcgatttcttttgacttaacagttacttctttatttatgtgtttaactaatggtaataaagttaagatttttaaagaatgtgacagttttaaattattgaaaaaggtattggaagatagagaagttaatatagtcaaactgactccagcacatttaaaaatagtagacagaaccaatattaaattaaataaaaacctccacactttaattgttggaggagaggctttttattacgatttagcaaaaaatatagaatctaagggagccaatattactatttataatgaatatggtccttctgaaactacagtaggagctattgtctacaaatttgatgctaataataaaagaattcaagtgcctatcggaaaaacaatagataatatgcaagctaaaataatggtagatggaagggaagcaaacataggagaagtcggagaaatatatcttggaggtataggcttggcaaatgggtatataagtgattccgaagacagtgatgaaaaatttgtttacattgagggccacggtgatcagaaattttacaaaacaggggatctaggtgccatattagatgatgggaatatagaatatctaggtagacaagattgtcaagtaaacattaatggatatcgagttgaattagaatctattcatcaatctcttatgagtctaccggaagtaattgaagcagtagtattaaaagaagattatcatacgaataatattatatcttatgtagtaatatcgaatgagttgagcaatatcaattcgaattatataacatcacagttaagaaaaatttctcctgaatatatgattcccaactcaatccgaattgtaaaaagtattccgttgactattaatggcaaagtcaatgaaaaaaaattaaaagagtctacacaaaaaaactttaatactcataatggttttgagaataaaacaattaatcaacgaatattattaaaaaaattagagtctattttaaaaaagtcaaacttgtctttatcagataattattttgagttgggcggggactctatacaagctattatccttagttcagaattaaaagacgaaggatttagtttggaagcgtcaaaagttctcaattcattagatttaaatgaaatgagtgaatatataaaaaaagacgaagaagttaactttaataatggagataataatgagctgtacccaattagtcctatacagaattggtttttcaatcaaaaattagaaaaccctaatcaatatgtacagtctttattattaaatatgagttataattataaatatgaagaagttatagacgcattactaaaattaattagaaagcatcctacacttagaactaattttaagcgtataaacaaccaactcgtaagacaatattctaaagatatggacgaaattgaaatatcaaaagttattgaatataaaaaaataaagagtgataaattcttagaagaaattcaacgagtaagcaatgatattatagatgaaattgaaatatttaatggaaaactatggaagatatgttttgttgaagctcatgattcaagaaaagttttatttgtttttcatcatttaataattgacattgtttcatggaaaattttaataaaagatttagaaaaagctttaatgaaaaaaactataactaaaacaacttcgtatctagagtggtcagagttaattaacaacaaaaaacaagcaaataaaaccctagcttgtgctgaaagcatagattgtaatttattaactaaagaaataaaaaatccaaacgaaatattgcattataaagtggaattagatgtaaaagaaagcgatttatcttttttgaataaacagttacatgccacaacttttgaggtaacttttactatcataatcttatctttaacgcatgttctaaaaaaagaaaatatatctgtaataattgaagataatggtagagatataggggatgaagaactaaatattgagaatactattgggtggttcacttcattttattccttagatatacgagttgataatgaaaaagatatagtagaaaatataaaaaaaataaaatatatgttgagaaattcaaagaaaaatgaggttaataaaacaaataacgttgataagcaaggacatataaaagtaaattatttcggagaaatatacaaaaatttaaattcaaatatatttgacattgaaaaaaaatatcaagaagctagttctttaaaaacaagcaaaattaattttcctttggaaataagttgttatttctcatctggcaaattaattatagactttgaacagtttagtgagttgaatgaagttttaagagaatatgagattaaatatagtatacaaaaatattttaatgaaatacttttgtttaaaaatgaacttcataaattgaaagaaattaaacactcaaacaaaggaaacgaaagtataaaattacaccctgtattacctactcaagaaggattatactatgaatggttaaaagataatagttcaagcaaatatatagaacaaaatgtttttacattaaatagagaactagatgttgaagctctaaaaagaggattaaatatacttatagaaaagtatgcagcattacgtacaaattttgattttgataaagaaagtaataagccggttcagttagttagagaaaaagggtatttagattttaatacaaaaatattgaataaaaaaaatattgaattactggtagagatagataagagtgagcctttcgatttgaagaaaggggaattgttcagaattacctacatttctggtatagattgttctgatactatcttatttacctttcatcatttaattttagacggttggagtaagattattttaattaatgagataagaaattatctatcaaatggaaatatgctatatgacagtaatggtgtacaacctggggaatatgcacgttttattgaaaaacagaaaaatgctgaaaacagtaaagttttttggacaaattaccttgcaaattgtaacgctaaaatacattggccttctgagtatcttgataaaagagattgccaaaatataaatgaatattactataaatttgataaggatattcttaagaagattaaagatatggcaattagtaatcagaccacattgagtgtgataattagtactttatggggaatatcaatgtatgattatgtaagtgaaaatgatatagtctttggttttgttacttcaggtagaaataaatatacttatcaaatgtcaaaaagtgtcggtatgtttgccaatactattccgattagaattaaatccgaaaatcatgagacaattaatgaggttattcgaaaagtaaaaactaatatcttaaagtcattagataacgactattactctttaggtgagatattatcgtatagttctattaaaaacattaatcatcttttagttattgaaaatcatgagaaaaatgacaaagagattgattttgccaaaattgaaacaaaatctaaaacggagtttgatttggaagcgttatttggtattaatgaacatcttcatattaaattgagatattatcctaataaagtgtcattatcaactctagaacatataattacaacttttattaatttaatatataagacatctttaaatggagaaattcatatgtcgcaaatagattcactaataaagcaagattataaaaaccgattgtatatgaataagataaatgacagattggattcaaaaaagcagggacagttgcaagaaaatttatcagaaattcttcaaaaaagttttcgagctttttctgaaagaacagcaatcatttctgaagatatacaatgtagctattcttatctagataaagaatctaaccgaatagtacaaatattacgagaaaaaaatattcataaaggagacgtaattggtgttttcttagataaatctattgagttagtagcttctatgattggtattattaaatttggagcagttattctacctattgatgtcaatctcccttcttctagaagagaatttatgataaatgattctaattgttctttaatattgtctaaggatatagatatgaagaatgataataattatgttgaccttaatgattataaaaacataaatgttacaaatagtgagtgggcaatacttgatgacaatgatcttcaatatattatatttacgtcagggaccacaggaaaaccgaaaggtgtaaaaatttcagtcggtaatttaaaaaactttattcatagtagccaatgttctgttgattttagtaaatcaattaatatgatttcaataacatctatttcatttgatatatctatttcagaattattaattcctttaataataggaggcaaaataacaattttaaataataaggattcaaaagatcctcgcaaaattttacaagtgttgaaaaataatgaatgtaatactttacagacgacccctacacgtttagaaagtattttagatagtgtgaaaataaaaaaagaatttgaaagtattgaatatgtatacttaatgggggagactcttaaaaaatctactgttaaaaaacttttcaatttaaaacatgtaaacttatataattgctacggacctgctgaagctactatttggatagccgcaaaaaaaataaataacgaaaaagaagatatatcagttgggaaacctataagaaatgtagaaatgtatatattagataataataataatgtaacttcagaaccttatggtcatttagctgtaagtgggaattcgttatccaaaggctatatcaataataacaaagagaataactcttcctttgtatttataaataattcaattaataaaaaagtctatttaacaggtgatttggccaaatggaatgaacaaggtgaaattgaaatattaggaagaaaagataatcaaattaaagttaatggtgtacgaattgaaacaacagaaatagaagaggttgcaaaaggctacgaaaatataaaaaattcaactgtactagttgataaaactaaacaaaatatgactttatatttgtctttaagtaacaaagatcaatattttgatatttctagttttagaaagtttttaacgaaacatttacttatacaaatgcttcctcaaaaaataaaaatagttagtgaaatacctgttaataacaatgataaagttgatttaaagaaattagaaaaactaaatagcacccaggaaacaaaatatatctttaacgatgtaattgaaaaagacttatccattatttggagtagttttttagagactgatgtattttctaccaacgctagtttttttgatttaggaggcaattcgttaaaagtttataaagttatttcagaaattaacaaatacttcaatattgatatgtcagtaattgatttttttaataatcctactattgatttattatctaaatttataaagaattttaaaaataatcatagagatcatttagaaggattgttcaaaatatatcctaaaatacctgaaaatataaagttgttaaaaactaatgattttaaatatttaatagttagctcatatatacttcttgttagttttatcgaaaagaaaagatcactttcattaaactttcagttaaacaatacagaatttactaaaaacttttctttcataaatatatcagattttgaacatctaattgagatagttaaagaaatatttcaagatgttaataataaaagagcttctgaaaataagcggactaagtggtcaataactgataacttattaaacgtaaaagaagataatgtaagcctctatattagtaataaaaatgaggttattattgtatgtcaaaaaacatcggtagaatataaatatctaaatgaaataaatatattatttgaaaaagttttaaacgaggttaacaattaa

SEQ ID NO: 5338 - DNA, 1272 bp, Staphylococcus epidermidis; identical to SEQ ID NO: 2702

SEQ ID NO: 5339 - DNA, 4359 bp, Staphylococcus epidermidis
atgaatatagataatattatgaagtcgttgtctactcagcaaaataaccacattgctattattggattagattgtactttaagtaattatgaaggtcaggaagaagttcttagtttaataagatataatcgcaatggcataaggacgataccttataatagaaaaaaaatatatgatatttcttttgtcggacaatcttcgcgtaattatataccactaggttatattaatgatatagatgcttttgattataaatttttcaatatgccattagaagaagcaaaacttacagatcctagacaaagattattcttacagtctgcatggagaactattgaagatgcaggatatcggatagataacttaccagacgatactggagtatttttagggctaagcaatgatagaggtaatgagtacgctgagatattgaaatatttagattctcaatccaaacaagtttctactgctggaaacatccaatcaataatagcaagtagaattagctatttattagatttaaaagggccagctatagttattgactctgcttgttcttcatcgatggtggcgttacatacggctattcagtctattataaatgatgattgctcacaagctatagtgggtggcgttaatttaaaaataaaacctaaattattaaaagaacacgaagttaatgttgggaatgtatctgacagttttttaactagagcttttgatgttaatgctaatggtaccaacagtggagaaggttttggctctatattaattaaaaaattggataaagctattgaaaataaagataacatatattcagttattcttggaagtgctctgaatcaagatgggaaatcaaacggtattacttctccaaacggagaatcacaagaagaagtaataaagaaagcatggaaaaaggcaaaagtacatgctgaagatttttcgtttatagaagcacacggaacaggtacaattatcggcgatcccattgagtttaacgctttaaacaaagtatttaacgaacagacttcaaaaaaacaattttgtgcactaacatcaattaaaagtaatattgggcacacggatagtttttcagggttagctggtataattaaatctgctttatgtttaaagaacggaattataccggcaagtagaaattttgcacaacccaataatagtatagatattctaaatagtagcttatatattaataaaaatacaaaaataaatagaaaatcaaaaaaaatatgtggcgtctcatcgtttagtattaacggaactaatgctcacgtagttatgagtgattttaaattagaagaaaactcgcatccgcctaactgtaaaaaaattcctttattattttcagcagaaaacatatcaattttaattaattatttaagacggttcttaacttttttaaagactactaaatactcaatatttgctatcagtcaaacattaaatacttcaaaaagacagatgaaatgtcgtcttgggttagctgttagaaataaagatgaagctataacaatattagaagaaataatgaaaaatggtattaacgctaatgtgaacaatgattataaatttaacatcataaaagataagcatttcttttttcatgactatattaataagttcaaacaaaaggcaattaatataagtgaaaaaagcacttgctatgatattgtaaacctatttacttataatgaatatttaaatcttgatggttattattttaatagtaatttcactaaagttagtttaccatcttatccatttagtaaagaaaaagtatgggctactagctattttgatcatttgttaggttttaaaatttatgaatctgaagaaaagtgtatctttgaaaataaatttcaaaaaaattccaattggattttaaaggaacatcatattgataataatagtgttttcccaggtacaacatatatagaaatggcgacaagatttgttcaaaaaaaatacgacaaaattaaagggctggatattaaaaatgtacacttcttcaatttattgaaaattaaagataatgaagaaattactttacgttttattattaaaagtcatactaataaatttatttttcaagtcattcaaatgaaaaataattcagagtatcaaaaaattgctgaactagaattacgtatttttaacgaaagacttaacaatactataaatattgatgaaattataaatagaatgcattcacaaatcgatttagataatatagatgaaaataatattaggaaagatacaataaatttaggtaagcattgggatactactcggaaagttttttataataataatgaagtcttctgtaagcttagtttagatacaaaatttcaagaagaagataaacgttatctttttcatccaagcctaatggattgtgcagtaaactctgctaatttcacactagaagaaggtttttatttaccttatttttataaaaaaatatctttttataacagtgtacctaacgaaatatttgtattgataactaaaccagaaccaattcaatctaatgatttaggtgaatttgatgttaaagtagcaaataaaaagggagaaataatttgtgaaattaataactatactgtaaaaaaagttaacccacacaaaaatgatgacttaacttatcaatatattttagaaaaaagagaagagaaattatacgctaaacccaaaagaaagttattagtatacgaaaattacaatgatacattattccaaagacttaaagataatggattttctcctatttccattgataatttaaacgaattatactctaacaataataaagaagttatagacgtgctactaacatcagataaaacagattctttaaaatcgttaaaacttttccttgagaaaattaagcagctttattcattaatatctgttgatactaagattttctatattaataaacaatctactacaaaaaatgttatggcaagcaatccatttgaacaagctaaagaaggattaattaaagtactaggtaaagaaaaaaataaaaataatattaaactaataacctatgatgaaaaaaccaactttgaaaaaattcttaacgaaatgaaaaataacagtgtccacaaagaagtgaaatattataataatgaaagatatgtaaaagttttgaagaaatttaacgttcctgtttctcctattccacaaaaaagtaaaatcaaaaaaaacatattaatagttggtggtttaggtggcttaggtatagagttgactaattatttgataaaaaataacaatataataattataggtcgttcagagttaaaattaattaaaaataaactcgcctcccttaagaataaagctaatatatataaaactaatttatcatattttaaagtagatatctcagataaagaaaatagttcaaaaaagttaaaaaaaattagtgaaatatacaatcagattgatgatatatatataactgttggtaatgaaccattaggttttatcaataatatagatagttcaaacttcatagaaaatatttcaagcgtaattattggtactgaaatattgttaagcacttttaaagataaaggtttgaaaaattttatctctttctcttcaattaatacactattaggagtacctggagaagcagattatatagttgctaattcatatatggatggatttagcgagtgggcatctcaaatctatagccatattaattttaaaactatttcttggggaggatggaacaaaacaggtttaagaaaagaaattatttccaataataatagtggtttcaaacctttatcacctcaaatagccttagaaaatatggcaaaagtaattgatcaaaaagacaaatatataataatcgctgatttagaagaagacaaggtttctgctttatcaaatacaacaggtctttatttttcaaataaaaattttctcgagaaaacaagaaatccagataatttgaaagagactagaaacactaaaaccacttcggaacaaaatatcaatgaagtagttagcaaaatatggcagaacctctttggcttaaaaaatattaatccagatacaaagttttttgaccttggaggagattcaatcttagctacctatctctttaaagaattagaacaacatttcgaaggattaattgatatatcagatatatttacttacccatcaattaattccataagtaagtatatatatttcgctcaaaaatataatgataaaaatataaggtataagaatgacagcctagacgataaattacaaaagttaaaaaacggcgaactatcagttagtgatttagaaaacgaggtgtaa

SEQ ID NO: 5340 - DNA, 4686 bp, Staphylococcus epidermidis
atggaaaatttaaaaaaatatatatatgaggaagtttccaaaaataatatgtcaattgataaagccaaggagttattaggggaaatccaaaaaaaacatgaagatatagcaatagtcggtatagcgtgtaaatttgctaatgcagaaaaccaacaagagttttggaataatttattagaaggaagagaatttaaaagaggatttcaagaaagacggttaaattatattaagaatatttcttcgtcccctctatttactcagtttttgggaagtatacctttaaaaggagaagagttaaatgatatcaggccaagcggttacctttctgacatagataaatttgacccggaatttttcaatatttccccgagtgaagctagagctattgatccggatcaaagagtaatgttagaaaatgttcaagatgcattaatagatgctggttacactcgagaaaaattaaacaatagtaaaactgctgtttttataggtaaagataatactaatgacacattataccgttatattactgaagaagaatctagtagtatgacaggaaactggcctagtctaatttctggacggattagtcatcttttaaacttaaaagggccgtccctactcattgactccgcatgtagttccggtctaactggagtgcatttagcatgtaagtctcttcaaaataaagagagtaacttagttatagtgggtggcgtctcaataaattcatttccttcgtttaataagtttccttattcattaatggaatcatcagataatactttgagaccttttgatgaaaatgctaacggtactagattctgcgaaggtgttgctacagttatattaaaaccactaaattccgccctcaaagataaaaacaatgtttatgctgtaattaaaggaagtgcaattaacaatgacggcaacacaaatggaattacctctcctaatgttgactcacaagaactagttctacacgatgcatggaaggacgctcaaattaatcctgaaaatattcaatacatagaaacgcatggaacgggaactaaaattggcgatccgattgaagtaaaaggtttaacaaatgccttttctaagcataccattaaaaggcaattttgtggtatagggtctgtaaaagggaatattggtcatactgtcgcagcttctggtttagcctcattaattaaagtggccctttccttaaaaaataaaaagataccaaaaacaataaattttcagatgcctaataattttttgaattttcctactacgcccctatatatggtgaacaacacaacaaaatggggatattctaatagcaatttaaaattagccggagtcagttcttttggttttgctggaactaattgtcacatagttctaagtaatattaaaaatgaaaatatatatagaaattataaagaaaattatagcgatagaacgaattatataataacgttatctgctaaaaataagaatgcgttaattcagaatgttaaaaactatttacaaaaattgtctacaactaaaaatataagtattgaagatattagttatactaccactttaggcagagaccactttaattatagattagcattactagttaatagcgttacacaacttcaagattccttacgtgaatttttacttaataattcaacaaatgtattaagcaaaaatatttattttggtattcataaaaaaatacccaatagtagaaaaccgattagtgaggaggaaaaaagctctcaggaattaaatagattaactaaaaagattaatgtcataattgaagaagaaataaatgctgttaatattaataaatttagtgaattaatatgcaagtattatattgaaggcgcttcaataaattgggataagttaaatcagttcaataaaagaggaaagattattagccttcctttatacccgtattctaagcgtatcctttggagtaaaataaaggtacctaataatgaacatttaatcgataataatattcatccattagtacataaactagcaattgattcaataaaagaaaaaatatatgtatcaagtttaaatttcgagagtcactggagcattacagatcatcaagtaaaaggtaaaaacgttttacctggtacagcgcatgtagaaataattcgaaaagttctgtctgagtacctacatacaaacaaaatctctcttcataaccttatattttattcacctattgtattaacagaaactattaaagaaatacagataataataaacaaagataaaaatgtagtgcaaatttgcagtaagaacaacaatgaatttaatatacatagtgaaacaagttttgaaataaactctaacgaccaatgcttctatgatatcgataaatttaacaaaaaagatgatgtgaaaaggcaagatattaattacaagcacaattttatcaaaaatgatacatttacattcggtccaaggtggttgaattttaagtctttagcttataggtcaaagaatgcagagtttcaacagttagcagaattaagaataaatgataaatttaaagatgatttaaaagaaaactatatacattctgcactattagataatgcggttaatctttacattgatgaaaatgatgaagaagtttacttaccattttcgtatggaaaaattaatatctttcatgaaatgccggaacacttttattcattagtaacaaaaaaagaaactaagaaagaaactaagaaatttgatatatctctgataaatgaaaataatgaaatttttattgatataaaggattatataataaagaaatctcataatactgatggaattatacgtgacaatatctttcagaatacgtacaacgttaaatggcaaccttcagaaaatactttaactcctttatctatagataaaactaaaatagttatattgtaccaaccaactaactttagtaaaagtttagctaaaacattaatcgaagaaaatcctgataactacattcccatatgtatatccaatcctaaagtgaatgatgaagcacatcattatttaaatcttaactcatacgatagttataaagaattatttaagtgtttaaaaactgaaaacatagatactatagtagatgtatcactgtatgaagactttaaaaagcattgtgaaaactctatagatagcaaacattatttttatatgtttaaagcgttgtttgatataacatttaaaactgattttacttataaattaatcttaaataacgcttatgaaattgatggtaatgaagatcatatttctcctacgtcaactgaaatatcagggttcttcaaaggtattttggaagaggttccaaaagcgaaattttcaatatatgacatagactttaaaactgattttaaaaaaatattaaacgaaatttggaaaccaacaacttcatttttaaatggatatagaaacaataaaaggtatattcctgagataattaaagaaacggaaaaaacttcaaatataaataaagatgtatattcaaattcggattcatatttaattactggcggtttaggagatataggattgcacatagctaaaaatatatctaatcaaaaaaaagtcacttttcatttactaactagaagaagaaaaccgtttaaagatgatatattaaaagaaattacaaataacggttctactgtctgtatccatactttagacataacaaatgaacaaaaaatgaaagagctatctttaaaaatcggaaaagttgatggaatatttcattgtgctggtaatgctggagatggttttgtatacaataaatctataacttcattttctaacgtactagatcctaaaaaactaggaatgttgcatatagaaaagtattatttacatgaaaatataaagtttttagtttgtttttcctctattgtttcattattaggaggagccggacaaacagattatgcagccggaaactcatttatggatggattcataattaacttaagaaaaaaaggttttaatgctatttctataaactggccttcttggaaaaatataggtatggctaagagatataatgtttctgatcaaaaaactatattcagttctatttcaacagaagaggccacatcgataatagaaaaatcaattgttcacggactaagtaactttataccaagtaatattaattactatttgattagtcaagttaatgaactattacctattaagttctccgattcactattaagtactgtaaaagacttacaaccaaattcacgtttagataaaactattaacaaagttactcttaaaggccaaactaaggacttcactaatacagaaattatagtttctaatgcttatgcaaatatattaaatattgaagaattagatgtttttgagagttttaattcgctcggtggcgattcaataatggctacaaatttattaaaagagttagaaaagaactttgaaggtatagttgaaattactgatattttcacatatggcagtgttaaggaactttctaattttattgatgaagagttaagaaaaaaaaataatgcttacgaaaaaaataatgatcttatttctttaatggaagaactatctcaaggacatgctaacgtagacgaaactttatctaaattaaacgggggggacaaaaatgagtaa

SEQ ID NO: 5341 - DNA, 1503 bp, Staphylococcus epidermidis
atgagtaataaaaaagtgattataatcggagctggcatagctgggttgtcactaggtagctatttacaaatgaatggttatgaggttcaaattttggaaaaagagtctcaagtaggaggactctgtacatcttggaaaagaaaaggctatcttatagatggatgtataacatggttagtaggctcaggagaaaatcatatatttcacaaattttggaaagaactgggaataatacctaagttacaattcaaacaaagtgaagtttttggaaaggcttatttacctaataataatgagtttaatctgtattctaacgctgaaagattaagagatgaattcaagagattagctccagaagacaatttattgatagaaaatttatatcaagctataaaaggtatttcaaatagtgaattagatttagagaagtctcctgaattatttacctatgaagactttataaatttcaaaaaaaaatctggtacttatatgaaagttatgaaagattggaaagttaaaattaaggattttgttcaaaattttaagtcacctttgatacgggaaaactttgaacaaattttttggtttaactctaatacctatatgagttattttattgctactttagcatggtgtgacatgaaaagttgtggttattctttagatagctcccttgaattttcaaaagcaatccaagaaaaatttgaaaatttaggtggcactatacactttaattattctacaaaagagattatagttgaaaataataaagctatagggataaaaaatacaaatggtgaatctttaagaggcgatttaataattagtgcatgtgatgggtatacaactatatataaaatgttaaaaggtaaatataaaaactctgatatcgattttatatatgaaaatttaaacactactaagcctaaattacgtgtgagtttgtgtttacgtaaaaataaaaaaagtttgcctcattattttaacttctattctaagaaaccaataaaaacatcagatagtacatcggatagtaatatttatgttaataattattctgaccgtaattttttaaaacccaacacctcaattttagctttatctgtgaatactgattataattattgggaaaatttaaaaaaacatagaagaaatctttataaatatgaaaagaaaagaattgctaaagaattaattcaagagttcgaatcaatgtttggtgatatcaatgagcatattgattttattgatattgctactcctgtgacatttaatagatacactaataattataatggatctatattaggatgggaaaaagaggctttttcttttgaaaacgaagacaaagtaaaacgtgaattacctaatttatctaatttttatatggttggtcattggtctttagtaggcggtgggctccctagtgtaatgttgcaatcacggaatttggctcaattaatttgtgctaaagatgacaaaacttttagtactcataattaa

SEQ ID NO: 5342 - DNA, 6393 bp, Staphylococcus epidermidis
atgaatcaatataaattaaaagaactaattctaggctacgtaaaaaatcaaaaattaaaccctgaaattgcagcaacattattaaaaaatataactcataacaatgaaaataattatactcgtgctaataaaaatataaaagaaaataaatttgccattatcggtattgctggaagatttgcagatgcacaaaatatccatgaattttggactaacctaataaaaaacaaatcctctattacttctattccatcaaatagattgaaagatattcaggattttaatatagatataaataacactcgtttttttaaaggtgggtttatacctaatattgatttgtttgatgaaaaattctttagaatttctccaaaagaagcacaacttatggatcccaaacaaagaatatttttagaaattgcttaccatgctcttgaagatgcaggttatacaaaaagtaaaatttatggaagtaatacaggtgtttttgttggtgtcgataatagtgtagataccaaattctcttacttatcaaatatcaaagaaaagaatctgcttgcgactacaggaaattcccctagtatactagcaagtagaatatcttatatcttaaatcttaaagggcctagcgtgttaattgacacagcttgttcctctagcttagtctctgttcattatgcttgtaattcaataaaaaataaagaatgtaaaatagcaatagcaggaggaatcaacttatttgaactccccatagacaatgaagtaatgacagatattgaaaataaagaaaaaaaattaagagcttttgacagcaaatctagtggtacgacttggggagaaggcggaggagctatcatattaaaatcttatgaccaggctattaaagacggtgatcgaatatatgccattataaattcaacttacattaacagtgacggtgcatcaaatggtataactgctcctaatcaatcagctcaaactaagctaataacagaagcttggaataatgcaaatatatctcctgaaaagatttcatatattgaaacacacggtactggaactcctttaggtgaccctatagaatttaaaggtcttacaaaggccttctctcagtatactaaaaaaagacaattttgcggaataggatctattaaacctaatataggccattgcgttggtgcttctggtatagcttcatttattaaattgatcttatcaatctattacaaaactataccagctacaataaatttcgaagagccaaatagttttattaactttcccgatagtcctctatatattaacactcaaaataaaaaatgggatgacaaagagcgctatgctggaataaattcatttggctttagtggcactaactgccatattcttttatctaataatttagctgaaactacttctgattctgcggaaactcaaaaaccaaaagaggatattttgtgtttatctgctatagataatggttctctaaaacgtgtaatcgaatcttacattacatacttagaagagcaaaaagaacttaatatattcgatttttcttataccaataatacatttaaaactaattttgaaaaaagaaaaatttttccagtatacaataaaactcaattattaaatgatcttaagagatattcattcaatgaaaagataaatacaaaaatacctgatagtaaattggaaacagcatttaattatatgcaaaaaaacaagatttcatggactgaaatttataatgaatataatgtaaaaaaagtttctattccaaactatccttttaaaaaaaatcgtcattggattaatgatgtcatcgatgaaaatgaaatcagtattatcaattcaaataaaaaactcaattcaacagaatataaattatcagttatatgggcaaagctcttcggattaaaagtagttgatctatcaaaaaatgattttttcagtttaggtggagattctattatagcgagctctttaaaaaatcaaattaagaaaaccttcaataaagaagtttctttttctgacatatataacaattcaaacatattatctatagcacgcttgttagaaaaaactaaaaatagttctgaagacattccgttagcacaccacaagcctttttatcctgtcccttacaatcaacagcaaatatatgttgcacaccaacgtaacccttattcgacaacttataacgttccgatatgtttggaaattaaaggtaagatttcatataagcaattagagagctccttagaaaaattagttgaaagacataccgttttcagaactaattttttagaaagagataatgatattatacaaataattaataataataacttttcttttaaaatcgaaacaatctcagagtataaattaaaagaaactataaaaagtttccaaaagcctttcaatcttcaaaaagatagtttactacgtgcaaagttacttaaagtttctgaacaaaaacattatcttttaattgatacccatcacattatcgcagatggtttttcaatcccaattatagaaagagatctactatatttttataacaacaaaccattatctccattagatattcaattttatgactacagtgagtggcttaacaataaaacggtaaatagttcgcaaaaaaagttttggaagaaagaaattggggaaaatccaagagagtcaattttaccttttgaaggtaataagttagagaaacctgtcccatcttctaattctttttcttttaaaatacctaaatacgattttaacaaacgcgacaatcaaacaagtgattttactatgtttatagctgctattcacatacttttatacaagtatacaggaaattctaatattgttgttggcagtccttttttaggaagaaacaataaaaaactggaagatatggttggaatgtttattcaaactttgccaataatctccgatatatcaactgatgattctatcagaactatattaaataagttaaatagaaaaataaataagataaaggattatcaaaattacgcaccagagttaattaattctatactcgaaaataaactagataataaagagaaatattatcaagttttgttatcttatcaaaactctagagacaatgttattcataataacgatttgaaatttaagaatataccgttaaatacaaataatagtaaatttccaatttctatatctgtctttccagaactcgaacattttactatagatattcaatatcaagaaactattgttaataataaagaaataaaaactttttctcacgattttaaaactattctttctacattaaacacaataaatctggatacaaaaatagcagcacttaactttgataataaacgatatgtaccactaaagtcgcatgacgattcataccaagatagttatcacaaccttttgcgtaaagcattaaatgactacaagtctcatatcgctcttgaatataaaagtacaaaaattacttacaaaaccttaaataaatatattaaaaatggagcatcttttttaaacaatataggtataaatagacaagaaaaaattgcgatattacttgaaaactcagtgagttatattattagtattttaagtgtcttagaacataactctatatttatacctctagatattgaggcaccattatctagaaatttatcaattattaaaaaaaataatataaaatatttaataacatattgtgattatgaagatgttttacctaatgatatcactattattaaagaaaccttctataaaacaaatggagaatttaaaagaaggatagctaatccagaagacatagcttatattattcatacttctggaactactggagaacctaaaggtgttccaatttctcattattcattagctagctattcaactaacatagtgaagtccttaaataaaacaaagttcacaaaatcgattttaacctctagtatatgttttgatttaggatatactagtatttttgtccctcttctaaatggaggaactgttattattgaagataaaaatacttatatagattctaaaaaattggctaatataatacgttcacataatattacttatttaaagttgactcctagtctttttacatcctttaatccagacgattttataaattgtcaatcattggatactataatatttggaggagaggttccaacatcaaccaatataaagaaatttagtaatgtgcttcctaaattaaaatttgcaaatcattatggtcctactgaagctactataggttgtataactaagtatatattagaaaaagatgtacaaaataacacctatattaacaatattggctgtccaatgaataatacacgagcacttatattaaataaaaactttgaaattatgcctaaactaattaaaggagaattatatatatctggaccttgtttaactcctggttatacaaatagaaaagaccttaataaaacaaagtttataactttaaatgggtgtcgtttctacgctacaggagatttagctaagtataatgaagatacatcaattcaatattgtggaagaaaagatgatcaaattaaacatatgggatatagaattgagttatcagaaataacaagaattgttttgcaaatagaagatgtaaaacaagcagctactattttctatgagcaatcaattcttctcttttttactggaaatatacatgctgataatgtcatggttaaattaaaagacgttttacctatgtatatggtacctaatttttgttataaaataattgaactacctctaaaatcaaatggaaaattaaacgaattaaatttaatacaatatcacgttaaagaaaaaaacacttcttctcctaatgaagtaggtaataaagaagaatatataatttccaacgcctggtcacgtactctaaatacccataatatatctaatagtgaagacttttttaaaaatggtggaaattcattaaaagccttgcaattagttaattttattagaaaatctggttacaacatagaaatttcagatgtatatgagcaacgcactataaagaatatttcaaaagtgataaaagaagaaaagggagaaagcaatattaaaacagaaagtggctattataaaacaacgcctaatcaagaatggattatcaaaaatttttataataccatcaactatcaaaatctttcttttactattgaatcacacgtagatttggatttgtcacttctaaataagacattaaatattttagtcaaccatcatgatatattgaaaaccaaatttaaatttttacgacaaaaagtagtaaaaccagtcatttatgaagatatcaattttaaaattaaatttaatacttctaataattttgattctaaagaaagagaacgttttatacattctttacatgataatatttctattgaaaacggaataaaccttgttttaggtattcacaaattttctgataaaatactactaacttttatatctaatcagttagtaatggatcatatgtctctccggatacttttagatgatttcacttatatctactactgtttatatacaaaaaaagaaataaatttaggctctaaaactaactcgttttcaatgtggagcgaaaaactaagtgaaatagacttttctaacgaaataacattttggaataatattgaatctcttagcgttccaccgctaaataattctagtattaaaagaaatttaattaatattagaactttaaccactaaatgtaataataccttagctagaagagttcattcattttgtcaaaaaaataatataaaagaagagtacttaatactttccgctttactagattccctagaatatacttacaaaaagaacaactacaagattcttttagggaaccatggccgtttttataatattagtaacttggacgtttctagaaccattggcagattttcaattacatacccaatagtatttaacgtcaacagtaatgatagaactattagtagagtaattgaaactattaataatataccaaacaacgggataggttatggtttcttaaaatataaatcgaaaaatttaattgatggaagacatgctgacatatcttttaatttcatggatgattttgatactgctatttataataaccttttttcactaacaaaaatacaaagtaataataatattaactcaaaatcttattttccatataatttaaaattaactgttattaaaaaacatcaagatttaattttaaacttcgactacaataatctttcgatctctgaaaaaaacattaaagaattaaataaaaaaataaacgaaattatatttgagtatataaacagggggtga

SEQ ID NO: 5343 - DNA, 1647 bp, Staphylococcus epidermidis; identical to SEQ ID NO: 2679

SEQ ID NO: 5344 - DNA, 1719 bp, Staphylococcus epidermidis; identical to SEQ ID NO: 2680

SEQ ID NO: 5345 - DNA, 687 bp, Staphylococcus epidermidis; identical to SEQ ID NO: 2681

SEQ ID NO: 5346 - DNA, 726 bp, Staphylococcus epidermidis
atgaataataattttttaaaaattagttatctaaatattgatgaaataagcattcaagaatgtttaaaacttttacacttatgcagtaaagaaaaaaaaagtcagactaaacagcttatttatgatctaaactataaacaaacaatttgtgcaaactcattgatttattatttattatattgtaaaacgggcttattgcattacaaacctattttacaatataataagtttgggaagccgtatcttaactcaatagtagaatttaactttaatatttcacattctgaaaattgggtggtcttagcacaatcagattctgatgttggtattgatattgaaaaaatacaaccagatatctataatatagctaaaaattattttagcaccaccgaacgacattatataaattctagtttttctaaaactgaaaaaaataatcgatttataaaaatttggactttaaaagagagcttcgtgaaatttttaggtacaggcttaaatacacatttaaatacattttctatatgtgatatagaagaacccatacatactgtaagatttcataaagagccaattaaaaataatatatatttaaaaagctttaactttgataataacttttacattgctacttgttcaagagcaacttatattgaaatggaaaaaatcaacataaatgatttgcttgaattttccaaaaaatctcgtattctttctttcacataa

SEQ ID NO: 5347 - DNA, 201 bp, Staphylococcus epidermidis
atgtttaaattttcatcaattcatgtttttggatataaaaatggcgtaagtatctttataataataagtattttaatttgcagcttctttgttattgcacttagattaacaattcaacatataaaaagcattcatttttcgtgtaattcagaaaatgattcaatcgttgaaataaaaatgtatttcgaagaaccagtataa

SEQ ID NO: 5348 - DNA, 114 bp, Staphylococcus epidermidis
atgtttaaggttttaaatacgaatgtgcgaagtattcaacgcgatttatcagatattcaagagtacttgaacgaaaataatcgaatattattatatgaatcatcttcatcataa

SEQ ID NO: 5349 - DNA, 306 bp, Staphylococcus epidermidis; identical to SEQ ID NO: 2683

SEQ ID NO: 5350 - DNA, 207 bp, Staphylococcus epidermidis
ttgttattaacaaacgtaggaacaacaagtgctactgaaaaccacttatctcattctcaaattcaaaattcagcaagtagttatattcagtcacatggtattaacttaaaacaatgttcaaaggttttagtagcgaaatcaaatgatatcggcggagatgtaccaaatggattatacaccagttatgtttggaaaggaggaacataa

SEQ ID NO: 5351 - DNA, 132 bp, Staphylococcus epidermidis
ttggctttgcctaaagtagatttttggctaataagtaaaccacaagatattaattcatttttaatacgagaaatctttttacgttcacaagataaacgtaaagccatttcttcattagtcaatacacaataa

SEQ ID NO: 5352 - DNA, 615 bp, Staphylococcus epidermidis
atggtttatatttcacatccaaccgaatatggaactttatacacgaaagaagaattacaatctttatctagagtttgccgtagacatcagattccactatttatggatggtgcacgtttaggctatggccttatgagcaatcaaactaatgtaactatcgaagatgttgcaaaatactgtgatgtgttttacataggaggtactaagattggagcactttgtggtgaagcaattgtcttcactaaacaaaatgaacctaaaaacttcactacaattataaaacatcatggtgctttattagcaaaaggccgtctaactggtgttcaatttttagaattattcactgatgatttatattttgatataagtcgacatgctattaaaatggctgaaaaggtaaaaaaaggatttatagataaaggatatcaagtctattttgattcaccaaccaatcaacaattttttattttaagcaacgataaaattgaagaactaaaacaaaaggtaaaattcgcagtttgggagaaatacgataatcaacatcgtgtagttcgcttcgcaacaagttgggccacaactgaagaaaatgttaatcaactacttgaactaatataa

SEQ ID NO: 5353 - DNA, 684 bp, Staphylococcus epidermidis
atgcaacaagaacgacaatcgtggtaccaaaaatcttggtttattattctcacattgctatttatttttccattaggtctctttctaatgtggaggtatgcgcattggaagaattggttaaaattgattgtttcatcagtctatattattagtttagttttaacacttttatttcaagttagtctattaaatgagaataaaacaaatcaaatagaacatgcatcaactatgaaagaaaagtctaatataaataatgtaaaaacaactaaaaataaaaatatggaaaaatcaacgcagacagacaaacaaaactctgtgaacttaaagcaaaacacaaaagatcaaaataataatgcaaatgatgaagcagcttctccaactagcgaacaaaatgcagctatagcacaagcaaagtcatatgcaaatacattacctatctctaagaaaagtttatacaaacaattaacttcggaatacggagagaaatatccggcagacgtagcacagtatgctgttgaccatatcagtgtagattataaaatgaatgcactgagattagcaaaaagttacgtaaaaaatataaacatttctaatcaagcgttatatgatcaactcgtttcagaaaatggagaaggatttactcctgaagaagcacaatatgcaatgaatcatttagataggtaa

SEQ ID NO: 5354 - DNA, 384 bp, Staphylococcus epidermidis
atgaaagatgcaattcaagaagctgaaaaactagccaagatgaataaagaccaaaagaatcaatatgagttggaaaagctgttaaaagaaaatgaagaactaaaagcagaaaaagctttatctcaaatgaagaatgagactcgttcaatgcttaatgagtcaggtttagaaaacttcgatgatcaaattgttaatatattagtcaattctgatgctgaaacaacaaagaaaaatgttgaatcatttactaacttacttaatcaaatggtcaaatcaaatgttgaaaaagcattaagacaagattcaccagtaagcactcaattaaataaaatgacaaaagatgaagaatcagattatcttgtttcagggagaaaatgtctataa

SEQ ID NO: 5355 - DNA, 168 bp, Staphylococcus epidermidis
atggagaacaatcaaagtaatattactgaagaaacgaaacacaatgataatttagaaacaacttatgaacaaacgcaacaaaaagagaaaacattctctcaagaagaagtatctcaaatgattaaggatcgtttagctagaaaaaaaagaaatctgattaacgtatga

SEQ ID NO: 5356 - DNA, 195 bp, Staphylococcus epidermidis
atgttaattaaagatgcttatcgtaaaaatgttattgtcacacttaaaaataatgaaaagtttaaaggttttgtgtttgattatgaaaacccattagaaagtgatactggaaactattccctggatttagagacagatttaggaatatattcaattgatgaatcggaaataaaaagtataaaattaatatcttag

SEQ ID NO: 5357 - DNA, 354 bp, Staphylococcus epidermidis
gtgatacgtagtggtaaaataaaattagatataaatcctgaaaaacaaaatagacattccttaaatcatagtttatatttgaaaaataaaaattttgcattaaaaaataatgaaagattaccaagttatactacgttatctatcaatgaattaaatagattagtacaacagtactcaacttctggtaaaatcttaataaataaaaacggttttaaccataaaaaagtaataaattttgagaggattataggaaaagcatttatagatggaaaatatattgagactacatttggtaaagtgcattattcaaaaacagactctcatataataccttttataagtaaggagaaataa

SEQ ID NO: 5358 - DNA, 648 bp, Staphylococcus epidermidis
atgaaagtatctagagaaaagctattaaagcagcaattagatttgatagtcaaagactccgctttagacattcatgatgaaatagaaaataagttggttgatagagaagttgaaagacaagcacatatacttggtgaacatgtgaaaattgatgacactgaagtaaaagcggttgttaacagtaactttaaaggtgtgaactggtctacaagattatgtcaagatatggctgtagttcaaaaagaagtagaaaaaacaacgagtaatgtattacttagagggagacatcctaatgagtacgtagctaagtttaaaaagcaaacaaataccacaacatataatgcaagtagattgttagttactgaatcagcatgtgtgcaggctgaatcacagaagttaacttatcttaaagatttaggtgaagatggcgaatataaatacgtggccaaaatcgacaagaaaacatctaaaatatgtcactctttaaatggcaaagtatttaaagttaaagatatgatgcctggagttaatgctccacctatgcacccttggtgtagaagtactacagtaacacatgtgggcaattggcgagatagattctttactgagcgtaaaggtaagtatcagacagagaataaagaatcataa

SEQ ID NO: 5359 - DNA, 1341 bp, Staphylococcus epidermidis
atgccaaaacgtagttttacaaaagatgatattcgtaaatttgctgaagaagaaaacgtaagatatttaagattacaattcactgatattttagggactattaaaaatgttgaagttccagtaagtcaattagaaaaagtattagataatgaaatgatgtttgatggttcatctattgaaggtttcgttcgtatcgaagaatcagatatgtatttacatcctgatttagatacttgggttatcttcccttggactgctggacaaggaaaagttgcacgactaatctgtgatgtatttaaaacagatggtacaccatttgaaggtgatccacgagctaacttgaagcgtgtattaagaagaatggaagatatgggctttactgattttaatctagggcctgaaccagaatttttcttatttaaattagacgaaaaaggcgaacctacattagaattaaacgatgatggtggttatttcgatttagctcctacagatttaggtgaaaattgtcgccgtgacatcgttttagaattagaagatatgggctttgacattgaagcaagccaccatgaagtagcgccaggtcaacatgaaattgactttaaatatgcagatgccgttacagcatgtgataatatccaaacatttaaactagttgttaaaacaattgcacgtaagcataatttacatgcaacatttatgccaaaaccattatttggtgtaaacggtagtggtatgcacttcaacgtatcactatttaaaggaaaagagaatgcgttctttgatcctgaaggtgatttacaattgactgatactgcatatcaatttacagctggtgtccttaaaaacgctagaggattcactgcagtatgtaatccaattgtcaactcatataaacgtcttgtaccaggttacgaagcaccatgttatattgcatggagtggtaaaaaccgttcacctttagtacgtgttccaacatctagaggtctatcaactcgtattgaagtacgctcagttgaccctgcagctaacccgtacatggcattagcagcaatcttagaagcagggttagatggaattgagaataaacttgaggttccagaacctgtaaaccaaaatatctacgaaatgaatcgtgaagaacgagaagcggttggtatccaagacttaccttcaactttatacactgcgttaaaagcaatgcgtgaaaataaatcaattaaaaacgcattaggtaatcatatttacaatcaatttattaactcaaaatcgattgaatgggattactatagaactcaagtatccgaatgggaaagagaacagtatattaagcaatactaa

SEQ ID NO: 5360 - DNA, 366 bp, Staphylococcus epidermidis; identical to SEQ ID NO: 3107

SEQ ID NO: 5361 - DNA, 1239 bp, Staphylococcus epidermidis
atgcaagattttagcaatttagttgaagaagttgaaaacacacttattccttactttagaaaaattgaaaagcgtgcattatttaatcaggaaaaggtcttaaatgcttttcaccatgttaaagctagcgaaagtgatttacaggggtctacgggttatggatatgatgattttgggagagaccatttagaacaaatttatgcgcacacatttaaagcagatgacgcacttgtaagacctcaaattatttcaggtactcatgctattactttagctttacaaagtacgttaaaaaacaatgatgaactactttatattacaggtagtccatatgatacacttctagaagtcattggtataaatggcaatggtgttgaaagtcttaaagaatatggtgttcgctataatgaagtcgaattacgtgacggtcgaattgatattcctaaagtcatcactgcaattaatgacaatacaaaagttgtagcaattcaacgatcaaaaggatatgatcaacgtccatcaattacaattaatgaaattgaacaagcaataacatctattaaagaggtttatcccaatatcattatttttgttgataattgttatggagaatttgtagaagataaagaaccgattgaagtaggtgctgatttaatcgccggatcattaattaaaaatccaggtggaggtttagctaaaattggaggatatattgctggtagacaagacttaattgaacgctgtggttatcgtttaacagcaccaggcattggtaaggaagcaggagcctcacttaattctttacaagaaatgtatcaaggattctttctagcgccacatgtggttagccaaagtttaaaaggtgcactgtttactagtttgttattagaaaaaataaacatgaagacctcccctaaatataatgtttatcgtacagacttaattcaaacggttcaatttgagaccaaagagcaaatgatttcattttgccaaagtatacaacacgcttcaccaattaacgcacattttagtccagaacctagctatatgcctggatacgaagatgatgtcatcatggctgcaggtacatttattcagggctcgtctattgaattatccgcagacggacctatacgtccgccttatgaagcatatgttcaaggtggtttaacttatgaacatgtcaaattagctgttacacgtgcggtccaacatatgcaagaaaacaatttactataa

SEQ ID NO: 5362 - DNA, 1242 bp, Staphylococcus epidermidis
gtgacacagcatgcgacctataaaacaaaaaataaacgagaaactgctgtattaatcggtgtacatgctcaaacggatcgtcaatttaattttgaatctactatggaagagctcgatgctttatcacaaacttgccaacttaatgttaaaggacaaatcactcaaaatagagagcaatttgaccataaatattatgttggaaaaggaaaaatcgatgaaataaaatctttcatagaattccatgatatagatgttgtcgtaaccaacgatgaattaacgacggcacagtctaaaacgttaaatgataatttgggcattaaaatcatcgatagaacccaattaattttagagatattcgcgttgcgagcgagaagtagagagggaaagctacaagtagaacttgcacaactcgattatttgttaccaagactacaaggtcatggtaaaagcctatctcgtcttggtggtggcataggaacaagaggcccaggtgaaacaaaattagaaatggatcgtcgccatattagaacacgtatgaatgagattaaacatcaattaaaaacggtcgtggatcatcgggaaagatatagaaataaacgtgaacaaaatcaagtttttcaaatcgctttagttggttatacaaatgcaggaaaatcgtcatggtttaatgttttggctaatgaggagacctatgaaaaaaatattttgtttgcaacattagatcccaaaacacgacaaatacaagtgaatgaaggatttaatttaattatttctgatacggtagggtttattcagaaattaccaacgacattggtggctgcgtttaaatctacactagaagaagctaaaggtgcagacgtacttatgcatgtcgtcgatgcaagtcattcggaataccgtactcaaattgacactgtaaatcaaattattaatgatttagatatggaccatattccacaagtagttatttttaataaaaaagacttatgtaacgaacagatggatgtacctgtatctaaatctgcgcatgtttttgtatctagtcgtgatgaaaatgataaacaaaaggtgaaaaatttagtaattcaagaaataaaaaatagtctcagcccatacgaagaaattgtagatagtgctgatgcagatagattatattttcttaaacaacacacgcttgttactgaattaatatttgacgaaacacaagcatcttatcgtatcaaaggatttaaaaaattataa

SEQ ID NO: 5363 - DNA, 477 bp, Staphylococcus epidermidis
atggaaagtatttatgattttgttgtacaaaaaaacaatggtgaaagttataaattagagcagtataagggtgacgttatgcttattgtcaacactgctagcgaatgtggttttacacctcaattcgaaggtttacagaagttatatgatgagtataaggatcaaggatttattattttaggatttccatgtaaccaatttggcggtcaagaaccaggatcgggagaagaagctgctcaaaattgcaaaattaactatggtgtgactttccctattcatgaaaaagttgatgttaaaggtgataatcaacatccattattccattttttaacaaacgctgctaaaggtatgataaacgaaaaaatcaaatggaatttcactaaattcctaatcgaccgtgaaggtaatgtgattaaacgtttctcccctcaaaagaaaccggaacaaattaagactgaaattgaaaaattactataa

SEQ ID NO: 5364 - DNA, 240 bp, Staphylococcus epidermidis; identical to SEQ ID NO: 3103

SEQ ID NO: 5365 - DNA, 999 bp, Staphylococcus epidermidis
atgactgaaatgacaaagccttttttaatcgttattgtaggtccaactgcttcaggtaaaactgagttaagtattgaagttgctaaaaaatttaatggagaaattattagcggagattcaatgcaggtctatcaaggaatggatattggtacagcaaaagttacaactgaagaaatggaaggtataccacattatatgatagatattttgcctccagatgcttccttttctgcatatgaatttaaaaaaagggcagaaaaatatattaaagatattactagaagaggcaaggtgcctattatagcaggaggaacaggactatatatacaatctctcttatacaactatgcttttgaagatgaatccatatctgaagataaaatgaaacaagttaaattaaagttaaaagaacttgagcatctaaataataataagctccacgaatatttagcttcattcgacaaagaatcagccaaggatatacatcccaataacagaaaaagagtgttgcgagcaatagaatattatttgaaaacaaaaaaacttttaagttctcgcaagaaagtgcaacaatttactgaaaattatgatacattattaatagggattgaaatgtcgcgtgaaacattatatttaagaataaataaacgtgttgatattatgttgggccacggattatttaatgaagtgcaacatctcgttgaacaaggttttgaagcgagtcaaagtatgcaagccattgggtataaagagcttgtacccgttattaagggaaatataagcatggaaaatgctgtagagaaattaaaacagcattctcgacaatatgctaaaagacagttgacttggtttaaaaataaaatgaatgttcattggttaaataaagaaaggatgtcacttcaaatgatgttagatgagattacaacccaaataaataaaaggagttctaaccatgattgcaaacgaaaacatccaagaccaagcactagagaactttaa

SEQ ID NO: 5366 - DNA, 927 bp, Staphylococcus epidermidis
gtgagtcaaagtcattttaaaataacagttgaagatggaacaatgttagaggtgaaaattgataaagcaaaaaagagtactattggtattgttcatcttttccatggcatggctgaacatatggaccgttatcaagagttagttgaggctttaaatacacaaggttatgacgttgttagacataatcaccgtggacatggtaaagaaatagatgagaatgaacgtggtcattttaatagcatgaatcaaattgtagatgatgcttatgaaattattgagacattatatcttgaagagctcaatgtaccctatattatcataggtcattcaatgggctcccttattgctagatcatttgttgaaaagtatcctgacattgctcaaggtttaattcttacaggaacaggtatgttccccaagtggaaaggtgtaccaatacgtttagcaatgaagttagttacatttatttttgggaaacgacgtcgactcaagtgggtgaatcaattattgaataaaactttcaataaaaaaatcactcaacctcgaacagatagtgattggatttctacacgtcaggatgaagttgataaatttgtggaagatgaattttgtggattcaaagtatctaatcagctcatttatcaaactttaaagaccatgatgaagacagtagaacgacaacaactaaaaagaatggacaaagaactacctatactatttatttctgggaaagatgatccttttggtgaatatggtaaaggtataaagcatttagctagattatataaaagagcaggtattaaacatataacagtacaactatataaacataagcgtcatgaaatattatttgaagaagattatttgaaaacatggcaacacatgtttgaatggatggaaaagcaaattttgaaaaaacaaaagtga

SEQ ID NO: 5367 - DNA, 1674 bp, Staphylococcus epidermidis
atgtcattatctacattgaaaagggatcatattaaaaagaatttaagagacactgaatacgatgttgttatcgtaggtggcggtattacaggtgcaggtattgctttagatgcaagtaatcgtgggatgaaggtagctttagtagagatgcaagactttgcacaaggtacaagttcacgctcaactaaacttgtacacggtggtttaagatatttaaaacaactgcaagtaggggtagttgcagaaacaggtaaagaacgtgctattgtttatgaaaatggtccacatgtgacaacaccagaatggatgcttttacctatgcataaaggtggtacatttggtaaattctcaacttctattggactagctatgtacgatcgtctagctggtgtcaaaaaatccgaacgtaaaaaaatgttatctaagcaagaaacgttaaataaagaacctttagttaaacgtgatggattaaaaggcggtggctactatgtggaataccgcactgatgatgcgcgtttaactattgaagttatgaaaaaagctgctgaaaatggagcagaaatcattaattatacaaaatcagaacacttcacttatgattccaataagaaagtaaatggtattgaagtattggatatgattgatggcgaaacgtatgcgattaaatctaaaaaagttattaatgcttctggtccttgggttgatgaagtgagaagtggcgattatgcacgtaacaataagcaattaagattaactaaaggtgtacacgttgttatagatcaatctaaattcccattaggtcaagcagtttactttgataccgaaaaagacggacgcatgatttttgcgattccacgtgaaggaaaagcttatgtaggaacaactgacacgttttatgataatgaaaaagcaacacctttaacaacacaagaagatagagactacttaattaatgcaattaactatatgttcccaacagttaatgttaaagatgaagatattgaatcaacatgggctggtattcgtccgctaattcttgaaaaaggtaaagatccttctgaaatctcacgtaaagatgaagtttgggaaggtgaatctggattattaactatagcaggcggtaaattaactggttatcgtcatatggcactagaaattgttgatttattagctaaacgtttaaaacaagaatacggattgaaatttgaatcatgtgccacaaaaaatctaaaaatttccggtggtgacgttggcggaagcaaaaactttgaacactttgttgaacaaaaagttgatgcagctaaaggatttggaattgatgaagatgtggcacgtcgcttagcaagtaaatatggttcaaatgttgatcaactatttaatattgctcaaacggcaccatatcatgatagtaaattaccattagaaatttatgttgaattagtttatagtattcaacaagaaatggtttacaaaccaactgacttcttagtacgtcgttctggcaaattatactttaatattcaagatgtgttagattataaaaatgctgtgatagatgttatggcggatatgcttaattatagtgaaactcaaaaagaagcttatactgaagaagtagaagttgcgattgatgaggcacgtacaggtaatgatcaacctgcaactaaagcttaa

SEQ ID NO: 5368 - DNA, 1500 bp, Staphylococcus epidermidis; identical to SEQ ID NO: 3099

SEQ ID NO: 5369 - DNA, 825 bp, Staphylococcus epidermidis
atgaatgcttatttagcagaatttttaggtactgcaatccttgttctttttggtggtggcgtttgtgcaaacgttaacttaaagagaagtgctggtaacggtgcagattggattgttattgcatttggttggggtttggcagtaacaatgggcgtttatgctgttggaacgttttctggtgcacatttaaatccagctgtaacagttgctttagccatggatggtggatttagctgggcgcaagtaccgggctatattgtttgtcaaatgcttggcggtattgttggtggagtttttgtatggttaatgtatttaccacactggaaagttacagaagatccagcagtcaaattaggtgtattctcaacagcaccagccattaaaaattattttgctaactttttaagtgagattatcgggactatggctttaacattaggaattttatttatcggggttaataaaattgctgatggtttaaatccaattattgttggtagtcttatcatagcaattggtttaagcttaggaggtactactggttacgctattaatccagcccgtgacctagcaccacgtattgcacatgctattttgccaattcatggtaaaggtaaatctaactggtcttacgcaattgtacccgttctgggacccatggcaggtggtatgttaggtgcgattgtttacgaagtgttttataaacaaacattcaattttagttgtttcattggtttaattgtacttatattcacacttatacttggcgtgatactaaataagatatctcaaaataaaaacaacgatattgaatcaatttattaa

SEQ ID NO: 5370 - DNA, 534 bp, Staphylococcus epidermidis
atgaaagagaatattttgccagctattagaaatatgagagatttagaaaagttaattaaaacagactacaaagcatgtgttgtgttagatatgcatataggtcatttgaaaagcattatggagttacttaaaagtcattcgattgaatgttatgtacatatcgatttaatcaaaggactcagtcatgatgaatttgcttgtgagtacattattcaacaatataaacctaaaggtattgtttctacaaaagctaaggtcatcaaaaaagctaaaatgttaaatactttgacgatatttagagtgtttatcatagatagtcaagcattaacaagaagtattgaactcattaaaaaagtagagcctgactatgttgaagttttacctggtgttgcaagtaaagcagtgagtaaaattcaacaagaaacatcagcgtcagtaatagctggtggtcttatcgatgaacaatcggaaattagagaagcaatttccaatggcgctaagtacgtcactacaagttacgagaaactttggtaa

SEQ ID NO: 5371 - DNA, 1938 bp, Staphylococcus epidermidis
atggggaaaataaaagaacttgagacgtctctagctaataaaatagctgcgggtgaagtggttgaaagaccaagttccgtagttaaagagctcttagaaaatgcaattgatgcacaagcgacagaaattaatattgaagttgaacagtctggagtttcatcaataagggttgtagataatggcactggtattgctcaggaagatttagggttagtatttcatagacacgcaacgagtaaaatagtcgcagataatgatttgtttcatattcgtactttaggttttaggggagaagctttagctagtatttcatcagtagcaaaggtgacattaaagacctgtactgataatgaaaatggacatgaaatatatgctgaagatggtaaaatcattcatcaaaaacctgcaaaagctaaaaagggtacagatatacaagtggattcattattctacaatacacctgctcgattaaaatatataaaaagtttgtataccgaactaggtaaaattacggacattgtaaatagaatggcgatgagtcatcccgaaattagaatttctttagtttcagatggtaaaaaacttttaagtacgaatggctcaggaagaacaaatgaagtaatggctgaaatttatggaatgaaagtagcaaaggatttagtgcatatttcgggtgatactagtgattatcatcttgaagggtttgtagccaaacctgagcattctagaagtaataaacattacatttctattttcatcaatggtagatacatcaaaaactttgtactcaataaagcaattttagagggatatcacacattgcttacaataggaagatttcctatatgttacattaatatccaaatggatcctattttggttgatgtaaatgttcatccaacaaaattagaagtgagactttctaaagaagatcaactttatgatcttatcgtaaccaaaatcagagaggcttttaaagacaaaatcctcatcccacaaaacgatttaaatcacgcgcccaaaaagaataaggttttagaaacatttgaacaacaaaagattaatttcgagaagcaacaatcacaaattggagaaacatctgcaccatatgtacatgatcaaaaagataagaatcatgatgtagagtcgcataagaataatttagattcaacttcatcgacaaataatgaaagtacggaagtttctaatgaattacacaatcacattgatgatagttacttacaaagtcaaaaagaagtattgtttgatatggaacaaaacacatctaatgaatatgagatattaaatcagcaatcaaacgatattaaaggaacagtgagtcagacacctcatcgtagggtgccttatatggaaattgtaggtcaagtacacggtacgtatatcattgcacaaaatgaaaatggtatgtttatgattgaccaacatgctgctcaggaaagaattaaatatgaatattttagagaaaaaattggcgaagtgaccaatgaagtgcaaaacttattaataccactaactttccatttctctaaagatgaacaaatgattattgatcagtacaaagatgaattagataaagtaggagtacatcttgaacattttggtggacatgattatattgtaaatagctatccagtatggtttccgaaagaagaagcggaagaaattattaaagatatgattgaacttgtcttaaaacacaaaagtgttgatgtgaagaaaataagagaagatgcagcaatcatgatgtcttgtaagaaatcaattaaggctaatcactatttaaaaaataatgaaatggcagatttaattgatcaactaagagaagcagaagatccttttacttgtcctcatggtagaccgattattatcaatttttcaaattatgaattagaaaagttatttaaaagagtaatgtag

SEQ ID NO: 5372 - DNA, 2622 bp, Staphylococcus epidermidis
atggctaacattacaccaatgatgcaacaatatttaaagataaaatctgaatatgatgattgtttgctattttttagactcggagatttctatgaaatgttctttgatgatgctaaagaagcatcaagagtacttgaaataacattgacgaaaagagatgctaaaaaagaaaatcctattccgatgtgtggcgtaccatatcattctgctgataattacattgaaacattgattaataatgggtataaggtcgctatatgtgaacaaatggaagatccaaagcaaacaaaaggaatggttagaagagaagttgtaagaatcatcacaccaggaactgttatggatcaaaatggtatggatgaaaagaaaaataattatattttaagttttatcgaaaatgaagaatttggattatgctattgtgatgtttctacaggagaactcaaagtaactcatttcaaagatacagctaccttgcttaatgagattacaacaattaatcccaatgaaatcgtcataaagcaagctctatctgaagaattaaaaaaacaaatcaacatgataactgagacgattactgttcgcgaagatatatctgatgaagattatgatatgaatcagttgacacatcagttaatgcatgacacaactcaattattgttagattatattcatcacacacaaaagcgagatttatctcatattgaggaagtgattgaatatgctgcagttgattatatgaagatggattattatgcgaagcgaaatttagagctgacagagagcatacgattaaaatcaaaaaaagggactttgttatggttaatggatgagacaaaaacaccgatgggtgctagacgtttaaagcagtggattgatcgtccattaattaataaacaacaaatcaacgacagattaaatattgttgaagagtttatggaccgttttattgaaagagatacattacgtaatcatttaagtcaagtgtatgacatagaacgactagtaggaagagtgagttatggaaacgtaaatgcaagagatttaatacaacttaagcattctatatccgaaatacctcacattaaagcattactcaatgaattgggtgcacaaactactacgcaatttaaagaattagaacctttagatgacttgttacaaattttagaagaaagtttagttgaagaaccacctatttccatcaaagatggaggattatttaaaaatggcttcaacgcgcaacttgatgaatatttagaagcttcaaaaaatggtaaaacttggcttgcagaattacaagctaaggaacgtgaacgtacaggtattaagtcattgaaaattagtttcaataaagtgtttggttattttattgaaattacacgtgcaaacttaaataattttcaacctgaagcgtttggctataatcgaaaacaaacattatctaatgctgaacgatttattacggatgaattaaaagaaaaagaagatataatacttggtgctgaagataaagcagtagagttagaatatgaattatttgttaaattacgagaacacattaaaacgtacactgaacgtttacaaaagcaagcgaaaatcatttcagaacttgattgtttacaaagttttgctgaaattgctcaaaaatataattatgtcaaacctacatttagtgatgataaagttttacatttagaaaactcaagacatcctgttgttgagagagtgatggattataatgattatgtacctaatgattgccatcttgatgatgaaacgtttatttatctcattacgggacctaatatgtcaggtaagtcaacatatatgagacaagttgctataataagtatcatggctcaaatgggagcatatgtaccatgtgattcagcaacattacctatatttgatcaaatttttactaggattggtgcagcagatgaccttgtatcaggtaaaagtacatttatggtagaaatgttagaagctcaaaaagctttaacttatgctactgaaaatagtttaattatctttgacgaaataggaagaggtacatccacttatgatggtcttgcgttagcgcaagcgatgattgaatatgttgctcaaacttcccatgctaagacacttttctcaacacattatcatgaattgacatcacttgatcaaatgcttaagtgtttaaaaaatgtacatgttgctgcaaacgagtatcaaggtgaactgatatttttgcataaagtcaaagatggtgctgtggatgatagctatggtattcaagtggcaaaattagcggatttacctaatgaagtcattgatagagcgcaagttatattaaatgcatttgagcaaaaaccttcgtatcaactctctcatgagaatactgacgatcaacaaacggttccgtcgtataacgattttggtcgaacagaagaagagcaatcagttatagaaacacatacatcaaatcataattatgagcaagcgacctttgatttatttgatggttacaatcaacaaagtgaagttgaatgtcaaattcgagaattgaatctatccaatatgacaccattggaagccttaatcaagctgaatgaattacaaagtcaattaaagtag

SEQ ID NO: 5373 - DNA, 495 bp, Staphylococcus epidermidis
atgaatattagaaagttgaccatcacagcattcttaatagctattaatgtcgtgttaagtagtttaattgtcattcctttaggtccaattaaagccgcacccgttcaacattttgtaaatgtattatgtgctgtatttgttggaccatggtatggtttagcgcaagcttttatttcttctgtactacgaatttcatttggaactggaagcgcatttgcttttccaggaagtatgataggtgtcttactttccagtctgttttatatgtataggaagcatatttttatggcttcagttggtgaagtattagggactggtgttattggtagtttaatgtgtatacctttagcatggtttttaggacttcaagatttctttattaaaccattaatgcttatgttcatagtatcaagttttattggggctttaattagttatatattgcttattattttgaaaagaagaggtttactagatagatttaacaaaaattaa

SEQ ID NO: 5374 - DNA, 366 bp, Staphylococcus epidermidis
atgtatagtgaaaaagaaatcatacgaaaagtcgaaagtttagcagagaaaattggaaaactagaagttgttcaagattatcataatgtagaaaaacaaattcataataatcaagcaataaaacaaaagatgaatcgtttgaaagcgcaacaaaaacaatcggttaattttcaaaattatggaaaacaaaatgcactcgagcaatctgaagttaaaattcagaatctaaaagatgaaattaatgaattacctattgttgaagaatttcgttcagcacaatatgaggcgaatgatttactacaaatgatggtcaaaacaatggaagatagactcaatgaatataataaaaaagaacacaatgaataa

SEQ ID NO: 5375 - DNA, 1545 bp, Staphylococcus epidermidis
gtgaatgaagagcaaagaaaggctggaacgataaatattctagcagaacgtgatcgtaaagctgagaaagattatagtaaatactttgaacaagtgtatcagccacctagcttaaaagaagctaaaaaaagaggaaaacaagaagttcaatataacagagattttcatatagatgaaaaatacaaaggtatgggtaaaggtcgcacttttttaattaaaacatatggatgtcaaatgaatgcacatgacactgaagttatggcaggaatattaaatgcattaggatatagtgctacttcggatattaatgaagcggatgtgattttaattaatacatgcgccattagagaaaatgctgaaaataaagtctttagtgaaataggaaatttaaaacatttaaaaaaagaacgcccagattgtttaattggggtgtgtggttgcatgtctcaagaagaatcagtcgtaaataaaatattaaaatcttatcaaaatgtagatatggtttttgggacacacaacattcatcatttacctgagattttagaagaggcatatttatctaaagcgatggtagttgaagtatggtctaaagagggagacatcatcgaaaatttacctaaagtgcgtgacggtcacattaaagcttgggttaatattatgtatggttgcgataagttttgtacttattgtattgttccatttactagaggaaaagaacgtagtcgtcgtccagaggacatcattgatgaggttagagaattagcaagagaaggttatcaagaaattaccttattaggtcaaaatgtaaattcatatggtaaagatatcgaaggtctggattatgaattaggtgacttattggaagatatttctaaaattgatatacctcgtgttcgttttacaacaagtcatccttgggactttacagatcgaatgattgaagttatagctaaaggtgggaacatagtaccgcatatccatttaccggtacaatcaggtaataaccaagtattaaagataatggggcgtaaatatacaagagagagttatcttgatttagtttcaagaataaaggaagctatccctaacgtagctctaactactgatatcatagtaggttatcctaatgaaactgaagaacaatttgaagaaacattatcattatatgatgacgttcaatttgagcatgcatacacatatttatattcacaaagagatggaacaccagcagctaaaatgaaggataacgtacctttagaagtgaaaaaagaacgtttgcaaaggcttaataagaaggttggaatatattctcaacaagcaatgagtcagtatgaaggtaagattgttacggtattatgtgaaggttctagtaaaaaagatgagaatgttctagcaggctatactgataaaaataaacttgtgaattttaaaggaccaagagagagcattggtaaactcgttgatgtcaaaattgacgaggcaaaacaatattctttaaatggaacatttatacaagaacatcaacgttcaatggtgacacaataa

SEQ ID NO: 5376 - DNA, 291 bp, Staphylococcus epidermidis; identical to SEQ ID NO: 3091

SEQ ID NO: 5377 - DNA, 618 bp, Staphylococcus epidermidis; identical to SEQ ID NO: 3090

SEQ ID NO: 5378 - DNA, 867 bp, Staphylococcus epidermidis; identical to SEQ ID NO: 3089

SEQ ID NO: 5379 - DNA, 1761 bp, Staphylococcus epidermidis
atgaaatcacaaatatcatggaaagtgggcggtcagcaaggcgaaggtattgaatctaccggtgaaatctttgctactgcgatgaatagaaaaggttattttttgtatggatatagacacttttctagtcgtataaaaggtggccatactaataataagataagagtttcaaaatcgcctgtgcatgcgattagtgatgatttggatatactcattgcttttgaccaggaaacgattgaattaaatcatcatgaaatgagagaagatagtattataattgcggatgctaaagcaaaaccccaaaagccagagaactgtgtggctcaattaattgagttaccattcactagcacggcaaaggaacttggaacagcattaatgaagaatatggtggcaattggtgcgacatctgcactgatggatttaaatacatcaacttttgaaactttaatcgataacatgttttcaaaaaaaggtaataaagtcgttgatatgaatatacaagcccttaatatgggttatgatttaatgaagcaacaagttaccaacgttaatggagactttacattagagaatggtagcggtcatcctcatttatatatgataggtaatgacgcaatcggattaggagcaatagcagctggatcaagatttatgtccgcttatccaattacgccagcttctgaaattatggaatacatgattgccaatctacctaaagttgatggtactgttgttcaaactgaagatgaaatagcagcagcaacgatggcgattggagctaactatgctggcgtacgaggctttacagcgagtgcgggtccaggtctttctttaatgatggaatctattggattgtctggtatgactgaaacgccattagtcattattaatactcaaagaggtggtccttctactggcttaccaacaaagcaagaacaatcagatttaatgcaaatgatttatggtacccatggtgatattccgaaaattgtcgttgctcctacagatgctgaagatgcgttttatcttactatggaagcatttaatttagctgaagaataccaatgtccagtcattctgttaagtgatttacaattatcattaggaaaacaaactgttaaaacactcgattataataaaatcgatattcgtcgtggagaaataatacagtcagatatcgagagagctgaagatgataaagcatactttaaaagatatgcattaacagctagtggcgtatcaccacgaccaataccaggtgttaaaggtggtatacatcatgtaacaggtgttgaacataatgaagaagggaagccaagtgaggcgcctatgaatcgtcagaatcagatggaaaaacgaatgcgcaaaactgaaagcttggttatcaataatcctgtgttactcaatgaacatgaagacgaagcagatatactgtatataggatttatatctactaaaggtgctattggagaaggtgcagaaagactagaacgacatggtgtaaaagtgaatacgatgcatattcgacaattacatcctttccctaaagatattgttcaacaagctattaataaagcttcgaaagtaatagttgcagaacataattatcaaggacaattatcaagtattttaaaaatgaacacacaagttaatgataaattagttaatcaaacaaaatacgatgggaaacctttcttaccttatgaaattgaagaaaaaggtttggaaattgctaaagagttaaaggagttggtgtaa

SEQ ID NO: 5380 - DNA, 795 bp, Staphylococcus epidermidis; identical to SEQ ID NO: 3087

SEQ ID NO: 5381 - DNA, 216 bp, Staphylococcus epidermidis
atgtctattaatattgatcctgaaaaatttgctgaattagttgtaacttcaaatccagccaaatctgatgacgctgaagatatcgctaaagaaagtttaattttatacattaatgcttatcgtttagcagagaaatatgcaaatatcgctacaaattgctatgatacagctgaaattttaaaagaaataaatgaagttgatttacaattaaaataa

SEQ ID NO: 5382 - DNA, 1560 bp, Staphylococcus epidermidis
gtgaatttattaagcctcctactcattttgctggggattattctaggcgttgttgtagggtatattgttgcccgaaatttattacaccaaaaacaagttcaagcaagacaaactgccgatgatattgttagctatgctaataaagaagcagacaatattaaaaaagaaaaattacttgaggcaaaagaagagaaccaaattttaaaagaacaagctgagaatgaactgcgtgaaagacgtggtgaacttcaaagacaagaaacccgacttcttcaaaaagaagaaaatttggatcggaaatctgatcttttagataaaaaagatgagattttggaacaaaaagaatcaaaacttgaagaaagacaacaacaagtagatgcaaaagagagtagtgttcaaacattaataatgaagcatgaacaagaattagaacgcatctccggtctcactcaagaagaagctgtgaaagaacagcttcaaagagttgaagaagaactgtcacaagatattgcaatacttgttaaagaaaaagaaaaagaagcgaaagaaaaagttgataagacagctaaagaattacttgctacaactgtacaaagattagcagccgaacatacaactgaatcaactgtttcagtcgtaaatctgcctaacgatgaaatgaaaggtcgtatcataggtagagaaggtagaaatatacgcacattagaaacacttactggcatagatttaattattgatgacacaccagaagcagttattttatcaggttttgacccaattagacgtgaaattgctagaactgcactagttaatttggtttctgatggacgtattcatcctggacgtattgaagatatggtcgaaaaagctagaaaggaagtagacgatatcattagagatgctggagaacaagctacctttgaaataaatgtacacaatatgcatcctgatttagtgaaaattttgggtcgattaaattatcgaactagttatggtcagaatgtacttaaacattcaattgaagttgcccacctttcaggtatgcttgcagcagaattaggagaggatgttactttagctaaacgtgctggattattacatgatgttggtaaagccattgatcatgaagttgaaggtagtcacgtagaaataggtgttgaattagctaagaaatataatgaaaataacataattattaatgctattcactcacatcatggtgatgttgaaccaacctctatcatttctattttagttgcagcagctgatgcattatcagcagcgcgaccaggtgcacgtaaagagacaattgaaaattatattagaagacttgagagactcgaaacgttatctgaaagttatgatggggtagaaaaagcatttgctatacaagctggtagagagattcgtgtagtcgtctcacctgaagaaattgatgatttaaaatcatatagattggcaagagatattaagaaccaaattgaagaagagttacaatatcctggacatatcaaagtgacagttgttcgagagactagagcaatagaatatgctaaataa

SEQ ID NO: 5383 - DNA, 1050 bp, Staphylococcus epidermidis
ttggataatgaacgtcaaaaagctttagatacagtaattaaaaacatggaaaaatcttttggtaaaggtgccgttatgaagttaggcgataataaaggtcgcagagtatcaagcacttcaagtggttctgtcacagttgataatgcattaggggttggaggttatcctaaaggaagaattatcgaaatatatggacctgaaagttcaggtaagacgacagtagctttacatgctatcgctgaagtacaaaaaaacggtggtgtagcagcatttatcgatgccgaacatgctctcgatccagtatatgcacaagcattaggtgtagatattgataatttatatttatctcaacctgatcatggtgaacaaggtcttgaaatcgccgaagcttttgttcgtagtggtgctgtggacattgttgttgtcgattcagtagcagcattaacacctaaagctgaaattgaaggtgaaatgggagatactcatgttggtttacaagcaagattaatgtctcaagcattaagaaagttatcaggggctatttctaaatctaatactacagctatatttattaaccaaattcgtgaaaaggtcggtgtgatgttcgggaatcctgaaacaacgcccggtggtagagccctaaaattctatagttctgtacgtttagaggtaagaagagcagagcagttaaaacaaggtcaagatattgtaggtaacagaaccaaaataaaagttgtaaaaaataaagttgcacctccatttagagttgcagaagtagatattatgtatggtcaaggtatctctaaggaaggagagctcattgatttaggtgtagagaatgatatcgttgataaatcaggtgcttggtattcttataatggagatagaatgggccaaggtaaagaaaacgtcaaaaattatcttaaggaaaatccacaaatcaaagaagaaattgaccgtaagttacgtgaaaagttaggtattttcgatggtgatgtggatgaaaatgagaatgaagacgattcaccaaaaactttatttgatgaatag

SEQ ID NO: 5384 - DNA, 1146 bp, Staphylococcus epidermidis
atgaatatttcaattgtagctgttggctctgaattattactaggtcaaatagctaatacaaatgggcaatatctttcaaaactttttaatagtattggtaaaagtgtagtagaacacacagttattggtgataaccctcaaaggttagaatatgtaataaagcaatgtctatctagatttgataccattgttttaacaggtggcttaggaccaacaaaagatgatttaactaaacatactgtagctaaagtattaggaaaaaatctagtgacggatgaagcatcgttaaactttatcaaaaactattttaaagaacaaggtcaagatatgacctctaataataagcaacaagcattagtaattgaagatgccatagttttaccaaataaaaatggtatggctcctggtatgcttgtagaattaggtaaacaaaaaataattctactaccaggtccaccgaaagagatgcaacctatggcgaagaatgaattattaccttatcttatggataaagatgaagttattttttctgaattacttagatttgctggtataggagagtcgaaattagaaacactattaattgatctaatagatgatcaaactaatccgacaatcgcacctcttgcaggtacgcatgaagtatatgttagattaacagccaatgctgaaagtaaggaacgatgtcaactgcttattaagcctattcgagatgaaattttaaatagggttggtactttttattttggctcagacgaagttaatattgaagaatcggttataaatagtgcaaaacagaattttgctatttatgacggtgtaactaatggagctttgtttactcgattaaaaaatgctgacagtaaaaatctagttaaaggtatgctaccacattctaatcaatttattgatgtgacttctgagtttaatgccgtgttattcaatgcagcacaatatgtcagggatttgtaccaaacagatttgggtattgtacttttaaataaagataacattgtatatttaggaatttatgatggaaataatttcgatatcgaaacatttaagatgtctcaaagtcgtaatttattgagaagcagaagtcaaaattatgcaatgattagattattaaattggtttaataaatag

SEQ ID NO: 5385 - DNA, 582 bp, Staphylococcus epidermidis
atgaatataccgaatcaaataacggtatttagagttattttaataccattttttattttatttgctttagttgattttggttttggacaaatttcaattttaggtggaaatcatattagaattgaaatattaattagtgctatcatatttgtggttgcatcattaagtgattttgctgatggttatcttgcccgtaaatggcaattagttactaatatggggaaattcttagatccacttgcagacaaattattggtcgcgagtgcattaattgttatggtacaacttggttttactaattctgtcgttgctatcataattattgctcgagaatttgccgtcacaggattacgattactacaaattgaacaggggtttgtaagtgctgcaggacaactagggaaaataaaaacagcagtgacaatggttgcaattatatggattttattgggcgatcctttcttacactatctacatttcccaattggagtgtggttattatacattggagtattctttactattctttcaggtattgaatatttttataaaggaagagatgtatttaaacattctaaataa

SEQ ID NO: 5386 - DNA, 393 bp, Staphylococcus epidermidis; identical to SEQ ID NO: 3081

SEQ ID NO: 5387 - DNA, 828 bp, Staphylococcus epidermidis
atgacttttgcaaaaaggaaagagtggtacttagaatatgagataactgtaaatcgtgctggcttactcggtgatatttcaagtttgattggaatgctcggcattagtattgttacaattaatggtgttgatcagggaaaaaggggattgttaattaaaacagatcaactagaaaaggtcgaaaggttcgaacaaattgtaaaagaaattaatgaaatagaaattacaaagttaagagttcctgaattacgagatagactcgctgtacgacacggtagatatattgaacaagatgctgatgataaaaagacttttaaatttgaacgagaagatttaggattacttgttgattttttagctgagttatttaaagaagaaggacataaattaatcggaatacgtggaatgcctagagttggtaaaactgaatctattgtagctggaagtgtttgtgcacataaaagatggttattcataagctcaactttaattaaacaaacagtaaggcgttcactatttaaaggtgaatatgattctaatcacgtatatatcattgatggtgcggtaacagcacgtgaattgaaccctgagcaccaagaattggtgagagaggttatgacgttaccctcaataaaagtagttgaacatccagatttatttgtagagtcgtgcaattataatatggaagattttgactatattattgaattgagagaaaatgaagatcaagagattcgatatgaagaaatgaagaaacatacggttcaaagcaagaataatttagattttggagatccatttggtggagggtttggtttctttgaataa

SEQ ID NO: 5388 - DNA, 705 bp, Staphylococcus epidermidis
atgaaagcgctagtcataggtggttctggaacaataggtcgtgccattgtaaaacgactgctatttgaaggttatgaagttttcttacattatcattcagctcaatattctgatttaagtaatcaatttaaaaatagcaaagttacatttattcaatgtgatttaaccaaagatataaagctcgaagattactttggacacattgacgagctagattgtctaatttataccagtgggacagcattatatggcatgttacaagatatgagtgattgtgacatcgataatagttatgcattaaatgtaagacaatttatacgtttgactcgctactttattgatattttaaggcagagtaacaatggacgtatcattgttatttcatcaatttggggagaaactggagctagtttagagacaatctattcagcgatgaaaagtgctcaaattggttttgttaaagcattaagtcaagaattagctttaacttcagtaactgtaaatgctattacaccaggtatggtaaaagggaaaatgagcgatgtatggtcaaaagatgagttatcgaatatagtatcagagttacctcagcaaagaatgattgatccttctgaagtggcacatgcttgtgcatacttgtgtagtactatgtcaaaaagtattacgggtacagtacataaagtgaatggcggatggtatatttaa

SEQ ID NO: 5389 - DNA, 1290 bp, Staphylococcus epidermidis
atgaaaacacatcaatatgaacttatagatgagaaagttttcgaacatgagtttgataatggattgaaattatttatcattcctaagcctggttttcaaaaaacgtatgtgacctacacaacacagtttggttcattggacaatcattttaagcccataggtagtcagcaatttgtaaaagttcctgacggtgtggcacattttttagaacataaattgtttgaaaaagaagatgaagatttatttactgcatttgccgaagagaatgcgcaagctaatgcttttacaagctttgatcgtacgagttatttatttagcgcaacaagtaatattgaaagtaacattaaacgtctcctcaatatggtagaaacaccttattttactgaagaaacagttaataaagaaaaagggattatagctgaggaaattaaaatgtaccaggaacaaccaggatataaattaatgtttaatactttaagggctatgtattccaagcacccgatacgggtggatatcgctggtagtgttgaaagcatttatgaaataacaaaagatgatttatatctatgctatgagacattttatcatccctctaatatggtgttatttgtggtaggcgatgttagtcctcaatcgataattaaacttgtagaaaagcatgaaaatcaaagagataaaacttatcaaccacgtattgaacgtgcgcaaattgatgagcctagagaggtaaatcaacggtttgtttctgagaaaatgaagttacagtcaccacgattgatgctaggttttaaaaatgaaccattagatgaaagtgcaactaaatttgttcaaagagatttggaaatgacatttttctacgaattggtttttggagaggaaacggagttttatcaacaacttttaaataaagatttaatagatgaaacattcggttatcaatttgtattggaaccgagctacagtttttcaattattactagtgcaacacaacagcctgatctatttaaacaattaataatggatgaattaagaaaatataaaggaaaccttaaagatcaagaagcatttgatttgttgaaaaagcaatttattggagaattcatatcaagtttaaattctccagaatatattgctaatcaatatgcaaaactctatttcgagggagtgagtgtatttgatatgcttgatatcgtagaaaatattacgttagagagtgtaaatgaaacttccgaattattcttgaactttgaccaacttgttgatagtcgtttggagatggaaaatagatga

SEQ ID NO: 5390 - DNA, 1272 bp, Staphylococcus epidermidis; identical to SEQ ID NO: 3077

SEQ ID NO: 5391 - DNA, 714 bp, Staphylococcus epidermidis; identical to SEQ ID NO: 3076

SEQ ID NO: 5392 - DNA, 2394 bp, Staphylococcus epidermidis; identical to SEQ ID NO: 3075

SEQ ID NO: 5393 - DNA, 1674 bp, Staphylococcus epidermidis; identical to SEQ ID NO: 3074

SEQ ID NO: 5394 - DNA, 2106 bp, Staphylococcus epidermidis
atgtctcaagagaagaaagtttttaaaactgaatgggctgggcgttctttaactattgagacaggacaattagcaaagcaagctaatggtgctgttttagtgcgttatggagatacagttgtcctatcaactgcaactgcttctaaagaacctagagatggcgattttttcccattaactgtaaattacgaagaaaaaatgtatgctgctggtaaaataccaggaggattcaaaaaaagagaaggtcgccctggtgatgaagcaacgttaacagctcgtctcattgatagacctattcgtccactgtttccaaaaggatatagacatgacgtacaaatcatgaatattgtcttaagtgctgatccagattgctcaccagaaatggcagcaatgattggttcttcgatggcgttaagtgtttcagatattccattccaaggtcccattgcaggtgtaaatgtaggttatatcgatggcaaatatgtcattaatccttccgtcgctgataaagaaatttctagattagatttagaagttgctggtcataaagatgcggtaaacatggttgaagcaggcgcaagtgaaattactgagagtgagatgcttgaggctattttcttcggacacgaggaaatcaaacgacttgttgcattccaacaagaaatcatcgatcacattcaaccgataaaacaagaatttgtaccggtggaaagagacgaagatttagttgaaaaagtaaaaagtttaactgaagataaaggacttaaggacacggttttaactttcgataagcaacaacgagatgaaaacttagatgctctgaaagaagaagttgttggtcattttctagatgaagaagatcctgaaaatgaaacgcttgttaaagaagtttatgcaattctaaatgacttaattaaagaagaagtaagacgtctaattgcagatgaaaaaatacgacctgatggacgtaaagtagatgaaataagacctcttgaatcagaagttggtttgttaccaagagctcatgggtcaggtttatttactcgtggtcagacacaagcactttcagttttaactttaggcgcacttggagattatcaattaattgatggtttaggacctgaggtagaaaaacgttttatgcatcattataactttcctaatttctctgtaggagaaactggccctgtacgtgcacctggtagacgtgagattgggcatggtgcgcttggtgaaagagcattacgttacattatacctgatactcaagatttcccttatacaattcgtattgtaagtgaagtattagagtctaacggttcatcatctcaagcatcgatttgtggttcaacattagcattaatggatgccggtgtaccaattaaagcgccagtcgcagggattgcaatgggactagtaacgcgtgacgatagctatacaattttaactgatattcaaggaatggaagatgcattaggtgatatggacttcaaagtagcaggtactaaagacggtattactgcgattcaaatggatattaaaattgatggtttaactcgagaagttattgaagaagcactagaacaagcgcgtcaaggacgattagctattatggatcatatgcttcacacgattgaacaaccacgcgaagaattaagtgcttacgcaccaaaagtggtaactatgagtattaatccagataaaattcgagacgtgattggaccaggtggtaagaaaatcaatgaaattatcgacgaaactggagttaaattagatattgaacaagatggtacaatctttataggtgctgtagatcaagcgatgattaaccgtgcaaaagaaattatcgaagatattacacgcgaagcggaagttggacaagtatatcatgctaaagtaaaacgtattgaaaagtatggtgctttcgttgaattgttccctggtaaagacgcgttattacacatttctcaaatttcacaagaaagaattaataaagtagaagatgttcttaaaattggagatacaattgaagtgaaaattactgaaatcgataaacaaggtcgcgttaatgcgtcacataaagtattagagcaatctaaaaattaa

SEQ ID NO: 5395 - DNA, 270 bp, Staphylococcus epidermidis; identical to SEQ ID NO: 3072

SEQ ID NO: 5396 - DNA, 972 bp, Staphylococcus epidermidis
atgaaagtgatagaagttacacatcccatacaaagtaatcaattcataactgaaaatgttgctatggcttttggtttcttcgatggtatgcatagaggtcacgacaaggtgtttcaagtgcttgatgaaaaagcaaaagagcatcaacttaaaaaggctgttatgacgtttgatccacacccctcagtcgtattaaaccctgagcgtaaacgtacaacctatcttacaccactttcagataagttagaaatgatagcagaacacggtatagactattgtatcgttatcaatttttcatcaagatttgctaatgtgacatctgacgatttcataaaaaattatattattaataatcatgttaaagaagtgattgcagggtttgatttcacctttggtaaatttggaaaaggaaatatgacggtacttcaggaatcaaaagcttttaatacgactattgtaggaaaacaagagatggattctgaaaaaatttctacaactgcaatacgccaagcgcttacagatggtcatttacagaaagcaaatgacgaattagggtatatatataggattaaaggaactgtagtacaaggtgaaaaacgtggaagaacaattggttttccaacagctaatgtgcaacccagtgatgattatgtactaccaaaaaaaggtgtttacgcagtgagtatggaaattggtccagagagtaaattacatcgtggtgtagctaacgttggagttaaaccaacattccacgatccaactagggctgagttagttattgaagtgaatatatttgattttaatgaaaatatttacggtgaacgtgtgactgtgtattggcatcactttttaagaccagaagttaaatttgatggtatcgatccattagttaaacaaatgaatgaagataaagcacaggctaaacatttattatctattgatttcgatgatgatatatcatataatatataa

SEQ ID NO: 5397 - DNA, 918 bp, Staphylococcus epidermidis
atgtataatggcatactaccggtatttaagaaacgaggtttaacaagtcacgacgtcgtttttaaattacgtaaaattttaaaaatgaaaaaaattggtcatacaggaacattagatcctgaagttaatggtgtgttaccaatttgtttaggcgatgcgacaaaagtcagtgattatatcatggaaatgggaaaaacttatcacgctatgataacgctaggaaagagtacgactactgaagaccaaactggagatattttagaaactagggctgttgataagaatgatattaatgaagatacgattgaccaagtgttgcagcaatttgaggggcatattcaacaaattccgcctatgtattcttctgttaaagtaaatggaagaaaattatatgaatatgcgagaaataatgaaactgtcgaacgccctaaacgacaagtttttattaaagatatacatagaatatctgaagttactttccaggagcagacatgtcattttgaagttgaagtaacatgtggtaaaggaacttatattagaactttagctacagatattggacttaaacttggttttccagctcatatgtcacgtctaactagaattgcttctggcggttttcaattagaaagtagtttaacgattgatcaaattaaagaattacatgagcatgattcattacataatgaattgtttcctatagaatatggcttaaaaggtctgaaatcattccaagtgaaagattcaaattttaaaaagaaaatctgtaacggtcaaaaatttcataaaaaagtgttaagtcaaaatgttaaagaaccttttatatttgtcgatagtagcactcaaaaagttttagcaatatatatagttcatccagataaaccttatgaaataaaacctaaaaaagtttttaattaa

SEQ ID NO: 5398 - DNA, 351 bp, Staphylococcus epidermidis; identical to SEQ ID NO: 3069

SEQ ID NO: 5399 - DNA, 2163 bp, Staphylococcus epidermidis
atgagtaaaaaaagaatttacgaatatgcgaaagaattaaatctaaagagtaaagagattatagatgagttaaaaagtatgaatgttgaagtgtcaaatcatatgcaagctttagaagaagaacaaatcaaagcattagataaaaaatttaaagcctctcaagcgaaagacactaataaacaaaatactcaaaataatcaccaaaaatctaataataaacaaaattctaacgataaagaaaaacaacaaagtaagaataatagtaaaccaacgaagaaaaaagaacaaaacaacaaaggaaaacagcaaaataaaaacaataaaactaataagaatcaaaaaaacaataaaaataaaaagaataataaaaataataaacctcaaaatgaggtagcagaaacaaaagaaatgccctctaaaatcacttatcaagaaggcataactgtcggtgagttagctgaaaagctaaatgtagaatcagctggtattattaaaaaattgttcttactaggtattatggctaatatcaatcaatcattggatgaagaaacattagaattaattgcagatgactatggcgttgaaatagagaaagaagtagtcgttgatgaagaagatttatcaatttattttgatgatgagactgatgattctgatgcaattgaacgtccagcagttgttacaatcatgggccacgtagaccatggtaaaacgactttattagattctattcgtaacactaaagttacagaaggagaagctggcggaatcactcaacatattggtgcttatcaaattgaaaattcaggtaaaaaaattacgttcttagatactcctggacatgctgcatttacgactatgcgtgcacgtggtgctcaagttactgatattacaattttagtcgtggccgctgatgatggtgtgatgcctcaaacaattgaagctataaatcacgctaaagaagcagaagtacctacgattgttgcagtaaacaaaattgataaaccaactgctaaccctgatcgtgttatgcaagaactcactgagtatggattaattccagaagactggggcggtgacacaatctttgtaccactatctgcattgagtggagacggtattgatgatttattagaaatgatcggtttagtagcggaggtacaagaacttaaagctaatcctaataaacaagctgtaggtactgtgattgaggctgaattagataaatcacgaggtccagctgcatctttacttgttcaaaatggtactttaaacgttggagatgcaattgttgtaggtaatacttatggacgtatacgtgcaatggttaatgatttaggaaaaagaattaaatctgccggtccttcaacacctgtagaaattactggtattaacgatgttccacttgcaggtgatcgttttgttgtatttggtgatgaaaaacaagcacgtcgaattggtgaagcacgtcatgaggcaagtgtcatacagcaacgtcaagaaagtaaaaatgtttcattagacaatttatttgagcaaatgaaacaaggtgaaatgaaagatttaaatgtcatcattaaaggtgatgtacaaggttcagttgaagcattggccgcatctctaatgaaaatagatgttgaaggtgtgaatgtacgaattattcatacagctgttggtgctatcaatgaatcagatgttacattagcaaatgcatcaaatggtattattattggttttaatgtacgcccagatgcaggtgcgaaacgtgcggctgaagctgaaaatgtagatatgcgattacacagagttatctataatgttattgaagagatagaatcagctatgaaaggtttacttgacccagaatttgaagagcaagtcattggacaagctgaagtgcgtcaaacatttaaagtttctaaagttggtacaattgctggtagttatgtgactgaaggtaaaatcactcgtaacgctggtgtacgcgtaattagagatggtatcgtgttatttgaaggtgaacttgacacattaaaacgtttcaaagatgatgctaaagaagtagctcaaggctatgaatgtggtattacaattgaaaaatataatgatctcaaagaaggagacattattgaagcgtttgaaatggtagaaattcaaagataa

SEQ ID NO: 5400 - DNA, 318 bp, Staphylococcus epidermidis; identical to SEQ ID NO: 3067

SEQ ID NO: 5401 - DNA, 285 bp, Staphylococcus epidermidis
atgagaaagaaaaaaattccaatgagaaaatgtattatatctaatgaaatgcgtccaaaaaaagatatgattcgagtggttattaacaaagaaggcgaaatctttgcagatgcgacaggaaaaaaacaagggcgcggtgcatatgtgtctaaagatgtagctttagttgaaaaggctcaacaaagagaagttttagaaaaatattttaacgctactaaagatacacttgatcctgtttataaagaaataataagactgatttatagagaagagatcccaaaataa

SEQ ID NO: 5402 - DNA, 1224 bp, Staphylococcus epidermidis
gtgtcaagtaatgaattattattagctactgaatatttagaaaaggaaaagaaaattcctagagaagttttaattgatgcaattgaagcagctttaattactgcgtacaagaaaaactatgatagtgccagaaatgtaagagtagaattaaatatggacgaaggttcatttagagtgattgcacgtaaagaagtcgtagaagaagtgtttgatgacagagatgaagttgatttaagtactgctttagtcaaaaatcctgcctatgaagtaggagatatttatgaacaagatgtaacaccgaaagacttcggacgtgtaggagctcaagcagctaagcaagctgtgatgcaacgacttagagacgcagaaagagaaattttatatgatgaatttatcgataaagaagaagatattctaacaggtgtgattgaccgtgtagaccatcgctatgtatatgtgaatttaggaagaattgaagctgtgctgtcagaagctgaaagaagtcctaatgagaaatatattcctaatgaacgtatcaaggtgtacgtaaataaagttgaacagactacaaaaggtccacaaatttacgtatcaagaagtcatcctggattactaaaacgcttattcgaacaagaagttccagaaatttatgatggtactgttattgttaaatcagtagcgcgtgaagctggagatcgttctaaaattagcgtgtattctgataatcctgatatagatgctgttggcgcatgtgtaggttctaaaggagcacgagtagaagcggttgttgaagaacttggtggcgaaaaaatcgatatcgtccaatgggatgaagatccgaaagtatttgttcgtaatgctttaagtccatcacaagttttagaagtaattgttgatgaagagaatcaatcaactgtagttgtagttcctgattaccaattatccttagctataggtaaaagagggcaaaacgcacgtttagctgctaaattaacaagttggaagatagatattaaatcagaatctgatgcccgagaagctggaatttatcctgttattgaatcagaagaagttgcagatgaaattgttaattccggtgacgaagatgttgagtttgataatgttaacttggaagagacaaacttaactagtacagaattagctgctgaaaatgatgaagataaaaaagataaaacagaagaagataatgacacagaatcatag

SEQ ID NO: 5403 - DNA, 468 bp, Staphylococcus epidermidis; identical to SEQ ID NO: 3064

SEQ ID NO: 5404 - DNA, 4317 bp, Staphylococcus epidermidis; identical to SEQ ID NO: 3063

SEQ ID NO: 5405 - DNA, 1704 bp, Staphylococcus epidermidis; identical to SEQ ID NO: 3062

SEQ ID NO: 5406 - DNA, 1287 bp, Staphylococcus epidermidis; identical to SEQ ID NO: 3061

SEQ ID NO: 5407 - DNA, 783 bp, Staphylococcus epidermidis
atgaaagtaagaacattaaccgcgattatagccttattaatattcttgcccatcttgctcaaaggtggcttaatattaatgcttttcgcattcttattagctttgatagccttaaaagaactacttaatatgaatatgatcaaatttttatctatacctggtctgattagtgctttagccctaattattatcatgttacctcaagatgcaggtgaatgggttcaagttatccaacttaaaggtttaattgctatgagtttcatagttttaagttatacagtgctatctaaaaacagatttagttttatggatgctgcattttgtttgatgtctgtagcatacgtaggaattggcttcatgtatttttatgagacacgttctgagggcttgagatatattttatttgcatttttaatagtttggctaacagatacgggtgcttatatttttggtcgccttatgggtaaacataagttatggccagtcattagccctaataaaacaattgaaggtttctttggtggtattttatgtagcattttagtaccattagtgatgcaaatgtttgtagatttacatatgaatatttggcttttactattagtcacaattgttttaagtatgtttggtcaattaggtgatttagtagaatctggttttaaacgtcattttggtgttaaagattcaggacgtatactaccaggacatggtggtatattagatagatttgatagcttcatgtttgtattaccgctattaaatattttactgatacaaacttaa

SEQ ID NO: 5408 - DNA, 771 bp, Staphylococcus epidermidis; identical to SEQ ID NO: 3059

SEQ ID NO: 5409 - DNA, 555 bp, Staphylococcus epidermidis; identical to SEQ ID NO: 3058

SEQ ID NO: 5410 - DNA, 723 bp, Staphylococcus epidermidis
atggcacaaacttctaaatataaacgtgtagtattaaaattgagtggcgaagctttagcaggtgataaaggattcggcataaatcctatcattatcaaaagcgttgcacagcaagttgctgaagttgccaaaatggattgtgaaattgctgtcattgtcggcggtggaaatatttggagaggcaaaactggtagcgacctaggtatggatcgtggtacggccgattacatggggatgcttgctactgttatgaatgctttggcattacaagacagtttagaacaattagattgtgatacacgtgttttaacttctattgaaatgaaacaagttgctgaaccatatattcgtcgacgtgcaattagacatttggagaaaaaacgtgttgttatatttgccgctggaattggtaatccttacttctcaactgacacaactgctgctttacgtgcggctgaagtagaagcagatgtaattttaatgggtaaaaataatgtagatggtgtttattcagctgatccaaaagttgatgcaaatgcaattaaatatgaacatttgacacatattcaaatgcttcaagaaggtttacaagtgatggattcaacagcttcatcgttctgcatggataataatattccgttaaatgttttctctattatggaagaaggtaatattaagcgtgctgtaatgggtgaaaaaatcggaacattaattacaaaataa

SEQ ID NO: 5411 - DNA, 879 bp, Staphylococcus epidermidis; identical to SEQ ID NO: 3056

SEQ ID NO: 5412 - DNA, 789 bp, Staphylococcus epidermidis
atggcagtgatttctatgaaacaattacttgaagccggtgttcacttcggtcaccaaacacgccgttggaacccaaaaatgaaaaaatatatcttcactgaaagaaatggtatttatatcattgatttacaaaaaacagtgaaaaaagttgaagaagcatacaactttgtaaaacaaatctctgaagaaggcggaaaagtcttattcgtaggtacaaaaaaacaagcgcaagaatcagttaaagctgaggcagagcgtgctggtcaattctacgttaaccaaagatggttaggtgggattttaactaactacaaaacaatctcaaaacgaattaaacgtatttctgaaattgaaaaaatggaagaagacggattatttgaagtattacctaaaaaagaagttgttgaacttaaaaaagaatacgaccgtttaattaagttcttaggcggtattcgcgatatgaaatcaatgcctcaagcattattcgttgttgatcctcgtaaagagcgcaacgctattgctgaagctcgcaaactaaatattcctatcgtaggtattgttgacactaactgtgatcctgatgaaattgattacgttatcccagcaaacgatgatgctattcgtgccgttaaattattaactggtaaaatggcagacgctatcttagaaggtcaacaaggtgtatctaatgaagaagtagctgcagaacaaaacatcaatttagatgacaaagaagaatctgaacaagcagaaacaactgaagaaaacacttctgttgaatcaaactaa

SEQ ID NO: 5413 - DNA, 774 bp, Staphylococcus epidermidis
atgagcttattatctaaaacaagagaattaaacactttattacaaaaacataaaggtattgcagtagattttaaagatgttgctcaaacaattagtaatgttacagttactaatgtatttattgtgtcgagaagaggtaaaatcttagggtcttgtttgaatgaattattaaaaagtgaacgcattaaagatatgttagaagatcgacatataccgcgtgaatatactgaagagttgatgaatgttaaacaaacagaatcgaatatcgatattgataatgaattaactgtatttccgccagagaatagagaggtatttttaaatagtagaacaactattttcccaattttaggtggtggcgaaagacttggtacgctagtcttaggtcgagttcaagacgacttcaatgaaaatgacttagtattaggagaatatgcagccactgtaattggaatggaaattttacgagaaaaacataatgaagtcgaaaaagaagctagagataaagctgctataacaatggcaatcaactcactttcatattcagaaaaagaagcaattgaacatatatttgaagaacttggtggtacagaaggtttacttatagcttcaaaagtagctgacagagtgggcattacacgatcagtcattgtgaatgctttacgtaaacttgaaagtgctggtgtcatagaatcacgttctcttggaatgaaagggacatttattaaagtaaaaaaagataaattccttgatgaacttgaaaaaaataagtaa

SEQ ID NO: 5414 - DNA, 1404 bp, Staphylococcus epidermidis
atggatacaaatggaattaaattaaccccaaaagacaccgtatctaaattgaatgagtatattgtaggacaaaatgacgcaaaacgtaaggtggctattgcactaagaaatcgttatcgtagaagtcttttaaaagaagaagagaaacaagagattgcgcctaaaaatattttaatgataggtccaacgggagttggtaaaactgaaatagctcgacgcatggcaaaaattgttggagcaccatttattaaagttgaggcaactaaatttacagaagtcggttacgtcggaagagacgttgaaagcatggttagagatttagttgatgttgctgtacgtttagtaaaagacgagaaaaagtcattagttaaagatgaggcaactaagaaagcaaacgacaaattagttaaattacttgttccgagtttaaaaaagaaggcagcacaaggtaacaaccctttggaaaatttattcggtggagcaattccaaacttcggtcaaaatcaagatgaagaggaagaaccgccaactgaagaaattaaaaccaaacgttctgaaataaaaaaacaacttgaacagggcaaacttgaaaatgaaaaagtaagaattaaagtagaacaagatcctgcatcaatgggtatgttagggactaatcaaaatcaacaaattcaagatatgatgaatcaattgatgcccaagaaaaaagtcgaaagagaagtttcggttgaaacagctagaaaaatcttagctgatgattttgcagatgaattaattgaccaagaaactgcgaatcaacaagccttagagcttgcagaacaaatgggtatcatatttattgatgaaatagacaaggttgctactaacaatcaaaatagcggtcaagatgtgtcaagacaaggcgtacaacgagatattcttcctatacttgaaggtagcatgattcagacaaaatatggtactgtaaatactgaacatatgctatttataggtgctggtgcattccacgtatcaaaaccaagtgatttaattcctgaattacaaggtcgatttccaattagagttgaattagaaagtctttcagtagaagatttcgtgagaattctgacagaaccaaaattatcgcttgtcaaacaatatgaagcattgcttcaaactgaagaagttacagtaaatttctcagaagatgccattcaacgattagctgaaattgcatatcaagttaatcaagatactgataatattggtgctcgtagattacacactattctagaaaaaatgcttgaagatttatcatttgaagcaccaagcatgccgaatgctgttgtggatattactccacaatatgtagatgacaaattaaaatcaatctcaacaaataaagatttaagtgcatttattttataa

SEQ ID NO: 5415 - DNA, 543 bp, Staphylococcus epidermidis; identical to SEQ ID NO: 3052

SEQ ID NO: 5416 - DNA, 891 bp, Staphylococcus epidermidis; identical to SEQ ID NO: 3051

SEQ ID NO: 5417 - DNA, 1308 bp, Staphylococcus epidermidis
atgacgcaaaaagtaaacgttgtaggagctggtttagctggctctgaagctgcatatcaattagctcaacgtggaattaaagtgaatttaattgagatgcgtccagttaaacagacaccggcgcaccatacagataaatttgctgaattggtatgttcaaattcattgagaggtaatgcacttacaaatgctgttggtgttcttaaagaggaaatgagacatttagactcgttaattatcacatcagcagataaagcacgtgtgccagcgggtggtgctttagcagtggatagacatgattttgctggctatattacagataccttaagaaaccaccctaacatcactgtattaaatgaagaagttaatcatataccagaaggttatacgattattgcaactggccctctaactactgagcatttagctcaagaaattgttgatattactggtaaagatcaattgtatttttacgatgctgccgcaccaataatagaaaaagattcaattaatatggataaagtatatttgaaatcacgttatgataaaggtgaagcagcgtatcttaattgtcctatgactgaagaagagtttaaccggttttatgatgcagtattagaagctgaagttgcaccagtcaatgagtttgaaaaagaaaaatattttgaagggtgtatgccttttgaagtcatggctgaaagagggcgaaaaactttgttatttggtccgatgaaacctgttggacttgaagatcctaagactgggaaacgcccttatgcagttgttcaattaagacaagatgatgcagctggaacattatataatattgttggctttcaaacacatttaaaatggggtgcgcaaaaagaagtcattcgtttaattccaggattagaaaatgttgatattgtaagatatggtgtgatgcaccgaaatacctttattaattcacctgatgttttaaacgaaaaatatgaattaaaaggacatgataatttatattttgctggacaaatgactggcgttgaaggttatgttgaaagtgctgccagtggattagttgcaggtattaatcttgcgcataaaattttagacaaaggtgaagttattttccctagagagacaatgataggtagtatggcttactacatatcacatgccaaaaatgagaagaattttcaacctatgaatgccaattttggtcttttaccatctctcgaaaaacgtattaaagataaaaaagaaagatatgaaacacaagccaaaagagcgttagagtatttagataattacaaacaaacgctgtaa

SEQ ID NO: 5418 - DNA, 2070 bp, Staphylococcus epidermidis
ttggcagataatttagtcattgttgaatcgcctgcaaaagctaaaaccattgaaaaatatttaggcaaaagatataaagttattgcttcaatgggacatgttcgtgacttaccaagaagtcaaatgggtgtcgacactgaagataactatgaaccaaaatatattacaattcgtggcaaaggtcctgtagttaaagatttaaaaaaacatgcgaaaaaagcaaaaaaaatatttttagctagtgaccctgaccgtgaaggtgaagcgattgcttggcatttatcaaaaattttagaattagaagatagcaaagaaaatagagtagtatttaatgaaattacaaaagatgctgttaaagatagttttaagcatcctcgtggtattgaaatggatttagttgacgcgcaacaagcacgtcgtattttagatagactcgttggttataatatttctccagtattatggaagaaagttaaaaaagggctgtctgctgggagagttcagtcagttgctttacgtttagtcattgatcgtgaaaatgaaattcgtaattttaaacctgaagagtattggtccattgaaggtgaatttagatacaagaaatctaaatttacagctaaatttctacactataaaaataaaccttataagctaaacaacaaagacgatgttcaaaggattactgaagcattaaatggtgatcaatttgaaatcacaaatgtgaatcgtaaagaaaaaacacgttatcctgctcatccatttactacatcaaccttacaacaagaagctgcacgtaaactaaattttaaagcacgcaagacaatgatgttagcacaacaattatacgaaggtattgacttaaagcgtcaaggtacagtaggtttaattacgtatatgcgtaccgattctactcgtatctcaacttctgcaaaatcagaagcgcagcaatatataaatgataaatatggtgaacagtacgtgtctcagcgtaaatcatcgggtaaacagggcgatcaagatgctcacgaagctattagacctactagtacaatgcgaactcctgatgacatgaaagcttttcttactagagatcaacaccgtctatacaaattaatttgggaaagatttgtagcaagtcagatggctccagctattttggatacagtagctttagatgtaactcaaaacgacattaaatttagagctaatggtcaaactattaaatttaaaggttttatgacactatatgtagaagcaaaagatgataaagagaatgataaagaaaataagcttcctcaactagataaaggagataaggtaactgcgacaaagattgaaccggcacaacactttacacaacctcctcctcgttatactgaggcgcgtttagttaaaacgcttgaggaacttaaaattggaagaccttcaacatatgctccaaccattgatacgattcaaaagcggaactacgtcaagttagaaagtaaacgcttcatcccaactgaattaggagaaattgtttatgagcaagttaaagaatacttcccagaaattattgatgtagaattcactgtaaacatggaaacattacttgataaaattgccgaaggtgacatgaattggcgtaaagtaataggagacttctacaacagttttaaacaagatgttgaacgcgcagaatctgaaatggaaaagattgagattaaagacgagccagctggtgaagattgtgaagtctgtggttctccaatggttattaaaatgggaagatatggtaagtttatggcatgttcgaactttccggactgtcgtaacaccaaagcaattgtcaaaacgattggtgtcacatgtccgaagtgtaatgaaggagatgtcgtagaacgtaaatcaaagaaaaatagaattttctatggttgttctagatatccagaatgtgattttatttcttgggataaacctgttggaagagattgtcctaagtgtcatcattaccttgtgaacaagaaaaaaggtaaaagtagtcaagttgtgtgctccaactgtgattatgaagaagaagttcaaaaatag

SEQ ID NO: 5419 - DNA, 873 bp, Staphylococcus epidermidis
ttgatacaacatacgatgttaaaactatattgggcaaatttcactacgacacaacttcatcatcttacaagtacatatcctgactttctatcagaaaacgtatttcatcaacatgacatgataaaaaggtggcttacagagcgtaattctgaaaggctatggaacaaatatgaacgtttcaaagaattaaagctgatggacattattaaagaaatgaaaaaagcaaatgttagttttacaacatactttgatgataactacccttctctttgcaaagaaatgtatgattatccttatgtgatattctacaaaggaaatccacagttctttaatcattctcactctttagctgtaattggctcacgtaatgccacacaatatacaagtcaatctttaaactatctttttccttcatttagacaattaaatatggcgattgtttctggattagcgcgcggtgcagatagtgtagcacatcaaaccgcacttaaatacctattaccaactattggcgtacttggatttggccattgttatcattatcctaaagcaaccttaaatttaagaactaaagttgaaaggaatggcttagtgataagtgaatatccaccattttctcctataagtaagcataaatttcctgaaagaaacaggcttataagtggtctgtccagaggggtacttataactgaggctgaagaaagaagtggtagtcaaatcactatcgattgtgctttagagcaaaatagaaatgtttatgttctacctggttcaatgttcaacaaaatgactaaaggtaatttaagaaggataaatgaaggtgctcaagttgttatagatgaaagtagtatattatatgattatctattttag

SEQ ID NO: 5420 - DNA, 909 bp, Staphylococcus epidermidis; identical to SEQ ID NO: 3047

SEQ ID NO: 5421 - DNA, 1167 bp, Staphylococcus epidermidis; identical to SEQ ID NO: 3046

SEQ ID NO: 5422 - DNA, 771 bp, Staphylococcus epidermidis; identical to SEQ ID NO: 3045

SEQ ID NO: 5423 - DNA, 864 bp, Staphylococcus epidermidis; identical to SEQ ID NO: 3044

SEQ ID NO: 5424 - DNA, 114 bp, Staphylococcus epidermidis; identical to SEQ ID NO: 3043

SEQ ID NO: 5425 - DNA, 2601 bp, Staphylococcus epidermidis
atgagaagaaaagcatgtttcattatattattaattacattatcattaattggtcatagttatattatttttcgcttccatcatgatggtgttctttcaactggcccaaatgatggtatggaacagatgattcctattcaaatgtatctttatcatcaatggactcaagggaacttattttattcaacacatttgggtcttggcggagattttttcactgacttaagttattatttttcaacaaatttaatatttattttaaatgtccctatcatcaaattatgtgaaatattcttttcattgaacacaaatcaaattcttctttggatgtacaatgcactaattatttcaattattaaatcaactattgctctgttttgcacttatttatttagttattatatttctaaaaataaaataatcagtttattgatttcatttatctttgttatgtcacctttgtactttagatttacaatttactggccattctttagtgatactttcatttggttaccactcttattattaggaattgaacgtttattaagggattttaaagtaggtttatttatactaactgtaagtctaattctaattaataacttttattttgcatattatttcttcattattggtataggttataccttgattagaattatttacagacatcctaaagatagtttaactcgttggcaagcttctcttacaattatatgtagtgctctgctcgctttaggaaatagtatgtttgtgttctttcatggtgttcaaagttttcttaataatcgtcgacaatcatttacaggacaagtgaattggattgaacatttaaataaagacaccaatatatttttcgataattacttgattgttgtaatatttttatctattcaagctcttttgacaatcaaattatacaaacatttttattataaattatttgcattgttattattggcaacaattatttttgcatttctcccatttgttgaccaactatttaatgggttttcagcacctcaaaaacgatggcattttatcttagcttttaatagttcaattttaattgggttatttgtaaagtattttaaaacaattcgaccaaagacttatatttatactaatctgatagctcaaagtgtcatctacataagttcaattagctacaatacttttttaccttggctctctttagttccagtcgtgtcagtgattggactattaattttattaataaaagagaaaaaagtacgttattatcttacttacctttatagtatttcaatcgctgctctcagtcttatgattactttcgtattcataaaaaatcaaattttctttcaagatcatatcaatcgtgcgaacaagcgatacattaattcaagtttctataactcggctatacaaagatcgttagtaaaagaaatgaaccaaactaagaatgacgatcaacgaataaattggcgtgtcgatgaacaagataatacccctatgtatcaaaattttaaaggacttagtatttactctagtatatttcatcacaacattctcgatttctattatgatgccttaaaaattaatttagctgaagaatctgtcagtcgataccagtctactaatgctcggcaaaatatcgagagtctgttttcagtaaaatatttaatgatgaaagattatcaaaattttattccatcttattttaagaaagttaagtcacgtggacaatatattatttataaaaatcaacttccactaccaagtgtaaaagtaacacaaaacatttataatcataaaagtttaaaaaaacctatagatagagagcatgcaatgattaatggtgctattgtgacatcaaaaggtacagcatatcactcaaaagttaaaaatttgttagaccaaacacgtgtatcaacacaaaatataacacgatattcaaacaatgaactaaccgttaataaagagagcggaataatcaaattacatttacctaagaatataagagacaaatacaaagatttttatctcactatgaatattaaacgaggcgatcctgacagtaattacactgtgagcatcaatcaatatcataatcatcgtctatacaatgattctatatatcgcacgggaataagcaaagtgctttatcgaagtttaccagacaaaaatggtgatattacgattcaactatcaccgaaaggtaagttcaatttggaactgttagaattaaacggtgaaaattatgatacgctaaaacaagcacaccatcatgctaactttaatatgcgttataaagatataaaaaacggggtaaaagttaacttagatcaccattctaaaggacttgcagtcattaatattccatatcgtaaaggtatgcgtgcatacgtggatgaccgacaaagcaatatcaaaaaggtgaattatatgatgacaggtgtcccagttaataaaaatgataaaataattacgattcaatatcgaccaccttttctaaaaacgatgttttctatctcaatatttagtatagtggtgagtattgtattcattagattaaagaatataaggaaaagaaagatgaggattcgccatgattaa

SEQ ID NO: 5426 - DNA, 2604 bp, Staphylococcus epidermidis
atgattaaaaatatatggaataaacctattaaacgttttacactaatcgttttagttagttgtatattgtcatttattctatatggcccttttctctatcaatttataactaaaggtatagtatttagtggtagtggagatggcttcagacaaatgatgccttttcaaatgtacctttatgaacacttcacatcattaaaaggattttatgatgcttcatttggattgggaggcgactatgttaaatcactggcatattattattcactatctccattgatgtggatcaacttctccatgatatggatattagaacaaactatcaatgtgaatcctcatgacatcagcttttggccaataaaccaattaatcatggcatatgtgcgcactgtaatcacatttattttttcattttatttatttagttatttgcgacttaaacccgcaccaatgtttatcgcaactattttatatggtatgtctactgttgttacatattataattttacttggtctttttacggtaatcttttaattatgttacctatgtcactttgggctatagaaagattctttaaagaacgtaaaataggttggtttattttcgcgattgcttatacattattctcaaacttttattttagttactatgaagcaattgtcataggtttctattttatttatcgattcgctattcctcatgagaaagatattgtgaatcgttggcagaaattatacatactcgtatgtgccactttgttaagtgtattagtaagtatttatggactatatactggtgtatcttcctttttagataatgatcgagcgcaaaatcctaatttcaaaattacttttttcacaaatttatttgaaaccaattataatatttttgctgatggtttttacattacaatttcttttattgctatcatttcattattttgttttaaattatatcaacactattattataaattgttcgcaattgcaacttggattttacttatcggttccttttctcaatggtttgacagtgcatttaatggcttttcattaccccaaagacgttgggtttactttttagcattatcaacaagtgtattaattgcattgttcatacaacatttaagtgaaatatcaattaaagaatacacctttgctgctataccagtattcatatacggtttcatatttatcgcactgtcggaaagatcagtaaagtggatgtttgttacattgattttaatcatagtgttatttatatttattaaatataaatcgttgttaacacgtacctcaatgatggtattactcgttgtcttatttttagctcaacaagtcttaatgactaatgattccagaaaaattactatcgaaccttatcaaacgactatcaaaacaattaatgattcgagctatagaagccctgtcctaaataaaaaaattaagtatatgcatcaaagctctacagatccattgaaaagattagattatttttcatactatgcattaaactcacctttgatatatcactacaacggcacatcattgtattccagtattttcgatggagatatattgaaatactatgaccagacgttacaaattaatatgcctgtagataaaaatagtacttatcgatatttaaataatcgtgcaaacttaatgtctctttgggatgttcaagatcgattacgacatcctgatgatttaaatatgccttatggttttaaaaagaaagaacttataactgataaaaaagatcaatggattcattctgttaatacaataaattatcctagtgcacacattactaataaaatttatgatgcaagaaaactaaaatctccccttgatagagagcaagctatgcttaaaggtgtcgtattgaatcataaatcccaagccaatactgattttaaacctaatcctaatttactttctaatgcaaaacaaaacttaaatcatgcgaattggattgatagtaaacatttaaaagttaaacagcacaatggtggcgtcatcctcaatttacctcgcaatatagttaaaaattataaagatatgtatattgaaatggatgttgaattactgtctcctgacaaagagcataaagtaggagttaatgaatattcgcaagaaagaaaccgtttgtcatacaaatatcgtcgttttgtttcgccagtgacgttgcgtgctaaagcttcaaatcaacttaacattaagatgtcaaaaggagtttatcgttttaaagtaaaaggaatttatggtgaaaactatcaaacattaaaaaaagcttctcaacagctccaaccagttaaagtaaaaaaagaaagaaatggtttcacaattattaaaaagaaaaaagaacatggttatcttgtcttgccaatggtatatgctaaaggaatgcatgcaatggcaaatggaaagcctctaaaagttcaacaaggaaacggtattatgactactattcctgtaaaagagggaccaacaaagataaaattaagttatacccctccttatttttatttattaatcactgtcagttgcattgggatcattttaagcattcttttcactcattacgtaaaaagaaaataa

SEQ ID NO: 5427 - DNA, 144 bp, Staphylococcus epidermidis
ttgaacataggtttaagttcgacaccgacaattgatgttaaaaacaaagcactaaaatgtttaggtctttgttttaactttgtaaataaaatcgaaaaaattgatagttttctatcaattaaaaatcatcataatgaactatga

SEQ ID NO: 5428 - DNA, 351 bp, Staphylococcus epidermidis; identical to SEQ ID NO: 3040

SEQ ID NO: 5429 - DNA, 738 bp, Staphylococcus epidermidis; identical to SEQ ID NO: 3039

SEQ ID NO: 5430 - DNA, 504 bp, Staphylococcus epidermidis
atggaggtagaggttggacaaatagtcaatacccatggtattaaaggggaagtaaaggtgaaatccaattctgattttactgaaacacgatttcaacctggtgaacaattacttgtaaaacataataatactgaaattgtttatacggtcgcttcttatcgtatacataaaggatttcacatgttaaggtttgaaggaatcaacaatataaatgaaattgaacatttgaaaggtgattatatttatcaagaacgtgatcaccaagatatagaattaggagaacatgaatactattattcggatattattggttgtacagtatttaaagatgatgatacgccaattggtcgggtgattaatatttttgaaacaggtgctaatgacgtttgggttgttaaaggtgaaaaagagtatctcattccttatattgaagatgttgtgaaagatattgatatagaaactaaaacaattaaaattacaccgatggaaggattgttagattaa

SEQ ID NO: 5431 - DNA, 276 bp, Staphylococcus epidermidis; identical to SEQ ID NO: 3037

SEQ ID NO: 5432 - DNA, 1368 bp, Staphylococcus epidermidis
atggcatttgaaggattatccgatcgcttacaagccacgatgcaaaaaatgcgtggtaaagggaaagtaacagaagcagatattaaaacgatgatgcgtgaagtgagattagcgttattggaagccgatgttaacttcaaagttgttaaggaatttgttaagactgtttcagaacgagcgctaggttctgatgtcatgcaatctttaacacctggccaacaggttattaaaatcgtacaagaagaacttactagcttaatgggtggagaaaatacttccattaagatggcaaacaaaccaccaactgttgtcatgatggtcggtttacaaggtgcaggtaaaacgacgacagcaggtaagttggcattattaatgcgtaaaaaatataacaagaaacctttacttgtggcaggagatatttatcgtccagctgctattgatcaattacaaacagtaggtaaacaaattgatatccctgtgtatagtgaaggtgatcaagtatcaccacaacaaattgttgaaaatgctttaaaatatgctaaagaagaacatctagatttcgttattattgatacagctggtcgtttacacattgatgaagcacttatgaatgagcttcaagaagttaaagaaatctctaaaccagacgaaattatgcttgttgttgatgcaatgacaggtcaagatgctgtgaatgtggcacaatcatttgatgaacaattagatgtttcaggtgtaacattgactaaattagatggtgatacacgcggtggtgcagcactttcaatccgttccgttacccaaaaacctattaaatttgtaggtatgagtgagaaattggatggtttagaattattccatcctgaacgaatggcctcacgtattttaggtatgggtgatgttttaagcctcattgaaaaagcgcaacaagatgtagatcaagaaaaggctaaagatttagagaagaagatgagagagtcatcatttacattagatgatttcttagaacagttagatcaagttaagaatttaggtcctttagatgacattatgaaaatgattcctggtatgaataaaatgaaaggtttagataagcttaatatgagtgataaacaaattgatcatattaaagcgattatacaatctatgacacctaaggaacgttcaaaccctgaaacattaaatgtatcacgtaaaaaacgtattgcaaaaggatccggccgatctttacaagaagttaatcgattaatgaaacaatttaatgatatgaagaaaatgatgaaacaatttactggtggcggtaaaggtaaaaaagctaaacgaaaccaaatgcaaaatatgttaaagggtatgaacttaccattttaa

SEQ ID NO: 5433 - DNA, 333 bp, Staphylococcus epidermidis; identical to SEQ ID NO: 3035

SEQ ID NO: 5434 - DNA, 1227 bp, Staphylococcus epidermidis
atgagtttttttaaacgtctgaaagataaattttctagtaaaagtgaagatgatattcaaaaagacctagatgaaactgtagattcaaatgctaatagtgactcagattcaatggacccgaatgattctgatgaacaagtcaaacccaaaaagaaacctaaaaaattaagtgaagctgattttgacgaagatggtttgatatcgattgaagattttgaagaaattgaagctcaaaaaattggagcaaaattcaaagccggtttggaaaaatcacgtcaaaacttccaagaacagttaaataatttaattgctcgatatagaaaagttgacgaagatttcttcgaagctctggaagaaatgcttattactgcggacgttggttttaataccgttatgaaattaactgatgagctacgtacagaagcacaaagacgtaatatacaagaaacagaagacttaagagaagttatagttgagaagattgtagaaatctatcatcaagaggacgattattctgaagcaatgaatattgaagatggacgtttaaatgtcatactgatggttggtgtgaatggtgtcggcaaaacaacaacaattggtaaattagcttatcgttatcaacaagaaggtaaaaaagtaatgttagccgctggtgataccttcagagctggagcaattcaacaattaaacgtctggggagaacgtgttggtgttgaagttgtgagtcaaaacgaaggttctgaccctgcagcagtagtatatgatgcgattaatgccgcaaaaaataaaggcgtagatattttaatttgtgatactgcaggacgcttgcaaaataaatctaatttaatgcaagagttagataaaatgaaacgtgtgattaatcgtgcaatacctgatgccccccatgaagctttattatgcttggatgcaacaactggtcaaaatgcactttcacaagcacgttcatttaaggaagttacaaatgtctcaggtatagttttaactaaattagacggtactgctaaagggggtattgtattagcaattcgaaatgagttacacattccagttaaatatgttggtttaggcgaaaaaatggatgacttacaaccgtttaatcctgaaagctatgtatatggattatttgctgatatgatagaacaaaatgaagatattcctgaagaaatctctagaaattcatccgttgaatctgaagaaggtaactaa

SEQ ID NO: 5435 - DNA, 3570 bp, Staphylococcus epidermidis
atggtttatttaaaatcaattgatgccataggatttaaatcttttgccgaccataccaatgttcaatttgataaaggtgtgacagctattgttggtcctaatggaagtggtaaaagtaatattactgatgcaattaaatgggtactaggtgaacagtctgccaaatcactgcgcggtgctaaaatggaagatatcattttttcaggtgctgaacatagaaaagctcaaaattttgctgaagtaaaacttaaattagataatcattcacaaaaactacaaattgattctgaggaattagttgtcacacgccgtctctatcgaagtggtgagagtgaatattatttaaataatgatcgtgcacggttaaaggatattatagatttatttctcgattcaggacttggaaaggaagcatttagtattatttctcaaggaagagtagatgaaatattgaatgcaaaaccaatcaatcgtcgacaaattattgaagaatctgccggagtacttaaatataaaaaacgtaaagctgaatcgattcaaaaacttgaccatactgaagataatcttaatcgagtcgaagatatcttatatgatttagagggacgagtggaaccgttaaaagaagaggcggccattgctaaagaatataagcaattatctaaagagatggagcaaagtgatgtcatcgttacagtatctgacattgatcattatactgaagataatcagcgattagatgagcgtttaaatcacctaaagagtcaacaggctgagaaagaaggtcaacaagctcaaatcaatcagttactacaaaaatataaaggtaaacgtcaacaaaacgattatgacattgaaaagttaaattatgaattagttaaagcaactgagaattatgagcaattatcaggtaagctaaatgtattagaagaacgaaagaaaaaccaatcagaaacaaatgcaagatatgaggaagaattagataatttagaatcacaaattgattctattaaaaatgaaaaagcccaaaatgaaaaattattagctgagttaaaaaataagcaaaagcaattaaacaaggaagttcaagaattagagtcacttctttatatatccgatgaacaacacgacgaaaaactagaagaaattaaaaatagttattatacattgatgtcagaacaatcagatgttaataatgatataagatttttagaacatacaatcaatgaaaatgaagcaaaaaaatcacgattagattcgcgtttagtagaggctttcaatcaacttaaagacattcaacaaaatattactcaaacacaaaaggaataccaaagttctaagaaatctatggaaaaagtagaacaaaatattcaacaattagaacaacagttgacagattctaaaagacttctatctgaatatgaaaataaactatatcaagcctatcgttataatgaaaagttaaaatcaagaattgatagtttagctactcaagaggaagattacacgtatttctttaatggtgtaaagcacattttgaaagcaaaagataaagaattaagaggaattcatggtgcggttgcagaagtgattaacgttccttcagaaatgacacaagcgattgaaaccgccttaggtgcatcgttacagcacgttattgttgataatgaaaaagacggtcgccaagcaatccagtacttgaagcaaagaggtttaggtcgtgctacttttttaccattaaacgtgattcaaccaagacatgtagctgctgacattaaagatgtagctcgtggttcacaagggttcattaatattgcatctgatgccataaatgtatctgctaaatataaaaacatcattgaaaatttattaggtaataccatcattgtagaaaatttaaaacatgcaaatgaacttgcacgtgccattcgatatcggacaagaatagtaactttagaaggtgatgttgtaaatcctggtggttccatgacaggaggaggagcacgtaaaacaaaaagtatattgtcacaaaaagatgaattatcaacaatgcgaaatcaacttgaagattatcaacgacaaacagcagaatttgaacgtcagtttaaagaacaaaaaacacaagctgaacaattaagtgaacaatattttagtgcaagtcagcagtacaacaatttaaaagaacaagtacatcatcacgaattagaactggatagactaaaaacacaagaagcacatcttaaaaatgaacatgaagagtttgaatttgaaaaaaatgatggatatcaaagtgataaaagtaaagaaacattaaaagaaaaacaaaatcatttaattgagatacaacaacaattgaagcaactagaaagtgatattgaaagatatacacaattatcaaaagaaggaaaagcttcgacacatcaaacacaacaacaactacatcaaaaacaatctgatttagctgttgttaaagagcgaattaaatcgcaaaagcaagtttatgaacgtttagataaacaacttagcgattcagaacgtcaaaaaattgaagtaaatgaaaaaattaaattgtttaattcagatgaaatgatgggtaaagatgcttttgaaaagttgaaagagcaaattcagcaacaagaaaatgtaagacaaaatttaaatcaacaacttagtgagattaaacaacaacgtaaagatcttaatgagaaaatcgaaataaatgaaagtcagcttcaaaaatgtcatcaagatatactttctatagaaaatcattatcaagatattaaagcaaaacaatcaaagctagatgtattaatcaaccatgcaatagatcatttaaatgacacgtatcaactcacagtagaacgtgcaagaatggaatatgattctgatgaaacaattgacaatttgcgtaaaaaagtaaaattaacgaagatgtcaatcgatgaattaggtcctgtaaatttaaatgcaatagaacaatttgaagagttgaatgaacgatacacatttttaaatgagcaacgaacagatttaagagaagcaaaagaaaccttagaacaaatcattcatgaaatggataaagaagttgaaggacgttttaagacaacatttcatgcggttcaagatcattttacgacagtgtttaagcaattatttggtggtggacaagcagaacttcgtttaactgaagatgactatttgtctgctggcgttgatatcatcgtacaaccgccaggaaagaaattacaacatctttcattattaagcggtggtgaacgtgctttaagtgctatagcattattgttcgccattctcaaagttcgttcagcaccttttgttatactagatgaagtagaagcggcattagatgaagcgaatgtgatacgatatgcccaatatttaaatgaattatctacagaaacacaattcattgtaattacacatcggaagggaacgatggagttttctgatcgtttatatggtgtaacaatgcaagagtctggtgtttctaagttagttagcgtcaacctaaatacaatagatgaggttatgaaggaggaacaagcatga

SEQ ID NO: 5436 - DNA, 738 bp, Staphylococcus epidermidis
gtggctaaccagaaaaagaaagaaatggtacatgattttcaacaaaaatttactgataaaatgaagtcgttaggattacattttaaaaatattgatttatatcaacaggcattctctcattcaagttttattaatgactttaatatgaatcgtttagaacacaacgaacgcttagaatttttaggtgatgcggtattagaattgacggtttcacgctatctttttgacagacatcctcatttaccagaaggtaatttgacaaagatgcgcgcaacaattgtttgtgaaccttcacttgtgatatttgcgaataagattaaattaaacgaactgattttattaggtaaaggtgaagagaagacaggaggcagaacaagaccttcccttatttcagatgcatttgaagcttttgtaggtgcactgtatttagatcaaggtttagattcagtatggacatttgctgaaaaagtcatctttccgtatgtagaagatgacgagcttgttggtgtcgtagactttaaaacacagttccaagaatatgtgcatagccaaaataaaggagatgtgacataccaattaattaaagaagagggtcccgcacatcatagactatttacatcggaagtgattttagaaaataaagcagttgcagagggtaaaggaaagacaaagaaagaatccgaacaaaaggcagcagaacaagcgtataaactaatgaaaaataaaaaatcattataa

SEQ ID NO: 5437 - DNA, 234 bp, Staphylococcus epidermidis; identical to SEQ ID NO: 3031

SEQ ID NO: 5438 - DNA, 735 bp, Staphylococcus epidermidis
atgaataaaagtgctttagttacaggtgcttctcgtggtattggtagaagcattgcattgcaattagcggaagaaggatataatgtagctgtcaattatgctggaagtaaagataaagcagaagcagttgttgaagaaattaaagctaaaggtgtagaaagctttgcgatacaagccaatgttgcaaaaggcgatgaagttaaagaaatgattaaagaagtggtaagtcagtttggttctgtagatgtattggttaacaatgcagggataactaaagacaacttacttatgcgtatgaaagaacaagaatgggatgacgtgattgatacgaacttaaaaggcgtgtttaactgtattcaaaaagtaacgccacaaatgttgcgtcaacgtagtggtgcaatcattaatttaactagtattgttggtgcaatgggtaatcctggacaagcaaactatgttgcaacaaaagcaggtgtcattggattaacaaaaactgcagcacgagaactagcatcacgaggtattacagtgaacgctgtagcacctggtttcatcgtttcagacatgacaaatgctttaagtgatgatttgaaggatcaaatgttagagcaaattcctttaaaacgttttggagaagatacagatatagctaatactgttgccttcctagcttctgataaagctaaatatattacaggccaaacaattcatgttaacggtggaatgtatatgtaa

SEQ ID NO: 5439 - DNA, 927 bp, Staphylococcus epidermidis
atgggtaaaatagcagttgtattccctggccaaggtgcacaaaaagtagggatggctagtaatttatataatgaagaggaacgctcgactcgagtattaaatttagctcaagagacagtagactttgatttgctagaaacgatgtttactgataatgatgggaaattaggagaaacagaaaatacacaacctgcactattaacacatagtgttgcgttactagaatcattaaatcatttaaaagtagattatactatgggacatagcttaggagaatattcaagtttagttgctagtggtgtattatcttttgaagatgcggttagaattgtgcgtaaacgtggtcaactgatggctcaagcgtttcctaacggtgttggaggtatggcagcagtattaggtttggattatgatgatgttgataagatatgtcaaacgttatctacaaaagaacagttaattgaacctgctaatattaactcaccaggtcaaatcgtggtgtctggacataaatctttaattgatgaattagtagaaaagggcaaagaacttggtgctaaacgcgttcttccattagctgtttccggtccttttcattcttcaatgatgaaagttattgaagaggattttgctaatttcattaatcaatttgaatggcataatgctaattatccagttgttcagaatgttaatgcaaagggagaaaccgatgctgaagtaattaaacgcaatatggttaaacaattatattcacctgttcaatttattcaatcaacggagtggttgattaatcaaggtgtcgatcactttattgaaattggaccgggaaaagtattatctggacttatcaaaaaaataaatcgagatgtaaaaatcacttcaattcaaacactcgaagatgtgaaaggatggaataatcatgaataa

SEQ ID NO: 5440 - DNA, 978 bp, Staphylococcus epidermidis
atggttaaaattgcagtagatatgatgggcggggatgatgcgcctggtattgtattagatgcagttaaaaaagctgtcgaggactttaaagatttggaaattattctttttggtgacgaatcacaatacaatttaagtcatgagcgaatagagtttagacattgtactgaaaagattgaaatggaagatgaaccagtacgtgcaattaagcgtaaaaaagatagctcgatggttaagatggctgaggcggtaaaatcaggagaagctgatggttgtgtatcagctggaaatacaggagctttaatgtcggctggattatttattgttggacgtattaaaggcgtagcgagacctgcattagttgtaacattgcccactactgatggcaaagggtttgtgttcttagatgttggtgccaatgctgatgctaaagcagaacatttactacaatatgcgcaattaggaaatatttacgctcaaaaaattcgtggtattcaaaatccttcggtgtcacttcttaatattggcactgaagcagctaaaggaaattctttaactaaaaaagcatatgatttatttgagaaaaatcaatcatttaactttacaggtaatattgaagcaaaaacacttatggatggaaatgttgatgtcgtagtaacagatggttatacagggaacatggttcttaaaaatcttgaaggtactgcaaaatctataggtaaaatgttgaaagaaacaataatgagtagcttcaaaaataaattagctggtgcagtattgaaaaaagatttagaaacatttgctaagaaaatggactactctgaatatggtggatcagtattattaggtttagatggtacggttgtaaaagctcatggtagttcaaacgctaaagcattttattctgcaattagacaagcaaaaattgctggtgaagagaatatcgttcaaattatgaaagatacagtaggtgagtaa

SEQ ID NO: 5441 - DNA, 561 bp, Staphylococcus epidermidis
ttgaaattaaagaaaaacgatagacgagtagccattaaagaggctatcgaattaaaccccttcatcactgattatgaattgtgtgagaagtttgatgtaagtattcaaactatacgtttagatcgcacgcatttaaatattcctgagttacgtaaaagaattaaattggtagctgaacaaaattatggacgaattaaatcaatagaagccaatgaaattataggtgatttgattcaagtgaatcctgatgttagcgcacaatctttaattgaaattacaattgattctgtttttgcaaaaagtgagattgctagagggcacgtcttatttgcacaagctaactcattatgtgtagctcttatacataaaccaatagtattgacacatgaaagtcaagttgaatttaaagaaaaagtaaaattaaatgatacagttcgagcagatgcccgtgtcatagatataacagataagcattatattattgaagtgaattcttatgtttcagatatgttagtttttaaaggtaaattcaaaatgtactatacaagtgaggatgaatga

SEQ ID NO: 5442 - DNA, 2049 bp, Staphylococcus epidermidis
atgtcaaaagttcatcttattgagagcccatatgcattagataaaattaaaggtataggtccgaaacgtttagcgttgttagaagaattaaatattaaatcagttgaagatttagtattatatttaccaacacgttatgaagataatactgttattgacttaaatcaagcagacgataaagcaactgtaacagtgcaaggtgaggtttattccagtccaactgttgctttttttggtcgtaataaatcgaaactaactgtccatcttatgataaatcatatcgctgttaaatgcgtattttttaatcaaccttatttaaaaaagaaacttgaattaaatagtattgtcactataaaagggaaatggaatcgtaataaacaagagattaatggtaatcgtatattttttaaagatcaaaaaaatcaagaggatactcatttagaaccaatatataggattaaagaaggaataaagcaaaagcagttacgcgataatataagacaggcgcttagtgatgttacaattcatgaatggttaactgatgacctcagagaaaagtataaattagaaactttagcttatacaatacaaacactacatcatcctattaataaacaaaatttgctaagagctagacggacttatgcatttacagagctatttatgtttgagctacgtatgcaatggttaaatcgcttagaaaagacatcagatgaggctattgaaattaattacgatataaataaagtaaaacaatttattgatagtttgccatttgagttaactgacgctcaaaaagttagtgtcaatgaaatatttcgtgatttaaaggcgcctattcgtatgcatcggttgttacaaggtgatgttggatctggcaaaactgtggtagcagcaatttgtatgtacgccttaaaaactgcaggctatcaatctgcattaatggttcccacggagattttagctgaacagcacgctgaaagtttaatacaactatttggtaatacaatgaacgtagctttattaactggttctgttaaagggaaaaaaagacgacttcttttagagcaattagaaaatggaactatcgattgtttgattggtacacacgccttgattcaagatgatgtagtcttcaataatgttggattagtcattacagatgaacagcaccgatttggtgttaaccaacgacaaattctaagagaaaaaggtgcaatgacaaatgtattgtttatgacagcgacaccaatccctagaacactcgctatttctgttttcggtgaaatggatgtatcttcaattaaacaattaccaaaagggagaaaacctataaaaacaagttgggccaaacatgaacaatatgatcaagtacttgcacaaatgtcgaatgaattaaaaaaaggtagacaagcctatgtcatctgtccattaattgagagctctgagcatttagaagatgtacaaaatgttgtggcactttatgaatccttacaaagtgattatggtaatgaaaaagttggattattacatgggaaaatgtctgcagaagataaagatcaagtcatgcaaaaattcagtgaacatgaaatagatattttagtttctactactgtagttgaggtaggtgtaaatgtacctaatgcaacgtttatgatgatttatgatgcagatcgattcggtttatctacattacatcaattacgtgggcgtgttggtcgtagtgaacatcaaagttattgtgtattaattgcatctcccaagactgaaacaggtattgaacgtatgaccattatgactcaaactactgatggattcgaattaagtgaaagagatttagaaatgagaggtccaggggatttctttggagtaaaacaaagcggtcttccagactttcttgtagcaaatgtagtagaagattatcgtatgcttgaagttgctagagatgaagcagcagaacttatacaatctggccaatttttcgaacaacaatatagtcatttaagagagtttattaaacaaaacttacgccatattcgtttcgattag

SEQ ID NO: 5443 - DNA, 1659 bp, Staphylococcus epidermidis
atgattagcaaaataaatggtaaattatttgccgatatgattatacaaggggcacaaaatttatcaaataatgcagacttagtggattcattaaacgtctatcctgttccagatggagatacagggacaaatatgaatttaactattacttctggtcgtgaggaagtcgaaaataatttatctcaaaatattggagagttaggtaaaacattttcaaaaggattacttatgggggctcgtggtaattccggtgttattctttctcaattattcagaggtttttgtaagaatattgaagaagaaaaagaaataagcgtgcaacagtttgctgagagttttcaagctggagttgaaacagcttataaggcagttatgaaaccggtagagggaacgattttaacagtagccaaagatgcagcaaaagccgcaatggattacgtggatcaagctgaagattgcgttgatttaatggcacatgtgattgaagctgcaagcgaatctctagataatacgcctaatttattagcagtacttaaagaagtaggcgttgttgatagtggtggtaaaggtttattatgcgtttatgaaggattcttaaagggtcttaaaggcgaaaaaatagaagcacaagcacctaaacttgatactgaatcatttgttaatgacgatcatgattttcatggggttattaatacagaggatattgtttacggttattgtacggaaatgatggttcgatttggtaaaaataaaaaagcatttgacgagcaagaatttcgtaatgatatgagtgaattcggagattcgttattagtaattaatgatgatgaaattgttaaagtgcacgtacatacagaacatccgggtgatgtatttaattatggtcaaaaatatggtgaactaattaaacttaaagtagaaaacatgcgtgaacaacatcgtgaagttattcgtaaggaacaagatggacttcaaaataaagaagctaatgaatcccaaacagttgaaacagctattgttacaatttctgtaggcgatgggattgctgaattatttaaatctatgggagcaacgcacattattagtggagggcaaacaatgaacccttctactgaagatatagttaaagttattgaacaatcacaatgtaaacgtgcaattatcttaccaaacaataaaaatattatgatggccagtgaacaagcagctagtattgtagaagctgaaactgtagtgattcctactaaatctattccacagggaatatcagccttattccaatatgatctagaatcgagtttagaagataataaacgccatatgagtgatgctttggaaactgttcaatctggttcaattacttttgcagttagagatactaaaatagacggtattgaaatcaagaaagatgaattcatgggtctagctgaagacaaaattgtgacaagtgatgttaatcaatttcatgcagtaaaaggtctactcagcaaacttcttaatgaagatagcgaaattttaacaatgatttcaggcgaagatgctgataattcaattacaaaccaaatcattgattggattgaatcggagtaccctgatgttgaagtggaacaacatgaaggtggacaacctatttatcaatatttctttgcagtagaataa

SEQ ID NO: 5444 - DNA, 375 bp, Staphylococcus epidermidis; identical to SEQ ID NO: 3024

SEQ ID NO: 5445 - DNA, 189 bp, Staphylococcus epidermidis; identical to SEQ ID NO: 3023

SEQ ID NO: 5446 - DNA, 636 bp, Staphylococcus epidermidis; identical to SEQ ID NO: 3022

SEQ ID NO: 5447 - DNA, 645 bp, Staphylococcus epidermidis
atggttaaaattttaccatcacttttatctatagattttttaaatttaaaagaagagcttcaattgttagaaacagcaaaggtagacggattacactttgatgtaatggacggtaaatttgtccctaatatttcaatcggtattccgattttggatgctgttagacaacaatctcatttgccaatagatgttcatttaatgattgagcaacctgaaaattatattaatctttttgccgaacatggtgctgatatgatttctgttcatgttgagtcgacaacacatatacatagagcaattgaacaaattaaacaattagggaaaaaagcaggtgtcgtcatcaatcctggaacatctgtagaaacaattttacctatattgagtattgttgattatgttctagtaatgactgtaaatcctggttttggtggacaaacattcatagaacaatgcgtgactaagattgagcaattaaatcaacttaaacatgaaaatcatttaacttttgatattgaggtagatggaggcattaacgatcaaacgagtaaacgatgtgtagaacagggtgctacaatgttagtcactggttcatacttctttaaacaagaggattatgcaaaagtaacatctttattaaaggaatga

SEQ ID NO: 5448 - DNA, 876 bp, Staphylococcus epidermidis
ttgaagactggtcgaatcattaaactaatcagtggtgtgtatcaagtagacgtagaaggtgagagatttgataccaaaccacgtggtttattcagaaaaaagaagttttcacctgtggtgggcgatatcgtagattttgaagttcaaaatacaaaagagggctatattcatcatgtacatgaccgaaataatgaactaaaacgaccacctgtaagtaatattgacgagttagttatagtaatgagtgcagtcgagcctgaattttcaacacaattattagatcgctatttagtgattgctcattcttatcatctcaaacctagaattttaatcactaaacatgatttagcttccgagcaagaaattcttaaaatcaaagacacaataaaaatatatcaaaaaataggatatgctacgcagtttattggaaaagatagtaattatactgctactgttgatgaatggtctgacggtttaatagtattaagtggccaatctggagtgggtaaatctactttcttaaatagttatcagcctcagttgaagttagaaacaaatgatatttctaagtcattgaataggggtaaacatactacaagacatgtcgaattatacgatagaaaaggtggttacatcgctgatacaccggggtttagtgcgttagattttaatcatattgaaaaagaacaactaaaagatttttttattgatattcatgaagctggagagcaatgtaagtttcgtaattgtaatcatataaaagaaccacaatgtcatgtcaaagcactcgttgaaaaaggagaaattccacaattcaggtatgatcattatcagcaattatataatgaaatttccaatagaaaggttcgatactaa

SEQ ID NO: 5449 - DNA, 2004 bp, Staphylococcus epidermidis
atgataggtaaagtcataaatgaacgctatactattaccgataaactcggtggtggtgggatgagtattgtctacttagctgtagattcaatacttaacagaaaagttgctattaaagcgatttcgattcctccaagtgaaaaagaagagacatttaaacgttttgaaagagaagtacataattcttctcaactttctcatgagaatatagtcagtatgattgacgtagatgaggaagatgattgtttttatattgttatggaatacatagaaggtcctactttagcggaatatatacacagtcatggtccacttagtgtagaaactgctattcagtttacagaacaaattttgagtggaatcaaacatgcgcatgatatgagaattgttcatcgcgatattaaaccacagaatatattaattgataagaataaaaaattacaaatttttgattttggtattgctaaagcattgagtgaaacgtcgctgactcaaacaaatcatgttttaggaactgttcaatatttatcgcctgaacaggctaaaggcgaagctactgatgaaagtactgacatatattcaattggaattgtattatatgagatgttagttggagagccaccattcaatggagagactgcagtgagtattgctataaagcatattcaagatagtatcccaaatataacaacggataaaagagatgatgtacctcaatcattgagtaatgtcgttttacgtgctaccgagaaagataaatatcatcgctatcatactgttcaagaaatgtgtgacgatttaacaagtgctttacatgagaatcgtttgaatgaagaaaaatacgagctagataaaactaaaacggtaccactcactaaagatgatttgaatcataaaatctatgatgaacaaaatcaaaatgaccttaataaaaccatgcaaatacctattgttaacgattcaataaagcaacaagaatttcaatcgtctgaaccacgttattatcaaaaaagcgacaagaaacgttctaaaatgaaaattgcaattttatcaatcatttttgtaatattattaattggtttattttcttttgtagctatggctgtttttggaaataaatatgaagaaatgcctgaccttaaagggaaaactgaaaaacaagctgaaaaggtattagacagtcatcatctaaaagtaggtgacatatcaagaaattatagtgataaatatcctgaaaaccaaattattaaaacaaatccagatagtggagaacgcgtcgaacaagggaatagagttgatatcgttctatccaaaggaccagagaaggttaagatgccaaatgttttaggtatgtcgaaaaatgatgcgctaaaaaaattaaaggctatcggatttaaagatattcacgttgagcaagcttatagtcaaacatatgaaaaaggattaatttctgaacaaagcgttgtagctaatagtgaggttgccgttaataatcatcatattacaatttatgaatcattaggtgttcgacaagtatatgtcaataattatgaaaataagtcatatgagtcagcaaaaaaagaacttgaagataaaggatttaaagttcaagtgacaaaagaaaacaacgatgatgtcgaaaaaggtaatgtcatttctcaatctccaaaggataaaactgttgatgaaggttctactatactattagtggtttctaaaggagaaaagtctgaagaagaagatgatgaggaggacaaggatacaacgactaaaaatgagactgttaaagtaccgtataccggtaaaaaaagtaaaagtcaaaaagtagaagtatttattcgtgatattgaaaataaaggtgattcagcagttcaaacgtttaatattaaaagtgataaaacaattaatattcctttgaaaattaaaaaaggaagtgacgctgggtacaccataagagttgataataaaattgtagctgataaagatgtgagctatgatggctaa

SEQ ID NO: 5450 - DNA, 744 bp, Staphylococcus epidermidis
atgttaaacgcacaatttttcactgatactgggcaacatcgtgagaaaaacgaggacgctggcggtatattttacaatcaaacacagcaacaaatgctagtattatgcgatggcatgggtggacatcaagctggagaaatagctagtcagtttgttacttatgaacttcaaaagcgttttgaagaagaaaatctaattgaaataaatcgtgctgaatcgtggttgcgttcgaacattaaagaaatcaattttcagctgtacaactatgctcaagaaaatgaagattacagaggtatgggtacaacgctcgtttgtgccatcatttatgacaaacaagttgttgtagcaaatgtaggagattcgcgcgcttatgtaattaatcagagacagatggatcaaattacgagcgaccattcatttgttaatcacttagtaatgactggacaaattactaaagatgaagcatttcatcatccacaacgtaatattattactaaagtcatgggaacagataaacgtgtttctccagatttatttatcaagagaactcatttttatgattatcttcttttgaactctgacggacttactgattatgtcagagattatgaaatccaagaactactaagttcaaataattcattagacgtccatggtaatgagttattggacttagcgcttgcccatgattcaaaagataatgtcagctttatccttttaaagttagaaggtgataaagtatga

SEQ ID NO: 5451 - DNA, 1095 bp, Staphylococcus epidermidis
atgataactgcagaaaaaaagaagagaaacaaattcttacctaatttcgaaaaacaatcgatctactccttaagatatgacgagatgcaacaatggcttattgatcacggacaacaaaaattcagagcaaaacaaatttttgaatggttataccaaaagcgtgtgaatactattgatgaaatgactaacctgtctaaagagttacgtcaaattctcaaagatcattttgcaatgacgacattgaccactgttgttaaacaagaaagtaaagatggaacaatcaagttcttatttgaattacaagatggttatactattgaaactgttttaatgagacatgaatatggaaattctgtctgtgtaacaacacaagtaggatgtagaattggttgtacgttttgtgcttccactttgggcggattaaagcgtaatttagaggccggagagattgtctctcaagtattaactgtacaaaaggcactagacgaaacgaatgaacgtgtatcacaaattgtcattatgggcataggtgaacctttcgagaattatgatgaaatgatggatttcttaagaattgttaatgatgataacagtttaaatattggtgcacgtcatattactgtatctacttcaggaattattccaagaatttatgattttgccgaagaagatatacaaataaattttgctgtgagtcttcatggtgctaaagacgaaataagatcaagattaatgcctatcaatcgtgcttataacgttgataagttaatggaagctattcgttattatcaagaaaagacaaatcgccgtgttacttttgaatatggattgtttggtggtgttaatgaccaacttgaacatgcgagagatttggcacatttaattaagaatctcaattgccacgttaatttaataccagttaaccatgtcccagaaagaaattatgtaaagacaccaaaagatgatatttttaaattcgagaaggaattaaagagattaggaattaatgctacaattagacgtgagcaagggtcagatattgatgctgcgtgtggacaattaagagcgaaggaacgacaagtagaaacgaggtaa

SEQ ID NO: 5452 - DNA, 1308 bp, Staphylococcus epidermidis
atgatgaaatcagtgcgaacatatgcattagaaacaatcaacgacgtcctaaataaaggggcttatagtaatttgaaaattaatgaagttctatctacaaataacattaatacagtagataaaaatttattcacagaattagtatatggaacaataaaaagaaaatactcgttagattatctactaaagccttttatcaaaactaaaatcaaatcatgggtgcgacaattactgtggatgagtttatatcaatatttatatttagataaaatacctaaccatgctattattcatgaagcggtagatatagcaaaaaaacgtggtggctatcacacagggaatatagtcaatggtgtattacgaacagtaatgcgcactgaattgccaagctttgaagatatagatgatactaaaaaaagaattgcaattcaatatagtcttcccaaatggattgttgatcattgggttacacattttggagtagaaaaaactgaaaacattgcacgatcttttttagagcctgtaaccacaaccgtgcgcgccaatatatctcgtgattctattgattcaattatctctaagttagaacaggaaggttaccacgttaaaaaagacgatatgttaccattttgtcttcatatatcaggtatgcctgtggttaattcaaacgcttttaaagaaggttatatctctattcaagataaaagttcaatgatggtagcttatgtaatgaacctagggcgagatgacaaagttttagatgcgtgcagcgcacctggtggtaaagcttgtcatatggcagaaattctttcaccagaaggtcacgtcgatgcaacagatattcatgaacataaaataaatcttataaagcaaaatattaaaaaattgaaattgaataatatcaaggcttttcaacatgatgctacagaagtatacgataaaatgtatgataagattcttgttgatgcaccatgtagtggattaggtgttcttagacacaaacctgaaattaaatatagtcaatcacaaaatagcattaagtctttagtagaattacaattacaaattttagaaaatgttaaagataatattaaacctggtggtacaatagtgtattcaacatgtacaatagaacaaatggaaaacgaaaatgtcatctatacttttttaaagagacataaagattttgagtttgaaccattccaaaatccagcgactggtgaacaggttaaaacgttacagatacttccacaagattttaattcggatggattctttattagcaagataaaaagaaaggaaagttag

SEQ ID NO: 5453 - DNA, 939 bp, Staphylococcus epidermidis
ttgacaatgagtaaaatcatttttatgggaacacctgatttttcaacgaaaattttagagatgttaattgctgagcatgaagttatcgctgtagtgacacaacctgatagaccagtgggacgtaagaaagtgatgacaccaccaccagtaaaaagagtagctacaaagcatcaaataccggtatatcaacctgaaaaacttaaagattctcaagaattagaatcgttactttctttagaatcagatttaatagtaacggctgcgttcggtcaactattaccagagtccttactcaatgcacctaaattaggagctattaatgtccatgcatcattgctacctaagtatagaggaggagcacctatacatcaggctataattgatggtgaagaagaaactggaatcacgattatgtatatggttaaaaaacttgatgcaggtaatatcatctcgcaacaatcaattcgtattgaagaagaagataatgttggcacaatgcatgataaattaagctttttaggtgccgaattattaaagaagacacttcctagtatcattgataataccaatgacagtatccctcaagatgatgcacttgcaacatttgcatctaatattcgtcgtgaagacgagagagttgattggaatatgagtgcacaagcaattcataaccatattagaggactgtctccatggccagttgcttatacaactatgaatgaaaagaatctcaaattatttagcgctttcattgtgaaagggaaaaaaggtaatccaggaacaattattgaaactactaagcatgaactcatcatagctaccggttctgatgatgccatcgcacttactgagattcaacctgcagggaaaaaacgtatgaaagttactgattatttaagtggtgtacaagagtcgttagttgggaaagttctattatga

SEQ ID NO: 5454 - DNA, 489 bp, Staphylococcus epidermidis; identical to SEQ ID NO: 3014

SEQ ID NO: 5455 - DNA, 204 bp, Staphylococcus epidermidis; identical to SEQ ID NO: 3013

SEQ ID NO: 5456 - DNA, 2409 bp, Staphylococcus epidermidis
atgattgcaaaagtaattgttgatattccgtcgaaaagtgtcgattttaaatttgattatatcgttcctaaaaatttagaacgtgtgattcaaattggcgttcgcgttgtggtaccttttggccctagaactatacaaggatacgtcatgaatattcaacaaaaaccagatggaaatatggatatatcgaaactaaaagaaataaaagaagtacgtgatattaaacctgaattaacatccgaactgattcaattaagcgaatggatgagccattatcatgtgatgaaacgtatttctgttttagaagcgatgttgccaagtgccattaaagcaaagtataagaaagctttttcaattatcgatccaaaaaatttatcttcaaaaaccaaagcgctatttaacaatgacggttattacttatataaagaagctcagcaaaacaatgatttagaagaaatgttgactttgttaaatcaaggattgattgaagaggtcacgatactttctcaaaacacaaaaaagaaaactcaaaaagctgttggcgtagttaatacgttgaatggtgatgaagtacttgcaaaactcgagaaatatacaaaacaatatgatttgtatgcatttttattagaagagtctcatcgaacagtgtttttaaaagaaatcaatgatatgggcttttctcactcgagtttagattctctaatcaaaaaaggttatattgaaaaatataccgccgaggttttcagagatccatatgcaaatcgtatatttgaacaagaacaaaagaggatattaactaaagaacagcgagatgcatttgaagctattcaacattatattcatgatgaaaaagaaagaacatttttattacacggagtcacaggttcaggtaaaaccgaagtctatcttcaaacaatagaagaagttcttaataaaggtaaagaagccatgatgttagtgccggaaatcgccttaacacctcagatggtactaagatttaaacgtcgatttggagatgatgtagcggtattacattccggactttcaaaaggtgaacgttatgatgagtggcaaaaaattagagacggtcgagctcgagtgagtgtaggtgctcgttcaagtattttcgcaccgtttaaaaatttaggcatcattataattgatgaagaacatgaatctacatataaacaagaagattatcccagatatcatgcacgtgatattgcacaatggagaagtcaatttcatcattgtcctgtagttttaggtagcgcaacaccgagtcttgagtcatatgctagagcagaaaaaaatgtttacgagttgttgtcattgccacatagagtcaatcaacaagcgttaccgcatattgatattatagatatgagagaagaattaagtgaaggtaatcgttccatgttttctatagcactaagacaagcgatacaagaacggttggataaaaaagaacaaatagtactattcttaaatagaaggggatatgcttcatttatgttatgtagagattgtggttacgttccccaatgtccccattgtgatatttcgttaacatatcataaaacaaccgatcaattaaaatgtcattactgtggttatcaagaaaatccaccatctcaatgtccaaattgtgaaggtgatcatatcagacaagtcggaactggaacgcaacgtgtagaagaattattacaacaagaattccctcatgctcgtattataaggatggatgttgatacaacttcaagaaaaggtgcacatgagaaattgttaaatgactttgaagcaggaaaaggagatatcttattaggtacgcaaatgattgctaaaggtttggattatcctaacattactctagttggtgtgctcaatgctgacactatgttaaacttacctgactttcgtgccagtgaacgaacataccaacttttaactcaggtatctggacgcgcaggtcgtcatgaaaaagaaggacaagttatcatacaaacgtacaatcctgatcattattcaataaaggatgtgaaattaaacgattatctttctttttatcaaaaagaaatgaattatcgaaaattaggaaaatatccaccttactattttttgattaactttaccatttcacatactgatataaaaaaggtcatgatggcctctaagcatatacatcaaattttagtacagcacttaagtgaaaaagcattcgtgctaggcccttcaccagcagcactagcaagaattaacaatgagtatcgttttcaaatactagtaaaatataagagtgagcctcaattacatcaagcgttacaatatttagatgattattatcatgatcaatatgtaaaggataaactatcattaaaaattgatatcaatccacaaatgatgatgtga

SEQ ID NO: 5457 - DNA, 1200 bp, Staphylococcus epidermidis
atgaaacatattttattagctgttacaggcggtatcgcagcatataaagcaattgatttaacaagtaaattaatacaatccggctatgatttaagagttatgctatctgatcatgctcaagagtttgttactccgctagcttttcaagcaatcagtagaaatcctgtttacacaaatacatttaaagaagaaaatcctgaagagattcaacatgtatcattaggagactgggcagatgcgattatagtcgcgccagcaactgctaatactatcgcaaaattaagtgttggaattgctgatgatttaattacttctacattacttgctacaacaacaccaaaattcgttgcacccgcaatgaatgtaaatatgtataacaatccacgtactaaacataatatgaaagtgctaagtcaagacggatattattttattgaacctggtagtggctatttagcatgtggttatgtagcaaaagggcgaatggaagaacccatgcaaatcctatctgttattaataaattttttactcaacagaagaatgttgtcaaaagctctttttctggaaagcgcgcattagttacagctgggcctacagttgaagttattgatcctgttcgatacgtatcaaatcgttcatcaggaaaaatgggatatgctatagctgaagcattacgagataagggagcaatcgtaactttaattagtggtcccacccacttatctctacctgaagggattaatgtagtaaaagttgagagtgcagatgatatgtttcaagctgtaaccgaacgctttgcgaaacaagatatagtgattaaagcagcggcggtgtctgattatacaccaatggacatacttgaacataaattaaaaaaacaagaaggaggattatctgttcaatttaagcgtacaaaggatattttaaaatacttaggagaaaataaaacgcaccaatatcttgttggttttgctgctgaaacacaaaatattgaacagtatgctctagacaaactcaaaagaaaaaatgcagatgttatcatttcgaacaatgtaggtgatacatccataggctttagttcagatgacaatgaattaactatgcattttaaaaataatgaaaaagtaaatattaagaaaggaaaaaaatcagctttagcacatcaaattatagaaattttagaaactaggtggcagtaa

SEQ ID NO: 5458 - DNA, 213 bp, Staphylococcus epidermidis; identical to SEQ ID NO: 3010

SEQ ID NO: 5459 - DNA, 624 bp, Staphylococcus epidermidis; identical to SEQ ID NO: 3009

SEQ ID NO: 5460 - DNA, 1698 bp, Staphylococcus epidermidis
atggcatatgatggcttatttactaaaaaaatgattgaatcattacaaggtttagtctcaggccgaattcataaaataaatcaaccagaaaatgacacaataattattgtaataagacaaaatcgtaaaaatcatcaactacttctatcgattcaccctagtttctctcgtttacaattaactactaaaaaatacgacaatccatttaccccaccaatgtttgcaagagttttccgtaaacaccttgagggaggctttataaaagcaattcgacaggttggtaacgatagacgtatagagattgatatcgaaagtaaagatgaaattggtgatacaatatatagaactatcatattggaaataatgggtaaacatagtaaccttatccttgtcgatgatcaacgtaaaatcatcgaagggtttaaacatctaactcctaacacaaatcagtacagaaccgttatgcctggcttcaaatatgaagcaccaccaaatcaaaataaaatcaatccttatgaattaacaggacaagaggtattaaaatatatagactttaatgctggaaagattgccaaacaattacttaatatatgtgagggctttagtccgctaatcgctaatgaaattgtgaatcgtcgtcaatttatgactcaagaaacattacctgatgcttttgatgaagtcatggccgaaacaaaatcagcacctacccctgtctttcataaaaatcatgaaacaggtaaagaggacttctatttcatgaaacttaatcaattctatgatgatatagttgagtatcattcacttcatgaactattggatcgcttttatgatgcacgtggagagagagaaagagtcaaacaacgtgcaaatgatttagtcagatttgtacaacagcaactgcaaaaacaacaaaataaattgagtaaacttatcgatgagtatgaaagtgctaaaaacaaagaaactcagcaattatatggagagttgattacagctaatatatatcgtattcaacaaggtgacgattctgttatagcgttgaattactatactggtgaagaagtaaagattccacttaaccctacaaaatcgccatcaactaacgctcaatattattataaacaatataaccgtatgaaaacacgggagcacgaattgactcatcagattaaacttactaaagagaatattgattactttgataatattgaacaacagttaaagcacattaccgttgatgatatcgatgatattcgcgatgaacttgctgaacagggattcatgaagcaaagaaaacaaagtaaaaagaaaaaacagtctaaaattcaacttcaaacgtatcattctactgatggagatacgatattagtaggtaaaaataataaacaaaatgattatcttaccaataaaaaggcacgtaaaaatcatttatggtttcatacaaaggatattccaggatctcatgttgtcatactcaatgagagtccaagcgaaacaacgattaaagaagcggcaatgctagctgggtacttctctaaagctgggagttcagctcagattcctgtagattatacagaaattagacacgttcataaaccttctggagcaaaacctggattcgtgacatatgacaatcaaaagaccctatttgcaacacctgattatgatcatattcaacaaatgaaagaatcataa

SEQ ID NO: 5461 - DNA, 408 bp, Staphylococcus epidermidis
atggacataccaaaaattacgacgtttttaatgtttaatgatgaagctgaagaagcaattcaattatacacaagtttatttgaagatagtgaaattattacaatggtgaagtatggcgaagaaggaccaggcacacctggatcagtacaacactccatctttacgttaaatggccaagtatttatggcaatagatgcaaatagtggagaagagttgccaatgaatccagcaatgtcactatatgtcactgttaaggatactatggagatggaacgtttatttaatggtttgaaaaatgaaggcgccattttaatgcctaaaacagaaatgccaccatttagagagtttgcatgggttcaagataaatttggcgtgagttttcaacttgctttaccagaaaacaaatag

SEQ ID NO: 5462 - DNA, 123 bp, Staphylococcus epidermidis; identical to SEQ ID NO: 3006

SEQ ID NO: 5463 - DNA, 207 bp, Staphylococcus epidermidis; identical to SEQ ID NO: 3005

SEQ ID NO: 5464 - DNA, 612 bp, Staphylococcus epidermidis
atggctaaaaatattgctaaagcattgttagacatagaggcagtttcattatctccaaatgatttatttacttggagctctggaattaaatcgcctatatattgcgataatcgaataactttaggctaccctgaagtgcgtaatgcgattagagatgggttaattcaattaattaaagaacatttttctaacgttgaaattatctcgggtacggccactgctggtatccctcatgcagcttacatttctgaaaaattagaattacctatgaattacgttagatcaaaaagtaaaagccatggtaaacaaaaccaaatagaaggtgcaaaaagcgagaataaaaatgtcgttgtagtcgaggatttaatttctactggaggttcttcgattacagctgtcgaagcattggaagaagcgggagctaatgtgcttggggtcgttgctatattcacatatggtcttgcgaaagcagacaagacatttaataaggctcatattccgttttacactttaagtgattataatgagcttatagaagttgcgaaagatgaaggtaaaatctctttaaatgatatccaaacattagttgattggcgagataacttatcgtaa

SEQ ID NO: 5465 - DNA, 693 bp, Staphylococcus epidermidis
gtgagaaatctacccattatagcattagattttaaatcagcagacgaggttcatacatttttaaataaatttaatgaaccgttatgcgtcaaaattgggatggagttattttatcaaacagggccagctttaattaagtccattaaaaaaagaggtcatgatatctttttagatttaaaattacatgacatacctaatactgtgagtaaagcaatggaaggcttagcacgtttagatgtagatttagtcaatgttcatgctgccggtggtattaaaatgatggaagaagctaaaaaagggttaagaaaacataatgctgatattaaaatcattgcagttactcaattaacttcaactactgaaagacaattacatgaagaacaaaatattcaaacctcaatagaggaggcagttttaaattatgctcgtcttactaaaaaagctggtttagacggtgtcgtatgttctcctcttgaggctgagatgatttctaaagaactaggtactgactttttaaaagtgacaccaggtattcgcccgaaaggcgcagctcgtaatgatcaacaacgaattacaacaccagaggaagctaaaaccttggggtcaacacatatcgtagtaggtcgacctatcactcaaagtgagcatccaattgacagttatcataaaataaaagaaagttggttaagttaa

SEQ ID NO: 5466 - DNA, 3174 bp, Staphylococcus epidermidis
atgcctaaaagagatgatattaagacaattttagtagtcggttcaggcccaattattattggacaagctgcagaatttgactatgcaggaacacaagcttgtctagcattaaaagaagaaggctacagagttattttagttaattctaatcctgcaacaataatgacagataaagaaattgccgataaagtctacatagaaccattaacgcacgattttattgctcgtattattagaaaagaacaaccagatgcattattacctactttaggtggtcaaactgggttgaacatggcgattcaacttcatgatagtggtgtgttagaagctaataatgtaaagttgttaggcacagagctagagtctattcaacaagccgaagatcgtgaaatgtttagaacattaatgaatgatttaaatgtacctgtaccagaaagcgatattgttaatacagtagaacaagcatttgaatttaaagaacaagttggatacccgttaattgtacgtcctgcatttacgatgggaggtactggcggtggtatttgccataatgatgctgaattaaaagaagttgttagtaatggtttacactatagccctgctacacaatgtttaatagaaaaatcaatcgcaggttataaagaaatcgaatatgaagttatgcgtgataaaaatgataacgcaatcgtagtatgtaatatggagaacatagatcctgtaggcattcatactggagattcaatcgttgttgcaccgagtcaaacactgtcagatgtagaatatcaaatgctacgagacgtatctttaaaagtaattcgtgctttaggtattgaaggtggatgtaatgtgcaactcgcgcttgacccacattcattgaattattacatcattgaggtcaacccacgtgtgtctcgttcatcagcattagcttcaaaagcgacgggttatcctattgcaaaattagctgctaagattgccgtaggtttaacattagatgaaatgcttaaccctatcacaggaacttcatatgctgcatttgaaccaactttagactatgttatttctaaaattccacgtttcccatttgataaattcgaaaaaggtgaacgtgaacttggaactcaaatgaaagcgacaggcgaagtcatggcaatcggtcgtacatatgaagaatctttactgaaagccattcgttcacttgaatatggtgttcatcatttaggtttaccaaatggagaaagttatgaattagattacattaaagagcgtattggacatcaagatgatgaaagattgttctttatcggcgaagcaattcgtagaggaacatctcttgaagaacttcataatatgacaaaaattgactatttcttcctaaataagttccaaaacattattgatattgagcatgaacttaaaaatcatcaaggtgatttagagtatttaaaatacgctaaagattatggttttagtgataaagtgattgctcatagatgggataaggaagaaaaagacatatatcaactacgtatgagtcaaaatattaaaccagtttataaaatggttgatacatgtgcagctgaatttgaatccacaacgccatactattatggtacgtatgaatatgaaaatgaatctatagtaactgataaagagaaaattctagtactaggttcaggaccaattagaattggccaaggggtagaatttgattatgcaactgtacatgcagtatgggctattcaaaatgctggttacgaagctattattgtgaataataatccggagactgtatctactgacttttcaatttctgacaaattatattttgaaccactaacagaagaagatgttatgaatatcattaacttagaacaacctaaaggtgttgtagtacaatttggtggtcaaacagcaataaacttagctgataagttagcacaacatggtgttaaaattctcggaacatcattagaagatttaaatcgagctgaggatagaaaggaatttgaagcgttattacgtgaaatagctgtaccccagccacaaggtaaaactgctacatcacctaaagaagctcttgaaaatgcaagagaaataggctatccagttgtagttcgtccttcatacgtgcttggtggccgtgcaatggagattgtagataatgatcaagaacttgaaaattatatgactcaagctgttaaagcaagtccagaacatcctgtattggtagaccgctatttaacaggaaaagagatagaagtggatgctatttcagatggtgagactgtcgtgattccaggaattatggaacatatagagcgtgcaggtgttcacagtggagattctattgcagtttatccaccacaaacactgactcaagacgaaattaatacactcgaagactacacaattaaattggcaaaaggtttaaatattaaaggtcttattaacattcaatttgtcatagctcacgacggtgtttatgtgttagaagttaatccgcgttcaagccgtacggtaccattcttaagtaagattactgatattcaaatggcacaattagcgatgcgtgcaattatgggtgaaacgcttgccgaaattgggttcaaacaaggtatccaaccatactctgaaggcgtatatgttaaagcgcccgtatttagttttaataaattaaaaaatgtagatataacgcttggaccagagatgaagtctacaggtgaagttatgggtaaagacctaacacttgaaaaagcgctatacaaaggtctcactggtagcggatttgaagtgaaagatcatggtacagtattgatgactgtaagtgataaagataaagatgaaatagtcaagattgcacatcgattaaatgaaataggctacaaaatattggctactcgtggaacagcacaaaagttaaaagatcataatattccagttgaggtcgtaggtaaaatcggtggcgaggatgatttactgacacgaattcaaaatggagaagtgcaaattgtcattaatactatgacaaaaggaaaagaaatcgaacgagatggattccaaattcgacgtacaacagttgaaaatggtgtaccttgtttaacatcactggatactgccagtgctttaacaaatgtcattgaaagcatgacgtttactatgagaaatgtataa

SEQ ID NO: 5467 - DNA, 1101 bp, Staphylococcus epidermidis
atgcttgaaaaacgttatcttgtactggaagatggctcttattacgaaggatatcgcttagggtcagatgacttatctataggcgaaattgtattcaacactgctatgacggggtaccaagaaacaatctctgacccgtcttacacaggtcaaatcataacttttacgtacccactaattggaaactatggtattaatcgcgatgattttgaatcattaacacctaaattaaatggggtagtagtaaaggaagcaagtacacaccctagtaactttagacaccaaaaaactttacacgaaacacttgctcaatatcatattcctggtatatcgggggtagatactagaagtattactcgtaaaattagaaatcatggtgttttaagagctggatttacagataataaagataacattcaggaacttgttgaacagttgaaaactgctgaattacctagagatgaagttcaaacggtttctacaaaaacaccatatgtatcaacaggttccgatttaagcgtcgttttactcgactttggtaaaaagcaaaatatcgttcgtgaattaaatttacgtggttgcaacgtcacagttgtaccatatgatacgtcagctgaagagattttaggcatgtctccagatggtgtcatgctatcaaacggacctggtgatccagacgaagttgacgttgctttagatatgatcagaggcatattaggaaagataccattctttggtatctgccttggtcatcaactttttgcattatcacaaggcgcaacttcattcaaaatgaaatttggacatcgtggtgcgaaccatcccgttaaagatttaagaacaggtaaaatagatatcacgagccaaaatcacggctattctattgattgtgactcgctaaaaaatactgaccttgaagttacacacattgctttaaacgatggtactgttgaaggactaagacataaagaacttccagcgttttcagtccaatatcatcctgaagcaagaccaggtccaagtgattctaattacttatttgatgagttcatagcaatgatgaaggatttcaaagaaaaggagcgtcaaatcaatgcctaa

SEQ ID NO: 5468 - DNA, 1278 bp, Staphylococcus epidermidis; identical to SEQ ID NO: 3000

SEQ ID NO: 5469 - DNA, 882 bp, Staphylococcus epidermidis; identical to SEQ ID NO: 2999

SEQ ID NO: 5470 - DNA, 1308 bp, Staphylococcus epidermidis
atggaaaatgagcaaatgtttgagcgtaccgttcagccagttcttgatgtaaaagataaaccaaaaccagcacaatgggcatttctgagtcttcaacatttatttgcaatgtttggatcaactgtacttgtaccatttttaacacatctgcctatatcagcagctttgttggcatcaggtattggtacacttttatacatattaatcacaaaagcgaaaattccagcctacctaggatcgagttttgcctttattacacctatcattacagggttaagtacacatagtcttggagatatgctggttgcattatttatgagtggattaatgtacgtgattataggtattttcattaaattgagtggaacacattggttaatgcacttgttaccaccagtagttgtcggaccagtaataatggtcattgggttaagtttagctcctacagcagtaaacatggccatgttcgaaaattctgctgaaatgaaagggtataacttaagttacttaattgttgctttgattacattagcagtaaccatcatcgtccaaggattcttcaaaggatttttatcactaatacctgtacttataggtattatagtgggatatattgtatccattttcatgggcatagttaaatttgctccaatagcacaagcgaaatggatagattttcctcatatttatctaccatttaaagattacacaccatcttttcatttaggactcattctcgtgatgatacccgtggtgtttgtgacggtaagtgaacatattggtcatcaaatggtaattaataaaatagtaggacgcaatttctttgaaaatccaggtttagataaatcaatcattggtgatggtgtttcaactatgtttgcaagtatgataggaggtcctcctagtacaacttatggtgaaaatataggtgtactagcgatcaccaaaatatatagtatttacgttattggtggtgcggcagttatagctatcattcttgcatttattggtaagttcactgctttaatatcttcaatacctacgccagtgatgggtggtgtctcaattttattattcggtattatagcagctagtggtttaagaatgcttgttgaaagtcaagtagatttcgcaagcaatcgcaacttggttatagcatcagttgtgcttgttgtcgggattggtaatcttcttatcaatttaaaaggcataggtatcaatttacaaattgaaggaatggcattatcagcactttcaggaataatattaaatttaattttgccaaaagataaaaaccaaataaattaa

SEQ ID NO: 5471 - DNA, 528 bp, Staphylococcus epidermidis
atgtctgaacgaattattttagatgaggcagcgatacaacgtacaattacacgaattgctcatgaaattctagaatataacaagggaactaaagatttagttctattaggcattaaaacaagaggtgcttttttagcacatcgtatacaagataaaataaattcaattgaacaacaattagtaccaacaggtactatcgatatcacgcattttcgagatgacgttgataaggtagtgcaacaagctgatcaatacgcttttgatattaatgtagatattaataacaaagtggttgttatcattgacgatgttttgtataccggacgtacagtaagagcctcattagatgcgattttattacatacaagacctattaaaatagggcttgcagcacttgtggatcgtggtcatcgtgaactccctatacgcgcagattttgtaggaaaaaatatacctacagcacgagatgaatctgtttcagtttatttagaagaaattgacgatagaaatgcagtcgtcattgaataa

SEQ ID NO: 5472 - DNA, 918 bp, Staphylococcus epidermidis
ttggaaaattataattttaatattatcgaacaatcacaagttggacaacgtatagataaacttgtttcagatttaaataaagattggtcacgtagtcaacttcaagattggattaaagaaggtttagtcaaggtaaatggtaaagtaattaaatcgaactataaggtcaagttaaatgacaaaattgttgtaaccgagaaagaagtcgtagaggcagatataaaacctgaaaacttaaatttagatatttattatgaagacgaagacgttgctgttgtatataaaccaaaaggtatggttgtacatccatctccaggtcattatagtggaacattagtaaatggattaatgtatcaaattaaagatttatcaggaatcaatggcgaaatacgtcccggcatagttcatagaatagataaagatacgtctggtttattaatggttgctaaaaatgatgttgctcatcgtcatttagttgaacaacttatgtctaaaactgttaaacgaaaatacacggcgttagttcatggtaatatccctcatgattatggcactattgacgcaccaattggtcgaaataaaaacgatagacaatcgatggctgtggttgatgacggtaaagaagctgtgacacactttaatgtattagagcattttaaagattatacattgatagaatgtcaattagaaacagggcgtacacatcaaattcgtgtacatatgaaatatattggttatcctcttgtaggggatccgaagtatggacctaaaaaaacgttagatatcgatggacaagctttacatgctggtataattggtttcgaacatcctgtaacacatgaatacattgagaagcatgcaacattacctaacgattttgaaaagttactagatgatataagacgtagagatgcataa

SEQ ID NO: 5473 - DNA, 534 bp, Staphylococcus epidermidis; identical to SEQ ID NO: 2995

SEQ ID NO: 5474 - DNA, 471 bp, Staphylococcus epidermidis; identical to SEQ ID NO: 2994

SEQ ID NO: 5475 - DNA, 798 bp, Staphylococcus epidermidis; identical to SEQ ID NO: 2993

SEQ ID NO: 5476 - DNA, 2751 bp, Staphylococcus epidermidis; identical to SEQ ID NO: 2992

SEQ ID NO: 5477 - DNA, 657 bp, Staphylococcus epidermidis; identical to SEQ ID NO: 2991

SEQ ID NO: 5478 - DNA, 663 bp, Staphylococcus epidermidis
ttggatccgagaggtcaatatatacttgaagtcattacgcgtagttatcaagatttacatgttacattttttggtggaccacatgcagaaagaaaacgtgcaatcatcgcaccattatattttaagccacagcctgaggactttgaattaactttatttgaacttcaatatcctaagaaatttgtaacaatacaacatcaacacgttcttggaacactcatgtcactgggaatacaaagagatcaactcggtgatattatagttggagaagatatacagtttgttttgacaaaacaattagaatcatatattatatctgaattaacgcgtattaagggagcctcagttaaacttaattctattcctactaaagatatgatacaatcagaagagaattggaaagttcatagtacaactgtgagcgctttgagattagatgtagttttaaaagagatgattcataagtctcgaaatattgcacaacaattaattataaaaaaaagagtcaaagttaaccatacaataatagattctacagattttcaattagagcagaatgatttattgtcaatccaaggttatggtagagctcaaattgttgaaataggtggaaaaacaaaaaagaacaagttacacattcattatcaaacactatttaaatag

SEQ ID NO: 5479 - DNA, 291 bp, Staphylococcus epidermidis; identical to SEQ ID NO: 2989

SEQ ID NO: 5480 - DNA, 594 bp, Staphylococcus epidermidis; identical to SEQ ID NO: 2988

SEQ ID NO: 5481 - DNA, 669 bp, Staphylococcus epidermidis
atggatgttaaagagaagcttgctaagattgaaaaggaaattgatgcaagcattaaaaaaagtgcgcattcagcacaacctcacgtgattgcagtaacaaaatatgttacaatagagcgagctagagaagtgtataaagtagggataagacatttcggtgaaaatcgattagatggattcaaagagaagaaagaatctctaccaagcgatgttaaattacatttcattggttctttacaatcaaggaaagtaaaagatattataaatgaagtcgattattttcatgctttagatcgtttaagtctagctaaggagattaataaaagagcaaatcatgttataaaatgtttcttacaagtaaatgtttctggagaagaatctaaacatggcatagctcttgaagaagtgaatcaatttataaatcaaattaaagaatatgaaaatatccaaattattggattaatgacgatggcaccattgactgatgatttatcgtacataagaaatttatttaaagaattaagacataaaagaaatgaaattcaacaattcaatttagcacatgcaccttgtacagaattatctatgggaatgagtaatgattatcaaatggcagttgaagaaggtgcaacctttgtcagaattgggactaaacttgtaggagaatag

SEQ ID NO: 5482 - DNA, 792 bp, Staphylococcus epidermidis; identical to SEQ ID NO: 2986

SEQ ID NO: 5483 - DNA, 1185 bp, Staphylococcus epidermidis
atgttagaatttgaacaaggatttaatcatttagccacattgaaagttatcggtgtaggtggtggcggaaataacgccgttaaccgtatgattgaccatggtatgaataatgtagaatttattgccatcaacactgatggacaagctttaaacttatcaaaagctgaatcaaaaattcaaattggtgagaaattaacacgtggattaggtgctggtgctaatcctgaaattgggaagaaagcagcagaagaatcaagagaacaaattgaagatgctatccaaggtgctgatatggtattcgtaactgctggtatgggtggcggtactggaacaggtgctgcaccggttgttgctaaaatagcaaaagaaatgggtgctttaactgtaggtgttgttacgcgtccattcggtttcgaaggtcgtaagcgccaaacacaagcggcagctggtgtagaatctatgaaagcagcagtggatacattaattgttattccaaatgatcgcttattagatatcgttgacaaatctacgccaatgatggaagcatttaaagaagcggataatgtattacgtcaaggtgtacaaggtatttcagatttaattgcagtatcaggtgaagtgaacttagactttgcagacgttaaaacaattatgtctaatcaaggttctgcgttaatgggtatcggtgtgtcatctggtgaaaacagagcagtcgaagccgctaaaaaagcaatttcatctccattattagaaacatcaattgtaggtgctcaaggtgtacttatgaacattacaggtggagaatcactgtctttatttgaagctcaagaagcagctgatattgttcaagatgctgcagatgaagatgtgaatatgatttttggtacagttattaacccagagcttcaagatgaaattgtagttactgttatcgcaactggttttgaagataaaccttcttcacaaggtcgtaaagctacaagtactggttttggttcaagtgtaaatagtagttctaatcatcaatctgttgctagtgctaaagaagattcattctctgcacacacttctcattcacaatcaagtgaaagtgtaaatgaaagaagccacactactaaagatgatgatattcctagctttattagaaatagagaagaaagacgttctagaagaactagacgctaa

SEQ ID NO: 5484 - DNA, 1395 bp, Staphylococcus epidermidis
atggaggaacattactatgtgagcatagatataggttcatcaagcgtaaaaacaatagtaggcgaaaaatttcacaacggaattaatgtgataggtacagggcaaacctacacaagtggtatcaagaatggtttaattgatgattttgatattgcaagacaagcaattaaagatacaattaagaaggcttcaattgcctctggtgtagatataaaagatgtatttttaaaactacctatcatcggtaccgaagtatatgatgaatcaaatgaaattgaattttatgaggatactgaaattgatggcacgcatattgaatcagttttagaaggtatccgggataaaaatgatgtgcctgaaactgaagtgataaatgtattcccaatccgttttgtagttgacaaagacaatgaagtttcagatccaaaagaattaattgcaagacattcattaaaagtagatgcaggtgtcatcgcaatccaaaaatctattttaatcaatatgattaaatgtgttgaggcatgtggtgttgacgtgttagatgtttattctgatgcgtacaattatggttctattctcacaccaacggagaaagaattaggcgcttgtgttattgatatcggtgaagacttaacgcaagttgctttctatgaacgaggagaacttgtagatgctgaatctatagaaatggccggtcgagacattacggatgatattgctcaaggactaaatactacatatgacacagctgaaaaggtaaaacatcaatatggtcatgcattttatgactctgcttcagatcaagatgtcttttcagtagatcaagttgattcagatgaacatgttcaatatactcaaaaagatttaagtgactttattgaacaaagagtcgaagatatattcttcgaagtctttgacgttttacaagagctaggacttacaaaagtaaacggaggatttgtagttactggtggatctgcaaatttactaggtgtaaaagaattactacaagatatggttagtgaaaaagtgagaattcatacaccgtcacaaatgggtatcagaaaaccagaattttcttcggctatttctacgatttctagtagtatcgcttttgacgagttattagattatgttacaattagttatcaagataatgaagaatttgaagaagaagttatcgaaactgataaagatactgaaacaaaatcaagcggttttgattggtttaagcgtaaatcaaacaaaaaagaaaatgacgaggtagcaccagaagcgcctcgtgaagagtcttatgaagaccgtgaaaatcatctagaagatgaacaacaaacagaaggcaaagccaaagaagaaagtaagtttaaaaaattaatgaaatctctatttgaatga

SEQ ID NO: 5485 - DNA, 1392 bp, Staphylococcus epidermidis
atggaagagaataaaaatcaacctaataaggagaatatgtcgaataaagacgataatgcaactcatttgaatgacagtcacggaaatgaagatttagagctttttagacggaataaaaacgctcgccaacgcagaagacgtcgtatagataaccaaagtaaagaaaaggatgctacgtctacacaatcacagttagaaactaaaccaatggataaatttttagataatcacaagtcgcataatcaaaacaaagaaataaaaagtgacttaattgaagaaaatattaatgatgaaaacgacaatcaaaaaaatattaatgataaattaaatgaccgtattgtccaagaaacaaatgaaagtcgtcaaagtactgaagacgatgaggaatttctacttgatcatcggagtgaacaacaacctaaagcctctcgtcattctaaaaagcataaattactaagtaaatttacttctaaaaaagaaaaggaaacatctacatcgttcaatagtaatgagaaggtaactcaaattaaaccgcttagtttagaagaaaaaagagccataagacgtaaaaagcaaaaaagaatccaatataccattatcacactactcattcttatcattgttctcattttactctatatgtttacaccactgagtaaaatatcaaatgtaaatgttaaaggtaataacaacgtaagtacgagtaaaataaagaaagaacttaacgttacttcgcgatcacgaatgtatacttttagtaaaaataaagcgattaggaacttaaaacagaatcctttaatcaaagaagttgatattcataaacaattaccaaacacgttaactgtcaacgtgactgagtaccaaattgtcggtttagaaaaaaataaagataaatatgtgccaattatagaagatggtaaagaattaacagaatacaaagatgaagtgtcacatgatgggcctatcattgatggtttcaaaggagacaaaaaaacacgaattataaaagctttatcagaaatgtcacctaaagtgagaaacttaattgcagaggtgagttacgcaccaactaaaaataaacaaagtcgcataaagatcttcaccaaagataatatgcaagttattggtgacattacaacgattgcagacaaaatgcaatattatcctcaaatgtcacaatcattaagcagagatgactctggcgaacttaagacaaatggctatattgatttatcggttggagcgtcatttattccttatcaaggttcatcaactgttcaatcgggtacagaacaaaatgtaaccaagtcaacacaagaagaaaatgatgcaaaagaagaacttcaaaatgtgttgaataaaataaataaacaatctaaagaaaataattaa

SEQ ID NO: 5486 - DNA, 1350 bp, Staphylococcus epidermidis
ttgctaaattacactgaattagaaaataaaaatgttttagtagtaggcttagcaaaaagtggatatgaagcggcgaaacttctccttaaattaggggctaacgttaaagtcaatgatggaaaggatctttcacaggatgcacatgctaaagatttagaatctatgggcattgaggtaattagcggtagtcatcctttttctttattagatgatgatcctatcattgtgaaaaacccaggtattccatatactgtatcaattattaaagaagcaacaaatagagggcttaaaatcttaacagaggttgaacttagctatttaatttctgaggcaccaatcatagcagttactggaactaacggtaaaactactgtcacttcactaatcggtgatatgttccaaaaaagcgtgttgactggacgactttctgggaatattggttatgtagcctcaaaagttgcacaagaagttaaatcagatgagtatttaataacagaattatcatcttttcaattattaggcattgaggaatataaaccacatatcgctatcattactaatatttattctgcacatttggattaccatgaaacgttagagaactatcaaaatgctaaaaagcaaatatatataaatcaaactaaagatgattatctcatttgtaattatcatcaaaggcacctaattgaatcagaaaatctagaagcgaaaacattttatttttcaacacagcaagaagttgatgggatatacattaaagatggtttcattgtttttaacggcattcgcattattaacactaaagacttagtgctaccgggagaacataacctggaaaatattttagcagctgttctagcatcaatcattgctggagtgccagtcaaagctattgtagatagtcttgttactttttccggtattgatcatagacttcagtatattggtacaaatcgcacaaataaatattataatgattcaaaagcaactaatactttagctactcaatttgcgcttaactcttttgatcaaccaattatttggttgtgtggtggattagatcgtggtaatgaattcgatgaacttattccttatatggaaaatgtacgtgtgatggttgtttttggagaaacacaagataaatttgctaaattgggaaatagtcaaggtaagtatgtgattaaagcaacagatgtagaggatgctgttgataaaattcaagatatagtcgagcccaatgatgttgttctattatcaccagcttgtgcaagttgggatcagtatcatacatttgaagaacgtggtgagaagtttatcgatagattccgagcgcacttgccatcatactaa

SEQ ID NO: 5487 - DNA, 966 bp, Staphylococcus epidermidis
atgatctttatatacgcaatcatcgcattactgataacatttattttagtccctatacttattccaacattgaaacgtatgaagtttggacaaagtatccgtgaggaagggcctcaaagccatatgaaaaaaaaaggtactcctactatgggtgggcttacatttttaattagtattataatttcctctatcattgcaattatctttgtagaccattcaaatccaattattttgttactatttgtaacaatcggttttggtcttattggatttattgatgactatattattgtagttaaaaagaataaccaaggattaactagtaaacaaaagtttctagcacaaataattattgcagttatattctttgtgctaagtgatgtatttcaccttgtgcattttacgacagatttgcatattccatttgtgaattttgatattccgttgtcatttgcttatgtgatatttatcgtcttttggcaagttggtttctcaaatgctgtaaacttaactgatggtttagatggattggcaaccggtttgtcaataataggttttgcaatgtatgctgtaatgagttacatgttagattcaccggctattggcatattttgtattataatgattttcgctttactaggtttcttaccttacaatttaaatccagcgaaagttttcatgggagacacaggaagtcttgctctaggtggtatttttgcaacgatttcaatcatgttgaatcaagaattatcattaatattaattggttttgtgtttgtagttgagacattatctgtaatgttacaagtagcctcatataaattaacgaagaaacgtattttcaagatgagtcctatacatcaccacttcgaattaagtggttggggtgaatggaaggtagtaacagtattttggacggtaggtttaattacaggattaataggtttatggattggagtgcattaa

SEQ ID NO: 5488 - DNA, 2220 bp, Staphylococcus epidermidis
atgattactggccactctaatggtcaagatttaattatgaaagccaatgagaaatacttagtcaaaaattctcaacaaccagaacgaggtaagatttatgatcgtaatggtaaagttttagcagaagatgtagaaagatataaacttgttgcagttgtggataaaaaagcaagtaaagaaagtaaaaagccgcgacacgtggttgataaaaaaaagacagcaaaaaaattagctgaaatcatagatatggacgctgacgaaatagaaaaacgacttaataataagaaagcctttcaaatcgaatttggtcagaaaggtactaatttaacttatcaagaaaaagaaaaaatagagaaaatgaaattacctggtatagcactttacccagaaactgagcggttttatcctaatggtaattttgcctcccatttaataggcatggcacagaaagatcctgatactggtgaattaaatggtgcattaggtgttgaaaaaatattcaatagttatttaaatggatcaagaggtgcacttaaatatatacatgatatatggggctacatcgcacctaatacgaagaaagagcagcagcctaaacgtggagacgatgtacacttaacaattgattctaatatacaagtctttgtggaagaagctcttgatgacatggttgaacgctatgctccaaaagatttatttgcagtagtaatggacgcaaaaactggtgaaatacttgcatatagccaacgcccgacttttaaccctgaaacaggtaaagattttggcaaaaagtgggcaaacgatttatatcaaaatacatatgaaccgggctctacttttaaaacatacggcttagctgcagcaattcaagaaggtaaattcaaaccggatgaaaagtataaatcaggtcatagaaatattatgggctctgaaatttccgattggaataaaactggttggggacgtatacctatgtcgttaggttttacttattcatcaaatacgttgatgatgcacttacaagatttggttggtgccgataaaatgaaatcttggtatgaacgctttggatttggcaaaaaaacaggtggtatgtttgatggagaagctgcaggtaatattggttgggcaaatgaattacaacaaaaaacgtcagcatttggtcaatccacaactgttacccctgctcaaatgattcaagcacaatcggctttctttaataaagggaatatgcttaaaccatggtttgtaagtagtattgataatccaataactaaaaagaattattactctggtaaaaaagagtttgccggtaaaccagtaacggaagaaacagccaataaagttgaagaagaacttgataaagtagtaaatagtaagaagagtcatgctatgaattatcgcgtaaaaggttatgatattgaaggtaagacaggaacagcacaagtagctgattcaaatggaggcggttatgttaaaggtgaaaatccttactttgtaagcttcattggggatgcacctaagaaaaaacctaaagtcattgtctatgcaggtatgagtcttgctcaaaaaaatgatcaagaagcatatgaaatgggtgtgagcaaagcatttaaaccaattatggagaatacgctgaaatatttaaatgttggaaaatctagtgatacttcatcaaaaactgactatagtaaagtgcctaacgtgcaaggagatgaagttccaaaagcagaggatagcgtcaatgctcaatctcttaaacctattacgattggtaatggcaaacaaattaaacaacaatcagttaagtcaggtaccaaagtcctaccacacagtaaagtaatgttaatgacagacggggaattaacaatgccggatatgaccggatggacaaaggaagatgtacttgcttttgaagatttaacgaaaattaaagtttctactaaaggtaatggatttgtcacgaatcaaagtatctcaaaaggtcaaatcattaaaaataaagataagatagaagtgtcattatctgctgaagatacggatgatgaccaagagaaaactgatgaggactcttcggataacaaatcaaagaaagataaagctgatgaggatcattcaaatacatcttcgtcaactaagaatgataagtcaaacgccgactcgaaaaatgattctgatgacagcacaaatgaaacatcaggttctgagagaaataattaa

SEQ ID NO: 5489 - DNA, 402 bp, Staphylococcus epidermidis; identical to SEQ ID NO: 2979

SEQ ID NO: 5490 - DNA, 936 bp, Staphylococcus epidermidis
atgtttcatcatgtgagcgtcatgttaaacgaaaccattgattatttaaatattaaaaaagatggtgtgtatgttgactgtacgttgggtggagcaggacatgccctctatttacttaatcaattaaatgataaaggtagacttattgcgattgatcaagatttaacagccatagaaaatgcgaaagaagttttaaaagaacacttgcacaaagtcacttttgttcataacaactttcgagaattaacaaatattttaaatgaattagaaattgaaaaagtagatggtatttattatgacttaggtgtttcaagcccgcaattggatgtgcctgaaagaggctttagttatcacaatgatgcgaaactagatatgcgaatggatcaaacacaatcactttctgcgtatgaagtagttaatcaatggtcttatgaagcattagttaggattttctttcgttacggtgaagagaaattttctaaacagattgcacgcagaattgaagcccatcgagaacaacaacctatagaaacaactttagaactagttgatgtcattaaagaaggcataccagcgaaagcaagacgaaaagggggacatcctgcgaaacgcgtgttccaagctattcgaattgctgtgaatgatgagttatcagcttttgaagattcagttgagcaagccattgaatgtgtgaaggtcggaggtagaatttcagttattactttccactctttggaagatcgtttgtgtaaacaaattttccaagagtttgagaaaggtccagacgtaccaagaggtctacccgttattcccgaagcatatacacctaagttaaaacgagtcaatcgtaaaccgattaccgctactgatgacgatttaaacaaaaacaatcgagcacgtagcgccaagttacgcgtagcagaaatattaaaataa

SEQ ID NO: 5491 - DNA, 432 bp, Staphylococcus epidermidis
atgttcatgggagaattcgatcatcaattggatacaaaaggacgtatgattataccgtccaagtttcgttatgatctaaatgaacgttttattatcacaagaggccttgataaatgtttatttggttacactctagaagagtggcagcaaattgaagagaagatgaaaaccttacctatgacaaaaaaagacgcgcgtaaatttatgcgtatgttcttctcaggtgctgtagaagtagaattagataaacaagggcgtattaatattccgcaaaatttaaggaaatatgccaatttaagtaaggaatgtacagtaattggtgtctcaaatcgtattgagatttgggacagagaaacttggaatgatttctatgatgaatctgaagaaagtttcgaagacattgctgaagatttaatagattttgatttttaa

SEQ ID NO: 5492 - DNA, 1614 bp, Staphylococcus epidermidis
atgaagtgtaatacgttaaagttaactgaacaggatcagttcattaataaaataaaaaatagtgaatctcaaattacatctttttatgaatatgatgcagcgcaaaaggaaagcttttatagaagattaaaaacacctaataatggaagggaatttcatttatcacgagtgattaaatcttacatgaatgaattaaagttaacacatcagcagctgaataacatagatgctttagctgatggtgcaaaagtagtgattgggggacaacaagctggtctttttgggggtccactgtatacgtttcataagattttctcaattataactttaagtcgtcaactttctgaggaatacgatactcctattgtacctgtgttttggattgcaggtgaggaccatgattttgaagaggtgaatcatacgtatgcattcaataataaagaaactactttgaaaaaagtaaagtatcatacgatgacaccaccagatagtaatgtttcaagatatactcctgataagaacgaattaaaagcatcattaaatcacttttttaaagaaatgaaggaaactgtacatactcaagatgtttatcaaatgtgtgtcaatatttttaatcaatttgattcatggactgatatttttaagggattgatacatgaagtgtttaaggattatgggattttacttattgatgctcaataccctgaattaagacagatggagaaaccgttgtttaaagagatattagaaaagaggaatcaaatcgatcaatcttttcgtgaaactcagatacgaacaactcaacaacaacttccatcaatgatacaaacagagacaaacacgcatttatttatccatgaagacggaatgagacaacttttaaattttgatggcacttattttaaactgaataaaactgagaaacgttacacgaaacaaaatttattagatattatagaaagagagcctgaaagaatttctaataatgttgttactcgtccagttgtagaggaatggttgtttaacacagtagcatttatcggaggcccaagcgaaatcaaatattgggcagaattaaaaggtgttttcgatacgttaaatgtagaaatgcctattgttatgccaagattaagaatcacgtatttgtatgctagaactaaaaagttattaaaacaatataatttatcgatagagtctgtcattgctaatggagtagaacaggaacgtcaacgttttgttcgtgaaaaagcatcaaataattttataaatgaagtagaagaaatgaaaattcagcaacaagaactttataacaatttattcacctatgtggaaaataaccatgacaaccaacttcttttagaaaaaaataatcaaattcatctcaatcagtacgattatttaatcaaacggtacttactgaatattgaaagagaaaatgatataagtatgcgacagtttagagaaattagtgaaacactccatccaatgggtggtctacaagaaagagtttggaatccacttcaaattatgaatgattttgggatagatgtgttcagtccctccacctatccaccactttcttactcgtttgatcatttgattataaatccttga

SEQ ID NO: 5493 - DNA, 441 bp, Staphylococcus epidermidis
atgggtgaagttaaacatttacaaatcaattacaaaacagatgagcttttcgctgatttcagagaatttggtaacaagaacctatatatgattgaggagttaaagggacaaatgattgatgcaagttccgattctcctttttatggaatttttgttggtaataaattagttgcgagaatggcattacttgataaaggagaagtagaagaaacctatttccctaatagcaatgactatattcttctttggaaattagaagtattagatacgtaccaaagacgtggatatgctaaacaactattaaactttgctaaagaaaataaaaaaccaattaaagctattgctagaaataactcaaaagaattctttttaaaacagggttttaaagatgtagaaaccaaaaatcctgaggggcacgacatcttaatatggaatccataa

SEQ ID NO: 5494 - DNA, 687 bp, Staphylococcus epidermidis
atgaaattcaaaaatatattatttgatttcgacgatacattagtggatttttatgacactgagaaaaaagcgttttataatttagcacagaaatacaatcatcagccaactcaacaggatttcgaacattttaagaaagtgaaccaagcgcattgggaagcatttcaacaaaataaattgactaaagatgaagtgctgtcacaacgatttattaattattttaatgactatcaaattcatgtaaatggaaaagaagctgatgagtgctttagagctgaattagcaatggcaccagttaaattatttgatcatacattagaagttatacaacaattaaaattaaatcattctctctatatagtaaccaatggtgtaacagaaacacagctacgacgaattgctcagacacaatttaatgaaatatttcaagatgtctttatatctgaacaagctggatttcaaaagccgatgacagagttcttcgattttgtgtttgaacatatcggagagaataacaggaatcaaactctaattgtgggagattctttaacgtctgacattttaggtggtaaaaatgctaatatatcaacatgttggtttaatatcagacaaaaagaaaaccatacgtctattcaaccggattatatcattaatgatttatcagaaatgattcgcattgttgagtga

SEQ ID NO: 5495 - DNA, 135 bp, Staphylococcus epidermidis; identical to SEQ ID NO: 2973

SEQ ID NO: 5496 - DNA, 135 bp, Staphylococcus epidermidis; identical to SEQ ID NO: 2971

SEQ ID NO: 5497 - DNA, 132 bp, Staphylococcus epidermidis
atgaaattatttaacgcttttaaagacatcttagaagcagccatcactaacgatggcactcaattaggggcaagtattgttaacatcatagaaagtagcgttgatatggtgaatcgatttttgggaaattag

SEQ ID NO: 5498 - DNA, 510 bp, Staphylococcus epidermidis; identical to SEQ ID NO: 2968

SEQ ID NO: 5499 - DNA, 588 bp, Staphylococcus epidermidis
atggaagatattgttattgcaactaataataaaggtaagataaacgattttaaagctatttttaaaaatcaacatgttattggaatttctgagttaattgaggattttgatgtagaagaaacaggtgccacatttgaagaaaacgctaggttaaaatccgaagcggcagcacatgcattaaataagcgtgtcattgcagatgatagtggacttgaagtgttcgcattaaatggagaaccaggcgtatattcagctcgctatgcaggattaggtaagaatgatgaagataatattgaaaagttgttaacgaacttagaagatgttcaagaccgtcgtgctcaatttgtttgtgtgattagtatgagtgcgcctaatgaaaaaacaaaaacatttaaaggaacagtttctggagtgataacaactgaacgacatggaaagaatggttttggttatgatccaatattttttgtcccagaattaaataaaacgatggcggaaattacaaatgatgaaaagggtaaaatcagtcatcgtggaaatgctattcgactgttaaaagaatatttagagggtgaacaacatgtctaa

SEQ ID NO: 5500 - DNA, 804 bp, Staphylococcus epidermidis
atgaataaacctattggagtcattgattcaggtgttggtggtcttactgtagctaaagaaattatgagacagttaccaaatgaaactatttattatttaggtgatatagcacggtgtccatatggtccaagaccaggagaagaagttaaaaaattcacaacggaactagctcaaaaattgatggaatttgatataaaaatgctagttattgcttgcaatactgctacggcagttgcattaaattatttacaaaacatattacctattcctgtcattggtgttatcgaacctggagcaagaactgctataatgactacaaaaaatcaaaatgtattagttttaggaactgaaggaacaattaaatcagaagcgtatcgcacacatataaaaaagataaatccaaatgtgaatgtctatagtgttgcatgtccgggctttgttcctctagttgaacaaatgcgctataaagaccctacaattactaatattgtgattcatcaaacgttgaagcaatggagaaacagtgatgcggacacggttattttaggatgcacgcactatccgttgttatatcagcctatttatgaatattttagtggtactaaaacagttatctcatctggcttagaaacagcaagagaagtaagtgcattactcacgtttagcaatgagcatgccagttacacagaacatccccaacatagattttttgcgactggtgacaccacacatattaaaaatattattgatgaatggttaaatatgaaagttgaagttcaaagaataactgtagatgattcatag

SEQ ID NO: 5501 - DNA, 843 bp, Staphylococcus epidermidis; identical to SEQ ID NO: 2965

SEQ ID NO: 5502 - DNA, 1767 bp, Staphylococcus epidermidis
atggcagagaaaaaaattattgttgtcggtggaggactagctggtctgatgtcaacaattaaagcggcagaacaaggtgcacatgtagatttattttccattgtaccggtaaagcgttcgcactctgtttgtgcacaaggtggcataaatggtgctgttaatactaaaggtgagggagattcaccgtggattcactttgatgatactgtttatggtggagacttcctggctaatcaaccaccagtcaaagcaatggctgatgctgcacctaaaatcatccatctgttagatcgtatgggggttatgtttaacagaacgaaagaaggcttattagactttagacgttttggcggtacactacatcatagaacagcttttgctggcgcaacgacaggtcaacaattgctttatgcattagatgagcaagttcgttcatttgaggtagatggtttagtaactaaatacgaaggatgggaatttctaggtattgttaaagacgaagaagatgctgcaagaggtattgtcgctcaaaatatgacaacatcagaaattcaatcattcggttcagatgctgtcatcatggcaacaggtggtcctggtattatctttggtaaaacgacgaattcaatgattaatacaggttcagcggcgtcaatcgtttatcagcaaggtgcgatttatgcaaatggtgaattcatccaaatacatccgactgcgattcctggagatgacaaattacgtcttatgagtgaatcagctcgtggtgaaggtggacgtatttggacgtataaagatggtaaaccttggtacttcttagaagaaaaatatccagactatggtaacttggttccacgtgatatagcgacacgtgaaattttcgatgtttgtattaaccaaaagttaggtatcaatggagaaaacatggtataccttgatttatctcataaagatccacacgaattggatgttaaattaggtggtattattgaaatttatgaaaaattcacaggtgatgatccacgtaaagttccaatgaaaatcttcccagcagtgcattattcaatgggtggtttatacgtagactatgatcaaatgactaatatcaaagggttatttgcagctggagaatgtgatttctcacaacatggtggtaaccgtttaggtgccaattctttactttcagctatttatggaggtacagtagcaggtcctaacgctatcaaatatgttgaaaatgttgaaaaatcgtatacagatctagatgacagtattttcgaagctcgtgttaaagaagagaaagaaagatttgatcatttattaaatatgcgtggaactgaaaatgcttataaacttcaccgtgaattaggtgaaattatgacagctaacgtaactgtagttcgtgaaaatgaaaagttgcttgaaacagataaaaaaattcaagagcttatgaaacgttatgaagatatcgatatggaagatacgcaaacatggagcaaccaagcagtattcttcacacgacaattatggaatatgttggttcttgctcgtgtgattacgattggtgcatataatcgtaacgaatctagaggtgcacattacaaacctgaattcccagaacgtaatgatgaagaatggttaaaaacaaccatggctcgttataaaggtagaagtgaaaagccagaatttacttatgagccagtagatgtaagtttaattccacctcgtaagcgtgactacacaagtaagtctaaaggaggtaataagtaa

SEQ ID NO: 5503 - DNA, 615 bp, Staphylococcus epidermidis; identical to SEQ ID NO: 2963

SEQ ID NO: 5504 - DNA, 1785 bp, Staphylococcus epidermidis
ttggaggaatatcaaaagaaaattaaagaaaaattaaacgtagtccctttagagccgggttgttacttaatgaaagatagaaataatcaggttatatatgtggggaaggcaaagcgtttaagaaatcgtctacgttcttattttacaggcgcacatgatgctaaaacaacccgtttggttggagaaatacgtaactttgaatttatcgtgacatcaagtgagacagaatcgctactgctagagcttaatcttataaaacagtatcaaccccgatataatattttattaaaagatgataaaagttacccttttattaaaattaccaaagaaaagcatccacgattacttgttactcgtactgtaaaaaagaattcaggcaaatactttggtccataccctaatgcatattctgcacaagaaacaaagaaattacttgatcgtatctatccatttagaaaatgcgataatatgccagataagctgtgtctttattaccatattggacaatgcatgggaccgtgtgtctatgatgttgatttagagaagtatgctcaaatgacaaaagaaattacggactttctaaatggggaagataaaacaatattgcatcatttagaagaccgcatgaataaagcgagtgaacagttagattttgaacaagcaaaagaatatagagatatgattcaacacattcacaatttaactaaaaaacaaaagattatgtcttcagataatacaattagagatgtttttggttatagtgtttctaaaggctggatgtgtgttcaagtcttcttcgttagacaaggtaatatgataaaacgtgatgctacaatgataccgttacaacaaacagaggaagaagaattttatacttttataggtcaattttatagtttaaatcagcatctattacctaaggaagttcatgtacctaaaaatcttgataaagacatcattcagtcagtggtagatactaagattgttcaaccagtacgaggagctaaaaaagacatgattaatttagcgaatcacaatgctgaagtacaactcgataataaatttgaattaattgctagagatgagtcaagaacaatcaaagcaattgaagaattaggagagcgtatgggtatccaaacaccaataagaattgaagcttttgataattcaaatattcaaggtgttgatccagtttcagcaatggttacatttgtagatggcaaacctcataaaaaagattatcgaaaatataagattaaaacagtggaaggacctgatgattataaatctatgagagaggtcgttcgtagacgctatacacgtgtactcaacgaggggctacctctaccagatttaataatagttgatggtgggaaaggtcatatgaatggtgtgatggatgtactcgaaaatgagcttgggctagatataccagttgctggtttacaaaaaaatgataaacaccaaacatctgaactactttatggagcaagtgctgaaatagtacctttaaaaaagaacagtcaagcattttatctattacaccgcatacaagatgaggttcatcgatttgcaattacattccatcgacaaacacgtcaaaaaacaggtctgaaatctgttctagatgacattgatggtattggaactaagagaaaaacttcattattacgtacatttggatcgattaagaaaatgaaagaagcatcctttgatgaattacgacaagcaggcttgcctgaaaaggttgctaaaaaccttcaaaacgcgttacaaaacaaataa

SEQ ID NO: 5505 - DNA, 315 bp, Staphylococcus epidermidis
atggcaatcgtaaaagtaactgattctgattttgatagcaaaattgaatctggtgttaaattagttgatttctgggcgacttggtgtggaccttgtaaaatgattgcaccagttttagaagaactagcaggagactatgatggtaaagctgacatcttaaaattagatgttgacgaaaacccatcaacttcagcgaaatatgaagtaatgagtatcccaactttaattgtatttaaagatggcgaaccagttgataaagttgtaggtttccaacctaaagaaaacttagcagaagtattagataaacatctataa

SEQ ID NO: 5506 - DNA, 2349 bp, Staphylococcus epidermidis
atgagacaaaaaacattagatgtcttggaatttgaaaagattaaatcatttgtggctgatgaaactataagtgatttaggtcgtgaaaaagtacaagagatggctcccgttagtaatttcgatacagtagaatttcaaatgaatgaaacagatgaaatttcacaaatctataacaagcatcgattaccaagcttaagtggtctagcaaaagtgtctccacttgttcatagggctagcataggaggcgttttaaatgtgggagaattaaacagaattaaacgcctagttcaagtgcaaaatcaatttaaaacattttacaatcaaatgctagaggaagatgaagaggttaagtatcctatactgcatgataaaatgaatcatctaccgatacttacagatttatttaaagaaattaatgaaaaatgtgatgcacacgatttatttgaccatgcgagttatactttacaaagtattagaagtaaaatttcaagaacaaatcaacggattcgtcaaaatttagatagaatagtgaaaaatcaagggaatcaaaaaaaactatctgatgcaattgtaacagtaagaaatgatcgcaatgttattccggtgaaagctgaatatagacaagatttcaatggtattgttcatgaccaatcggcatcaggacaaacactatatattgaaccgaattctgttgtagagatgaataatcaaattagtcgtttgcgtaatgatgaagcagttgaacgtgaacgtatattgactgaattgacgggattagtttcggcggaatctgatgcattactcgttgctgaatcggtcatgggtcaaatcgattttttaattgctaaagctcgttatgcgcgcactataaaaggaacaaaacctacatttaaagaggagcgaacgatatatttacccaatgcatttcaccctttattagacaaagatactgttgtagcaaatacaattgaatttattgacgatgtagaaactgtcattattactggaccaaacacgggtggtaagactgtcactttaaaaacgctaggtttgataattgtcatggcacagtcaggattgttaattcctacactggatggaagccaattaagtatctttgaaaatgtgtattgtgatattggagatgaacaatctatagaacaatcattatcaacgttttcatctcacatgaaaaatatagtggaaatattacaggatgcagatcaaaatagtctgattttatttgatgaactaggcgcaggtacagatccaagtgaaggtgcggcactcgcaatgagtatcttagattatgtacgtcgtttaggatctttagttatggcgacaacacattaccctgaattaaaagcttatagttataatcgtgaaggtgtcatgaatgcaagtgttgaatttgacgttgatactctgagtccgacttataaattattaatgggtgttccagggcgatctaatgccttcgacatttcaaaaaaacttggtctaagtctcaacatcattaataaagctaagacaatgatagggacagacgagcaagaaatcaatgccatgattgaatcattagaacacaattcaaaacgtgttgaccaacaacgaatagaattagatagacttgtgagagaagcacaggaaactcacgatgccttgtctaaacaatatcaacagtatcaaaattatgagaaatctttgatggaggaagctaaagaaaaagccaatcagcgtgtgaaatctgcgactaaagaagcggacgaaattcttaaagaacttagaaatctaagagatcataagggcgctgaagtaaaggaacatgaattaattgataaaaagaaacaacttgatgatcaatatgaggcaaaatcaattaagcaacatgttcaaaagaaaaagtatgatacgattcatgctggagatgaagtgaaagttctatcttacggtcaaaaaggtgaagtgcttgaacttgtaggtaacgaagaagcagttgtacaaatgggaattattaaaatgaaattacctattgaagatttagaaaaaacgaaaaagaaaaaagaaaaacctacaaaaatggtaacaagacaaaatagacaaactattaaaacagaacttgatttaagaggatatcgttacgaagaagctttaaatgaattagatcaatatcttgatcaggcggttttaagcaattacgaacaagtttatattattcatggtaaaggtacgggagcacttcaaaaaggtgttcaacaacatttgaaaaaacataaaagcgttagacaatttagaggaggtatgcctagtgaaggtggatttggtgtcactgtggcagaactcaagtaa

SEQ ID NO: 5507 - DNA, 1710 bp, Staphylococcus epidermidis
atgacaaaaaaagatgtaattcaattattagaaaaaatagctatatatatggagctaaaaggagaaaatacatttaaagtttcagcgtatagaaaagccgcacaaagtttagaggttgatgagcgtacattagaagagattgatgatgtaacagaacttaaaggcattggaaaaggcgtaggagaagttattaatgaatttaaaacacaaggtcaatcatcgacccttcaaacacttcaagatgaagtacctgaagggttagtgccacttttgaaaatacagggattaggcagtaaaaaaatagcaaaactatatcatgaacttcaaattacagataaagaaacacttcaacaagcctgtgaagaaggtaaggttagtactttaaaaggttttgcaaaaaagacagagcaaaacattttagaagcagtgaagtcgataggtgctaaaaaagatcgttatcctatagagctaatgagaggactcaaccaagaaattgtaaaatttattgaacagttagaaggagttgaacaatattcaactgctggtagttttcgaagatataaggaaatgagtaaagatttagatttcattattagtacatcggagcctaaaaaagttcaacaacaattacttcgtattccgaataaagtcaaagatgttgctgttggggatactaaaatttctctggaattagcttatgatgatgagacgattggcgttgattttagattgatagaacctgctgccttttaccataccttacaacacttcaccggttcgaaggatcataatattagaataagacaattagcaaaagcacgcgacgaaaaggttagtgagtatggtatcgaacaacaagatggtaagctattacaattacaaagtgaagaagcgatctatcatcattttggtgtagattggattgcgcctgccatgcgtgaagatggtagtgagtttgataaagatctgagtcaaatcattcaattagatgatatcaatggagatttgcatatgcacacaacatatagtgatggtgccttttcgattaaagaaatgattgaggcaaatattgaaaaaggttatgaatttatggtcattacagatcactcacaaagtttaaaagtagctcatggattacaagtcgaccgtctgctaagacaaaatgaagaaataaagcaattaaatgaagaatataaagaaatagacatatattcaggaacggaaatggacattttacctgatggaacattagattacgatgatgaagttttggcacagcttgattatgttatcgcagctattcatcaaaactttaatcaatctgaagacgaaatcatgaaacgtttggaaacagcatgtagaaatccatatgtgcgtcacattgctcatccaaccggtcgtattattggacgtagaaaaggttataaagcaaatattgaaaagttaatgaatttagccgaagaaacaaatacaattttagagattaacgcaaatccgcatcgtttagatttaaatgcagaaatcgttcgtaaatatccaaaggttaagttgacaattaatacggatgctcatcatacaaatcatcttgatttcatgaaatatggtgttgctactgcacaaaaaggatttgtcaataaagagagggtcattaatacaatgacgaaggaagcctttcgctcatttgttgaaacgaataaatataagaaatag

SEQ ID NO: 5508 - DNA, 522 bp, Staphylococcus epidermidis
atgctcattgatatagttgttcttcttattatttgttactttatagtgatagggtttcgtagaggtatttggttatcgatattgcactttgcttcttcaattgtatctttatttattgcgtcacaacattatcaatctattgcgcaacgtttagttgtttttgtgccctttcctaaaacagtagcgtttgatatggtctatactataccttatgatcatttgcaatacagatttgaaaaagtgatagcatttattataatatttggtatgtgtaagcttattttgtatctagttgttgttacatttgataatataataacgtataaaaagatacatttagtaagtcggatatcgagtgtcgttttgagtatcatatcggtttttatatatttacaaattggactttatttattatcgctatatccgcattcatttatacagtaccaattatctcaatcgctagtaagtcgagttgtgattgaacaaattccttatttatcacaatttattttaaatttataa

SEQ ID NO: 5509 - DNA, 267 bp, Staphylococcus epidermidis
atgggtgaatttaaaaatagaataaatgttacgattaatgatcaacatttcacaatcattggcgaagatagccctgaacatattcgttatgtagcacatcttgttgatgaaaaaatgcaagaattaggtcaaaaatcagcaggtttagatacaactcgaaaagcgattttaacatctgtgaatattatgcatgagaaagttatattagaagaagagaacagacgattacagcaagaaataaatcaattaaaacaaagagatgaataa

SEQ ID NO: 5510 - DNA, 927 bp, Staphylococcus epidermidis
atgggaaatgtcgtatacaaactcacgtcaaaagaaattcaatcattgatggctcaaactacttttgagacgacgaagttacctcaaggtatgaaagctcgtacgagatatcaaaatactgttatcaatatctatagttctggcaaagtaatgtttcaaggtaagaatgctgatcaacttgcgagtcaattgctaccagataaacaatcaacaactggcaaacatacatcatcaaatacaactagtattcaatataatcgttttcattgtattggaagcgatgaagcaggcagtggcgactattttggtccattgactgtatgtgcagcttatgtgagccaatcacacatcaaaatcttaaaagaacttggtgtagatgattcaaaaaaactaagcgatactaaaatcgtcgatcttgcagaacagctcattacctttatcccgcattctttattaacattagataatgttaaatataacgaacgacaaagtacaggatggtctcaagttaaaatgaaagctgtcttacataatgaagctatcaaaaatgtgcttcaaaaaattgagcaagatcaactggattatattgttattgatcaatttgcaaagcgagaagtttatcaacattatgcattatcagcattaccttttcctgacaaaacaaaatttgaaacaaaaggtgaatctaaatcactagcaatcgcggcagcaagcattatttctcgttatgcatttgttaaacacatggaccacatctctaaaaaactccatatggaaataccaaaaggagcaagtaacaaagtagatttaattgccgctaaagtcattcaaaaatatgatattcaacaacttgatactatttcaaaaaaacattttaaaaacagagataaagcaattaatctaatgaatcaaaaatacaataaataa

SEQ ID NO: 5511 - DNA, 2403 bp, Staphylococcus epidermidis
atgttaatttcaaatgaatggctaaaagattatgtgaatgttgaccagtcagttcaagcgttagcagagagaattacaagaactggaattgaagtcgatgatattattgactatacaaaagatattaaaaaattagtagttggacatgtcttgtcgaagacgccacatccaaatgctgataaattaaatatttgtcaagtagacttaggtgaagaagaaccagttcaaattgtttgtggtgcaccaaatgtagatgaagggcaacacgtgattgttgctaaagttggtggtcgtttacctggtggaattaaaattaaacgtgctaaattacgtggcgaacgctctgaaggtatgatttgctcattacaagaaataggtatttcaagtcatgtaactcctaaaaattatgagtcaggtatatatgtatttccagaagcagttaaacctggaacagatgcgttagaagcactatatcttaatgaccaagtgatggaatttgatttaacacctaatcgtgctgatgcattaagcatggtaggtactgcgtatgaagtcgcagctttatatcaaactaaaatgaataaacctcagttaacaagcaatgaaagtcaagaatctgctaaagatgaactaacaatagaagttaaaaatgaagataaagtaccttactatagtgcacgtgttgttcatgacgtgactattggtccttctccagtatggatgcagttccgattaattaaagcgggaatacgtccaattaataatgtggtagatatttccaattatgtacttttagaatatggccaacctctacacatgtttgatcaagaacaaattggttcgcaatctatagaaattagacaagctaaaaaagatgagacaatgagaactttagatggtgaagaacgtcgattgttagatactgatattgtcattacaaatggcaaagaccctattgcattaggaggtgttatgggaggagatttctctgaagtcactgaacaaacacgacatgttgtagtagaaggggctatctttgatcttgtatctattcgacatacatcacgccgtttaaatttaagaagcgaatcatcgagtcgatttgaaaaggggattgcaactgaatttgtcgatgaagctgtagatagagcttgttatttacttgaaagatatgcttcaggaacagttttaaaagaccgagtttcgcatggagatttaggatcatttgtgaccccaatagaaatcactgctgacaaagttaaccgtacaattggttttaatttaactgatgaagaaatcattgatatttttgagcaattaggatttgacactgaaaataaaaatggtgagattatcgtgaatgttccatcaagacgtaaagacatttctattaaagaagacttaatagaagaagtagcacgtatatatggatacgatgacataccatcaacgctacctgtatttaaagatgttacaagtggagaactaacagatcgacagtttaaaacgcgtactgttaaagaaacgcttgagggcgctgggctagaccaagctattacttattcattggtatcaaaaaatcatgctacagattttgcactacaaaatcgtcctacaattgaattacttatgcctatgagtgaagcacattccacattacgtcaaagtttattaccgcatttaattgatgcagtatcatacaatgttgctcgtaaaaatacaaacgttaagttatatgaaatcggacgtgtcttctttggtaacggtgaaggtgagttaccagatgaagtagaatatttgagtggtatattaactggagattttgttaataatacttggcaaggtaagaaagagtcagttgatttctatttaactaagggtgttgttgaacgtattgctgaaaagcttaatcttcaattcgattttagagctggtcaaatagatgggttacatccaggaagaacagcaattgtgtcacttaatggtaaagatattggcttcataggtgagctacaccctacgttagctgcaaacaatgatttaaagcgtacgtatgtatttgaacttaattatgatgcaatgatggaagtttctgtgggatatattaattatgagcctatacctagatttccaggtgtaacacgtgatattgcattagaagttaatcatgaagttacttcatctgaattgttatccattattcatgagaatggtgaagatattttaaatgatacactcgtatttgacgtatacgagggtgaacatttagaaaaagggaaaaaatctattgcaattagacttagttatctagatacagaaaacacacttaccgatgaacgtgtaaatgctgtgcatgataaaattttagaagcacttaaaaagcatggtgcaattattagataa

SEQ ID NO: 5512 - DNA, 1059 bp, Staphylococcus epidermidis
atgactcaaaatgatttaatgtctgagttgaagcaacaagctttagtggatataaatgaagcaaaagatgcgcaagcgttacaagaagtaaaagtaaaatatttaggtaaaaaaggttctgttagcggcttaatgaaaaatatgaaagatttgcctaatgaagacaaacctgcgtatggtcaaaaggtaaatgaattaagacaaactattcaaagtgaattagatgaaagacaaaaactaatcaaagaagagaaattaaatcaacagctttctgaagaaacaattgatgtcacattgccaagtcgtcatattgaaattggatcaaaacatcctttaacacgtacagttgaagagattgaagacttgttcttagggttaggttatgaaattgttgatggttatgaagttgaacaagattactataattttgaagctttaaacttacctaaatcgcatccagcacgtgatatgcaagatagcttttatatcacagaagaaattttaatgcgtacacatacttcaccagtacaagcacgtactatggaaaaacgtaaaggacaaggaccagtcaaaattatttgtcccggtaaagtttatcgacgtgactcagatgatgcaacacatagccaccaatttacacaaattgagggtttagtagttgataaagatattaaaatgagcgatttaaaagggactttagagttagttgcaaaaaaattattcggtgcagatcgtgagattcgtttacgcccaagttatttcccgtttactgaaccatcagttgaagtagatgtatcatgtttcaaatgtaaaggacagggttgtaatgtttgtaaacatacaggttggattgaaattttaggagcgggcatggttcacccgaatgtattagaaatggccggattcgattctaaggaatattctggcttcgcatttggtatgggaccagatcgaattgcaatgttaaagtatggtattgaagatattcgtcacttttataccaatgatgtccgtttcttagatcaatttaaagctgtagaagatagaggtgaacaataa

SEQ ID NO: 5513 - DNA, 741 bp, Staphylococcus epidermidis
atggaacaaattacttctgctcaaaatagtaaaataaaaaatgcgaataaattaaaaaagaaacgtgagagggataaaacgggtcttgctttagtagaggggattcatctcatagaagaagcttatcaaagtcaaattgaagtaatacaattgtttatcgttgatcccgatagaatgtcatcttcaataattgattatgcgaaagaagtgtatcaaattaatctaaaagttgctgaagcactttctggaactgttacacctcaaggtttctttgccattataaaaaaaccaacctatgataagacactagccaaacaagtattattaattgaccgtattcaagatcctggtaatctaggaactttaattaggacagctgatgctgctggactagatttgatagttatggagaaggggaccgctgacccttttcaagataaggtgatccgtgctagtcaaggaagcatttttcatataccagtcatttttgatgacatcaacaattatattcatcaatttaatggtccagtgtatggtacggcacttgaaaacgcagtgagcttcaatgatattgaagcacaagccaattttgcgcttatattaggtaatgaaggagaaggtgttaacccagatttactaaaagaaacaacgcaaaatctcactattcctatttatggcaaagccgaaagtttaaatgttgctattgctggaagtatcttaatgtatcagctgaaaggttga

SEQ ID NO: 5514 - DNA, 138 bp, Staphylococcus epidermidis
atgatgtattctttaaaattgatatatcctttgaaaatcaatcaaatttgtatttcttttatttcagcgattttaattttaaaacgtatgattattgttttgaaaacagaaaaaatattcaataattattttatatag

SEQ ID NO: 5515 - DNA, 2409 bp, Staphylococcus epidermidis
atgaaaaaatctagtaaattttcaaaagattttcctactagaaaaaatcattacgcaattagaaaattcacagttggcactgcttcgattatcgtaggatcattcttatttttcggacaaacacaagctcatgctgaacaagctgaagaattcgaaagagtaacaactggtacagttgatacaggtggacagcctgctagagcagatcaaggacaagaaggaccacaagcaggcgcggatacgcacaatacagcaagtcaacctggtgttacaggtcaagatgcaccaaatgaaaatcatgctggtgaccaaaatgctgcagtaacacatccggctaatcaagaaaataatgcacctcaagttggggctggtactcctggcgctgagaacacaccacaagccggtggtgaaaatcataatcaagatactgcagtaacttcagcaggtactaatggggaacaaaatggtggtaaaccagctacgtcaacaactggtcaagatgccgcgcaatccaatggacctcaaggtacttcagtagcccaacctggtaatgatgcttctagccaaggtcatgatacacctcaagctgatgctggtactcacaatacagaaggccaacctgctgtaactactggtgagcaagctggtggtaagcctgctgcaacgaaacctgaaggtgccagtgcagaaactgcgccagcgcctaataatgctgatgaaaatcacgctcaaccttcaccgcaaacaggaggtactacagcaacacaagctggacaagtaaaaccatccggtgattctacgcctaccggtgagccaaacaaagcagacgatcaaggtacacaaattaaacctacaagtaaccaaggtactacagcaacaactaatgaaactggaaatcaaaaaccaagtggtcaaacaggtaatactgagaacacgcctaatgatggtactcaagtaaaacctaataatgacccagctgtgactggtacgccaaatactaatggagaacaaactggacaaggtaatgcaacagtaacaccaggacaaggtaatgaagagattaacggagctagtaaacctggagaagtgtctccgaaacctgaagaaaacaatccaactgccactgaacctggtacaactgcacctgggaatactaatcaagacacacaagtaaaacctaatacagatcagactgctactggtactccagctggtactgataatcaaaatacgcaacaaggcaatactgaacaaaataaccaaaatgctcaaccatcagcacctggaacaactgatcaagccggtgctacggttaaacctagtactacacctaatcaagacgctgaagttaaacctaatccagatcaaaataatacaccaactaatggtcaagacgggaatcaaacaggtcaaggtactcaagtaaaacctaataacgatcaaacggcaactggtactcaaggtgccactggtaatcaaaatgctgaacaaggtaatactgaacaaaataaccaaaatgctgaaccatcagcacctggtacaactgatcaagccggtgctacggttaaacctggtactacacctaaccaagacgctgaagttaaacctaatacagatcagactgctactggtactcaaggtgccactggtgatcaaaatgctgaacaaggtaatactgaacaaaataaccaaaatgctgaacaaggtaatactgggcaagagggttctaatcctaatcaaagtggtcagttaggtgctacggttaaacctggatctgctccaaatcaagatactgaggtaaaacctaatccagatcaaaataataacccaactactgggcaagacgcgaatcaaacaggtcaaggtactcaagtaaaacctaataacgatcaaacgacaactggtactccagctggtactgataatcaaaatacacaacaaggaaatactgaacaaaacaatcaaaatgctgaacaaggtaatactgggcaagagggttctaatcctaatcaaagtggtcagttaggtgctacggttaaacctggatctgctccaaatcaagatactgaagcaacccctaatccagatcaaaataatacacaaactaatggtcaagacggggatccaacagatcaaagtacacaagatgataatgataatcaaaataagcaacaaggcaatactaaacaaaataaccaaaatgctgaacaaggtaatacaggcgatacagataaagatgctaaagtaaatactgatgatgatgaaacaaaaacagatgttaaaaatgatactgaattacctgaaacaggactaagtaatgaatatgattatacaactacagtatttggttctatcgctttaatatcttcacttttattactaagacgacaaagaaaagaatctaaataa

SEQ ID NO: 5516 - DNA, 174 bp, Staphylococcus epidermidis; identical to SEQ ID NO: 2951

SEQ ID NO: 5517 - DNA, 555 bp, Staphylococcus epidermidis; identical to SEQ ID NO: 2950

SEQ ID NO: 5518 - DNA, 1134 bp, Staphylococcus epidermidis
atgaaaagtgttggactgataactgaatataatccttttcataacgggcacttatttcacgctacattgtcaaaacaacgctctgaaactaatgtaactattgctattatgagtggcaattttgtgatgcgtggagaaccagcaatctaccataaatttaaacgcactgaaatggctttatccgccgtagatttggtcgttgagctaccaatgataggtagcctatcttctagtgatacctttgcggaaatagctattaaaacagctcagtatctcgatatagatattatatcttttggcagtgaaagtgcatccttaaaagatttacaatatcttgcaacacaaatgattgactatgaaaaacatccagattttaaagagaaattaaaacaaggtaaaagctatccacgaatcttaagtgagttaacacataacgacacacttttacaatctccaaacaatattttaggaataagctaccttaaagcaatgcagcaatttgcgcctcacatgtcagcattgactattaaaagagaaggttcacttcatcatcaaaaagtaattgatcaccatcattttgcaagtggaacatctattaggcgttcgctaatgaatgataatgtagactggaaaaatgtggtcccaaatcaaatacaatctttatattgtaaacctcatactacggttgaggatacatttccttttatcaaacaccaattaattacacaaccaaaagagagccttcattctatttacacaataaatgaggggtttgaaaatcgcttgcaaacaatgattcatcgaagcgattcctttgagtctctattatcaaaccttaaaacaaaacgttatacgcagacatatattcaacgtgtattaatgaatgtgttattaaatataacaaaagatgatgttaacaaggaaattaacgctgttagagttttaggaatgagtgaaaaaggacgctcatatttaaaatatttaaaagctaattatccaaatcgtcactacattactaatgtaaatcaaaagactgcacactattttaaaaatgaaattaaagcgactcatgtatataatctattaagtaatcaatcacagacagactttaacacacccttagtacgcatttaa

SEQ ID NO: 5519 - DNA, 486 bp, Staphylococcus epidermidis; identical to SEQ ID NO: 2948

SEQ ID NO: 5520 - DNA, 543 bp, Staphylococcus epidermidis
atgcgtgtaattgcgggtaagcataaaagtaaagcgctagaaagtttagaggggcgaaatactcgtccaactatggataaagttaaagaaggtatttttaatagtttatatgatgtttctggtttaggattagacttatttgccggtagtggtgcacttggcattgaagcattatcacgtggtatggataaaatgatttttgtagatcaaaattttaaagcggtcaaggttataaaagctaatcttaatcaattagatttaatgtcacaagctgaagtctataaaaataatgctgacagagcacttaaagcacttgctaaacgagaaatacaattcaatgttatctttttagacccaccttataataaagggcttataaatgaggcgatttctcgtatagcagagtttaacttattaaaagaaaatggtattatcgtttgtgagtttagtcataatgaagaaataacaattgcgccatttcaaatgattaagcgttatcattatggtttgacagatactttgttacttgaaaaaggagaataa

SEQ ID NO: 5521 - DNA, 390 bp, Staphylococcus epidermidis; identical to SEQ ID NO: 2946

SEQ ID NO: 5522 - DNA, 252 bp, Staphylococcus epidermidis; identical to SEQ ID NO: 2945

SEQ ID NO: 5523 - DNA, 927 bp, Staphylococcus epidermidis
atggctcattcaaaaaaatggtttattaatggtacgttggcaacagccggtattataagcagtctattttactttttaaaaaataaaaataaatcaccgcaacaattaaaatctattccacctttcttctcaggacaagcaccttacatatttgcacatagaggtggcatggcaatgcgaccagagcaaacacagttggcatttgataatgctgttgaacatggattggatggctttgaaacagatgtacgactaactaaagatgaacaactcattgtttttcacgatgcacttgtcgatcgtacaactaatggttcaggtaaagtgagtgaacatactctagctgaactaaaacgattagatgcgggatatcattttactgacatcaataatcaaacaccttatcgcgggcacgataaagctaagattttatcattcgaggaactgcttgaattgtaccctaatatgtatatcaatgtggatttaaaagatgcgccagacacatatgaaggtcgtatcgcaccaaaagtgatttacgataatatcatcaaacatggggcgcaacatcgagtgctcgttacaagcttccataaaaaacaaattcaacgtttcactgagtataaccaagctgatattgctatcggtgctagtgaagccgaagttgctgaaggttttattaaatttaacggcatgttaggtcacacatttaaaccacaagcagacacattccaaatgccagttgcatataaaggaatttcattaacttctaagcgtttcattcaatggcttaacttaaataatattgtacccggttactatggtgtgaatagtatagatttaatgacagacttatatcataaaggtgttcataccttagttacagatcgcccagatttaggtcaacaatttaaagaaactttaaaataa

SEQ ID NO: 5524 - DNA, 435 bp, Staphylococcus epidermidis
gtgattactgaagaaacattagacattttagatgatattgaggatatctcggatatgattgtacaatctgatatttatgtctcataccgacgagctaaaatgcaattagatgctgatgatgaggcaagtctactttatcaagcttttctaaaagtgaaagataggtatgatgatgtgatgagatttggaaaatatcatcccgattacaaagatattatgttagaaactcgaaaacgaaaacgtgcttatgaaatgcttccagtagtaatggagtataaagcaaaggaagtggcattacaaaatttaattgacgaagtgatgtccaaaatcgcattagctgtttctgagcatgtaaaaattgaaacaggtaatcctttcttccaaactggacatgatggatgtgcatctggtggcacatgtaactgttcattgtaa

SEQ ID NO: 5525 - DNA, 1053 bp, Staphylococcus epidermidis
atgaagaagttaataattaaagttattggtgttatattattagtgacatttttaatttatctcttttactcaccacgtttaaagtttgatgttctagagaatccaaataaaaatagcaaaacgactaagacggagcaatttaaacaggtgaataaggatgctgagaaccctaaacctaaagaagggatagggacttggattggaaaagatattaaaacactaacgcatcattatggacaagctgatcggtcttatccatataaaaatgggttaaaaaattatgtctttaaacagaaagatgaatattatattgtaagtactaataaaggaacaatcacatcagtttatgccacaggtaaaggtgtgaaagtgagcccacttaaaataggtgaaagttcatctcatatttttgaagatactagtattaatccagaaccaactgtcaaaacgaaaggtaaaacttataaatttgaaatgtctgatgaagacttaaagacacagacgttaattaaatatggagatgtttatgctcaaatatattctgatcaacaaactaataaaattttggcagtgagatttttagatgcaaatacattggcaacactacaaccatataagttaaatagagcagaagatgagggacaaattagtgaaagttccgacgataaaattccacatgaacaaaaccctaatcaattgattacactctatgaagtaacgaataaaatgagagaaatgaaaaatttaaaatcacttaaagttaacaacgatattgctcgtattgctgctatcaatctgtatgaagcaacggataaaggatcaaacagtgtggagtttactgagaatgctttaacacaacaactggatgaacgccatgtaagttataagtcagcaagtcaaaatgtaggttatgattttgacgatgtacctacacttattcatagttggattaattctgatattcatcgctcacgcttgttaagtaataaatatgatgaaatgggtggagaagtgatgagtgattattattcattaatatttgtagaaaagtaa

SEQ ID NO: 5526 - DNA, 462 bp, Staphylococcus epidermidis; identical to SEQ ID NO: 2941

SEQ ID NO: 5527 - DNA, 912 bp, Staphylococcus epidermidis
atgaacaaagatcaaactttgtcacatactacgggccgtgtatccttcaaagaattacaacaaattattaaaatgggccttgttcaaggtaatttaatacctgcttttgcaggcgcatggcttgcaatagtaatgacaaaccattccttcctatcttccattccacaaatactattgatgctagttggctctacgcttattatggggggcgcttgtgctttaaataattattatgatcaagatattgatcgcattatgcctagtaagcaaagtagaccaacagtaaatgatagaatatctgatagaaacttattaatgttaagttttgggatgatgttaataggtgaagcatgtttattcttattaaatataccttctggtgttttaggattaattggtattgttgggtatgtatcttactattcaatttggtctaagcgccatacaacttggaatactgttgttggaagttttcctggagctgtaccaccattaattggttgggtagctatcgatggatcattaagtttagcagcagtagcactctttttagttgtcttttgttggcaacctatccatttctacgctctagcaattaaacgtagtgatgagtatgcgcttgcaaatattcctatgttaccatcagtgaaaggtttcaaacggacaagagtaagcatgtttatttggttagtgttattattaccattgccattcttattatctaatttaggtgtaacttttgttgttattgctacactacttaatttaggatggttagctttaggttttacaacgttcagaaaagaatctaatcaaactaaatgggcaacgcaaatgttcgtttattcattgaactacttagtagtattctttgcactcgttgtagttgtttcattaatcaagatgatataa

SEQ ID NO: 5528 - DNA, 909 bp, Staphylococcus epidermidis
ttgtttagaaagcaaaaccttaaatggttaggtgttttagctacgattattatgacctttgtacaattaggtggcgccctcgtaactaaaacgggatcagaagatggttgtggctcgtcttggcctttgtgtaatggcgctttacttccagaaaatttaccaatacaaacaattatagagctgagtcatcgcgcagtatcagccatttcacttatagttgtattatggcttgtaattacagcttggaaaaacattggatatattaaagaaatcaaaccactctctattattagtgttggttttttattagttcaagcacttgtaggtgctgctgctgtgatatggcaacaaaatccttatgtattagcgctacattttggtatttcacttatcagtttctcttctgttttcttaatgacattaattattttctcaattgacaaaaaatatgaagctgacattttatttattcacaaacctttacgtatcttaacttggttaatggctatcatcgtatacttaactatttatacaggtgctttagttagacatactaaatcaagtcttgcttatggtgcttggcctattccatttgatgatatcgttcctcataatgcgcatgattgggtacaattttcgcacagaggtatggcgttcatcacttttatttggattatgattacatttatacacgctattaagaattattcagataatcgaactgtacgttatggttatactgcatcatttatacttgttatccttcaagttattacaggtgctttatcagtcataactaatgtcaatttaattattgcgttattccatgctttgtttatcacttacttattcggaatgattgcttattttattttactaatgttaagaacgacgagaagtctaaaataa

SEQ ID NO: 5529 - DNA, 3450 bp, Staphylococcus epidermidis
ttgaaacaaataaagaaattacttgttgctaaccgtggtgaaatcgccattagaatttttagagcggcagcagaattaaatatcagtacagtagcaatttattctaatgaagataaaagttcgttacatagatataaagcagatgaatcctatctagttggaagtgatttaggacctgctgaaagttatttgaatatcgaacgtattatcgaagtagctcttcgcgcaggtgtcgatgcaattcatcctgggtatggttttttaagtgaaaatgaacaatttgcacgccgatgtgctgaggaaggcattaaatttataggtccgcatcttgaacatctagacatgtttggagataaggttaaggctagaacaactgctattaacgctaacttacctgtaatcccgggtacagatggtcctattgaaagttttgaagctgcagaacagtttgctaatgaagcaggttacccacttatgattaaggctacaagtggcggcggtggtaaaggtatgcgaatcgttcgtgaatcaagcgaattagaagacgctttccatcgtgcgaaatcagaagccgaaaagtcatttggtaatagcgaagtttatatcgaaagatatattgataatccaaagcatatagaggttcaagttattggtgatgaattcgggaatatcattcatttgtatgaaagagattgctccgtacaacgacgtcatcaaaaggttgttgaagttgcaccttcagtaggtctttctaacaaattaagagagcgaatttgtgatgccgcaattcaactgatggaaaatataaaatacgtcaacgctggaacagtggagtttttagtttctggggatgaatttttcttcattgaggttaatccacgtgttcaagttgagcatacaattactgaaatgattactggtatagacattgtaaaaacgcaaattttagttgctgatggagaatcgttatttggagataaaatctctatgccacagcaaaatgaaattcaaacattagggtatgcgatacaatgtcgtataacaactgaagatcctactaatgattttatgccagattctggcacaattattgcatatcgatcaagtggcggttttggtgtgagacttgatgcgggggatggattccaaggtgcagaaatttcaccttactacgattcactattagttaagctttctacacatgccgtttcatttaaacaagctgaagagaaaatggaacgttcattacgcgaaatgcgaattcgtggcgtaaagacgaatattccatttctcatcaatgttatgcgtaatgataaatttagaagtggtgattatactactaaatttattgaagaaacacctgaacttttcgatattgcaccgacattggacagaggtaccaagactttagagtatattggtaatgtgacgataaacggatttcctaatgtagaaaagcgtccaaaaccagaatatgaatctaccaaaatcccaaaaatttctcaaaagaaaatcaatcagttatctggaacaaaacaaattcttgatcaacatggaccaacaggtgttgcaaattgggttagagaacaagaagatgttttaattaccgatactacatttagagatgcacaccaatctttacttgcaacacgtgtaagaacaaaagatatgatgaacattgcatctaaaactgctgaagtgtttaaagatagtttttcattagaaatgtggggtggtgcaacatttgatgtcgcctataatttcttgaaagagaatccatgggaacgtttagaaagattgcgcaaagccattccgaatgtgttattccaaatgttattacgagcttcgaacgcagtaggttataaaaactatcctgataatgtaattaagaaattcgttcatgaaagtgcaaaagctggtgtagatgttttccgtatattcgactcattgaactgggttgatcaaatgaaagtagcgaatgaagctgttcaagaagctggaatggtatctgagggtacaatttgctatacaggtgatattttaaatgctgaacgttccaatatttatactttagattattacgttaaaatggctaaagaactggaaagagaaggattccatatattagcaattaaagatatggctggtttattgaaaccgaaagcagcttacgaattaattggtgaattacgagaggcaacacatcttccaattcatttacatacacatgatactagtggaaatggattgttgacatataaacaagcaattgatgctggcgtagatattatagatactgctgttgcatctatgagtggtttaacgagtcaaccaagtgcaaattcattatattatgcactaaatggattcccacgtaatttaagaactgatattgatggtttagaagagttgagtcattactggtctgtagtcagaccttactatgcagactttgagagtgatatcaaatcaccaaatacagaaatttatcaacatgaaatgccaggtggccaatattcaaacttaagtcaacaagctaaaagtttaggattgggcgaacgttttgatgaagtcaaagagatgtatcgtcgtgtcaacttcctgtttggagatcttgtaaaagtaacaccatcttcaaaggtagttggagatatggcactatatatggtgcaaaatgatcttgatgaagatacggtcatcaatgatggttataaattagatttcccagaatctgttgtgtcattctttaaaggtgacattggacaacctgtcaacggattcaacaagaaattgcaagatgttattttaaaaggacagcaaccaattactgaaagaccaggtgaatacttggagccggtcgattttgaagcaatccgtcaagaattaagcgacatacaacaagacgaggtaacagaacaagatataattagttatgtactttatccgaaggtatataaacaatatattcaaacgaaagagcaatttggtaatgtatctttactggatacaccgacattcttatttggcatgcgtaatggtgaaacagttgaaattgaaattgatactggtaaacgtctaattattaaattagaaacaatcagtgaaccagatgagaatggtaagcgtacaatttattacgctatgaatggtcaagcaagacgtatctatattcaagatgaaaatgttaaaacgaatgctaatgttaaacctaaggcggataaatcaaatccaaatcatattggtgctcaaatgcctggttctgtaactgaagtcaaagtgtctgtaggcgatgaagtacaagctaatcagccattattaatcactgaagcaatgaagatggaaacgacgattcaggcaccatttgatggaattattaaacaaataaatgttgctaatggagatgccattgccacaggagatttattagtggaaattgaaaagcaatcataa

SEQ ID NO: 5530 - DNA, 1119 bp, Staphylococcus epidermidis
atggtttatagcgcaagcatggttgcagctacaaaaggtacgttaaccgggggagtaccagtttcaggaacatacttctacaatcgacaacttttatacgttatcatgagctttgttatcgtattttttatggcttttattatgaatgttaaagtattaaaaaagcctaatgttcaaaaaggtatgatgattggtatttttacacttttactactaacattagtaataggaaaaaatatcaatggttctaaaagttggattaacttagggttcatgaacttacaagcttcggagttattgaagattgcaataattctatacataccatttatgattgaaaagaagatgcctgcggtgaggcataatataaaattaatattaggaccaattttgtttgttgtaacttgtttgatacttgttctttttcaaaaagatgttggtcaaacaatgctgattgtgatcatattcttctcaattattttttactcaggtatcggtgtgcagaatatgttaaaatggggcgctttggtagctattggttttatcatcgtagctacatttatgttcatgttagatatggttccaagttatttgcaagcacgttttagtacgttaaccaatccatttagtcaagaatcaggcacaggatatcatatttctaattctcttttggcaattggcaatggtgggttgttcggacgtggtctaggaaatagtattatgaagcttggttatttgccagagccacatacagactttatatttgctattatttgtgaagagatgggattaatcggtggcttaatcgttttaattttagagtactttattgtatatcgcgctttccaacttgctaataaaacgcaatcgtatttttataaattagtttgcgttgggatagctagttatatcggaagccaaacattcgtaaatatcggtggtatttctgctacaattccacttactggtgtaccgttaccatttattagttttggtggttcatcgatgattagtttaagtatagctatgggattactacttattacagcaaaacagataaaacaagatgataaacgactgaaacaacgtaaggtagatattaaacgtcgatataattaa

SEQ ID NO: 5531 - DNA, 276 bp, Staphylococcus epidermidis; identical to SEQ ID NO: 2936

SEQ ID NO: 5532 - DNA, 483 bp, Staphylococcus epidermidis; identical to SEQ ID NO: 2935

SEQ ID NO: 5533 - DNA, 156 bp, Staphylococcus epidermidis; identical to SEQ ID NO: 2934

SEQ ID NO: 5534 - DNA, 1278 bp, Staphylococcus epidermidis; identical to SEQ ID NO: 3689

SEQ ID NO: 5535 - DNA, 1041 bp, Staphylococcus epidermidis; identical to SEQ ID NO: 3688

SEQ ID NO: 5536 - DNA, 954 bp, Staphylococcus epidermidis
atgaaaatggaaaaagaacaagcacattggatttataaaacgatgaacgaaattcgattttttgaagaaaaggtacacaaaatttttagtgatggtagaattccaggattcgtacacttatatgtaggtgaagaagctgttgcaacaggtgttatgtctcaattaaatgatgatgactatattacaagtacacaccgtggtcatggtcatgcgattgcaaaaggatgcgatttaaatggtatgatggcagaaattatgggtaaacgtgacggattaggtcacggtaaaggtggctcaatgcatgttgcagaaattgacaaaggaatgctcggtgcgaatggtattgtcagtggtggttttgggttagcaattggtgcaagtatttctatcattaatcaaggtaaagataatgttgcggtatgtttctttggtgatggtgctgcaaatgaaggtaatttccatgaaggtcttaattttgcttcaattttagatttacctgttctttttatatgtgaaaataaccaatttgctgaaggaacaacacatgactacgcaagtgcttctgaaacaattgcagagcgtgctgcggcttataatatgccgggtgtacgtgttgatggcatggatgttatggaagtatataaagcaacacaagaggctgtagaacgcgctaaaaaaggtgaaggaccaacgttaattgaatgtgatacgtatcgtaaatatggacattttgaaggtgatgagcaaaaagtaaaatcaccagatgatcgtaacgcagataaaaatgcgacagtagaatttagaaaaagagcaattgaagaaaattggctcactgaaaaagaagcagatgaaatagaaaaagcagctgaacaagctgtagaagatgctgtgaaatttgctgaagaaagcgaattaccagatgaggattcattatacaaggatgtttttgcttaa

SEQ ID NO: 5537 - DNA, 1353 bp, Staphylococcus epidermidis
atgagtaaatcatatgacttaatcgtaataggagctggacctggtggctatgtagctgcaatacgtggtgcgcaacttggtaaaaatgttgcagtcattgaaaaaaataatgctggaggcacgtgcttaaatgtaggttgcatcccctctaaaacgttgttagaacacggcgagaaagcacacagcatacgagttgcaaacgattggggaatcacaacgaaagacttaaaaattgattttactcaatttgtccaacgaaaaaagaaagttgtacaaacacttacgggtggcgtgaagcagttgttaaagaaaaataaagttacttatattgaaggggaagcacgaatttctaaaaacttaaaagtggacgttaacaatgaaacgtatcaagcgaaagatataattttagcaactggcagtcagccgttcattccaccaaatgatgggttagatcaagtcaattatgaaacaaccgatacatttttcgatttagagaagctaccaaaacagttagcggttatcggtgggggtgtgattgcaacagaactcgcatcctcaatggctgatcttggggttagagttacgataatagaagttgcagatgacattttattaactgaaatcaacgaaactagagaaatgttaaaagcacatttagataatcaaggtattaagatactgacgaaagcaaagataaaacaagtaaaggaatcgaaaataatattagatgggcaagatgatgttagctttgatacccttcttgttgcaacaggtagacaaccgaatacgcaagttgcaaaagatttaaatttggaaatggatggtaaattctttaaagtcaatgaacattatgaaacgagtcaaaaacatgtctatgctataggagatttaattaaaggatatcaacttgcacatgcagcaagtgcgcatggcattcatgttgtcgaaacaataatgaacaaacagccgtcacttgtgcgtcaagaagatattacgcgttgtatatacacaagacttgaagcagcatcagttgggttatcagaagagcaagctaaagaggctggttatgatgtgaaagtgactcaatcagcatttcaagggaatgcaaaggcgttaatcaaaggagaaaatgaaggatttattaaacttgtcgttgataaaaagtatggagaggttcttggtgcttttattgtaggaccacatgctacagatataattggagaacttttaagtgtcaaagcatcagagggtacgattcatgaactttctcaaattattcaaccacacccggctttattagaagcaataggtgagagtgcagatgcattttttgattctgcaattcatatgtag

SEQ ID NO: 5538 - DNA, 1419 bp, Staphylococcus epidermidis
gtgggaagtactgttaaatatcgtaagtttattctacctattgtcgttggtttaattatctgggcattgacgcctattaaaccagatgccttaaatgatcaagcttggtttatgtttgctatttttgtgtcaaccatcattgcttgtattacccaacctatgactataggtgcagtatcaatcattggttttacaatcatgattttggttggaattgttgatacaaaaactgccgttcaaggcttcggtaatagtagtatttggcttattgcaatggcctttttcatttcaagaggatttgtaaaaacagggctaggtcgacgtattgctctgcaattcgttaaattatttggaaagaaaacgcttggtttggcttattcacttgttggtgttgatcttatcttagctcctgctacgccaagtaatacagcacgtgctggtggtattatgtttccaatcattaagtccttgtcagagtcatttggttcatcgccgagagatggttctgagagaaaaatgggtgcgtttttaatctttactgagttccaaggtaatttaattacttcagctatgtttttaacagctatggccggtaaccctatagcgcaaagtttagctgaaaaaacggcacacgttcaaattacatggatgaattggtttgttgctgctattatacccggattgatttctctcatcgttgtccctttcattatttataaattatacccaccaactgttaaagaaacgcctaacgctaaaaaatgggctactgaacaactagaagaaatgggacatatgtctatagccgaaaaattgatggttggtatctttatcatagcattggctttgtgggtattaggaagcttcattaatgttgatgccacgctcactgcatttattgctttagcattgttactattaacaggtgtattagcgtggtcagatattttaaatgaaacaggcgcatggaatacactcgtttggttctcagttcttgtattaatggcagaacaattaaacaagttaggctttatcccatggttaagcaaactcattgctcaaggtttaaatggctttagttggcctatcgttttagttttactcatcttgttttatttctactcacattatttattcgcaagtgcaacagcacatgtcagcgccatgtacgccgcgttactcggtgttgcagtcgcttcgggtgcaccgccattattcagtgcattaatgttagggttctttggtaacttactggcatcaacaacacactatagtagtggaccagcgcccatattatacgcagctggctatgttacacaaaagcgctggtggactatgaatattgtacttggtatagtctattttattatttggattggtgtaggttcactatggatgaaactcataggtatgatgtaa

SEQ ID NO: 5539 - DNA, 912 bp, Staphylococcus epidermidis
atggacaaattaacagtaggtttagaatggtttttaaatcctgatcatatgccgttaatcttaggtatcgaaaaaggttggtttaaagaagaatcattagaaattgagatgattgaaccaaaggaacactttgacgcactagacgagattgaaaatggttcaatggatatcgcgattactgaacctattcatctggttcaagatagagctaaagaacaaaacgtcatcgggtttgcgagatatcttcacactaacggaggtattatgtataacaaagataaaaatatcgctcgccccaaagatttaatcggtaaacggcttcaatatcctggcgctcccggtccaggtggtattgccatggctaaaacgatgattgaagctgatggtggcacatataaagagggtgacatcacaccagttaatcatagcttttatcatactgatgcacttttaactgataaagctgatgctgctacactcattttcgaaaattttgaaattcttgaagctagaaatcaaggacttaatgtagattattttccacttaaaaattataatgtacccgatttttgtcaactcattttcattactacacctgaagtattaaatacgagtgaggtcaaacttaaaaagtttctgaaagtcattcaaaaggccattcattacatcaatcatcatttagaaagtgcaattgaaatttactcaacgtatactcaaactgatatctctaaccaattaaacaaagatacaattgaagcaacagctaaatgttttacaaatgatttgtctatgagttccgactactacaatgatttacagttgtggcttaaagaagtcaatgatattaaagacacgattaacccaactttatattttacaaatcaactactattcagtcgatatacaaaataa

SEQ ID NO: 5540 - DNA, 906 bp, Staphylococcus epidermidis
atggtgtcttcggagtataaaaaaggaatatttttagctttaggtgcttatattttatgggggattttacccatatattggcgtttaattgatgaaataggcgcttttgaaattttggcattccgtattattttttcagtgatatttatgatttttgtgctcattataggaaaaaatcaacggaacgctttttttagagatgttaatcagttggtatcgcatcccgtgcaacttattgccatcatagttgcagggtatgttattacagtgaattgggggacatttatttgggcagtatctaatggtcacgtgctacaatctagcttaggttactacattaacccactagtgagtatcgtcttggcgcttatatttttaaaagagagatttaataaattcgaatggttagccatcatctttgcactagtaggcgtactttatatgacaataaaaatcggtgaatttccatttatttcacttctattagcattttcttttggtatatatggtttattaaaaaagattgtgcatatcgatgcgataagtagcatcactattgaatgtattgttactgcaccagccggtttaatctatgttatttacctatggcagcaacaacacataacatttggattaaatatatcatcattttggctactattttcaggtgcaattacagcaataccattgattctgttctcagcaggtgctaagcgaattccattatcgttaactggcttcattcagtatgtagggccgacaatcatgtttatcttaggtatctttgtctttaaagagccatttaacactgatcaattgattacctttatttttatatggataggtattgtgttatatagtatttctcaatatgttcaaattaagaaaaacccagttgtaaaatag

SEQ ID NO: 5541 - DNA, 498 bp, Staphylococcus epidermidis; identical to SEQ ID NO: 3682

SEQ ID NO: 5542 - DNA, 1704 bp, Staphylococcus epidermidis
atgaaaagtgcccaagcacttgaacagactttaacatcgttagacggtcaaaagtacggtgcgtataagcaaataaaagacctatacgaatttaatttatttaaactacgtattgaccatatccaagctgatccatttgcgccaccatctaagatgagtgttgttatagatcgccaacaagcaaaatttcctgattctttattaaattctgaactgaaacaacgggctgtgagtgattacttaacgcgcgtgtttcataagcagattcaatcaatagtagcccaagataaaaaagtaagtaaaattcaaattgatagttgtggccaagaaatcttagagcgtaccgcagtagtaattaagaatcgtcaaattgaggcacgtattgaagttggattaccagcacgaggacgtaccatattaggtagaatagcaagacatacacttattaatgtattacctcaaatagtagaacatgccttatgttatcgcaacattaatgtttcacaattggaacaacaagttgaattaatgatagatcaagaggagattagacaacagttagtaaaacgtgaccttgttgcatttgtagcaaatggtgctattttaccaagaaaaagtggtgtttcagatctccctatgaataacgctattgaatttaaaagtcctaaacaatatgagattgtaatgaaactatcgagtggcaaagttattaagggtatgggtattcctaaaggcattacactaatagttggaggcggttatcatggtaaatcaacattacttgaagcgttagaacgaggtgtatataatcatattgctggtgatggtagagaatatgtgatcacaaatcaagatgcaatgaaaattcgtgctgaagacggaagaagtattcaaaatgttaatatccagccatttattgatcatttgccaggtgaaagagatactacacatttttcaacggaaaatgcgagtggtagtacgtctcaagctgcaaatgtcatggaagctttagaatcacaagcatcattgttactcattgatgaagatacatctgcaacgaatttcatgattcgtgatggtcgtatgcaacgtttaattgctcccgaaaaagagccgattacccccttttctaataaggtaaaagcattatatgacgaccataacgtgtcgactattctaatcgttggaggttcgggagattattttgacgtggcagatcaagtattgatgatggatgaatatgtgttgaaagatgttacgcaacatgctaaagacattgcgcagtcagacggttatcaaagaaggctttcttctcactatcagttcggtcacattccatcaagaattccgttgagagcgagttttaatcaaaaagggaaacgtgatcgctttaaagctaaaggattgaatgtagtaacgtatggtaaggaaactattcatatttctggcttagaacaacttgtcgatgacagtcaaacacaaggtttagcgatgatgttaagttatgtaaaaaatgaattgctagatgacaaaagtacgattgtagaattgaccaatagtttgtatcaacggattgagaaacacggattagatgttatatcaaatcatcaggggcatcctggtcatttagcgctacctagaaagcaggagtttattgcgacacttaatcgatatcgtagattaaaaataaagcaaagggaataa

SEQ ID NO: 5543 - DNA, 1341 bp, Staphylococcus epidermidis; identical to SEQ ID NO: 3680

SEQ ID NO: 5544 - DNA, 2187 bp, Staphylococcus epidermidis
atgaaaaataaaaagaattcatatagcattcgaaagttaagtgtaggtgcgtcttcaatcattgttgcatcgatgttatttattggcggaggctcagtacatgctgctgaatccaatcaccttgaaaatcaagaacaatcagaagtaagtgcatcacattctattgagatgcaacacaaaaatcaagaaactcaacaaactgagaataaagataataaaactaaccattcaaaaacaattgataagactccaactatacataacaatggctactcatatcatgagacacctagtactgacgttaaatctaatgaagacaaacaaattgatagtcaatccaatcaacctcagacatctatgccaaataatgatcaacaaaaccctaaaaaagtagcggaacatacaacgaaaagtataaatgcaaaaaaagaagaaactagaaagaatgaaaatgcaaagagcctagtacaaccccaacaagatgataaaacaacatctgaacaaacaaaaatgaaagaatcacgtgaacaggagattacaaacgagcaaaagcagttacaaagtaaagatgtaaaaaatgctcaacaagaaaatcaaaatatagaccaagaaaaatctcaagaaaaaattaaagtccaacaatcgaacatcgaaaaggctcaaaaatcttcaagaatagatggaaaattagataatcaatacaataaagatgcaacgcaatcggatgaggggactgcatctgagaacgtttcagaacagcatataacagcaaaagatggaggtgttacacgaaataatcgtggagataaacatttaaatcaagaaaagccaacaacatcatcagataaagaacttaaagtggatgacatagacaaagatctttccacaaaagaatctcctgaaaatgaaaaagatgattctagaaaagggattaaagcactcactaaaaactctcaggcaacaacaagaaatactgcgacaacagaggcatccaaagaattgaaggatcaaacaaataaagtagcatcacaaaaagaatataaaaatcatgatcctattattcttgtacacggctttaatggttatgcatcaggaactggtcccgttacaggaaaaggtaactattggggtggtaaccgtctcaaaattattcaagattatagagctaaaggttataacgtgatggaagcaagtgtaagtgcatttggcagtaattatgatagagctgtagaattgtactattacattaaaggtggacgtgtagactatggtgcggcacatgcggcaaaatatggacacgagcgttacggaaaaacatacgccggcgcttataaggattggaagcctggtcaaaaaattcatctcattgggcatagtatgggtggtcaaacaattcgttatcttgaagagttattacgacatggtagtccagaagaggtagaataccagaaacaacatggtggtgacatttctccgttatataaaggtggacaagataatatgatatcgtctattactactattgccacaccacataatggcacccatgctgcagatttattaggtaatgaagaaattattagacaagtagcatatgactatgcaaggtcaaaaggtaataaattatctcatgttgatgttggtttaagtcaatggggacttaaacaaagagaagacgaaacattagctcaatatattcaacgtgtgaaacaaagtaaattatggacaacaaaagataatggattttatgatttaactactgagggtacagatatcttaaatcaaaaaacatccttaaaccccaatattgtttacaaaacatatcagggtgaatctacaagaccaggtccaaatggtactcaaaaagcagatgtcaatatgaacataggctatacattaactgcaaatacgattggtaaagtaaaagacaaagcgtggagagaaaacgatggactagtgtctgtcatctctgggcaatatccattgaaccaagcgcatacgtctgcgacagatcaagttcaaaaaggagtatggcaagtgacaccagttaaacataattgggaccatggtgacttcgttggtacagatacatcagaagttcgtatctctaaagaagaattagaagatttctgggacaacatgtttgaagatatggtacgtaatgaaaaagtgacagataaacaataa

SEQ ID NO: 5545 - DNA, 624 bp, Staphylococcus epidermidis
atgtatttgtatgtgactaagatgacagaaactttagaggaagtagaattgcttttgaatagaagttctcgtcagttgaaaaagccagaacgaatacactatagatttttaaaggatcgacttatgcaccaattaggtgatgcattgattcagtatgctattgaacaatgtgctggattaactcctaaagaatgggagtatcacatcacaactatgggtaaagtagagatacgaagttcttgtcatatatacgtgagtatttcgtatagttatccttatatcgtttgtataatagataatcagcctattggtattgatatcgaagaaatgaaagacttggattataaatatttggcgaagaattttacaacaaatgaatttaaccaagtgactacacttaaagatttttatgaaatttggactaagaaagaaagttatacaaaactcatcggtgagggattgatgaatggtttagactgctatgatgtgacgcaaaatttgagatttttaaaaaaacatgtccaatttacctcagtagattattttaaaagactcattcaaatatgtcatatgagtaaacatagtttgaactttgaagtggtgccgctcacacaattattataa

SEQ ID NO: 5546 - DNA, 7164 bp, Staphylococcus epidermidis
atgaatattgaagcactatattttcaaaaatatttttattttaaacatttaaatcaatcaagttcagaacacagggtgacatactgggtaaagttaagtcgcgacattgagttacgtagattaatgtatgcattattagatgtcgttcaaagtcaacctgtgttgcgtacacagtttgtgacagatgattttaatcaactcaagataaatttaagagatttttttccatttattgaaattaaagaagttaatgaaatgtcgcaaagcatagatttagaagcattctttacacgtaatttaaattcctaccatttcaatcaattacctctgtttaattttaagatttatcaatttcttgatgaagcctacctacttttagattttcacgctactatttttaatgaaagtcaattaactccatttttacaacaattaaatatcgcttatacccactctttaaaaagtgaatatagtatctcggatttttataattggattaaagaaatgaatcaaaagatggatcaaaatcaagttgtgtgtccatcaaagcacttcaacgtattgaatgcagacggtgataattacgcttacatacctgttaagaatacatgtgaaaagaaaaaaatgtgttctttgcatgcagaactaccatctttagacattgatgtgtggattgtaagtatttacttagcgcatcattttataagtcagtcttctgatgtgacgttaggcatccatttttcgatagataataaaaatactgagaatatgatggttttaaacacagacattgccccacttaatttaagtattagtcaaagtgacgtcgtaaaagatatggtagatgagtgttccgctctacttgaagagcttcaaatgtgtggtgcgtcttttgttgttcaacctaaagcagtacaaatagatgtagaaacgatgattcatattgaaaaagtacaagaacaatttgagcttaatcatatatgtcatcatatacatcgtctatacaatgaagcatcatcattcgcggatttagagttttatcctcatgtgcaggatggttttgatatagtttataatgacaacgtttatgatgatttaactgtacatacgttagtcaaattaattaatgggatttatatgcaaattacacaaaatccatcattattaattaaagatataaaactcagtgatcgctcagatttagctaaatataatgacatcaataatcaaaacaatgacattaattatagtgaggtcacttataaaaccgtggttgaaagattcgaacgtcaagtgcaccaacatcccgatagtattgcgttgcaatatgaacaacgatcgatgacatatcatcaattaaatcaatgtgcgaatcttttagcatatagattgcgtttaaatcatcagattgaacctaatgatatggtggcattaatagcagaacgcagcttagaaatgattattggaatgttagggatcttgaaagctggtgcaggctacataccaattgatccggattatcctgaagaaagaatgaattatattattgaggacgcaaaacctaaagcggttgtaacatatcgtacatcatttcaatcaggtttacctcaaatggatatagaattgatagttgattcaagagaacatgatattgataacccgagaggcattaattgttcagaagatatcgcttatgtcatctatacatcaggaacgactggtaaacctaaagggacactggtgccacatagaggaattgatcgcttagtacacaatccaaattatgtcgaattgaacgaaaatacaaccgtcttattatcaggaacagtagcttttgatgcagcaacctttgaaatatatggtccattattgaatggtggacggttagtcattacatctaaagatacgttgttaaatcctcaattgttagatcaagctattactgaaaataaagtcaacacgatgtggttaacgtcatctttatttaatcaaattgctagcgaacgtatcgaagcactagaatctttaacttatttgcttattggtggggaagtgttaaatgctaaatgggttcacttattaaattcgcgtgagtgtcatcctcaaataatcaatggttatggaccgacagagaatacaacatttactacaacttttgcgattccacaagagatgccttcacgtatacctattggtttacctattagtggaacgacagtttatgtcatgcaaggtaatcgtatttgtggcgtaggtgttccaggtgaattgtgcattggtggtgcaggtttagcaaaaggttatttaaatcaacctaaacttactgctgaacgttttattcagtcaccttttaacaatgaaatgctttatcgaagcggtgatttagttcgtcttcaagaagatggctatattgattatattagtcgtatcgataagcaagttaaaatacgcggttttagaatagaattatcagaaattgaaaaagcattagaagctatacgtgatattaataaagctgtagtcatcgttcgagagcaagaccaagataaacaaatagtggcatattatgaagcatcgcaattaaaatcaacaggtcaattaaaagatattttaagtgaaacattacctgaatatatggtacctgtgcattttatgaaggtggatcgtatacctatcacgatgaatgggaaattagatgtgcgttcattacctgaaattaatctaaagaataatagaaattatgtagaaccacgtaatgatattgaacgtaccgtttgccgtattttcgaagagattttacatgttgatcaggtaggtgttaaagataatttctttgaactaggtggacactctcttagagcaacattagttgtaaaccgtatcgaagaaaggttaaaaaaacgtcttaaagtaggtgatttaatgaaatcgcctactgtagagcaacttggacaacaaattgaagaactgcaaaatgatgtctatgaagtgattcccaaagcaaatgaatcgtatcaatatgatttaagtgcgtctcaaaaaagtatgtatcttttatggaaggtcaatcctaaagacacagtgtataacattccattcttatggagattatcttctgaacttaatgttatgcaattgcaacgtgcattatctaagttgattgaacgtcatgaaatattacgaacacaatatgtaattgatgacaatgaagttaaacaacgtattgcgacacatgtttcacctgattttgaagaggtaacgacatctctaacgaatgagcaagatattattcaatcatttatggaaccgtttgatttagaacaaccaagtcagatgcgagttaaatatatacatggaccacaacaagattatttatttatggatactcatcatagtattaatgatggtatgagtaacacgattttactatctgatttgaacgctttataccaagataaatcattacctgaacttaagcttcagtataaagattatagtgagtggatggtgcacagagacttatctaaacaacgtcacttttggttacaacaatttgaaaatcaggttccaatattaaatatgcctacggattatcctagaccaagtattaaaacaaccaacggtaatatgttgacatttcattacaatcgtcaaatcaaacagcaattgaaatcttatgtagaacaacatcaagtgacagactttatgttctttgctagtgcaatcatggtattattgcacaaatatacacgtcaggacgatatcgctattggtagtgtaatcagtgcgcgtacccatcgcgatactgaaaatatgttaggtatgtttgctaatacacttgtatatcgtggtcgacctcatgatcaaaagacatgggatcaattgatggctgagatgaaagaaatgtgtctaggggcatatgaacatcaagaatatccttttgaaagcttagtcaatgatcttgttgatgaaagagatgcttcacataatccgttatttgatgtgatgctcgtacttcaaaataatgaaacaaatcatgcgaattttggacatagtcaattgacacatattccacctcagtcaacaacagctaaatttgatttgtcatttattattgaagaagatcaagatgactatgtcatcaatattgaatataatacagatttatataaacaagagaccattcatcatattgctgaacaacttcaaatgattattaaacatgtaatatctaccgaaaacctaaaaattcaagatattgatgaaaatgatgacttattaatttggttggacaagcatgtgaatgattgttctttagacttgccaaaaaataagtcaatacagcaacttttacatgatgtcatgaaagcgaaagcagatgatgtagcacttaaaatgaatggacaatcgatgacgtatcaagaacttgatgattattctaatagtatggctcaaacattgatacaaaatggaattcaaaaaggggaacgtgtagcccttttaactgaacgaagttttgaaatggttgctagtatgattgctgtattaaaagttggaggttcttatgtacctattgacgtcacttatcccaataaacgcattgaatttattattgaagacgctgaagtcgcagcagtgctcacatatggaaaaacaatatcctcacatataccagtaattaaaattgaagatattgataacactgaaaataataaaaggttaaatatagaatatgcagggaatttggaagatgatatgtatcatatttatacatctggaacaacaggaaagcctaaagcagtatcagtgaaacaacgtaatatattaaatttagtatgtgcttggacaaaaagactcaatttatccgatgatgaagtttatctgcagtacgctaattatgtgttcgatgcttcagcaactgatttctactgtagtttattaaatggatatccgcttgtcattgcaacatcagttgagcggaccaatacagatttattagaaaagttaatttcacaagaaaatatcaccatcgcatctattccactacaggtatataatgtgatgcatcatttctatattcctaaagtgattacaggaggtgcgacaagtactccagcatttgttcaacatatttctaagcattgtgatatgtacgttaatgcctatgggccttctgaaaatacagttatcacatcttgttggatatacgaaaaaggtgacgccataccatcgactattccgattgggaaaccgttagctaatgttgatatttttattatgtcaggcggtaaactatgtggcgttggtattccaggtgaattatgtattgcaggagaaagtttaacttcaggatatttaaacagacccgaactttctgctgaaaaatttataaataatccttttgggccaggacaactttatcgaagtggtgatttagcacgattgatgccagatgggcaaattgaatttcttggtagaatagacaagcaagttaaagtacatggctatcgcattgaactaggtgaaattgaaaatatcattaattcagtagatactgttacagatagcgttgttattttagctaaacagggtgagcgtgaagtgctgcatgcttattatgttggaagtcaagaagacgaaaatcatatttcacaacatttaaatcaatatttgcctaaatacatgattcctaagacattaacagctattagcgaaattccattaacaggaaatgataaggtggatgagtcaagattacctgtacctaatgtacacaaaaataaatttgttgcaccacgtaataatatcgaacgagaaatagcacaaatcgttagcggagtgttggacgtatcgtctatgagtatagatgatgacttctttgaaatgggtggtacatcactagatgctatggtggtagtatcaaaactaaaatcaaatggcatacacattacaatgcaagatgtatatcaatttaaaactgttcgttatatagctaatcacacagaaaaacgccaagcactaccagaagtagtattaccagatcatctaccacaattacaatctttggttgaaagacgataccaactaaaatcacaacacctaacgcaatcatctctaggtcatgtattgctaactggtgcaacagggttcctaggcgcatatttaattgatgaaatgcaagatgatgctgatcaaattacatgtattgtcagaggtcatgatatcaatcaagctaaaactaacttggaaaataatttaaattgttattttgatacggctcatgtggataaattaatgaagcacattgatattattttagcggatttatcagaacttgaccatctcattatcgattcagccattgatacaattattcatgctggagctcgtacagatcactttggcgatgatgaaacatttttcgatgtcaatgtaagaagtacacaagcattaattgatttagctaaggataaaaaagcgaaattaatctatatatcaacgataagtgtgggtacggtatttgaagtacatcaagacgatattacattttctgaaaaagatttatataaaggccagttatttacatcaccatacactaaaagtaagttttatagcgagattaaagtgttagaagcggttaatgaaggtttagcagctcagattataagattaggaaatctgacaagtgcttctactggaccattaaatatgaaaaatttaacaactaatcgttttagtattgtcatgcatgatttattaaaaatgccgtttataggagaaagtatatcgaaagctaaagttgaattttcatttatcgatgtcacagcgcgccatattattaaattggcaagatccaatgcaatacctattatttatcatgtatacgcaccatgttcaataactatgaaacaagtaattgacaatgccaaagggtcagaaatgactgtagtaagtgatagtgagtttgaacagaaattacatgaattaggtatgcatgaattgattggtcttaatagtaatggagataatcaaatttcaggtgtgacagattcaaatatgactcaaacagtaatgaaagaattacaaggtgagtggccacatctttcttaccaatggttgcagcagtggtaccatttattgtttgaaaaatttgatgccaactag

SEQ ID NO: 5547 - DNA, 1242 bp, Staphylococcus epidermidis
gtgaagcaattaagtacaactttaaaagtccgattaatatgcgatttttttcaaaatattatagtcacggcatttttaccatttattgcgttgtatttaacagatatggtcaatcaacatttttcagggctttttttatttgggcttgtaatgataaattttccaatttctttgatttcaggtcatattattgaacgtttacctaaaaagacgttaacacttagttatcaatttatattaagtttaatgctcgtaattatggcgatttcaatatcacaacatacttttaagatcattttattttgtatcgcttacacaatatttagtatcacaataggcatgcagcaacctataatggacacgattattatggatgcgattacgcctgaagttgagcaatatatttataagataagttattggctgacgaatattgctgtcgcctttggtgcgctcataggtggattgatgtatggggcacataaatctatgttgtttttcatcgcttttgtcatttacattatggtttttatagcacttatcgtatggttgcctaaagatttaaatattgttactcagtcgcacacacatcatgctaatgagaaacaattctccatgggtcaaatattaaaaagttataaaccagcatttaaagatacaacatatctacttctaattataggatttagtattttaacaatgggtgagttatctgcatcatcgtacatttcagtgcgtttaaaacaagagtttgatccgatgatattgttttcgttacatatcaatggcgttaaaatgtattcacttctattaatgacgaatacaatcattgttataatttttacctattttatttcaaaaattgttatgagaatgaatgttaaaacagcattattggttggaattattttttatgtcattggatattcgaacctcacttatcttaatgattttacgttacttatcatatttatgattatagcgacgataggtgaaatggtatattctccaattcttgaagaaaatcgttttaaaatggttccttctcataaaagagggacatattcagcagtgcatgctttaggatttaacctagctgaattacttgcaagatttggaattatattaggagtgtttttaacttcaatggagatggggatctatatgtttgttttattattactaggtggcatgtcactttacattgcagtgagtcgttttaataatacaaattcacaataa

SEQ ID NO: 5548 - DNA, 1419 bp, Staphylococcus epidermidis
atgtctaacatttcgatgacgacttctaaacgtaatgctatcgttacggtaatgctcattagtgcttttgtgtctatgctcaatcaaactattttaaacactgcactaccagcaatcatcaaaggactgaacatcacagaaacaacagcacaatggttaattaccggatttatgcttgttaacggtataatgattccactcactgcctttttaatggataaatattcgacacgccatttatatattttctcaatggctatttttcttataggatctattgtagcggcattttcacctacgtttacaattttaatgatatctcgtattatccaagcgattggtgccggcatccttttaccattgatgcagtttacagtatttacactgtttcctgctgaacaacgtgggtttgcgatgggattggcaggggtggttgtacaaagtgcgcctgcaattggaccaacgttaactggattattcgtagatttatttagttggagaatgccattttatcttgtttcagcaattgctgcggtagcttttattttaggtttcttcttcgtagaaaataatacaaaaacaaaagacattgttcttgataaaatttctgtagtttattctactttcggctttggtttaattttattcgcatttagtagcgtgagtacgtttggtatcacctctctacctgtcattgtgacatttgtactcggtatagccattatcataatttttacaacgcgtcagcttaaattaaaacatccattgttaaatatgcgtgtgtttaaaaataaagtgttcacactttcagctgtttcttcaatgcttgtatatattacgatggtaagtcctgcgttactcatacctatttacattcaaacaggtttaggtcaatcagcattactatcaggtgtcgtcgtacttccaggcgcggtcattaatggattaacgatggtttatacaggaaaaatttttgataagcatggtattaaagtgcttgtgatacctggttttatcttactcattagtatgacattcttatattcattccttactacaggaacgccatattggtttgttattcttgtttacactataagaatgattgcgttaggattattagttatgcctcttaatacagttggactgaatgcacttgagtcagatgatgtctcacatggtacagcaattatgaattccttacgcatcattgcaggtgctatgggtacagcggttagtgtgacgattctatcaatagtggcaaaacagtatacagcttcacactcgacaatgtcaaaaatgaaactaacacaagaagcaactgtacatggtatagatgttgcatttatttttactacagtattaatcattattggatttatcttagcgttattcataaaagaagaaaaaaatcattaa

SEQ ID NO: 5549 - DNA, 246 bp, Staphylococcus epidermidis
atgattcatctacagaacatattgccagtcattatatacgctgttttgcttgctattcattactttttatcgcgtacgggaaataaaatattaggccttattgtgcctgttggtgtgattgcaagtcttgtatatatgtatcaagccgatattatacatatgaaaatgattggcgttattattataggtattgtggctctattattcttggcagaggagtggcagagagcacaaaaggataaataa

SEQ ID NO: 5550 - DNA, 897 bp, Staphylococcus epidermidis
atgaactttgaacagttagcatacgtaaaaaagctatatgaattggaatcaatgattcaagcgagtgaaagcatacatattagccaatctgcaatgagtcaatctctcacaaatttagaaaaagaattaggatataaattattttcgcgttctagaaaaggaactactttaacagaagcaggaaaccgtttaataccgtttatattagagatactagagtctaaagatgcactattatcagaaatagctatgatgaagacaaatattaaaggaacacttagagttggtacgattccaactctctttcataaaatactacccaaagctttatctcaatttaaagctaaccaccctaatgttgatgttgaagtcattgaagctgataaagatagaataaaaatgttggttaatcatggtgacattgatattggtctgataggtgttacagaacgagaggatgaagatagtcaagtatcacaacactcacttaatttaacctctcattttagattgattgttcctaaaaagtctaaattaactttcaaagaatatgttaatttggaagaaattcaacaatatccttttgtactatatgatcgtgagttttaccaacatcacttgaagaaatttgaagaaacgcaccatccacttaagattatttttaaaaccactaatccaattgttcttatgcgaacagttgctgaaggtttaggtgtaggtatcgtttcagcgttaatgcttgaaaatgaaccatttttagataacgaactcatagagtcagtaaccctaggtaaaccatttgattatgtagtaaattttatagcgattgtaaataaagaaaagtcaaaacaacaaatagtattagaattcattcactatttaaagaaaaatgagtaa

SEQ ID NO: 5551 - DNA, 1203 bp, Staphylococcus epidermidis
atgtcgaatcaatcaacgaataaccgtttgtggacgaaagactttatatttattactttcgttaacttattcatgtatttaattcattacatgatggtcgtaacaatcactgaatatactattgataaatatcatgcctctgaaagtataggtggattagctgcaggtatatttattattggtatgctagctggacgtttaggttctggcagaatcatagatcacttacaacctaaaaaggtcttactttacggcgtcatcttttcaattattacgatagcattatatttcactatcacaagcctatggattcttatgttgattcgatttattcatggcatagcctttggattctcatcaacggcaacaggaaccatttcatctcgaatcatcccagagaatcgaaaaggtgaaggtattggttattatggattaagtgtaacacttgcttctgctattggcccttttattggattagtatttaataaccatttagggtttaaatctatctttgctatcagtctattaagtattcttatagcatttgtattaagtatttttattaaaagactacctgtacttaatcataatctcgaagctaaagatcaaccaagtggtatgcacgcttatctgcaaaaagaagcactacctatttctttggtagtcatcttaattggtgtcgcttattctagtgttttatcatttttatctatttactctgaaaaaatcaatctcgttactacatcaagtttcttcttcattgtctttgcgattgttacgtttatcacacgcccatttacaggtaaaatttatgacaattatggtgaaaacaaagtaatgtatccagttttactgagctttacatttgggcttattattctcggttttactcatacaagcataattttgcttattgcagctgcattcatcggctttggttatggcactatcgtacctactgctcaagcaattgcaattcaacaatcacctgcaaataaaatgggcttagcaacgtcaacattttatatctttgcggatttcggtgcgggtatggggccatttattttaggtatcatcataccatttattggttatcgtcaattatatatggcaatggggatgcttgttatcatagcacttattctgtattactacgttcacggtagaatgcacaaaaatccattcaacaaaagagaatattga

SEQ ID NO: 5552 - DNA, 597 bp, Staphylococcus epidermidis
ttgagtgaatttttagctgcaatagtcggaggcatttttactttagcaggtacatttatagcactttggttccaatttagaaaagatgataaagataaaagaaaagattatcataacgatcaagttagttctttagatgttacagcttataaagctgcaaaagtaagaaataactacttaaatttcgaaacttctaactttagtaaagaaaatacaatggaaatttatcaagatattgaaacagattttaaatctcttgatacccatgttcaaaatttaatttctctaatgagtcatcatagcgatcaatcgaatacaataatacaaaaattattaggtagctatgaaccagtcgaaaatcaatataacaaacttaaagtagcttataagatttatcaccatcaatataatacaccggattttgataaaaatggcatcactttctctaaaagaaaactagacatcgaaatagatcaatttatagataaattagaagcatttgctaaaaccgaatatgctaatcaccaactatataaaccaacactaaatcctactgtagataaatccgacgcaatttataaaaataaaaaatattaa

SEQ ID NO: 5553 - DNA, 375 bp, Staphylococcus epidermidis
atgacatctatagtagtagtaagtcatagtcataaaatcgcagaaggtgttaaacaattaatcaatcaaatgactgacggtggtgttgaccttattgccgttggtggcttaagtgacgatgaaatcggtacatcatttgatcaaatcgtctctgtaattaatggacttgaaaatgatgcgctttgtttctatgacattggttcagcaggcatgaatttagacacagctttagaaatgtacgaaggtgaccacaaaattgttaaaatggaagcgccaatcgttgaaggaagctttattgcaagtgtaggaattaaatcaaatatgagtatggatagtgttatctctgaagtaagagctaaatatcctgaagaataa

SEQ ID NO: 5554 - DNA, 576 bp, Staphylococcus epidermidis
atgaatgtagcagatatcaaagcacgcttattagatttagaaaatacttttaaagaaaaagaaagtgaactgactgatttagacagagctatcggtgatggagatcatggtgtaaatatggtcagaggtttcgaacacttaaaagaaaaaatagatgatcaaagtatgcaagcgctatttaaatcaacaggtatgacattaatgtctaacgtaggtggtgcttctggaccattatacggatttggttttatcaaaatggcgagtgcagtgaatgatgaaattgatcatgataatcttaaagaggtacttaaagcgtttgctgatggcattcaacaacgtggtaaagtcgaattaaatgaaaaaacgatgtatgatgttatcgaacgtgcgagagaagctgttgaaaaaaatgaaacagtagatctagataaactacaatcatttgctaatgaaaccaaaaatatggtagctactaaaggccgtgcatcatattttaacgaagcttcaaaaggttatattgatcctggtgcacaaagtagtgtttatattcttaatgcaattataggaggagagtaa

SEQ ID NO: 5555 - DNA, 963 bp, Staphylococcus epidermidis
atgaaaaagttaattcaagataaaaacacaattttaaaagatatgcttgatggaattacagtttcaaacaacgatgttgaagttgtatctgacactattgttgttagaaagcataaaaaacaatcaggtgttgcactcgtttctgggggcggcagtggacatgaacctgcacacgcaggatttgtagcagaaggcatgctcgatgcagctgtatgtggagaaatcttcacttcacctacacctgataaaatattagatgccattaaagctgtggacaatggtgacggcgttctacttgttattaaaaactatgcaggagacgttatgaactttgaaatggctcaagaaatggctcaaatggaagatattaaagttgaaagtgttattgtcagagatgatattgctatttctgacccggaaaaacgccgtggtgtagcgggtacagtatttgtgcataaatatgctggatacctagctgaaaaaggtgttgcacttgatgaaatcaaatctaaagttgaggcacttttaccagatattaaaagtattggtatggcattaacgcctccaatggtacccacaactggtaaaaacggtttcgatattgaagacaatcaaatggaaattggtatcggtattcacggtgaaaaaggtttacatcgtgaagacgtacaacctattaacgtgattgttgaacgtttactcgatcaattatacaaagaaattgagaaaaaacctttaatcgtaatggttaacggtatgggtggtacgccactatcagaattaaatatagttactaaatatctagatgaacaattcaatcagaatgatattgatgttaaacaatggttcgtaggtgactatatgacagcgttagacatgcaaggcttctctataactgtactccccttcagtgaagaattgagtgaagctttagctgcacctacagcaagtaaatatttctaa

SEQ ID NO: 5556 - DNA, 1104 bp, Staphylococcus epidermidis
atgtctaaatttatttatcaatcaccaggaagatatgtacaagggaaaggtattgttagctctatcgctgaagaaacagaacgtcttggtagtcacgcgttgattattgcagatgaagtggtttggaatatcactgaagaaaaaataaaagaaagtttctcagcaaataacaacgttgattttgaatatgaagtatttaaaggagaatcttctgaagaagaaattcaacgtatagttaaacaatataaagaaaaaaacattgacgttgttattggtttaggcggaggtaaagcgttagatacaggtaaagctgtagcatttgaacttaaagcaagcgtcatcgattttgcgtctacagcatcaatggatgcaccaacagcagcagtatctgttatttataacgaagatggatcatttagtggttatgaattctaccctaaaaaccctgatacagttatcgtagattctgaaattgttgcacaagcacctgtacgtttatttgcatcaggtatgagtgatggtttagcaacattaatcgaagttgaatctacacttcgtagacaagggcaaaacatgttccatggcaaacctacattagcaagtttagcaatcgctcaaaaatgtgaagaggttatttttgaatatggttacagtgcttatacttctgtagaaaaacatatcgtgacaccacaagtagatgctgtgattgaagccaatacattactttcaggtttaggatttgaaaacggcggattagcaggtgcacacgcaattcataatggattcacagctttagaaggagatatccaccacttaactcatggtgaaaaagtggcatacggtattttagtacaattagtacttgaaaatgcgccaactgaaaaattcatgaaatacaaaacattcttcgataatatcaatatgccaacaacattagaaggtcttcacattgaaaacacaagttatgaagaattagttcaagtaggtgaacgtgcattaacaccaaatgatacgtttgctaacttaagtgataaaatcactgctgatgaaatcgcagacgcaattttaactgttaatgatttatctaaaagtcagttcaactaa

SEQ ID NO: 5557 - DNA, 966 bp, Staphylococcus epidermidis
atgacattgaatctagcacaacgtgtgttaaaccgagaaccattaactaaagaagaagcattaaaaatttttgaaagttccgaactagatacatttgatttattaaatgaagcctatacagtgagaaaacattactacggtaaaaaagttaagcttaatatgatattaaatgctaaaagtggtatctgtgcagaagattgtgggtactgtgggcaatctgtaaaaatgaaagaaaagcaacgttatgcacttgttgaacaggaccaaattaaagaaggtgctcaagtggcaactgaaaatcaaatcggtacatactgtatcgttatgagtggtagaggacctagtaacagagaagtcgatcatatttgtgaaacagtagaagatattaaaaaggtacacccacaactaaagatttgtgcgtgcttaggattaacgaaagaagaacaagctaaaaaattaaagactgctggtgtcgatcgttataatcataatttaaatacgagtgaacgttatcacggtgaagtagtaactacacatacatatgaggatagagtgaatacagttgaaatgatgaaagataataatatttctccttgttcaggcgtgatatgtggtatgggagagtcgaatgaggacattattgacatggcatttgctttaagagccattgatgctgatagtattcctattaattttttacatcctattaaaggaactaaatttggtggattagatttattgtcaccaatgaaatgtttaagaattatagcgatgtttaggttaatcaatccaacaaaagaaattcgaattgcaggtggacgggaggtaaatctacgttcattacaaccactcgcattgaaagcggctaattcaatttttgtaggagattacttaattacaggtggtcaaccgaatgaggaagattatcgcatgattgaagatttagggtttgaaatcgacagttaa

SEQ ID NO: 5558 - DNA, 876 bp, Staphylococcus epidermidis
atgaataaattatcaaagtacattgcaatagctacattagcatcgacagttacaatttcagcaccaattcatacatatgcatgtgaatctcatactaaagataaccataatcaaacgacacaacatcaaaatgaccccaaccttggtgaacaaaatgtaatggctgtctcatggtatcaaaattctgccgaagcgaaggcactttatctacagggatacaatactgcaaaatatcagttagatgaacatattaaaaagaataaaggtaagaaaaaacttgctatagctttagacttagatgaaacagttcttgataattcaccatatcaaggatatgcttctatgcacgatacgtcttttccagaaggatggcatgaatgggttgctgcagcgaaggcaaaacctgtttatggcgccaaatcattcttaaaatatgctgacaaaaaaggtatcgatatttactatatttctgaccgtgataaagaaaaagattttaaagctacaaaggaaaatttaaaaaatattggactaccgcaagcgaaagataatcatattttactaaaagggaaaaatgataaaagtaaagcatcacgacgtcaacaagtcgaaaaaaatcataagttagtgatgttatttggtgacaatttgttagattttacagatcctaaaaagtctactgctaaagaacgtgagaaactcgtacagaagcatgcaaaagattttggcaaaaagtatattattttcccaaatccaatgtatggaagttgggaatcgacactttatcataatcaatacgaaataagtaagaatgaaaaggatgaactacgaaagtcatcaattaaacaatttaatcctaaaacgggtgaagtaaaataa

SEQ ID NO: 5559 - DNA, 426 bp, Staphylococcus epidermidis
atggaaataacaagtgttaatcatatttgtttttcagtgagtgatttaaatacctctatacaattttataaagatattttacatggtgacttattagtatcaggtagaacgacagcatatttaactattggtcatacttggattgcactgaatcaagaaaaaataataccaaggaatgaaataagtcattcctatacgcacattgctttctccatagatgaagaagattttcaacagattcaatggcttaaagagaatcaagtaaatattttaaaagggcgaccaagagacattaaagacaaaaaatcgatatattttacagatccggatgggcataaaattgaattacatactggaacattaaaagatagaatggaatattataaatgtgagaagacgcatatgcaattttacgatgagttttga

SEQ ID NO: 5560 - DNA, 225 bp, Staphylococcus epidermidis
atgaaagtgtataagttgaattatcaacaccataaagatattgttgatgataatgtattaacgatgttcgtaacagctgacaatcaagatgaagttgaagcgtttgcgaaaaaattacattacaagattgaacatttatctccattaactaaaaaggaatttgaagatgagaaagcgaaagattcacactatagacttgaacacgtggatcactatttaaattaa

SEQ ID NO: 5561 - DNA, 1002 bp, Staphylococcus epidermidis
atgaaaaatttacgtaacagaagctttttaactttattagacttttcacgacaagaggtagaatttttattaacactctccgaagatttgaagcgtgccaaatatatcggcactgaaaagcctatgctaaaaaataaaaatatcgcgcttctttttgaaaaagattccactagaacacgttgcgcattcgaagttgccgcacatgatcaaggtgcacacgtcacttatcttggacctacaggttctcaaatgggtaaaaaagaaactgctaaagatacagcacgtgtacttggtggtatgtatgatggtattgagtaccgaggtttctctcaacgtaccgtagaaacattagcgcaatattcaggtgttccggtatggaatggattaaccgatgaagatcaccctacacaagtgcttgctgactttttaactgctaaagaagtattgaaaaaagagtatgctgatatcaactttacttatgttggcgatggacgtaacaatgttgctaacgcattaatgcaaggtgctgccattatgggtatgaatttccatcttgtttgtcctaaagaactcaatccgacagaagaattattaaatcgttgcgaacgtattgcgacggaaaatggcggtaacattttaataacagatgatattgataaaggcgtgaaagattctgatgttatttatacagatgtttgggtatcaatgggcgaacctgatgaagtatggcaagaacgccttaaacttttaaaaccatatcaagttaaccaagcactattagaaaaaacaggcaatccaaatgttatttttgaacattgtttaccttctttccacaatgcagaaactaaaattggtcaacaaatttatgaaaaatatggcattagtgaaatggaagtcactgatgatgtcttcgaaagcaaagcttctgtagtattccaagaagctgagaatagaatgcatacaattaaagcggtcatggtagcaactttaggagaattctaa

SEQ ID NO: 5562 - DNA, 933 bp, Staphylococcus epidermidis; identical to SEQ ID NO: 3663

SEQ ID NO: 5563 - DNA, 1557 bp, Staphylococcus epidermidis
ttggaacaagcgatcaatgataataaaaagaaaaaacgttttaactttagaatgccaggtgcatttatgattctctttatcctaacagttgtcgcagttatagcaacttggataatccccgcgggtgcatactcaaaactttcatatgaaccttcatcccaagaattaaaaattgtcaatcctcatcatcaagtaaaaaaagttcctggaacacaaaaggagcttgatcgattaggagttaaaatcaaaatagaacaatttaaatctggtgcaattaataaacccgtttcaattcctaatacttacgaacgtctaaaacaacatccagctggtcttgatcaaattactagtagcatggttaaaggaaccatcgaagccgtcgatattatggtctttatacttgttctaggtggactgattggtattgttcaagcgagcgggtcctttgaatcaggattgttagcacttactcaaaaaaccaaaggccatgaatttatgttaattatgttcgtagcgattttaatgattctgggtggaacactatgtggcattgaagaggaagctgtagcgttctatcctgtactcgttccaatatttattgcgctcggatatgattctattgtctctgtcggtgcaattttcttagcaagctctgtgggcagtacattctcaacaatcaacccattctcagtcgtcattgcttctaatgcagcaggaacaacttttactgatggtctttattggagaataggcgcttgtatcatcggtgccatatttgttattagttatttgttctggtattgtaaaaaaattaaaaaagatcctaaatcctcttattcttatgaagacaaagcagcatttgaaaaacaatggtctgtgctacatgatgacggttcttctgagtttacattacgtaaaaagattattcttacgcttttcgtcttaccattccctattatggtttggggcgtcatgacacaaggatggtggttcccagtcatggcatctgcattcttaatctttaccattgtcatcatgtttattgctggaacaggacaatatggtttaggtgaaaaaggtactgtagatgcattcgttaatggagcttcaagtttagtaggtgtatctttaatcattggtttagctcgaggaattaacttagtattgaataaaggaatgatttctgacacaatcttgcacttttcatcatctatcgtgcaacatatgagtgggcctttatttatcattgttctgctctttatctttttctgtttaggatttatcgtgccatcatcatcaggattagcagtactatctatgcctatctttgcgccattagctgatacagtaggtataccaagatttgttattgttacaacatatcaattcggtcagtatgcaatgttgttcttagcgcctactggacttgtaatggcaacacttcaaatgttaaacatgcgttactcacactggttacgtttcgtatggcctgttgtcgcgtttgttttaatatttggtggaggcttattaattacacaagttttaatatactcataa

SEQ ID NO: 5564 - DNA, 768 bp, Staphylococcus epidermidis
atggctcatattacattaaattatttatctaaaactttaggaatgcatcaaacgattaatgtcattcttccagaagataaaagttactttgatacaaatgaaaatgcgaaaccattaaaaactatgttattgctacatggtttatcaagtgatacttcctcttatatgagatatacgagtatagaacgctacgcgaatacccaccaactagcagtggtgatgcctaatgccgatcatagtttctattcaaatatggcttatggacatagttattatgactatatactagaagtttatgattatgttcatcaaatattgccattatctaaaaagagagaagataattttatagcaggtcactctatgggaggttatggtgcaatcaaatttgcattaacgcaaagttatcgtttctcaaaagccgccatgctttcagcgccatatgatgtttctatgattggtcaatatcaatggtatgattttacgccagaagcgattgtaggtaatacgcaacatgtcgcggggacatcttttgatccatactatttagttgaacaagcaatagacaatggacaagcgttaccacaactatatattacttgtggaactgaagatgaactgtatcaaggtaatattgattttgtgaactatttagatgaaaaaggtattccatatcaatttaaaaaagcgccaggtaatcacgattatgcattttgggataaagcaatagaagatgtcattgaccgttttacatcatcacatatttaa

SEQ ID NO: 5565 - DNA, 648 bp, Staphylococcus epidermidis
atggaagggaatttaatacaacaactcgttcactactaccaaatgaactttggctacctatgggaattgtttgttaatcatttgttaatgtctgtttacggtgttttactagcatgtttagtgggcatacctcttggtatcatcattgcaagatttggtaaattatcaggtgtgattattactatcgcgaatattattcaaactgttccggttattgctatgttagcgatattaatgcttagtatgggactcggtatgaatacagtcatttttactgtgttcttatatgccttgcttcctattattaaaaatacgtatacaggaattaatgaagttgatccaaatattaaagatgctggaaaaggtatgggaatgacgcgtaaccaagtattaactatgattgagttacctctgtcactttcagttattataggtggtattcggattgcccttgttgtagctattggtgtcgtagctgtaggttcatttattggtgcgccaacattaggtgatattgtgattagaggtacaaatgcaactgatggaacactattcattctagcaggtgcaatacctatcgttatcattgtcatacttatagatgttttattacgtttattagagaaaaagctagatccagctacgtaa

SEQ ID NO: 5566 - DNA, 960 bp, Staphylococcus epidermidis
atgaagaattataaaaaatatctgattgttttagtattatgtctaacagtgttatctggatgtaacttacccggtttaaaaaatagtcattcagatgacgatgttagaatcacaagtttaggaacaagtgaatcacaaattatatcgcacatgctgagattacttattgaacatgatacaaaaggtgaaattaaacctaccttaattaataatttaggttcaagtacgattcaacataatgctgtcacaagtggccaagctaatatgtcaggtacgcgttatacaggcactgacttaacaggggcgttgaaagaagatccgattaaagatcctaaaaaggccatgaaagcgacacaagaaggatttaaaaagaaatacaatcaaacattcttcaattcgtatggtttcgaaaacacgtatgcattgatagtgacaaaagaaacagctaaaaaatatcatttagaaactgtttcagacttggaaaaacatgcgaaagatttaagagtaggtatggatagttcatggatggaccgcaaaggtgacggttatccagcatttaaaaaagaatatggttatagcttcggtactgtgagacctatgcaaattggcctagtttacgatgcacttagttctggcaaattagacgtagcagtaggttattctacagatgggcgtatttcagcatacgatttaaaagtgttggaagatgatcgtcgattcttcccaccatacgatgccagtccccttgcatcagatcaattgttaaaagagaagccagagctcaaaccgattgttaaaaaattagaaggtaagatatcaacagaacaaatgcaagaattaaattatcaagctgatggtaaaggaaaagagcctgcaacagttgcagaggacttcttgaaaaaacatcattattttgaagacgatgacaataaaaaagataaacagaaaggtggtcaataa

SEQ ID NO: 5567 - DNA, 636 bp, Staphylococcus epidermidis
atgataaagtttatttcggaacatagtggtatgttatttgcaaagacattcgaacatttgtacatatcgatagtggcattggttattgcaatgatcgtagcggttcctttaggcattttattatctaaaaaagaaaagctttcgaaagtgtcattgacgatagctggcgttttacaaacgatacctacattagcggtattagctttaatgattccattatttggcgtaggaaaaacacctgcaattatagcgttatttttatatgtattattaccaattttaaataatacgattataggcattcaaaatatagattccaaccttagagaagcaggacgtagtatgggaatgactaactttcaattgatgaaagatgttgagttgccactcgcattaccattaatacttagtggaattagactgtcttcggtctatgtcattagttgggcaacattggcaagttatgttggtgctggtggtttaggtgattttatctttaacggattagcgctatttgaaccgagtatgattattactgcaactattcttgtcactgctattgcacttattgtagattatgttttatcactgattgaaaaatgggttgtacctaaaggattaaaagtttccagataa

SEQ ID NO: 5568 - DNA, 1188 bp, Staphylococcus epidermidis
atgttaagtattaaaaacttatcaaaggtctatgcaggtggtaaaaaagctgtagataatatgaccatagacattgaatcaggagactttattgcatttattgggacaagtggtagcggtaaaacaactgcccttagaatgattaatcgtatgattgaatctacagagggagaaattaccattgacggtaaaaatatcaaagagcttaatccggttgagcttcgtcgcagtatcggttatgtcatacaacaaatcggcttaatgccacatatgacagtgaaagagaatattgttctcgtaccaaagttattaaaatggtcacaagagaaaaaggatgagaaagcgaaagaacttatacgcttagtagatttaccagaagaatatttagatcgatatccttcagaattatcaggtggtcaacaacaacgtattggtgttgtaagagcacttgcagctgaacaagatattattttaatggatgaaccgtttggtgcactcgatccaatcacaagagatacgttgcaagacttagtcaaaaaattacaacaacaattaggaaagacattcatttttgttacacatgatatggatgaagcaatcaaacttgcagataaaatatgtattatgacaaatggacaggtggttcaatatgacacgccagataatattttacgtagtccagcgaatgatttcgttaaagactttattggtcagaatcgcttaattcaagatagacctaatatccgtacagttaaagatgcgatgattaaacccgtgacagtacatgttgaccgttctcttaatgatgcggtgaatattatgagagagaaaagagtcgatacgatatttgttgtcggcaatgatgagcatttattgggttatttagatattgaagatattaacgaaggattaagacatcataaagaacttatagatacaatgcaacgagatatttatagagtacgtattgatagtaagttacaagattctgttcgtacaattcttaaacgtaatgtacgtaatgtacccgttgttgacagtgataataaaacattattaggccttgtcactcgagctaaccttgtagacattgtttatgacagtatttggggagagttagaatcggataacaatgataatcattctgggattgttgaacccgaatccataggagttgagacaccatga

SEQ ID NO: 5569 - DNA, 489 bp, Staphylococcus epidermidis
atgatgaatcaacagtatgtgtttcacacaaaagtgcatcgtgattgggtagatcataacgggcacctaaatgatgcaatgtataaccgaattttcagtgatacaacagatgattggttaggtcatttaggcttaactattaatgccattcaatcttatcaatataccgtattcaccttagaaaatcatgtcatgtttcttaatgaaatgaaagaaaatgaagatgtcattgttaaagtacatcttcacgattatgatagcaaacgattacatgtactaatggaaatgtttaatgcagatgatgatttatgtgcaacatatgaagtgatgctgatgggcattgatacgacttcaggaagaccttcagcctttccgaatgacattttgaataacattgaacactattataatattgagaatgtggagatgacatctcaatatataggtcatcgtattggcatcaagaaaaagccaaaaagcaaagagtaa

SEQ ID NO: 5570 - DNA, 966 bp, Staphylococcus epidermidis
atgaaattcgcagttgttggaacaggtgtaattggtagtggatggattactagaatgcttgcgcatggtcatgaagtgattgctactgatccaagtgaaggtgcatatgaacgcatgttgacacaagttaaacaaaattggccttacgcagagcaaatgggccttgctgaaaatgcatcaattcaaaacctaacatttacaccacatttagaagaagcggtcaaaaatgcggatcatattcaagaaaatgtaccagaagtagaagaaattaaagatgctgtattaaaagagattgatttttatgcgaaacctgaagcaacaattggttcaagtacatcaggaattatgccttcagaattacaagctaacttatcacatcctgaacgattagttgttgcccatccatttcatccggtatatattttgccattagtcgaaattgtgccaggtaagcaaacatctgaagaaaccacagttaaagccgaacagatttatgaaagtataggtatggatgttttacatgtgcgtcatgaaatagaaggacatattgcagatcgtcttatggaagcattatggcgtgaatcattgcacatagttaatgatggtattgcaacaacagaggaagttgataaggcgtttacccatgcagcaggtttacgttatgcacaatatggtccatttatgacgttccacttggcaggtggtgaaggtggtatgcgtcatatgttaaaacaatttgggccagctttaaaaaaaccttggacaaaactcatcgcgcctgaactgacagatgacttatatcataaagtagtaagtggtagtgaagcatcttctcaaggatatacaatgtctgaacttgatcaaaaaagaaacgaatttctaattaaagtgaaagaattagcagaacaatattggccaagtgatagtaaagcgatgaaaaagtctaacggagcggaattacaatga

SEQ ID NO: 5571 - DNA, 894 bp, Staphylococcus epidermidis
atgcaaaaagttgttttaacagcagctattactggcgctggagatacaatacaaaaaaatgagaacgtaccagttacaccacaagaacttgcagattcagcaattaaatgtgcacgagcaggagcaactgttgcacatattcatgtaagagatcctgaaactggaggagtaagtcatgatccagaactgtatgctgaaacagttagattaattagagaagctgatgaagatatcgtcattaatgtgacatctggtggcggtggagacttcattccaagtcttgaacatccagagacaggtggagaaggaacttggatacaaacaccggaagaacgttttaaacctattggtgacttgttaccagaaatgtgtacattagattgtggtagtgtcaacatgggagatgcaatttatttaagtccggcatcatggctacgtaaacaagcacaaatggttaaagatgcaggagtcaaaccagagcttgaatgttttgatacaggccatgtgagttttgccaaacaaatgatagaagaaggattaattgatggagaccctatgttccaattttgtttaggtattccttggggtgcagaaaatgatcctgaaacaatagaatatcttaaatcacgtataccagaaaatgcacattggtcagcatttggcattggtaagatgcaactgccaactgtaagaaaagttgcgcaacgtggaggaaatgttcgtgttggattagaagataatatttatttaagaaaaggtgtaaaagcaacgaatgaagcattggtagaagaggcaaaaagaattttagctgagctcgacattgagccacttacacctgctgaagcaagagaaaaatttaatcttagaaatcctcatggtaaaggaggcaaataa

SEQ ID NO: 5572 - DNA, 540 bp, Staphylococcus epidermidis
atgcctagaatttccaaaagacaattaatattagaatcggccgcagctattattaatgaaaaaggtgctgattatctcacgttggatgctgtagctcaaagggctggaataagtaaaggtggtttattttatcattttaaaagtaaagatgaactcatcaaagagctggttaactatgccaataatttgtacagagagaacgtgaaccaacatatcggtaatgaaaagaacaaaaaagggcaatggctcaacgcatttatagaagcgacaagagcacatcgtacggataatgcgcctattacttctggaatgttagcggcgcaagggactaatagaagtttattattaccattaaagacctcatatcaagaatggcaatatcaaattacccacgacgggttagatgaggtagatgcaaccattattcgtttagctgtcgatggtttatggttgtcggaaatattcggaattagtgctatagatgaagaaatgagagagaaagttattgaacgtttaaagatgcaaatagaaaaaaagtaa

SEQ ID NO: 5573 - DNA, 1362 bp, Staphylococcus epidermidis
atgatgaaaaataaactaacattaaaagagaatctatttatcggctcaatgctgtttggtctattttttggtgctggaaatctcatttttccaattcacttaggtcaaactgcggggtcaaatgtatggaccgccaatttaggatttcttatcacggctatcggactaccttttttaggaattatagcgataggtgtatctaaaacaaacggggtctttgaaatttcctcaaggataagtaaaatatatggttatttgttcacaattggcttatatcttgttataggtccgttttttgcgttgccaagacttgcgacgacgtcatttgaaatagcattttcaccatttatttcatctggtacggcccaaacgttgttgcctatttttagtattttattcttcggagtagcgtggttattttcgcgtaaaccttctaaaatattagactatattggaaaattcctaaatccggtctttctcatcttgcttggaattgttgttgtgcttgcatttatccgtcctatgggtggaattagtcatgcgccagtaagtgctgattatagcaatagcgtgttactcaaagggtttatcgatggatataatacactagacgctttggcatcattagcatttggtattatcattgttactacaattaaaaagttggggattactaatccgaatacaatcgctaaagaaactttaaaatcaggtacgattagtattatagctatgggcgttatttatactttattagctttaatgggtacgatgagtttaggtcgttttaaagtaagtgaaaatggtggtattgcgcttgctcagattgcacaacattatttaggggattatggaattattattttgtcactaatcatcattgtggcatgtctgaaaacagcaataggattgatcacagccttttcggaaacatttacagagttattccctaaatctaactatctttggttagctactggggtgagtatattagcttgtatatttgctaatgtaggtttaacaaaaattattaagtattcaacaccagtattgatgttcatttatcctttagcgattactttaattttattagcattacttagcccattatttaaacattctaagattgtctatcgatttacaacattatttacaatggtggcggcatttgtagatggtgtgaaatcaagtccagagttctttgttaatacaaaatttgcacaaacaatcattggatttggagaaaattatctcccattctttaacattggtatgggatggattgttccagcacttattggtttcattattggtattattgtatactttatgactgctaaaaaatcgtcccacgtacaataa

SEQ ID NO: 5574 - DNA, 1128 bp, Staphylococcus epidermidis
atgaataataaatatgaacctttatttaaatctttaacactacctaatggtgttgaagtaagaaatcgttttgttttagctcctcttacacatacttcatcaaatgatgatggaacaatttcagatatagaattaccttacattgagaaacgttctaaagatgttgggattgcaattaatgcagcaagtaatgttaatgatgtaggcaaagcatttcctggtcaaccttctgttgcacatgactcagatatcgaagggttaaaagaacttgctcaagttatgaagaaaaatggtgcgaaagcaatagtccaaattcatcatggaggtgctcaagctttaccagagttaacacctgatggagatgttgttgcaccaagtgccatttctcttaaaagttttggtcagcaaaaagaacatgatactcgtgagatgactgctgaagaaattgaacaaactattagagactttggtgaagcaactagaagagcaattgaagcaggttttgatggcgttgaaattcatggcgcaaaccattatcttattcaccaatttgtttctccttactataatagaagaaatgatgtttgggctgataactataaattccctgttgctgttatagatgaagttgttaaagctaaaaaagctcatgcaaatgatgattttattattggttacagattgtcacctgaagaagcggaatcaccaggtatttcaatggagataactgaagaattaattcaccaaatcgcaaataaaccacttgattatattcatgtgtcattaatggatgttaactcagttacgcgagaaggtaaatataaaggtgaaaatcgcttggaacttattcatcaatggataaatggacgtatgccgcttattggtataggttctgtctttacagctgaagatgcactaaatgctgttgaaaacattggagttgaatttgttgcattaggtcgtgaaattctacttgattatgattttgttgctaaaataaaagaaggtcgagaagacgaaattataaatgcttttgatcctaatcgtgaagaccaacattatctaacaccaaatctttgggaacagtttaatcaaggattctatccattacctcgaaaagacaaataa

SEQ ID NO: 5575 - DNA, 381 bp, Staphylococcus epidermidis; identical to SEQ ID NO: 2740

SEQ ID NO: 5576 - DNA, 594 bp, Staphylococcus epidermidis
atgacgaactatcctcagttaaataaagagattcaagataacgaaattaaagtagttatgcatacaaataaaggtgacatgacatttaaattatttcccgacattgctccaaagacagttgaaaactttgtgacgcattcaaaaaatggatactacgatggtgtaacgttccaccgtgttatcaatgattttatggtacaaggtggggacccaactgcaactggtatgggcggagaaagtatttatggtagtgcttttgaagatgaattttctctagaagcttttaacctttacggtgcattatcaatggctaatgcaggtcctaatacaaatggatctcaattctttattgtccaaatgaaggaagtgcctgaaaatatgttaagtcaattagcagatggtggatggcctcaacctattgtagaagcatacggtgaaaaaggtggtacgccttggttagatcaaaaacatacagtatttggtcaacttattgagggtgaatcaactttagaagatattgcaaatactaaagttggtgctcaagacaaacctgtttatgatgtagtcattgaatcgatagatgtagaagaataa

SEQ ID NO: 5577 - DNA, 381 bp, Staphylococcus epidermidis
atgttatatcgattttctcacaagactggtgtttatggtgtaagtgtcaaagaggaaactggaaatcaaatactcgtacaaattgaacaagtaattaaacatcccaaacaaggtgatttacaccaccccaatgaaacagaaggcgtcttttttcatgaacgtaaagctttaagccattttgagaaacgttacgctacaccttctcaacttcgtgattttaatgtcgaggccatgccttatgaagactcacttcaacatgctattacacatcttgagaatcaactaaaaaaagagaagacagagtattctcgattgtctttaaataatttaaatcgtttaaaagaagattacgctattcaatataaaagacacttcgactaa

SEQ ID NO: 5578 - DNA, 2406 bp, Staphylococcus epidermidis
gtgagtttgttacatattgcggtactattaccgttaatatttgcactcattattccattcctataccggttcgttaaacgtatacatttaggatggtttgtattacctgttcctattgtcttatttatatatttcatatcattgatttcaatgacgatgtcaggtaataacgtaatgaaaaacttaaattggatgccacatattggaatgaattttaatttatatgtggatggtctcggattattattcagtttgcttatcactggcataggaagtctagtggttttatattctatcggatatttaagcaaatcagaacaactcgggaatttttactgttatttattactatttatgggtgcaatgttaggagttgtactctctgataattttattattttatatttattttgggagttaacttctttctctagctttttattaatctctttctggagagagaaaaaagcttcaatttatggtgctcaaaaatctttaatcattaccgtattaggtggcttgagcatgctaggtggtatcattttactttccctagctactgatacttttagtattcaggctatgatttcaaaagcaagtgacattcaaaatagtcctttctttatcttagtaatgatactttttatgattggtgcatttacaaaatctgcacaagtgcctttttatatttggttaccagatgctatggaggcgcctacgccagtgagtgcataccttcactctgcaacgatggtaaaagcaggactatatctaatcgcaagaatcacacctatatttgcaatatccgaaggttgggtatggacaattacacttgttggtttaatcaccctattttgggcatcactcaatgcaacaaaacaacatgatttaaaaggtattttagctttctcaactgtgtctcaactagggatgattatgtctatgcttggtattggtgctgtaagttatcattatcaaggcgctaatagtcaactttacgttgctggatttgttgctgccatatttcatttaattaatcatgccacatttaaaggtgcactatttatgattacaggtggtattgatcattcaactggtacacgtgatgttaaaaagttgggcggtttacttacaatcatgcctatctcattcacgcttacagttattacaacattaagtatggctggtgttccgccttttaacggctttttatcaaaagagaaattcttagagtcgatgattaatgttacacatttaaatttaatgagtttaaatactttaggtattcttttaccaatcattgccgttattggtagtattttcacatttgtatattcaattaaatttatattgcatatattctttggttcttataaacctgaagctctgccaaaacaagcgcatgaatcttcaatgttaatgcttatttcacctatcattttaacatcactagttatagtattcggtttattcccaagtatattaacgcaatctattatagagccggcatctgaagcagttagtcaaacatcaaatataactgctgagttccatttattccatggtataactccagcattcctatcaacaataggtatttatattattggtattttattattaatttcatttagttattgggttcgtttattacaagcacatccatatcagttaacgttgaatcattggtatgacacttcaggccaacgtattccaggatattccgaaaatataacaaatagttatgttacaggtttttctagaaataatttggtgattatcttaggtattctcattgctttaacttttgttacagtcatcagtgtacccttcagtattgactttaaaaacgtgagtcatttacgcgtatttgaaggtgcaacagtattgtttttactgattgcttcaactttcattatatttgcaaaatcacgtttgtttagcattatcatgttaagcgctgtgggttacgctatatcagtattatttattttctttaaagcgcccgacttagcattaacacaatttgtagtggaatctatttctacagcattattcttactatgcttttatcacctacctaatttaaatcgctacaatgaaaaaccaacctttaaactgacaaatgctgtgatttcaattggagtgggattatcagtgattattttaggattaattggctatggtaatagacactttgactctattactaaattctatcaagaacatgtttttgatttagcacatggtaaaaatatggtaaatgtcatcctcgtagatttccgtggtatggatactttattcgagtcatctgtactaggtattgcaggtttaggcgtatatacaatgattaaattacgattaaaacagaaaaatcaatcaagtgaggtgaatgaccatgaatag

SEQ ID NO: 5579 - DNA, 429 bp, Staphylococcus epidermidis
atgaatagacaacaaaataaccttatctttcaatacgctgccgtgattattttcttcatggtcattgtgtttggcttttcattatttttagctggacattatacacctggtggcggtttcgttggtggtttgcttttcgctagtgcattattagttattacaattgcatatgatgtaaaaacgatgcgaaagatttttcctttagattttaaaatcttaattggtattggtttattattttgcgtgggtacaccattaacaagttggttcatgtctaaaaacttttttacacatgtcacctttgacatccctttgcctttacttgaacctatgcacatgacgacagcgatgttttttgattttggtgttttatgtgcagttgtaggaactattatgactataattatttcgattggagagaacgaatag

SEQ ID NO: 5580 - DNA, 348 bp, Staphylococcus epidermidis
gtggaaattatcatgatctttgttagtggtattctcacatctataagtgtctatctcgttttgtctaaaagtttgatacgtatcattatggggactacactactaactcatgctgcaaatttatttttaattactatgggaggtttaaagcacggaactgttccaatatttgaaaaaggaacatcaagctatgttgaccctatcccccaagcattgattttaacagctatcgttatcgcctttgctacaacagctttcttcctagttcttgcatttagaacatataaagaactaggcactgataacgttgagctaatgaaaggagcgccagaagatgatagagagtaa

SEQ ID NO: 5581 - DNA, 1497 bp, Staphylococcus epidermidis
atgatagagagtaacttgcttgttttaactttaatcatacctatcctaactgcaattttactcatatttattggaaagcgcccaataataaaaagatatgttgcacttgtcggtacattgctaacattggtcgttgcattgattaacttaaagaatgtgctacgagatggaccaatcaaggttgaactgggctcttggaaagccccatacagcattgtatttgtagtcgatatttttagcgctctactcatcatcacaagtattattattaccatattagtcattttatactcatatcgttctatcggtttagatagagaacgtcattattattatttctctatcatgtttatgttgattggtattattggctcatttacaacaggagatattttcaacttgtttgtgttctttgaagtctttttaatgtcttcatattgtttactcgttattggtactactaaaatacaattacaagaaacaattaagtatattttagtcaatgttgtttcatcatctttctttgtcatgggtgttgcagttttatattcagtagtaggaactttaaatctcgctcatattagtgaaagattgtcacaactttctgtacacgacagcggcttagtcaatattgtttttattttatttatctttgtctttgccactaaagcaggcgtttttcctatgtacgtatggctacctggtgcttattatgcccctccagtagcgatcatcacgttctttggtgcactattgactaaagtgggtgtatacgcaattgcgagaactctaagtttattctttaataatacagtaagcttttctcattatgtcatccttttcttagcattacttacaattatttttggatgtataggtgcgatagcttactatgatacgaagaaaatcatcctttacaatattatgattgcagtaggtgtcatattagttggtattgctatgatgaacgaatcaggcatgactggtgcaatatattacacactacatgatatgttagttaaagcttcattgttcttactcattggcgtcatgtacaaaatcactaaaacgactgacttacgtcattttggtggcttgataaaagggtatcctattctaggttggacattctttattgcagcgctaagcttagcgggtataccaccttttagtggtttctacggtaaattctatattgttcgagcgacctttgaaaaaggattttatctaagtggtatcattgtacttttatcaagtttaatcgtgttatattcagtcatacgtattttcttaaaaggatttttcggtgaagttgaaggatatactttatctaaaaaggtaaatgttaaatatctaacaactatcgctgttgcatctacagttattactgtaatctttggattatctgcagacacgttattcccaatcatcaaagatggcgctgaaacgtttgtcgatccaagtcaatatattcatagtgtgttaggaggtaaatag

SEQ ID NO: 5582 - DNA, 480 bp, Staphylococcus epidermidis; identical to SEQ ID NO: 2733

SEQ ID NO: 5583 - DNA, 294 bp, Staphylococcus epidermidis; identical to SEQ ID NO: 2732

SEQ ID NO: 5584 - DNA, 357 bp, Staphylococcus epidermidis; identical to SEQ ID NO: 2731

SEQ ID NO: 5585 - DNA, 1155 bp, Staphylococcus epidermidis
atgcactggacaattattggtggtggcttacaaggaaccaccattgcacttaaattaaaaaatgaaggactaaaaaatgaggcgcttactatcatagatccttactcctcattatgtgagcgatttaatatttatacacaacgtattagtatgccatacttaagatcgcctttcgttcatcatattcatcctaaaccttttcatctcaaacaatatgctagatatcatcagtatacttcagcttattacggcccgtataaacgtcctcaaagagatatgtttatgcatcatgttcatgatttgatacatcaatttaaacttaatgattgtcatatacaaggtaaagtcgaagctattaataaatcaagaggtaaatggtgtataaaactatcaactggcgataaaatgattaccgattgtgttgtgatagcaaatggctatacgcaaacgccattcatacctgaaattttcagaaataaagcgaatgtaaaacacatatttgctgataattatcatgcctctttagataaagatactcaacatgttgttggttcaggtatatctgctgcccacctcactttaaaattattaaatgaacacaatcaccaacttgttcatttatggatgaataaagatattgagatacatgattttgatgctgaccctggttggttaggacctaagaaattgaactatcttgcatctatatcctcatcagatgcaagaatgaagttaattgaagacgaacgtcatagtggttcaatgcctatggaattatttttaaggttaaagaaatatgtgcaaagtggtcgactcgtcatacatacgagtcaaattgatgatgtaactgaatcctatattatctccgctggaaaatattttgaatataagcatattttgttagctactggattttataatcaattgttaacacaaccactcataaaaaatcttattcaaaacgaacaagcaccacttaatcaatcaggttatccttctttgtcaaacgaactagaatggttaaatcaattattcgtagctggtggactcgctgatttagaactaggtccttttgcaagaaatataatgggcggtaaagaaagcgctgaacgcataagtaaagcatataaacgtttaaataagaaaatctcttaa

SEQ ID NO: 5586 - DNA, 375 bp, Staphylococcus epidermidis
atgaccaatcttttagaaacatttgaaatgaagattgaacaaaaagaagatggtaaagtagtagtgtctatgcctgtgacagataaagtaaagcaaccctttggctatttacatggtggtgcaagtttagctttaggtgaaacagcatgttcgataggtgctgctcatttgattgatacgcagcaatttattccactaggtttagaaatgaatgcaaatcatattcgctcaactcgacaaggacatgtgagagcatttgcttctttaatacatcaaggaaaaacaacacaagtttggaatattgatatcaaagatgaccatgaccaattaatcagtgtcatgcgtggtacgatagctattaaacctattcaataa

SEQ ID NO: 5587 - DNA, 1317 bp, Staphylococcus epidermidis; identical to SEQ ID NO: 2728

SEQ ID NO: 5588 - DNA, 1482 bp, Staphylococcus epidermidis
atgcaattttttattaatcaagatacgccaacatcaattgaaacgattgtggtgggtgtgccagatcacctcaaccaattaggtgagataaaatatcataagacgttaattaaagaacgattagaaacattaaaacaatatcatgtcatcaatagctcaatcggcaaaatatcatcaacgcttatctacattgatgaaaagcctaaaagattattaactgtaggactaggaaacttaaaaatcttatcatatcaacgtttattaaaagtttggggtcagttgtttcaatatttaaaagacgttcatgtcacggattgtgaattattgttagatactttcaaatctaaacatggtaacattgttgaaatttgtcaaactttaggtttacaaagtgcacaatctatctttgaatttgaccattataaatcggataaaaagcctccatatcaaggtagagtctatatacaaacgacagagcataatatagaaacgaagattaacgaaggccaacaattgggtgaatctataaattatgctcgtgaactaagtcaaatgcctccgaatattttaacaccccaatattttgccgaagaaataaaaaaacatttcgaagggagttccgttagtgtagatatcaaagatcaccgacaaattatagatgaaggatttggattaatacatgcagtaggtaaaggttctaatcatggtccgagattaattacggtatcatactatggtgcagaagctgatgaaccacctatttcattagtgggtaagggtattacatatgattccggtggatatagtattaagtctaagataggtatgcaaactatgaaatatgatatgtgcggtgcggccaatgttattggtatgattgatgtgatctctaagcaaaacctacctgtaaatattgtaggaataatcgcttcagctgaaaatatgattggtgaatcttccatgaaaccagatgatgtatttactgcgcttaatggggaaacagtagaaatgttgaatagtgatgctgaaggtagaatggttttaggtgacgcagtattctatgcaacacaatttaaaccacaactaattcttgattttgctacattaacgggtgcagcgattgtagctttaggtgatgacaaggcggctgctttccaatctcatgctgaaaatgaacttaaaaacttattaacagttgcacgtcatgtagacgaaaaagtattcgaattacctattacagagactgaaagacatttaattaaacaatcagatgtagcagatttagtcaatcatacgaacggtcaaggaaaagcattgtttgcagcagcatttatttcgcattttagtggtgacatcccacacattcactttgatatcgcgggccctgcaacaactaaaagtgctacatataaagggccaaagggtccgacaggttacatgatacctacagttgtagagtggttacaacaaaaatataaataa

SEQ ID NO: 5589 - DNA, 1287 bp, Staphylococcus epidermidis
ttggcttgtcatatgtttatagcctttatctacattgttggttggttaaaatattatgaaagcttaggtgaattagagatggctcaagatcgtaagaaagtgctcgtattaggtgcaggttatgctggtttacaaactgtaactaaattacaaaaagaactttctgctgatgcagcggaaattactttaattaataagaatgaatatcattatgaatcaacttggttgcatgaagcttctgccggtacgattaattatgaagatttattgtatcctgttgagaaaactgtcaacaaaaataaagtgaattttgttgttgctgaggtaacaaaaattgatcgtaatgctaaacgtgtagaaactgataagggtgtttatgactttgatatcttagttgttgcactaggttttgttagcgaaacatttggtattgatggtatgaaagaacatgctttccaaattgagaacgttttaacttctcgtaagttgtctcgtcacattgaagataagttcgcaaattatgctgcttctaaagaaaaagatgataaagatttatctattttagttgggggagctggatttacaggaattgaatttctaggtgaattaactgatagaattcctgaattatgcagtaaatatggtgttgatcaaagtaaagtgaagttaacatgtgttgaagcagcacctaaaatgttaccgatgttctcagacgacttagttagttatgcagtaaaatatttagaagaccgtggagtagaattcaaaattgcaacacctattgtcgcttgtaatgaaaaaggtttcgttgttgaagtcaatggagaaaaacaacaattagaagccggaacttctgtatggactgctggagtgcgtggaagtcatttaatggaagaatcatttgaaggtgttaaacgtggacgtattatcaataaacaagatttaacaattgaaggtcataatgacatctttgttataggagattgttcagcgtttattccagctggtgaagagcgtccattaccaacaacagctcaaattgctatgcaacaaggtgagcatactgctagcaacattaaacgtttattaaatggtgaatcaacacaagatttccaatatgttaaccgtggaactgtatgttcattaggtgctaatgatggtgttggaattgtatatggtagagatatcgctggtaaaaaagcagcattcttgaagaaagttattgatactcgtgcgatttacaaacttggtggcataggattagcctttaaaaaaggaaaattttaa

SEQ ID NO: 5590 - DNA, 360 bp, Staphylococcus epidermidis
atgccaacagtcattttaactgaagcggcagcatttgaagttagagacatgttaaaaaataacgacatgtctgatggttatttaaaaattaaagtaaatggtggaggatgcacaggattaacttatggcatgtcagccgaagcagaacctggtgaaaatgatgaaattctcgaatactatggtttgaaagttctagtagaccgaaatgatgctcctgtattaaatggaacaacaattgattttaaacagtcacttatgggtggaggatttcaaataaataatcctaatgctattgcctcatgtggttgtggaagttcatttaaaacagctaaagtcgctggaaatccagagcaatgttaa

SEQ ID NO: 5591 - DNA, 213 bp, Staphylococcus epidermidis
atggccaaaggtagtgatgttgtatttgaaaaattagaaaatgatcctaacatagatgtccttgaatacggttgtctacaaaattgtggtctatgcgcaagtagcttgtatgcccttgtagatggtgatattgttgaaggtaacacaccagacgatttattaaaaaacatatatcaacatatcgaagataatgatataacgaatttgttataa

SEQ ID NO: 5592 - DNA, 1065 bp, Staphylococcus epidermidis
atgaaaaacttagtattactaggcgggggctatggtaatatgcgaattatgtcgcgcattttacctcattcaattcctgagggatatcacttaactttaatcgaccgcatgccattccacggtttaaaacctgaattttatgcacttgcagcaggaactaaatctgacaaagaggtgcgaatccaatttccagatagcagtcaaattaatacggtttatggggaaatcagtgatatagatttggacgaacaaatgataacagttggaaattcaaaaatagattatgacgaacttatcattggtctagggtgtgaggataaatatcataatgtccctggtgctgaagcatatacacatagcattcaaacattatctaaatcgcgtgaaacataccatagaattagcgagttacctaaaggggcacgtgtaggtatcgttggggcaggtttaagtggcattgaattagcgagcgagctacgtgaaagtcgatcagacttggaaattttgttatatgatagagggcctcgaattttaaggaattttccagagaaactgagtaaatacatatctaattggttttctaaacacaatgttactgtagtacctaattcagtcatcgacagagtagaacccggaaaaatttataataatggtaaaccagaaaatattgatttagtcgtttggacagcaggcatacaacctgttgaaattgtgcgtaatcttcctattgatatgagtaccactggacgcgtgattattaatcagtaccatcaaatcccaacctatagaaatgtttatgtcgtaggtgactgtgctaatttaccacatgcacccagtgctcaactagcagaactacaaggtgaacagattgctgaggtgttgaagaagcaatggaataacgaaccacttccagataaaatgcctgaaattaaagtacaaggctttttaggctctttaggtgacaaacaaggttttgcttatatcatggatcgaacagttaccggacgattagcctctattctaaaatcaggtgttctgtggcgctataaatatcataatggttaa

SEQ ID NO: 5593 - DNA, 321 bp, Staphylococcus epidermidis; identical to SEQ ID NO: 2722

SEQ ID NO: 5594 - DNA, 243 bp, Staphylococcus epidermidis; identical to SEQ ID NO: 2721

SEQ ID NO: 5595 - DNA, 1239 bp, Staphylococcus epidermidis
atgaaactgaaaccattcttacccattataatcagtggcgtcatatttattatatttttatttttaccagcaagttggtttactggtcttgtgacaaataagacgttagctgataatagaatttctttaactgatcaagttttaaaaggcacgctcattcaaaataaattattcgagtcaaataagtattacccgatttatggttcaagtgaactggaaaaggatgatccttttaatccaggtatagcgctaaataaacaaaatgctagtaaagaaacgttccttattggtgcgggaggttcgacagatttaattaatgcagttgaacttgcagcgcaatacgacaatttaaaaggaaagaaatttacatttattatttctccacagtggtttacgaatcatggattaacaaatcaaaactttgatgctcgtatgtcacaaagtcaaatcaatcagatgtttaatcaaaaagatatgccagctaatttgaagaaacggtatgcacaaagattgttacagtttccgcatgcacacaataagtcataccttagagaacaagcaaaacatcctaatgatgtctctggaaactacatttcttcatttaaagaaaatcaattaactaagattgaagctattaaatcattattctcattcactaagccacctctagcagaagtaaaacctgcaacaagagaacatgcttcatgggatgagatgaaacataaagctgccgatataggcaaagcaaatactcaatctaataaatatgatataagagatccatattggaaattgataaaacaaaacaagcgtaaaatcaaaagggattatgagttcaacattaactcacccgagttccaagatttaaaattattagtgcaaacgctacatgctgctggagctgatgtacaatatgttagtataccttcaaatggaagatggtatgatcatataggtatcaaaaaagatagacgtgaagctgtatataaaaagattcactcaactgtagttgataatggtgggaaaatttatgatttgacaaacaaggactatgaaaagtacgtaattagtgatgctgttcatattggatggaaaggttgggtttacgtcgaccagcaaattgcaagacatatggatggtcatgcgcctaaaaatcatgaagtcgattattctaaaaataaaccaccgcacaaacatcacaacgatcgtcaagatgatcaacatcaaggcaacaaataa

SEQ ID NO: 5596 - DNA, 237 bp, Staphylococcus epidermidis; identical to SEQ ID NO: 2719

SEQ ID NO: 5597 - DNA, 1215 bp, Staphylococcus epidermidis
atgataccttatggcacatttacatttttcttaattgcatttatcgttcttatacctgtgataatacttggattcttaggtaagcgaagttatatttacaatggtataagtacagcaatcatgattgtcattatattcgcatcagataaacataatctgttagggcaaaaatatctaagtgcacaacttttttgttttattatttatgtcatatggcaggttgccctcattatgtactactatcaatcacgacaaaagaagaatacttttacaaaatttgtaacaattatggtgttgtctattctccctctagcaattgttaaaatattacagagttcatggttaggtggacatcaaattcacttccatgaaagtaaattaattgaatttgtaggatttttaggtatctcatacgtcactttcaaaagtgttcaattaattatggaaattcgtgatggttctattaaagaaatcaaggtagggaaattgatacaattcatttcattcttcccaaccatttcatctggacctattgatagatataaacgttttgtgaaagatgataagaaagtacctagcggtgcagagtacagagaacttgttgtcaaagcaattcatatgattatgttagggttcttatataaatatattattgcgtatttgattcagacttacgctgttaatcctttacaacttaacctgcatggatttactcatatgtggctatatatgtacgcttatagcttatatttattctttgattttgctggatacagtttattcgcaattgcagtgagttatttatatggtattaagacaccgcctaactttaaacaaccgtttaaagccaaaaatattaaagatttctggaatagatggcatatgactttatctttctggtttagagattgtatctatatgagatctttattctacatgtcacgtaagaagttattaaaaagtcaatttgcaatgtcaaatgtagcgttctttttaaactttttcataatgggagtatggcatggtcttgaagtatattacattgtatatggattataccacgcagcgttattcataggttatggttattatgagcgttggcgtaaaaagcatccaccacgttggcaaaatggtttcactacagctataagtattatcattaccttccattttgtaactttcggattcttaattttctcaggcaaatttatttaa

SEQ ID NO: 5598 - DNA, 1458 bp, Staphylococcus epidermidis; identical to SEQ ID NO: 2717

SEQ ID NO: 5599 - DNA, 147 bp, Staphylococcus epidermidis; identical to SEQ ID NO: 2716

SEQ ID NO: 5600 - DNA, 972 bp, Staphylococcus epidermidis
atgaataaaatactcgtaacacgtcaaattccacaacactacgtagagcaacttaaaaaaataggacaagttgtcatgtgggaacacgatttaacgcctatgtctagagaatcatttcttgctaacgttgaagatgcaacagcatgtgtgatcacattgagtgagcatattgatgaagaagtatttctcagggcacaacaacttaaagtgattgctaatatggcagtaggttttgacaatattgatatttcattagcaaagaaacatggtgtagttgttaccaatacacctcacgtactgacagagacaactgccgaactagggtttacattgatgcttactgtagctcgtagaatcattgaagcgacatcatatattcaagagggtaagtggaaaagttggggcccctacttattatcaggaaaagatgtatacggtgcaactgttggtatttttggaatgggtgatataggaaaagcgtttgcacgtcgcttacaagggtttgatgcacggataatatatcacaatcgcaaacgtgacttaaatgctgaaagagatttaaatgctacatatgtaacgtttaaatctttacttgaacaaagtgattttattatttgcacagcacctttaactaaggaaactgagaatcaatttgatgctcgagcttttaataaaatgaaaaatgatgctgtcttcattaatattggaagaggtgcaattgtagatgaggaagcacttttagaagcgttaaaaaatcatgagatacaagcctgtggtttagatgttatgcgtcaagaacctattcaacctaatcatccaatactgaaattacctaacgctgtggtgttacctcacataggaagtgcatcccaagtcactagaaatcgaatggtacaactttgtatagataatattaaagcagtattaaataatgatgcaccaataacccctgtaacctctttacacttttaa

SEQ ID NO: 5601 - DNA, 780 bp, Staphylococcus epidermidis
gtgaaacattatcaggcatacttaatcgatttagatgggacaatgtataaaggcacagatgaaattgacggtgccgcacaatttatagattatttaaataataatcatatcccgcatctatatgtaactaataattctacaaagacacctgttcaagttactgagaagttacgtgagatgcatattgatgctaaaccagatgaagttgtaacttcagcattggcaacagcggattatatctctgaacagcatccaaatgcaactgtatatatgattggtggtcatggactcaaaactgcactaactgatgcaggactttcaataaagaatgatgaacatgttgattatgtagttattggtttagatgaaaaggtaacatatgaaaaattatcaatcgcaacattagctgtacgtaatggagctaaatttatatctacaaatccagatgtatccatacctaaagagagaggttttttacctggtaatggtgctattacgagtgtggtcagtgtctctactggcattcagccagagtttattggtaaacctgaaccaattataatgtctaagtctttagatatacttggattagaaaaatcagaagttgcaatggttggtgatttatatgacacagacattatgtcaggtattaacgtgggtattgatacgatacatgttcaaactggtgtgagtacgtatgaagatattcaatctaaagaaataccgcctacgtattcatttaaagatttaaatgtagctattgcagaattagaaaaataa

SEQ ID NO: 5602 - DNA, 435 bp, Staphylococcus epidermidis; identical to SEQ ID NO: 2713

SEQ ID NO: 5603 - DNA, 267 bp, Staphylococcus epidermidis; identical to SEQ ID NO: 2712

SEQ ID NO: 5604 - DNA, 390 bp, Staphylococcus epidermidis; identical to SEQ ID NO: 2711

SEQ ID NO: 5605 - DNA, 915 bp, Staphylococcus epidermidis; identical to SEQ ID NO: 2710

SEQ ID NO: 5606 - DNA, 1320 bp, Staphylococcus epidermidis
atggaattaacaatatatcacacgaatgatattcatagtcatttaaatgaatatgctcgtattcaagcttatatggcaaaacatagaccgcaacttgaacatccctcactctatatagatataggtgaccatgttgatttatcagcacctgtgacagaagctacggtaggacaaaaaaatatagaacttttaaatgaagcacattgtgatattgcaaccattggaaataatgaaggaatgacaatttctcatgatgctttacaaaatctatataacgacgcggattttaaagtgatttgcacgaatgtcatagatgaagagggacatcttccacatcatattacctcttcgtatatcaaagaaataaaaggaacacgtattttatttgttgcagcaacggcaccgttcacacctttttatcgagcactggattggattgttactgacccattagcggcaatcaaagatgaaatcaatgcacatcaaggtgaatatgattttttaatggttatgagccatgtcggtatcttttttgatgaaaagttatgccaagagattccggaaatagatgttatctttggtagtcatacgcatcatcattttgaacatggagaaataaacaatggtgttttgatggcagctgccggaaaatatggctattatttaggtgaagttaatattacgattgaaaatggaaaaatcgttgataaaatcgccaaaattcatcctattgaaacacttcccttggtcgagacacattttgaagaagaaggaagagcacttctaagtaaaccagtagttaatcatcatgtgaacttagtcaaaagaacagatgttgttacaagaacatcgtatttactggctgaaagtgtatatgagttttcaagggctgattgtgcaatcgtaaatgctggacttatagttaatggcattgaagctgataaagtgacggaatatgatatacatcgcatgttaccccatccaatcaatattgtaagagttcgattaactggtaaacaattaaagcaagtgattcaaaaaagccaaaagcaagaatatatgcacgaacatgcacaaggtcttggttttagaggggatatatttggaggatatattttatataatctaggctttattgagtcagaagaccgttattttataggcgatgaagagattcaaaatgataaacaatatacgttaggtactgttgatatgtatacatttggaagatatttcccattgctaaaggggttatctacagattatattatgcctgaatttttacgtgatatttttaaagagaaattactaaaattataa

SEQ ID NO: 5607 - DNA, 828 bp, Staphylococcus epidermidis
atgttattaacaattattctattaatattaatagggggattatcagcgattttaggatctatcgttggtattggtggtggaatcatcatcgtccccacacttgtttatttaggcgttaaccatcatcttctacatggtattacgacgcaaattgcaataggtacttcttcagttattctgattgttactggattatcttcctcattaggatatttaaaaaccaaacaagtagatataaaaaatggttcgatatttctatttggactactacctggatctttggttggttcttttttaagtagataccttacacttgattcgtttaacttatactttggcgtgtttatgatatttgtgtcgatattactgatgattcgtcacaaaatcaaaccttttaaaatttttgacaaacctaaatatgcgcgtacatatgttgatgctgaagggaaaacataccgttatagtgtaccacccctgtttgcttttataacaacgttatttattgggctattaacagggctgtttggcataggtggaggtgcattgatgacccctcttatgctcatcgtctttagatttccaccacatgttgcagtaggcacaagtatgatgatgattttcttttcaagtgtgatgagttcaatagggcacatctttcaaggacatgtggcttggggctattctatcattctcattatttcaagtgttataggtgcacaaataggtgtgagggtcaatcgatctatgaaatccgacacagttgtaatgttattgagaacagtaatgcttattattggtatatatttaatcattaaatcttttatttaa

SEQ ID NO: 5608 - DNA, 849 bp, Staphylococcus epidermidis; identical to SEQ ID NO: 2707

SEQ ID NO: 5609 - DNA, 1026 bp, Staphylococcus epidermidis
atgattattgcaattatactattaatatttgtttcatttttcttttcaggtagtgagacagcattaacagccgcgaatcgcactaagtttcaaactgaagctaaaaagggtgatcgtaaggcgcaaggtttaacaaagttattagataaaccaagtgaatttatcactactatattaatcggtaacaatgtagcgaatattattttacctacactcgtgacaatcttagcgattgatattggagtgaatgtgggaatagcatcagcaattgtaacaattgtgattatacttatttctgaagtgattcctaaatcaattgctgcaacatttcctgataaaatttcaaaacttgtgtatcctatcattcatatatgtgttattgtactcaagcccattacaatcttattaaacaagatgacagatggtattaatcatttactatctcgaggccaacctgttgaaaaaagattttctaaagaagaaattcgtacattattaaatattgcgggtagagaaggtgcatttaatgagatagaaaatactcgacttcaaaacgttatggactttgaacaattgaaggttaaggatgttgataccacgcctcgtattaatgttgtagctttttcaaaggatgtaacatatgacgaagcttatgatacagtgatgaataatccatatacgagatatccagtatatgatgaaaatatagatgatatcatcggcgtattccactcaaaatatttattagcttggagtaaacataaagaggagtcaattactaattatgcatcaagccctttatttgtaaatgaacataatagagcagaatgggtattgcgtaaaatgaccgtttcacgaaaacatttagcgattgttttagatgaatttggaggtacggatgctatcgtatcgcacgaagatttaatagaagagctacttggtatggatattgaggatgaaatggatcgtgaagaagaaaataaattaaaacatcaaaaatttccacaaagcatgatgcatcgttaa

SEQ ID NO: 5610 - DNA, 126 bp, Staphylococcus epidermidis; identical to SEQ ID NO: 2705

SEQ ID NO: 5611 - DNA, 270 bp, Staphylococcus epidermidis
atggaattaaatggatatcgcgatgctttatatggtggtggtaaatctgctaaatccctgatgactaaaaaagatattaagatgagtaataaaattgccaatgcaatgaaaaggttagaaaaagttatagataactcacatgaaaaaattgacgccagagcaatacgagagtatgtcaataaatatccaattatcgagggtcaagttatacatatcaatagttgtcttgataatgatatttctggcacatatatttactacagtgcctga

SEQ ID NO: 5612 - DNA, 147 bp, Staphylococcus epidermidis
ttgattaagcatatcaaaattactttgggtgacttcaaagattttcaagttaaacatgattttgatgatgcgaacttattgaatatgattgcacctgtagctacaatggcttcaaaagtgaaagatatgccgagtgattgctactaa

SEQ ID NO: 5613 - DNA, 1398 bp, Staphylococcus epidermidis
atggcaaaacaagcacctgatgttggggattataaatacggattccatgacgaagatgtttccatttttagatcagagcgtggtttaacggaaaatatagtaacagaaatctctaaaatgaaagaagagccacaatggatgttagatttccgtttgaaagcattaaaactattctataaaatgccaatgccacaatggggtggagatttatctgaattagattttgatgatattacgtattatgttaaaccttctgagcatactgaacgttcatgggatgaagtgcctgaagaaatcaaacgtacttttgataaattaggtattccagaagctgagcagaaatacttagctggagtttctgcacaatatgaatcagaagttgtttatcataatatggagaaagaactggaagaaaagggtattattttcaaagatactgatagtgcattacgtgaaaatgaagagttatttagagaatattttgcgtcagtggtacctgctgcagataataaatttgctgcattaaattcagcagtatggtctggtggttcattcatttatgttcctaagaatgttaaattagatacaccactacaagcatatttccgtattaactctgagaatatgggacaattcgaacgtacattaataattgctgatgaaggtgcatcagtaaactatgtagaaggttgtactgcacctgtatactctacaagttcgctacactcggcagttgttgaaattatagtacacaaagatgcacatgtaagatatactactatccaaaactgggctaataacgtatataatttagtaactaaacgtacctttgtccatgagaatggtaatatggaatgggtagatggaaacttaggctctaagttaacgatgaaatatccaaactgtgtacttttaggtgaaggtgccaaaggtagcacattatccattgcatttgctggtaaaggtcaagttcaagatgctggtgctaaaatgattcataaagcacctaatacatcttcaactattgtttctaaatctatctccaaaaatggtggtaaagtcatttatcgtggtatcgttcattttggacgtaaagctaagggagcacgttcaaatatcgaatgtgatacattaattttagataatgaatcgacttcagatactatcccttataatgaagtgttcaatgacaatatttcattagaacatgaagctaaagtttctaaagtatcagaagagcaattattctatcttatgagtcgtggtatttctgaggaagaagcgacagaaatgattgttatgggattcattgagccgttcacaaaagaattaccaatggaatacgcagtagaaatgaaccgtttaattaagtttgaaatggaaggctcaattggttaa

SEQ ID NO: 5614 - DNA, 465 bp, Staphylococcus epidermidis
atgaattttaataatttggatcaattatatagatctgtaattatggatcattacaaaaaccctagaaacaaaggtgtcttagacaatggctcaatgactgttgatatgaataaccctacatgtggtgatcgcatacgtttgacatttgatattgaagacggaatcattaatgatgctaagtttgaaggagaaggatgttcaatttcaatgtctagtgcatctatgatgactgaagcagttaaaggtcattcacttggtgaagcaatgcaaatgagccaagagtttactaaaatgatgctcggtgaagactacgagattacagaagaaatgggagatattgaggcgcttcaaggtgtctcacaattcccagctagaattaaatgtgcaacgcttgcatggaaagcattagaaaaagggacagtcgaaaaagaaggtaagtcagaaggtacaacggaagaagattaa

SEQ ID NO: 5615 - DNA, 1242 bp, Staphylococcus epidermidis
atggccgaacattcttttgatgtcaaggcagtcattaaagactttccaatacttgagcaaaaggtaaataataaacgtttagcataccttgattcaactgcgactagccaaacacctgtacaagttttaaatgtactagatgattactacaaacgctataattctaatgtccatcgtggtgtacacacattagggtctttagctacagatggctatgaaaatgcaagagaaacagtaagacgttttatcaatgcgaagtactttgaagaaattattttcactcgaggaacaactgcatcaataaatatagtagcatatagttatggtgacgctaatattagtgagggtgacgaaattgttgtaacagaaatggaacatcatgctaatattgttccatggcaacaattagctaaacgtaaaaatgcaacactaaaatttattccaatgacaaaagatggtgaattgcaattagatgatataaaagcaaccatcaatgataaaactaaaattgttgctatcgcacacgtttccaatgttttaggaacaattaatgatgttaaaactatcgctaaaattgcacatgaacatggtgcagttataagtgtggatggtgcgcaatcagctccacacatggctttagatatgcaagatatcgatgctgatttttatagttttagtggacataaaatgttaggtcctactggcattggagttttatatggaaaaagagaattattacaaaatatggaacccgtcgaatttggtggagatatgatagacttcgtaagtaaatatgacgccacttgggctgacctaccaactaaatttgaggctggcacaccacttattgctcaagcaataggtttagcagaagctatacgttatattgagaatttaggttttaatgcgattcatcagcatgaaaaagaattgacagaatatgcatatgaacaaatgttaactatagatggtcttgaaatttacggtccaccaaaagatagacgtgcaggggtcattacttttaatttagcagatatacatccacatgatgtagctacagctgttgatacagaaggtgttgcagttcgtgcaggccatcactgtgcgcaacctttgatgaaatggttaggtgtctcttcaacagcacgtgcaagtttttacgtttataatacgaaagaagatgtagatcaattagttcaagcattgaaacaaacgaaggagtttttctcttatgaattttaa

SEQ ID NO: 5616 - DNA, 1308 bp, Staphylococcus epidermidis
atgacaactaaaactttgaacatttctgaagaacaacttgttgattattctaaagcgcacaatgaaccttcttggatgacagagttacgtaaaaaagcgttgaaattaacagaaactttagaaatgccaaaacctgataaaacgaaattaagaaaatgggattttgatacgtttaaacaacaccatacaacaggagatgcatacactcagttaactgatttaccaaaatctgttaaagaaatcattgatgttgaaaactcagaaaacttaatcattcaacataataatgaattggcatatacacaagtatcggatcaagctaaacatgatggtgtgattattgaaggtctatctgaagcactagtcaaccatagtgatttagttcaaaagtactttatgactaaagcagtagatgttgatgaacatcgtttaacagcattacatactgcattagtaaacggtggtatttttgtttatgtacctaaaaatactgttgtagaacatcctatacagtacgttgttttacatgatgatgaacaagcgagcttttacaatcacgtcatcattgttacagaagaaagtgcagaagttacctatgtagagaactatctttctactactagtggtgaagataaccaacttaatattgtgtcagaggttatcgctggcgcaaactctaacgtcacatatggttcagttgattatttagataaaggatttacaggtcatataattcgtcgtggttctgcagatgcagatgcttctatcaattgggcactaggtttgatgaatgaaggtagccaaattatagataatactacaaatctaaacggtgatcgttcaacaagtgcattgaaatcagttgttgttggcacaggtgatcaaaaaataaatttaacttccaaaattgttcaatacggtaaagaaacagatgggtatatattgaaacatggtgttatgaaagaaaaagcatcttctgtatttaatggaattggctacattaaacatggtggtacgaaatctattgcgaaccaagagtcacgtgtattgatgttatctgaaaatgctcgtggtgatgctaaccctattcttttaatagacgaagatgatgttgaagcaggacatgcagcctcagttggtcgtgtcgatcctgagcaattatattatttaatgagccgtggtatttcaagagctgaagcagagcgtctagttatacatggtttcttagatccagtagtacgtgaattaccaattgacgatgtaaaacgtcaacttagagaagtaattgagcgtaaagtttcaaaataa

SEQ ID NO: 5617 - DNA, 762 bp, Staphylococcus epidermidis
atgtcatcaacattagagattaaggacctacatgtgtctatcgaggataaagaaattttaaaaggtgttaacttaacaattaacactggtgaaatacacgcaattatgggacctaatggtactggtaaatcaacattatcgtcagcaattatgggacatccaagttatgaagttacacaaggtgaagtattattagatggcgttaatattttagagttagacgttgatgagagagctaaagcaggcttatttttagctatgcaatatccatcagaaattacaggggtaacaaacgcagattttatgcgctcagcaattaatgcgaaacgtgaagagggacaagaaattaatttaatgcagttcatcaagaaattggataaacaaatggactttttagatatcgataaagatatggctcaacgttatttaaatgaaggtttctctggtggagagaaaaaacgaaatgagattttacaattaatgatgttagaaccgaaattcgctattttagatgaaattgactctggtttggatattgatgctttgaaagtggtttctaaaggtattaatcaaatgcgtggtgaagagtttggagcattaatgattacgcactatcaacgacttttaaattatattacaccagataaagtacatgtgatgtacggtggtaaagttgtgaaatctggaggtccagaattggctaaacgccttgaagaagaaggctatgaatgggttaaagaagaatttggtgctgctgaatag

SEQ ID NO: 5618 - DNA, 861 bp, Staphylococcus epidermidis
atgaaaaaattcaaatggataaatatatttaaaggttttggtatgggtacaagtgatctcgtcccaggtgtaagtggagggactatcgctttattacttggaatttatgatgactttattagctcaattagtggtttgttttcaagacgattttggcctagcttaaaatttttactacctattttagtagggatgctaatagctataggactattaagtcaattatttaattatttgcttagtcaacatcatattcctactatgttattttttacaggtttgattctcggtatcatcccttatttattaaccatctcaaatttcaaaaaaaatttcagtataatacattattttattctattattaggtattgctattatagtcgttttcgcattgcttaatcatggagacaagcattcaggtgaaacacttactttatctttcagtcttatcattaaatattttatcgcaggtgttttcgcttcaagtgctatgttattaccaggcatttctggatcatttatgttacttgtcttcggagtatatgggacgctaatgtatgctatttctgaactacttcattttaatttaaatgcattacctatcatattaatagtaggtttcggtattgtaactggttttatgatttcaagtcgattaattcaatattgtctacatcaacaccctacaatgacatttgctttgataataggctttgtaatcggatcgttgtatgcagttttccctggattcccgaaagacttaatccaatggatcgtatcatttttcctattgatcactggcttcttagtaagttatgttcttggtaaaattacagcaaaaaatgaagcatcattttga

SEQ ID NO: 5619 - DNA, 192 bp, Staphylococcus epidermidis
atggctgaagataaatttgaacaagctaaaggtaatattaaagaaacagtaggtaatgctactgataataaagaattagaaaaagatggtaaaggtgacaaagcttctggtaaagcgaaagaagctgtagaaaacgttaaagaaaaagcaaatgacgttattgataaatttaaaggtaataaaggtgactaa

SEQ ID NO: 5620 - DNA, 159 bp, Staphylococcus epidermidis
atgaaatttattactattaaagcgattactgagaaagggttagataaaaaagtaaatcaatttttaaaatcacatccacaaattgaaattatcaaatttgattaccaaatgggatatagcggtgtaagtgttggtattttataccgtgataatatttaa

SEQ ID NO: 5621 - DNA, 813 bp, Staphylococcus epidermidis
atgaaaaaattattcggaattattttagtattggctttaacgattaccttagctgcatgtggtggaggtaaagataaggaaaaaactatcacagtaggtgcatctccagcaccacatgctgaaattttagaaaaagcaaaaccattattgaagaaaaaaggttatgatttaaaaatcaaatcaattaacgattacacaacgcctaataaattattagacaaaggtgaaatcgatgcgaacttcttccaacatacaccatacttaaatactgaaagtaaagaaaaagggtataaaattgaatcggctgggaatgttgaattagaacctatggctgtatactcaaaaaaatataaaagcttaaaagatcttcctaaaggtgcaacagtatatgtatcaaataacccagctgaacaaggacgattcttaaaattctttgtagatgaaggtcttattaaacttaaaaagggcgttaaaattgaaaatgctaaatttgatgacataactgaaaacaaaaaagatattaaatttaacaacaaacaatcagcagaatatttaccaaaaatctatcaaaatcaagacgctgacgcagtaatcattaattctaactatgcgattgaccaaaaattaaatcctaaaaaagattcgattgctttagaatctcctaaagataacccatatgcaaatttaattgcagttaaaaaaggtcataaagatgataaaaatatcaaagtattaatggaagtgctacaatctaaagaaattcaagattatattaaagataagtatgatggagctgtcgtacctgctaagtaa

SEQ ID NO: 5622 - DNA, 696 bp, Staphylococcus epidermidis
atgggtaaatcttatggtgaaatatttcacgaaatggtgacaatgccaaatgttcagtggccagaggtttggcaggcaattttagaaactctatatatgactgttgtttcgacgctttttgcatttgtctttggacttatattaggggtattactctttttatctgcgaaaagtaactcattggctgctaagattttctacacgattgtgtcattcattgttaatttatttcgagcaattccatttatcatattaattttactgttaattccatttacaagtgtacttctcggaacaatcagcgggccaactggtgcattaccagcacttattattggtgcagcgccattctacgctagattggtcgagattgcttttaaagagattgataaaggtgttatagaggctgcttggtcaatgggagcgaacacttcgatagttgtgagaaaagtgctacttcctgaagcaatgcctgctttagtttcaggtattaccgttactgcaattgctttggtaggttctacagctattgcaggtgttataggcgcaggtggtttaggtaatttagcatatttaacaggatttactcgaaatcaaaatgatgtcattttagtttcaacagtatttattttaattattgtatttataatccagttcctaggggattggcttacaaataaaatcgataaacgctaa

SEQ ID NO: 5623 - DNA, 1026 bp, Staphylococcus epidermidis
gtgattaagctaaaccaaattgttaaacgctatcataccaaggataaagatgttcttgctgttgatcacgttgatttaaacattgaatccggctctatttttggtgtgattggtttctcaggagctggcaaaagtacgcttataagaatgtttaacaacttagaatctccaacgtcaggtgaaatcattatagatggtgacaatataagtcaattatctaaatcacagttacgaaaaaaacgacaaaaagtgagtatgatttttcaacattttaacctgctatggtcaagaaatgtattgaaaaatgtaacatttccattagaaattgctggcgttccaagtggtctagctaaacaaaaagcattggaactcattgaacttgtcggcctaaaaggtcgagaaagtgcgtatccgtctgaattatcaggcggacaaaaacaaagagtgggtattgcgagatcattagctaatgatccagatgtattgttatgcgatgaggcaacaagtgcattagatccacaaactacagatgaaattctagatttattattgaaggtaagggaacaacaaaatttaactattgtacttataacacatgaaatgcatgttatacgaagaatttgtgatgaagttgctgtaatggaaaacggtaaagttatcgaacagggagcggtaagtaaagtatttgagaatccacaacatgaagtaacaaaacgttttgtgaaagatgatttaaacgatgattttgaagattctttagagtatttggagccattagatcatgatgcatatatcgtgaggttaaactttactggtgaaaatacgactgagcctatcatatcttatatgacgaagacgcataacatagatgtgaatattcttgaagcagatattaagaatactaaaaacggttcgcttggatttttagttattcacataccacatataagtgaagaacatttcaagcaatttaaacataatcttcacgaacaacacgttaatgtggaggtgctaaaacatgggtaa

SEQ ID NO: 5624 - DNA, 297 bp, Staphylococcus epidermidis
atgaataaattgaaggatattgaagacataactgttaattttaataaagaaaaacatctcatatttggttatacaccaatgtgtggaacatgtaagatttctgaaaggatgttggatattgctaatgaaatcttacaattgccaataaaaaaaatagatcttaatttttatcctgaatggagtaaagagaaacaaattatgtctgttcctgttttgttgcttatgcgtagagaggaagagataaaaagaatctacgcatttcagtcagttacttatttgttagaaaatttaaaataa

SEQ ID NO: 5625 - DNA, 387 bp, Staphylococcus epidermidis
atggctattgtaaataaggttattattgttgaaggtaaatcggataagaaaagagtacaacaagtaatcgctgaacctgcaaatatcatttgtacacatggcactatgagtatagataagatagacaacatgatagaaacactttatgacaaacaagtttatgttcttgccgattctgatgatgagggtgaaaaaattagaaaatggtttaaacgttatttaagcgaaagtgaacatatttatgttgataaaacgttttgtgaggttgctaagtgtcctaaaaattatttagcacatgtattaagtagatatggttttaatgtaaaaaaagaaaagaaacttatgaataatttaaaaactgaaaggctagttttagtaaatgaataa

SEQ ID NO: 5626 - DNA, 381 bp, Staphylococcus epidermidis
gtggcagtaccgagcgaatttaaatattctaaagagcatgagtgggttaaaattgaaaataatgtagcaacaattggtattacagaatacgcacaaaacgaattaggtgatatcgtatttgttgagctacctgaaactgacgatgaattaaatgaaggtgacacattcggtagtgtggaatcagtaaaaacagtatcagagttgtatgcgccaatttctgggaaaattgttgaagttaatgaagaattggaagatagcccagaatttgtaaatgaatcgccatacgaaaaagcatggatggttaaaattgaaattagtgacgatagtcaattagaagaattattatcagcagatcaatactcagaaatgattggtgaataa

SEQ ID NO: 5627 - DNA, 354 bp, Staphylococcus epidermidis
ttgattaaattttatcagtatccgaaatgcacaacgtgcaaaaaggctgcaaagtttttagatgagcacgatgtgaattatgaatccattgatattgttcaacatacaccgactaaaaaagaattcaaaaatatcgtagataaaacgggtgtgaatattaataagttgtttaatacacatggtatcaaatatcgcgaattaaatttaaaagagaaacttaaaaatatgtttgatgatgaaaaactagaactacttgcttcagatggaatgttggttaaacgtccattagctatctctggtaaccatttgactttaggatttaaagaaaatgagtatcaacaccaatggttatag

SEQ ID NO: 5628 - DNA, 324 bp, Staphylococcus epidermidis
atgaaaactattcatcaaaccgaagaatttaattctactattggtagtactgatccagtaattatcaagtttgaagccgactggtgtccagattgtaaagcgatggatatgtggatagatccaattgttgaaaaatataataattatcaatggtatgtggtcgatcgtgaggaattagaagatgtgacaactgaaaatgatgttatgggtatcccaagtattttaatattccaaaatggtaaaaaattagcacacttgcattcagcaaatgctaaatcacctgaacaagttgaatcattcttgtctgaacatttagatcaataa

SEQ ID NO: 5629 - DNA, 543 bp, Staphylococcus epidermidis
ttggaattacaagaagctatatctaatcgtagaagcgtcaaaaaatttaaacacgatatggtggttgatgatcaaacggtttacgatgcaatatataaagctactgacgctccaaatcatggtatgagagaaccatggagattggttcatatttcaaaagataaactcggtgattttagtagggatatcgcaagatttgcttttccagatagtccggataagcgagaggatcactttcatgcagtaacaaatttaggtggcatgttgttgttgattttaaaagatgatccaagacaacgtcaaagtcgtgaaaattattttgcatttggagcttttgctcaaaatttaatgttacttttatacgaagcgggtattggtacttgttggaagtcgccacaatatatctttgatcctaaaatacgaaaagctttgggtgtaaaggataatgaaatattagcaggatttttgtatcttactgatttagaagaagtaccaacgaaggctaaacgtaaaaataaaaatcttattaccgaatttgaataa

SEQ ID NO: 5630 - DNA, 717 bp, Staphylococcus epidermidis
atgacccatgtagatattgcagcgacaattgcaccagaagacaagctttctaaaactttactcaaagatataaaagtaaacgaggaatcaatagatatcattgaattgcgcattgatcaatggccatcatttaataaggcattattaaatgaagtgattaagcaattaaaaatattccatttgaaaatattagtaacatatagaacttcagttcaaggaggaaaaggagctgtaaatgagcaagagtatttaaatatactaagtgaattaattgagtgtccacaatttgatatgattgatattgagtggagcagtgccgtcaatattgaaaaatatacgcatcttgttcaacgtgcacaacaaaaagggctcgaagttgttctttcgcatcataattttcaagaaacacctgctttagatgaacttaaatttatttactttaaaatgcaaaagctcaatcctgactatttaaagcttgcggttatgcctaaaagtcaagaggacgtgttacatttattagaagccatgtcactcacagcgaagcacacaacatgccgaattgtcggtatatcgatgtctagtttgggtaaagtcagccgaattgctcaaggcgtatttggtggaacgctgtcttatggttgcatagaagaaccacaagcacccggacagatacatgtctctaagttaaaatccatggtttctttttttgaggattaa

SEQ ID NO: 5631 - DNA, 426 bp, Staphylococcus epidermidis
atgatggcagttcaatatgaaactaaagcgactaacgtaggtggacgtaaaggtcatgtccatactgacgataatgcaataaatgtagatgtattaccaccacaacaagctgacggtaaagcgactaatccagaacaattatttgctgcaggttacgcttcatgctttaatggtgcatttgatttaattttaaaacaaaataaagtgcgcgatgctgaacctgaagtaacgttaacggtacgcttggaagacgatccagatgtcgaaagcccaaaacttagcgttgatattcatgcaaaagttaaaaatgttttatcacaagaagatgctgaaaaatatttacaaaatgcgcacgacttttgtccgtattcaaaagctacacgtggcaatatcgatgtaaacttaaatgttgaagtagtagaataa

SEQ ID NO: 5632 - DNA, 1458 bp, Staphylococcus epidermidis; identical to SEQ ID NO: 3159

SEQ ID NO: 5633 - DNA, 2403 bp, Staphylococcus epidermidis
ttgagtgagataattcaagatttgtcacttgaagatgttattggtgaccgatttggacgttatagtaaatatatcattcaagaacgtgcattacctgatgtacgtgatggtttaaaaccagtacaacgacgtatactattcgcaatgtattcaagtgggaatacgtatgataaaaatttccgtaaaagtgcgaaaactgtcggtgatgtaataggtcaatatcatcctcatggagactcttcagtatatgatgctatggtgcgcttaagtcaagattggaagttacgtcatgttctaattgaaatgcatggtaataatggtagtatcgataacgatcctccagctgctatgcgttacacagaagctaaacttagtcaattatcagaagaactattaagggatattaataaggaaacagtatcatttattccaaactatgatgacacaactttggaaccaatggtattaccagcgagattccctaatttattaattaatggatctacggggatttcttcaggatatgctactgatatcccgccgcataacctcgccgaagtaatacaaggcacattgaagtatatcgatcaacctgatattacaattaatcaactgatgaaatatatcaaagggcctgactttcctacaggtggtatcattcaaggaatagaaggtataaaaaaagcgtatgagaccggtaaaggaaaggttgtcgtgcgttcacgagtagatgaagagcctttaagaagtggacgtaaacaattaattgtgactgaaattccgtatgaagtgaataaaagtagtttagttaaaagaattgacgaattacgtgccgataaaaaggttgatggtattgtagaagttcgagatgagactgatagaactggattacgaattgcaatcgaattaaaaaaagatgctaatagcgaatcaatcaaaaactatttatataagaattcggatttacaaatttcatataattttaatatggttgctattagtgaaggtcgccctaagttgatgggattacgtgaaattatagaaagttatttaaatcatcaaattgaagtggttacaaatagaacgcgttatgacttagagcaagctgaaaaacgtatgcatattgtggaaggattaatgaaagctttatctatacttgatgaagttattgcattaatacgtaattctaaaaataaaaaagatgctaaagataatttagttgcagagtatgactttactgaagctcaagcagaagctattgtcatgttacagctgtatagattaacaaatactgacattgaagctttgaaaaaagaacatgaagagttagaagctttaataaaagaattaagaaatatcttagataatcatgaggcacttttagcagtaattaaagatgaactaaatgaaattaaaaagaaatttaaagtggatcgactatctacaatcgaagctgaaatttccgaaatcaaaattgataaagaagttatggtgcctagtgaagaagtgattttaagtttgacacaacatggctatataaaacgtacatctacacgtagttttaacgcaagtggtgtgactgaaatcggtttgaaggacggcgaccgtttattaaaacatgaaagcgtgaatactcaagatactgttcttgtatttacaaataaaggtagatatttgtttatacctgttcataaattagccgatatccgttggaaagagcttggtcaacacatatcacaaattgtgccaatagatgaagatgaagaagtggtaaatgtatacaacgaaaaagattttaaaaatgaagccttttatattatggctactaaaaacggcatgattaagaaaagtagtgcttcacaatttaaaactactcggtttaataaaccactcataaatatgaaggttaaagacaaagatgaacttattaatgtcgttcgattagagtctgatcagttaattactgttctaacccataaaggcatgtcattaacttattcaactaatgaattatcggatacaggcttaagagcggctggtgttaaatcaattaatcttaaagatgaagactatgttgttatgacagaagatgtgaacgactcagattccataataatggttacacaacgtggtgctatgaagcgtattgattttaatgttcttcaagaagctaaacgcgcacaacgtggaattactttactaaaagaattaaagaaaaaaccgcatagaattgtggcaggtgcagtagttaaagaaaatcacacgaaatatattgtattctctcaacatcatgaagaatatggtaatatcgatgatgtacacttatctgaacaatatactaatggatcatttattattgatactgatgattttggagaagtagaaagtatgattctagagtaa

SEQ ID NO: 5634 - DNA, 2001 bp, Staphylococcus epidermidis
ttggcaatgaataaacaaaataattattcagatgattcaattcaggtacttgaaggactagaagcagttaggaagagacctggtatgtacattggatcaactgataaacgaggattacatcatcttgtatatgaagttgtcgataactccgtcgatgaagtattaaatggttatggtgatgcgattacagtaacaattaatcaggatggtagtatttctatagaagataatggtcgaggtatgccaacaggtatacatgcgtctggcaaacctactgcagaagttatatttactgttttacatgctggaggtaaatttggacaaggaggttataaaacatctggaggtctccatggggtgggtgcttctgttgtaaatgcccttagtgaatggcttgaagttgaaattcatagagatggtaatatctacacacaaaatttcaaaaatggtggtattccagcgacaagtttagtaaaaactggaaaaacaaaaaaaactggtactaaagttacatttaaaccagactcagaaatatttaagtcaacgacgacttttaattttgatattttaagtgagcgtttacaagaatctgcatttttacttaaagatttaaaaattacacttactgatttacgtagtggaaaagaacgagaagaaatttaccattacgaagaaggaattaaagaatttgttagttatgtcaatgaaggtaaagaagtattacatgatgttactacatttgcagggtattccaatggaatagaggtagacgtagcattccaatataatgatcagtactctgagagcatattaagttttgtaaataatgttcgtacaaaggacggaggtactcatgaagttggtttcaaaacggcgatgactcgtgtttttaatgaatatgcacgtcgtataaacgaactgaaagataaagataaaaatttagacggtaatgatatacgcgaaggtttaacagcgataatttcagtacgtataccagaagaacttcttcaatttgaagggcaaacgaaatcaaaacttggcacttcagaagcaaggagtgctgtagactctgttgtttcagagaaattaccatattacttagaagaaaagggccaattatctaaatcattagttaaaaaagcaattaaagctcaacaagcacgcgaggctgctcgtaaagctagagaagatgcacgctccggaaagaaaaataaacgtaaagatacattgttatcaggtaagttaactcctgcgcaaagtaaaaatactgataaaaacgagttatatctagttgagggtgattcagcgggaggttctgcaaaattgggacgcgaccgtaaattccaagctattttacctcttcgtggaaaggttattaatacagaaaaggcacgtttagaggatatttttaaaaatgaagaaattaatacgattattcatactattggtgctggtgttggtactgactttaaaattgaggatagtaattacaacagaattattatcatgacagatgctgatacggatggtgcacatattcaagtattattgcttacatttttctttaaatatatgaaaccacttgttcaagctggacgtgtctttattgcgttaccgcctttatacaaattagaaaaaggcaaaggtaagaataaaaaagttgagtacgcttggactgatgaagaattagaaaatttacaaaagcaattaggaaaaggtttcatattacagcgttataaaggtcttggtgaaatgaatccagaacaattatgggaaactaccatgaatccagaaactcggacattaattagagttcaagttgaagatgaagttcgttcatcaaaacgtgtcactactttgatgggggataaggttgccccacgaagagagtggattgaaaaacacgttgaatttggtatgcaagaagatcaaagcattttggataataaagaagtccaaatactagagaatgaaaaatatattgaggaggaaacgaattga

SEQ ID NO: 5635 - DNA, 609 bp, Staphylococcus epidermidis; identical to SEQ ID NO: 3156

SEQ ID NO: 5636 - DNA, 297 bp, Staphylococcus epidermidis; identical to SEQ ID NO: 3155

SEQ ID NO: 5637 - DNA, 468 bp, Staphylococcus epidermidis
atgatatacagtttgactgaaattgaagcaagatatcaagaaaccgataaaatgggggttatctatcacggtaactacgcaacatggtttgaagttgcgagaacagactatataagaaagcttggcttcagttatgcctctatggaagaacaaggtgttatttcaccagttgtagatttaaaagtgcaatataaaaaatcaatttactatcctgaaaaggtgacagtaaaaacatgggtggaaaaatattctagattacgttcaacttattgttatgaggtttataatgaaaatggagagttagctactactggttcaacagaacttatctgtattaaagcagatacatttaaacccatacgcttggatagatattttcctgagtggcatgagacttatagtaaagttaaccagttaaataaagaaggtaaagatgctgaggttacgtttggcattaatcatttataa

SEQ ID NO: 5638 - DNA, 2706 bp, Staphylococcus epidermidis
atggcttctaatattaaagaacaagcaaagaaacaattcgaattaaatggccaatcatatacttactatgacttacaaacattagaagaaaaagggctagctaaaatttctaaattaccatactcaattcgcgtattgttagaatctgtgttacgacaagaggatgattttgttataacagatgatcatatcaaagcattaagtaaattcggaaatgcaggtaacgaaggtgaagttccattcaaaccttctagagttattttacaagactttacaggtgtgccagcagtagtagatttggcttctttacgtaaagctatgaatgatgttggtggggatattaaaaaaatcaacccagaagtacctgtggatttagttatcgaccattcagttcaagttgatagttacgctaatccagaagcattagaacgtaatatgaaattagaatttgaacgtaactatgaacgttatcaatttttaaactgggcaacaaaagcttttgataactataatgcagtacctcctgctacaggtattgtccatcaagtaaacttagagtatttagcaaatgtagtacatgtaagagatgttgatggtgaaaaaacagcatttcctgacactttagtaggtactgattcacatactacaatgattaatggtattggtgttctaggttggggcgttggtggtatcgaagccgaagcaggtatgttaggacaaccatcatatttcccaattcctgaagttatcggagtgcgtttaactcactctttaccacaaggctcaacagctacggatttagctttacgtgtgactgaagaattacgtaaaaaaggtgtagttggaaaatttgttgaattcttcggtccaggtgttcaacatttaccattagcagacagagctacaattgctaacatggctccagaatatggtgcaacgtgtggtttcttcccagtagatgaagaatcattgaaatatatgaaacttacaggccgtgacgaagaacatattgaattggttaaagaatatttacaacaaaaccatatgttctttgatgtagaaaaagaggatcctgaatatacagatgttattgatttagacttatctacagtagaggcatcactttctggtccaaagcgtccacaagacttaattttcttaagtgatatgaaaaaagaatttgaaaaatcagtaactgctcctgctggtaatcaaggacatggacttgatcaaagtgaatttgataaaaaagcagaaattaattttaatgatggatctaaagcaacaatgaaaacaggagatatagcaattgctgctattacctcatgtactaacacttctaatccatatgttatgttaggtgctggtttagttgctaaaaaagctgtagaaaaaggattgaaagtaccagagtttgttaagacgtcacttgctccaggttcaaaagttgttacaggatatttaagagattctggattacaacagtatttagatgatttaggtttcaatcttgttggttatggttgtactacatgtattggtaactcagggccactattacctgaaattgaaaaggcagttgcggatgaagatttattagtaacttcagttttatcaggtaatcgtaattttgaggggcgaatccatccattagtgaaagcaaactatttagcctcaccacaacttgttgtagcttatgcgcttgctggtacagtagatattgatttacaaaatgaaccaattggtaaaggtaaagatggtaaagatgtatatttacaagacatttggccttcaatacaagaagtttctgatactgtagataaagttgttacacctgaactattcttagaagaatataaaaatgtatatcataacaatgaaatgtggaatgaaatagatgtaaccgatgaaccattatatgatttcgatcctaattcaacatatattcaaaatccaacatttttccaaggattatctaaagagccgggtaaaattgaaccacttaaaagtttgagagttatgggtaaatttggtgattctgttacaacagaccatatttctccagcaggtgctatcggtaaagatacaccagcaggaaaatacttattagatcatgatgttgcaattcgcaactttaactcttatggttcccgtcgcggtaaccacgaagttatggtacgtggtacatttgccaatattcgtatcaaaaaccaacttgctccaggtactgaaggcggatttacaacatattggcctaccggagaaataatgcctatatatgatgcagcaatgaaatataaagaagatggaactggcttagttgtcttagctggtaatgactatggaatgggatcttctcgtgactgggctgcaaaaggtaccaatttattaggagttaaaactgtcattgcacaaagctatgaacgtattcatcgctctaacttagttatgatgggtgtactaccgcttcaattccaacaaggagaatctgcagaagcactgggtcttgatggaaaagaagaaatatctgtagatattaatgaagatgtacagccacatgatcttgtaaatgtgactgcaaaaaaagaaaatggtgaaatcattaatttcaaagctattgtacgttttgattcactagtagaattagattattatcgtcatggtggtattttacaaatggtactaagaaataaacttgcgcagtaa

SEQ ID NO: 5639 - DNA, 1641 bp, Staphylococcus epidermidis
atgaattcttcttcacaagagaagaaaaataaaaagttttcttcggttttcatctatagttcaattattgcagctatagtagtgattatcggtgctgtttggcctgagaaattcgatagcgttactaatacggctaagatgtggattactaataatttgggttggtattaccttattttaacaacagtaattgtattcttctgtgttttcttgattttcagtccaattgggaaacttaaattaggtaaacctaatgacaaaccagaatttaatacaatttcttggttcgcaatgctattcagtgctggtatgggtattggtttagtattctatggtgcagctgaacctatggcacattttgctgctccaccaacagctgatcctgaaacgacaaaggcctacactgagtctttaagatctacatttttccattggggattccatgcttgggcaatttatggcgtggtagctttagcacttgcttattctcaattccgtaaaggtgaacctggattaatttctagaaccttacgtccattattgggagataaagttgaaggaccaataggtactcttattgatgtactttctgtttttgctacattagttggtgtagctgtgtctctaggtatgggcgcacttcaaattaatggtggcttgcattatttatttggtgtgccgaacaacacttttgttcaaggtattattattgttgtcgtaacaattttatttattgctagtgcttggtcaggtttaagcaaaggaattcaatatttaagtaatttaaatataggtcttggtacgatattaatgattgtaaccttaattgttggaccaactgttttaatcttaaatatgatgacaagttctacgggtagcttattaaattcattcttatttaacagttttgatactgctgcgttaaacggtcaaaagcgtgattggatgtcaacttggacattatactattggggttggtggctaagttggagtccattcgttggtgtattcatcgcacgtgtatctaaaggacgttctataagagaatttatttcaggtgttttattagtaccggcacttgttagctttatatggttcagtgttttcggcgtattaggcattgaagctggtaaaaaagattcgggtctctttaaaatgtcacctgaaacacagttatttggtgtattcaaccatattccgttaggtattgttttatctatcattgcattattgcttatcgcttctttctttgttacttcagctgactcagcaacattcgtattaggtatgcaaactacatttggatcattaaatccaagtagtctagttaaagtaacctggggagttgcgcaagcacttattgcctttgtactattattagctggtggaggagatggctctaaagccttgaatgctattcaaagtgctgccattataagtgccttcccattctcattcgtcgtcataatgatgatgataagtttctacaaagatgcaaataaggaacgtaaattccttggattaacacttacgccaaataaacatcgcttacaagaatatgttaaatatcaacaagaagattatgaaacagatattcttgaaaaaagagaagttagaagaaataaagaaaaagaagaatag

SEQ ID NO: 5640 - DNA, 351 bp, Staphylococcus epidermidis; identical to SEQ ID NO: 3151

SEQ ID NO: 5641 - DNA, 3030 bp, Staphylococcus epidermidis; identical to SEQ ID NO: 3150

SEQ ID NO: 5642 - DNA, 1125 bp, Staphylococcus epidermidis
atgaaaattgtacataccgctgattggcatctgggtaaaattttaaatggaaaacaattgcttgaagatcaaaaatatattttaactcagtttaaacaacatatggagaaagaacagccagatttaatagtaattgcaggtgatttgtatgatacctcatatccaagtaaagaagcgataggtttacttgaagagactattgaatacctaaatatagaacttaaaattccaataatcatgataagcggtaaccatgatggtagggaaagattgaattatggctctaaatggtttgagaataatcaactttacataagaactcaactagaaaatattgatgatccaatagaattgagtggtgttcaatttttcactttacctttcgcaactgtgagtgaagtacaaaattattttaaagataagcaaatagaaacatatcaacaagcattaaacgaatgcttagagcaaatgtctagttccatagataataataaggtgaatatattaattggtcatttaactattgagggcggtaaaacttcagattcagaaagaccattaactattggaacagtagaatcagttgatatgcattcttttcggttgtttgattatgtaatgctcgggcacctacatcatccatttagtataaataactcttttatcaaatatagcggttcgattttgcaatactctttctctgaagtaaatcaatctaaaggatatagagttcttgatattgaaaacaaccaactattaaatgaaaccttcgttcctttaaaacctctaagagaactagaagttattgaaggtgattatgaggatattattcaagaaagaattaaagtaaaaaataaaaataattattttcattttaagttaacgaatgtttctcatattactgatccaatgatgaaactgaaacaaatttatcccaatatattagcactatcgaatgtagtatttgatcatagtgagaattttagccatgttgaaatcaaaaaacaagatgatcagacaattatagaaaatttttataaaaatatgacagatcaacatctgagtcaagttcaatcagacaaaataaagcacttgttaagttttatattggatagggaggggtaa

SEQ ID NO: 5643 - DNA, 468 bp, Staphylococcus epidermidis
ttgacttatttagtcttttccattgtatttgcatttctaatgggtgctgtcgttatagtgataagaatgaaagcacaacagtttccaatcaatgaaaagaaaattatcttaccaccatttttcatggctaccggtgcattgatgtatgtggtaccatactttcgattaactggtatggaaatgttagaatcattgatattaggtgttttgttttctactgttttaatctggacttctagattcgaagttaaagatgataatatttatatgaaacggtctaaagcatttccaattattttaatatcattattaataataagaacagttattaaaatatttataagtagcgaaattgatccaggtgaaattgctggtatgttttttttactcgcattttgtatgatagtaccttggagatgtgcaatgctttataaatataaaaaattgcaaaagaatcttattaagtaa

SEQ ID NO: 5644 - DNA, 228 bp, Staphylococcus epidermidis; identical to SEQ ID NO: 3147

SEQ ID NO: 5645 - DNA, 1989 bp, Staphylococcus epidermidis
atgtttaatgaaaaagatcaattagctatagatacgatacgtgctttaagcattgatgcaatcgaaaaagcaaattcaggacaccctggattacctatgggagcagcacctatggcgtatactttatggacgcgccaccttaattttaaccctcaatctaaagatttttttaatagagatagatttattctatcagcaggtcatggttcggctttattgtatagcttattacatgtctctggtagtttagaacttgaagaacttaaacaatttagacaatggggttcgaagacgcctggacatccagaatatagacatactgatggcgtagaagttactactggtccattaggtcaaggttttgccatgtctgtagggatggcgttagcagaaagtcatttagcaggtaaatttaataaggaccaatttgatatagttaatcattacacttatgtattagcgtcagatggtgacttaatggaaggtatctcacatgaagctgcatcttttgcaggtcataatcagttagataaattaattgtcctttatgattcaaatgatatatctttagatggagatttagataaatcattttctgaagatacaaaacagcgtttcgaagcctatggttggaactatattctagttgaaaatggtaacgatttagatgagattgataatgcaatcactcaagctaaatcacaacaaggacctactattatcgaagttaaaactattatcggttttggttctcctaataaagctggttcaaatggagttcatggtgccccacttggtgaagaagaacgtgcacttacatttaaagaatatggattagatcctgaaaaacgttttaatgttcctgaagatgtatacgaaatatttaaatcaacaatgttaaaacgtgcaaatgaaaatgaagaggcttggaataatatgcttaaaaattatagtgaagcctatccggaattagctgaagaatttaaattagcaatgagtggtaagttaccaaataattacgctgatgccttaccagaatatgatttaaatcacagtggtgcttctagagctgattcaggagaaataattcaaaaattaagcgagtttgtaccttcattctttggtggatcagcagacttagcaggttcaaataaatctaacgttaaagaagctaaagattataataaagatactccagaaggtaaaaacgtatggtttggtgtacgtgaatttgcaatgggagcagcaataaacggcatggcagcacatggtggacttcatccatatgcagcaacattctttgtattcagtgattacctaaaaccagctttacgattatcatcaatcatgggactcaattcaacgttcatctttactcatgattcaattgctgtaggtgaagatggccctacacacgaacctattgaacaattagcaggtcttcgtgctattcctaacatgaatgttattcgtccagctgatggtaatgaaacacgtgtagcttgggaagttgcacttgaatcagaacacacaccaacatcattagtgttaactcgtcaaaatttaccaactttggatgttgataaacaaacagttgaaaatggtgtgagaaaaggcgcatatattgtttttgaaacagaacaacaacttgaatatttattattggcatctggatcagaagttaatttagctgtagaagccgcaaaagaattagagcaacaaggtaaaggtgtacgagttatttctatgccaaactggtacgcatttgaacaacaatcttctgaatataaagaatcaattttaccttctgatgttactaaacgtatagctatcgaaatggcatcaccacttggttggcataaatatgttggaattgaaggtaaagtcattggtataaatagttttggcgctagtgctcctggagatttagtagttgaaaagtatggattcactaaagaaaatattttaaaacaagtccgttcattataa

SEQ ID NO: 5646 - DNA, 237 bp, Staphylococcus epidermidis; identical to SEQ ID NO: 3145

SEQ ID NO: 5647 - DNA, 234 bp, Staphylococcus epidermidis; identical to SEQ ID NO: 3144

SEQ ID NO: 5648 - DNA, 621 bp, Staphylococcus epidermidis
atgagagaactcactaagcgacaaagtgaaatatatgattatattaagaaaattgttcaaacaaaaggttatccaccaagtgttcgagaaattggcgaagctgtcggtttagcttcaagttctacagtacatggacatttatctagattagaagaaaaaggatatataagaagagatcctactaaacctagagctatcgagatagttagcgaacaattagatgaggtaaatgtagaggaaacaatacatgttccggttatcggtaaagttacagccggcgttccaattacagctgtagaaaatatagaagaatattttccgctaccagagcacttaacttcaacacataacagcgatatatttattttaaatgtagttggggaaagtatgattgaagctggaatattagatggcgacaaagtaattgtacgaagtcaaactattgctgaaaatggtgatattatagtagctatgactgaagatgaagaagctactgttaaacgcttctataaagaaaaaaatcgttatagactacaacctgaaaatagtactatggagcctatttacttagataatgtcattgtagtaggtaaagtaataggattatatagagaaatgtaa

SEQ ID NO: 5649 - DNA, 942 bp, Staphylococcus epidermidis
atgattaaagctcaaaatgatatacgtcatcaaattaatcgatggattgattctgattcaaatgacgataatactcaattagcgattcctaaaaagcaagaatttgcaatcaacaatatacagatgaatatgactaaaaaagatgttgaagcacaattgggacaacataagcgtatgacttcgagtgtgtatggcacaaattggtacacatattattcaaatgattataatcaatttttgatggtgagttatattaacaatcatgttaatgcactgtatacaaatcaaaatcttatttcatcaaaatctcaaattaagtatgatactcctaaagatgttgttagggaaaaatatgggtccccgattcaagttataaaaaaagggaaagttggttttgatgtaaaaagtaatgaatatgatgttttccataaagaccatatttataccacagtattttatgataagcacagagataatggtgtgaagtcattattacaagttagtgagaaaatggaaaatcgattaagatatcaatatgggaaaccatctaaattacttgcaaagagttttgagttgcaaaattttgacattgtcaatgctgaaagaaaacagcatggcttaaaaacattagattattctaaggatgtttctcatactgcgcgtaagcatagtattgacatggttaagcataattattttgaccatataaatccaaagaaactttctccttttgatagattaaaaaaagatggaatagaatttaatgctgctggagaaaacttagcatatggacaattgaatagtatctatgcacatgaaggtttgatgaattcaatggggcatagaaagaatattttaaacactcattttgattatttgggcgtaggtgtatatttcaatgatcgaagacaacccttttggaccgaaaattatacaagttaa

SEQ ID NO: 5650 - DNA, 978 bp, Staphylococcus epidermidis
atgaaaatttttgattatgaagatatacaattaattcccaataaatgtattgttgaaagcagatctgagtgtaatacttcggttaaatttgggcctcgtacttttaaattgccagttgttccagcaaatatgcaaacagtcatgaatgaagaacttgcacaatggtttgcagaaaacgattatttttatatcatgcatagatttaatgaagaaaatagaattccatttataaaaaaaatgcatcatgcagggttatttgcttctatttctgttggagttaaagaaaacgaatttaattttattgaaaaattagcttcttcatcgctcataccagaatatataacaattgatattgctcatggtcactcaaattcagttataaatatgattaagcatataaaaaaacatttaccaaatagttttgtgatagctggtaatgttgggacgcctgaaggagtaagagaacttgagaatgccggtgcagatgctacaaaagtaggtattggtccaggaagagtatgtattactaaaattaaaactggatttggtacaggaggttggcaactttctgcgttaaatctttgtaataaggcagctagaaaacctattattgcagatggagggttaagaacccacggtgatatagccaaatcaattcgttttggtgccactatggtaatgattggctctttatttgctgcccacgaggaatcaccgggtgaaaccgtcgagctagatggcaaaaaatataaagaatattttggtagtgcctcagaatatcaaaaaggtgaacataagaacgttgaaggtaaaaaaatgtttgtagaacacaaaggatctcttaaagatacccttactgaaatggaacaagatttacagagttcaatttcatatgcaggaggaaaggacttgaagtcattaagaacagttgattacgtcatagttagaaattcaatttttaatggtgatagagattag

SEQ ID NO: 5651 - DNA, 270 bp, Staphylococcus epidermidis; identical to SEQ ID NO: 3140

SEQ ID NO: 5652 - DNA, 150 bp, Staphylococcus epidermidis; identical to SEQ ID NO: 3139

SEQ ID NO: 5653 - DNA, 1515 bp, Staphylococcus epidermidis
atgtcaaaacaggatggaaaattaactggactttttggtgcgccagtttcggatagagaaaatagtatgacagcaggacaacgtggaccattattaatgcaagacgtttattatttagaacaaatttctcacttcgatagagaagtgattcctgaacgtcgtatgcatgcgaaaggttcaggtgcatttggaacgttcacagttacaaatgacatcacacaatatacaaatgcgaaaatattctcagaagtcggaaaacaaacagagatgtttgcacgtttttctactgtttcaggagaacgtggagcagcagatttagaacgtgatatacgtgggtttgccttgaaattctacactgaagatggaaactgggatttagtaggtaacaatacgccagttttcttctttagagatcctaaactatttattagtttgaatcgtgctgtaaaacgagatccacgtacaaatatgagaagtgcacaaaataactgggacttttggacaggtctaccggaagcattgcatcaagtgacaatattaatgtcagatagaggtatgccaaaaggattccgaaatatgcatggattcggttctcatacgtattctatgtataatgataaaggtgaacgtgtatgggttaaatatcatttccgtacacaacaaggaattgaaaactatactgacgaggaagcggctaaaattgtaggtatggatagagattcttcacagagggatttatataatgctatcgaaaatggagattatccaaaatggaaaatgtacattcaagttatgacagaggaacaagctaaaaatcatccagacaatccttttgatttaacaaaggtatggtataaaaaagactatccactgattgaagtgggagaatttgaattgaatcgtaatcctgagaattattttcttgatgtagagcaggcagcgtttacgcctacaaatattgttcctgggttagattattcaccagataaaatgctacaaggacgtttattctcatatggagatgcccaacgttatcgtttaggagttaatcattggcagattcctgtcaatcaacctaagggagttggagttgagaacttgtgtccatttagtcgtgatggacaaatgcgtttcttagataataaccaaggtggaggcccacattattatcctaataatcaaggtatatatgagtcacagcctgaacacaagaagccaccattcccgacagatggtgatggttatgaatataattatcgccaggatgatgacaattactttgaacagccaggtaaattattcagattacagtctgaagatgcaaaagagcgtatcttcacaaatacagctaatgcaatggatggggtctctaaagatgtcaaagttcgccacattcgccactgctataaagctgatccagaatatgggaaaggtgtagcaaaagctttaggtattgatatcaatcaaatagatttagagacaaatcaagacgaaacatatgaaaactttaaataa

SEQ ID NO: 5654 - DNA, 1449 bp, Staphylococcus epidermidis; identical to SEQ ID NO: 3137

SEQ ID NO: 5655 - DNA, 315 bp, Staphylococcus epidermidis
atggttggacaaacaaatttattcgatgatgttataaagaaagaggaacgttttgttatagttgttcaagcacttgaagaaaaaaatggtaagctcttaaaacggactttgagagaatatccaagcttagagcacacgcaaatgaatgaccttttctctcatcttaaagaagtatttcttgaagaaccttttggggtcaatcaatcagcatatagcattactgtttatacaaacctagattatgccgcagatcaagtatatgcacatgttaaacgctataaaggaaaacatgactggacacatactgcgaaatag

SEQ ID NO: 5656 - DNA, 807 bp, Staphylococcus epidermidis
atgactcagtataaaatggtagttttagatatagatgatactttaatgaatagtgataataaattatccattgagacaaaatcttacttattagatattcaaaaacgtggttattatgtggtattggcctcaggtagaccaacagaaggtatgttacctactgcgagagaattagagttaaataaatataacagcttcattattagttataatggaggtaaaactataaatatggctaatgaaaatgtagaggtcgatcagcctgtttcaaaggaagatttcgataatattgtagattattgtagagataagaactttttagtacttacttatgataatggatatatcattcacgatagtagtcatgaatatatgaacatagaatcacaacttaccggattacctatgaatcgtgttgctgatttgaaggaatatattaatcatagtgtgcccaaagttatgggtgtggattatgtaggtcatattaccgaagcacgtattgaattggatggttacttcaataatgatattgatgtgacaacgagtaagccttttttcctagagtttatggcaaagaatgtttcgaaggggaacgcaataaaagcactttgtaaaagattacaaatttctctagaagaagttatagtattcggggacagtttgaatgataagtcaatgtttgaagttgctggatattctgtagcaatgggaaatgctagtgatgaactcaagaaaattgctgacgaagtaactttagataataattctaacggtattccttatgcattaaaagaacttttggtttaa

SEQ ID NO: 5657 - DNA, 921 bp, Staphylococcus epidermidis
atggaggaagttttaaaacttaaaatccctgcatcaaccgcgaatctaggtgtaggttttgactcaattggtatggcattggataaatatttgcatatgtctatacgtaagattgaaaaatctaattgggaatttctatattatagttcagaactagaaggtttacctaaagatgagaataattatatttatcaaactgctctaaatgttgcgcataaatacaatgttacacttccaagcttgcaaattgaaatgagaagtgatattccattagctagaggactaggttcatctgcctctgcattagtcggtgctctttttattgctaattactttggtaatattcaattatctaaatacgaattgttacaactagcgactgaaattgagggacaccctgataatgtagcacctacaatatatggaggtttgattgcaggtttttataatccaataactaaaataacagatgttgctagaatagaagttccgcacgtagatataattttaactatacctccatatgagcttcgtacagaagactctagaagggtcttacccgatacattttcacataaaggtgctgtgcaaaatagtgccattagtaacactatgatttgtgctctcattcagcataaatataaacttgctggaaagatgatggaacaagatggttttcatgaaccatataggcaacaccttattccagaattcaatcaagtacgtaaactatcacgtcaacatgatgcatatgcaactgttataagtggagctggacctacaatactcactctttgtccaaaagaaaaaagtggtaaattagttagaacactacgtgagaaaattaataattgtgcttcagaactagtaacaattaatgaaataggtgttaaagatgaagtggtgtacctaaagtcctaa

SEQ ID NO: 5658 - DNA, 1065 bp, Staphylococcus epidermidis
atgaaaagatggcaaggattagttaaagaatttaaagaatatttaccagtcaatcaatctacaccagcgctaacactcaatgaaggacatacaccacttatttattgtgaaaatctttctcaaaaattagatattgaattatatgttaaatatgaaggagcaaatccgactggctcatttaaagatcgtggtatggttatggctgtaacaaaggcaaaagaacaagggaaaaaagttgttatttgtgcttccactggtaatacttcagcatcagcagctgcttatgctgcaagagctggtttaaaagcaattgtcgtaattcctgaaggtaaaatagcattaggtaaattatcacaagcagttatgtatggtgcagaaattgtttctatagaaggaaacttcgatgaagcactagaaattgtaaaagagattgctgaagaaaatgatgaaattgaattagttaattctgttaatccatttaggattgaaggacaaaagacgggtgcctttgaaattgttgaacagttagatggtcaagcccctgacattttagcaataccagtgggaaatgcaggtaatataactgcttattggcaaggatttgttgaatatcataataaaaagaatacacaattaccacaaatgtttggcttccaagcagaaggagcatctccaattgttcaaaataaaataatcaaaaatccagaaacaatagctacagctatccgaatagggaatcctgctagttggcaaaaagctgttaatgcactagatgaatcaaatggtttaattgatagtgtgacagatgaagaaattttagaagcttatcagttaatgacaacaaatgaaggtgtttttagtgaaccagcgagtaatgcttcaattgcaggtctaatcaaacttcatcgctctggtaagttacctaaaggtaaaaagatagttgcaatattaactgggaatggacttaaagatcctgacacagctatttctctcttagataatcctattcaacctttacctaataataaagaaagtataattagatacatcaaaggggcaatctag

SEQ ID NO: 5659 - DNA, 1281 bp, Staphylococcus epidermidis
atgaaagagttaaatatcgcattacttggtttgggaacagtcggatcaggtgttgtaaagattattgaagagaatagacaacagattaaagacaccatcaataaggatattgtcattaaacatattctagtccgagataaatctaagaaacgtccgttaaatattagtcaatatcatcttacagaagatattaatgacatcttaaatgacaattctattgatatagtcgttgaagttatgggtggtattgaacctactgttgattggttaagaacagcccttaaaaataaaaaacatgtgattacagcaaataaggatttactagctatccatttaaaattattagaagacttagctgaagaaaatggcgtcgctcttaaatttgaagcaagtgtggcaggtggtattccaattgtcaatgctattaataacggactgaatgcaaataatatttctaaatttatgggaatatttaatggaacttctaactttattctctcaaaaatgactcatgaacaaacaacttttaaagatgcgttagaagaagcacaaagattaggatttgctgaagctgatccaacagatgatgtagaaggtgtagatgctgcaagaaaggtagttattacatcttatttatcttttaaccaagtcattaaactgaatgatgttaaatcggtaggaattagtgacattacattagcagacatcaatgcagcaaactcattaaattataaaattaaattaataggtaaaggtacatatgaaaatggatatgtgaatgcttctgtggaaccgacactgatacataagaatcaccaacttgcagctgtagagaacgaatacaatgcaatatatgttataggtgatgctgttggcgatacaatgttttatggtaaaggtgcaggtagtttagcaacaggaagtgcagttgtaagtgatttattaaatgtggcacttttctttgaatcaaacttacacactttaccacctcattttgaattaaagacagaggaaactaaagaaatgatggatggtgcagaaccagtggttattcaagagaaatctaattactatatagtaattagtaacaataataaatctttggagaaagttgaatatgacattaaaaagaaattaccattccataaatcgttgcaacttgttgagagggatcaagatacttatgcaattatcgttactggaatagaaacatctccagaaaaagttctaaatcaatcaggatttaatatcaagaaagtttatcctgtagagggagtttaa

SEQ ID NO: 5660 - DNA, 1377 bp, Staphylococcus epidermidis
atgaaagtttctaagtttggtggaagttctgtatcaactgcagaacaaattaaaaaggtattaactatagtgaatgaagaccctgaacgtaaaatcattatcgtttcagctccaggcaaaaggcataatgacgacattaaaactactgatttattaattcgtctctatgaaaaagtacttaataaattaaattatgaaagtaaaaaacaagaaattatccaaagatatgctgatatagtagaagaattaggtataggaaatgacattttaataacaattaatgacactttagaggaatacattaaacatctttctgacaaacctaaccgtttatatgatgctttattatcttgtggcgaaaattttaatgctcaattaatagcccagtataataatagtcaaggtattcctactcgttatatttctcctaaagaagctggattaactgtaactgatttaccacagcaagctcaaattttagattccgcatataatgaaatatacaaattgcgtgattatgatgaaaagctaattattcctggttttttcggagtttcaaaacaaaattatatcgttacgtttccacgcggtggttctgacataactggtgctatcatagcacgtggcgtccgagcctcactttatgagaacttcactgatgtatcaggaatatataaagctaatccaaatatcataaataatcctgaactcatagaggaaataacttatagagaaatgcgagagctatcttatgcaggatttggagtttttcacgatgaagctctacaacctttatacaaagatcgaattccggtagttatcaaaaatactaatcgtccaaatgataaagggacctacattttacatgaccgtgaaatcgattctaaaaatgtcattagtggaattagttgtgataaaggctttactgtgattaatattaaaaaatatttaatgaatagattagttggatttacacgaaagattcttggcgttttagaagaatttaatatatcatttgaccacatgccttctggtattgataacataagtattatcatgcgtacaaatcaaattcaaggtaaagaaagtcaagttcttaatgccatacgcaaacgttgtgaagttgatgaattaagtatcgaccatgatttagcagtactaatgattgttggtgaaggtatgaatcaagttgttggtacagctagtaaaattactcacgccctttcagaatcaaacattaatttaataatgattaaccaaggtgcttctgaaatttcgatgatgtttggaattcatgaagcagatgctgaaaaagcagtattatctacgtacgaattttgttacaacggcgtttgtttaaaaaatttgtgtaaataa

SEQ ID NO: 5661 - DNA, 600 bp, Staphylococcus epidermidis
atgtacgttaaagaagaaaaaccagtgaataaaatagtcgaaattttaaggaaaacatcatctcatttattcaaatttcacggcgaggtagcgatgcatctatttctgaatgatgattttatattaccatcgaaagtagatatttgtgttgagcgcaaaaagttattagaaattgtcagggtgattcctgaagaatttacgattcactattatgatgatcagttatatgaaagattaagagaatctttatctttatcagatgttgaacatgttaaagtctttaaaaacgatacagaagtcatgacaatatttgtttatgatgttgtaaatgatgaatggctatttaggttagatcatcatatacgtttaccaaaaaataatatatattttcattctttaagttggaacgtagattatattaagccagaaatagttcttatgtatgatttaatgagtgaacaaaaatatcatcagtttagtaattataaagctgttattgattctcttagttattatcaattctatattttaaaattagtagtaggtgaacagcgtattaaaaaggctatagtaaatagttctgctaagaagatatcttaa

SEQ ID NO: 5662 - DNA, 873 bp, Staphylococcus epidermidis
atgtctttaacgattatcttatctataataattattattttgattatggctatggttcttaatcaaaaatttatgaaagatagggttgaaacagaagaatatgctagaaatcaattaatctctaaaaattcaattttaagtgaagaaaatttatcattgaaaaaccaaatgttaagtacaaacaatgacgtcggtcaacacgcttttaaaaacgccaagcgtgaattaagaaaaatattaaatagatttaaagaagagggtcgtttacgatcatatacaattgttcctacgagtaatttggctgttaaacatccccttttcgaatatgcacgttcattcgattttattatcattactgatgttggtttgataaatgtggatgttaaaaattggaaccaaaaaacgttttatcattttgatgtgccagatcaacatcttgaagaaggacaaccacaatataataccgaaaaagttgtcggtcattatattagcaatcgatatcatagtcagtttaaaacaacacgttctggtgtctatacttttattgagattttacaggataatcgtgtaatatatgaattttatgaccacgatccatacgataaagccgcaaacaatgcaaaagcattaaaagataaaattgaaaatgattataattttaaaattcaaagtattggcgtcatatattttagtgatggtagcgttaatattattgaaggatccgacgagagtgataaatacgtcgacaccgtatctacaccgatatcacttgaaaaagtaattgaggaagctatcgatttatctaagcacccccttactgataaacaaatcgaagaaatttctgaaagctttaaacaacatatgaataattaa

SEQ ID NO: 5663 - DNA, 165 bp, Staphylococcus epidermidis
ttgcagttaaagaaatttgatgtggaacttgttgatggatttacgaaagttattttaagtttcatcagaatgtcgattcgaaacataattaaagtcaaaagagaaattgcatttgtattaatgctaatgaatataaaaaaagtagttgctcaacaatttaaataa

SEQ ID NO: 5664 - DNA, 537 bp, Staphylococcus epidermidis
ttgaaatctaagaaaatgtcatcgcttttagtagtagcgatgataggaatacttgtaattattttccagtttgtaaaccattctggaccgtttagtggttcagaatctcaacatcaatcagataattccaatttaaatggtaaagacaaagtatatgtgaaacgagttgtagatggtgatacatttgttgctcaaaaaaatggagaggaaattaaagtcagattaattggtgtagatacgccagagactgttaaacctaatacgccagttcaaccatatggtaaacaagcatctaattatacgaagaagtatctcacgcatcaaaatgtttatttagaatatgataaagaaaaaactgataggtatggtcgtactttggcgtacgtatggttaaaaaatggagatatgtttaacgaatcgctggtgaaaaaaggtctagccagagaaaagtatttttctccaaacggaaaatatagggataccttcgtaaacgctcaagaagaggcaaaaaagagaaaattaaatatttggagctag

SEQ ID NO: 5665 - DNA, 189 bp, Staphylococcus epidermidis; identical to SEQ ID NO: 3124

SEQ ID NO: 5666 - DNA, 603 bp, Staphylococcus epidermidis; identical to SEQ ID NO: 3123

SEQ ID NO: 5667 - DNA, 1095 bp, Staphylococcus epidermidis
atggaatcaagaagttggggagtgagaataggggaattaagtactttaatatatttaatatttccgattttagctatatttgttgacaaacgtggtaatttcttaacttatttaattgtttgtactatttttataatcagctatgtgacgatgattatattttataaataccttagtgatagtattttatattcattactggttattcattatttaggaatcttttattttgtctatagtgtcaatcctatgaatagtttgtttttcttctatagtgctttcgccttaccttttatttttaatgttcgtgttgtatcaaaagaatttataacctttttaatagctatgataagttgtttaatactaacttatatatttaatccaacatttgtggttccattaagtgcattttatttggttatattaattgttgctgtaggtaattttaaaaatagagacgaacgaattatgaaagctaaacttgaagaaaagaataagtatattaatgtactaatagctcaacaagagcgtaatagaataagtcaagatcttcatgatacattaggacatgtatttgctagtcttactttgaagtctgaattagctgttaaactcatagatactaatcctaaagaagcaaaaaatgaaatgcaggcaataaatcaactttcaacagaagccttaaataaagtcagactcattattgatgatttgaagatacaatcttttgaagatgaaatttcatcattggaacacttattgcaaaatgctaatctacattttaaatttaacaataaaagtgcggctaaatcattaaatccagcgaaacaatcaatattatctatgatttttagagaagcaattaataatgttattaaacatgcgcatgcgactgaagtaataggtgaattgaaggtacatgagcatcaaatcattttaaaaattaaagataatggtgtgggaatagaaaatgaagatgcttcaaatttgaaaagtattaaagaacgtgtagattatttaaatggtaaattaattgtacaatcaaataatggaacacttattattgttgaaatacctagaggtgatttattatga

SEQ ID NO: 5668 - DNA, 732 bp, Staphylococcus epidermidis
gtgatatcaacattttttaaaatagaattaaagattatatttagaaagaaattgtatttagttgtgtccatattcctacctgtcgtgttttatttattatttacttctatattggacatgccagaagaagcaaaacttaagttttataaagagtatatgtatagtatgacagtatttagtctaatgaacttttgtctattgtcatttccattagatttgattgaagagcgaaatcaaggttggtataagcggttaatggtgaccccattatcatcatttcaatattatttagttaaaattagtaagacaatgtgtcagtttttaatagcaattacaattattttttcagtagctcatttttacaaagatgttcacatgactgtttttcaatggatattctctgcattaactttatggattggggttagtttatttttgactttaggattgattatcgctcaactcaacgatattcaaaaagcaagtagttttgccaatttacttaatattacactagctatattaggaggtctatggtttccagtatacacgtttcctgattggcttcagtcgatttctaaacacatgccaacatataatttaaagctacttgctatagatttagcgcaaaataaaggggtgaatatagaagcgtttggatatctcgtggtctattgtataatctttgtgagtattgctttattcatgaataagaaaggagatgtacactaa

SEQ ID NO: 5669 - DNA, 870 bp, Staphylococcus epidermidis
gtgattgaactacgacatatttctaaatctttcaagaaacataaagttttagaagatataagtattgatataaaaaataatcgttgtacggcattaatcggtaaaaatggagcaggtaagtcaacattaatagatattatcgttggaaataatcactatgatagtggtcaaatcgctgataaatccaatttgttaaataaacataaaatgggtattctttttcaaaaaacagagtttcctaaatacataaaggtttgcgaattattacatttatatcaatccttttatcaaacgtttatttcttttcatcagtttaaagaaatcacacaatttagtgaccgacaaatgaatcagtttgcatgtaatttatcaggtggacagcagaggattttagattttgctttagcattggtaggtaaacctgaactgttaattttagatgagcctacgtcagctatggatgtagaaatgcgtcaacatttttggaatgttatagataaattaaaaatgaataacactacgatactatatacctctcattacattgaagaagttgaaagaatggctgatcaagtaatgatgttagataaaggtaaaatacaattagatgattcacctgaaaatataaaaaggaatcaaagttattctttaattcgaattccttgcaaatatcaagaacttatcaatcaactgaaacataaatacgaaattgaattaataaaaaatagatatgaaataaaaacaactgatgtgagtgatgttttacaattattgaaacaatatcatgtcaatttcaataagattgaaattcttaaaaaatctttattagaagtcatgttttctaatgataagtctaaaggagggaaataa

SEQ ID NO: 5670 - DNA, 1473 bp, Staphylococcus epidermidis
atgaattttggatttttgggtaccattttaactatattgttagtagttgggtttataactaacgtagtattggcatttgtcatcatcttccttgaacgtgatcgacgtactgccagttcaacttgggcgtggttattcgtattattcgttcttcctgtcattggatttattttgtatctatttttaggacgaacggtttccaagaaaaagatggaaaaaaataacggtgatgaattacatgcatttgaagatttagttcaagaccaaatcgacagttttgataaacacaattatggttatatcaatgatcaagtcattaaacaccatgatttaatacgtatgttgttaatgaaacaagatgcctttttaacagaaaataataaaatcgatttatttacagatggtcataagctttatgaaaaagtacttgaggatatttacaatgctcaagactatatacatctagagtactatacctttgaacttgatggattaggtaaaagaatcttagatgcacttgaaactaaacttaaagaaggtttagaagttaaacttttgtatgacgatgttggttctaaaaaggttagattatcaaaatttaaacatttcagagcattaggtggagaagttgaagcatttttcccttcgaaagtacctttaatcaatttcagaatgaataatcgaaatcatagaaagattatcattatagatggacaaattggttacgttggcggttttaatgtcggcgatgattatttaggattaggtaagttaggttactggagagatacacatacacgtgttcaaggtgaaggcatcgatgcactacaattaagatttattttagactggaattcacagtcgcatcgtccacaatttaaatttgatcaaaaatacttccctaaaaaaattggggacaaaggaaacgcggctattcaaatcgcttctagtggacctgcatttgatttacatcaaatagaatatggttatacaaaaatgataatgagcgctaaaaagtctatctatctacaaagcccttactttattccagaccaatcatacattaatgcattaaaaatggctgctaatagcggcgttgaagtcaaccttatgataccgtgtaaacctgatcatccattcgtttattgggctacattttcaaatgcagctgatttattagatagcggagttaatatttacacttatcaaaatggatttattcattctaaaatattaatgattgatgatgaaatttcttcaattggtagtgcaaacatggactttagaagctttgagctgaatttcgaagtgaacgcatttatatatgatgaagatatagctaaacagttacgtcaagcatttgaaaaagatattgagcaatctaaattacttacaaaagaagtatacgacaagcgtccattatcaattaaatttaaagaaggactagcaaaattaatatctccaattttataa

SEQ ID NO: 5671 - DNA, 198 bp, Staphylococcus epidermidis
atgcaacaaataaaatttaaaactttaactgaggaaacactagagagcttagagaaaagtgttaattcgtttttaaagtctcaagagggtaatggttacaaattattaaacattactattaaacaaatcgaagaacgtgcatttccgcataatgacgaggactttaatgctattttaacattggtaactgaagcatag

SEQ ID NO: 5672 - DNA, 117 bp, Staphylococcus epidermidis; identical to SEQ ID NO: 3117

SEQ ID NO: 5673 - DNA, 408 bp, Staphylococcus epidermidis
gtgatttcatttgaaaatgattatttagaaggtgcacatgaaaaagttttaaatcgattagtagagacaaatcgaatacaagctgctggatatggcttcgatgacttttcggcacaagctgcagataaaattagacaacgtattgactgtccagatgctaccattcggtttttagtaggtggtacgcaaaccaatcaagtagttattaactcaatgcttgatagttatgaaggtgttatatccgctgatacaggacatgtggcagtccatgaaggtggtgcgatagaattcagtggacataaagttctaaccataccctcccaagaaggtaagattactgctcaagacgttgagaattatatagaaacttttgaaagtgattttaaaaaagaacacatggtgtattag

SEQ ID NO: 5674 - DNA, 177 bp, Staphylococcus epidermidis; identical to SEQ ID NO: 2855

SEQ ID NO: 5675 - DNA, 495 bp, Staphylococcus epidermidis
atgattagatttgcacgactagaagatcttcaagatattttgacaatttataatgatgccatccttaatacaacagctgtttatacgtataagccacaacaattagatgaacgtcttcaatggtatcaatctaaagcaaaaataaacgaacctatatgggtttatgaaaaagaagggaaagtagttggttttgccacttatggttcctttagacaatggccggcctatttatatactattgaacattctatatatgttcatcaacagtacagaggactaggtatcgcttctcaattattagagaatttaattcgttacgctaaagaacaaggttatcgcaccattgttgctgggattgatgcatcgaacatggatagtatcgcattgcataagaagtttgacttctcacatgcaggtacaattaaaaatgtaggttataaatttgatcgatggctcgatttatcattttatcaatatgatttatctgattcataa

SEQ ID NO: 5676 - DNA, 612 bp, Staphylococcus epidermidis
atgaagcagtggatgaatagattaatcaccttaataggcgtattgttaatcattttagctatttatttattctcaaagccatatatcgataattatctacatgaaaaagataacgatcataaaattgaaaattatgataaaaaggaaaaagaacagacaaagacatctaaatcgacgccaaagataccttccgataaatctaaaatggctggttatatagaagttccagatgcacaaataaaagaaccagtataccctggtccagcaacaccagaacaactcaatagaggtgtaagttttgcagaaggtgatgaatctcttaatcaacagaatatttcaattgctggtcatacgtttacagatcgttcgcactatcaatttacaaatttaaaatcagccaaaatcggtagtaaagtgtattttaaaactggaaatcaaactagaaagtataaaataactaaaatacgtgatgttaagcctacagaggttaaggtcttagacgaacatcctaataagaaaaatcaattaacattaattacttgcgatgactacaacgaagaaacgggtgtttgggaaacaaggaaaatattcatagctacacaaattaactaa

SEQ ID NO: 5677 - DNA, 810 bp, Staphylococcus epidermidis
atgattaaagccattgcggtagatatggatggaacatttcttgacacaaataaacagtttgatcgaaatcgttttgaaactatttttaaagaattaatagataaaaatattaagtttgtagctgcgagtgggaatcaatttgcaaagctaaaatcaatttttggagatagagaaatgttctttatatctgaaaatggagcagtcatctataaaggtaatcaactttacaattatcgaagttttgatcagtatatttttcaaaaagttgtaaattatttaaatttaaatcaaaagataaacaatttgattatttgtggcgtaaaaagtgcatatattttaaaagaaacaagcgaagcatttaagcaagatgcacgtacatattatcaccaactaatagagattgactccttacaaacattacctgatgatgattatgtgaaaattgctttcaatataaatcgtcagactcatcctgacttagatgagaaattagctcttaagtttaaagaagatattaaactagtatcaagtggaagagatagtatagatgttattatgccaaatatgactaagggtcaagctttgtctagattattaaaagaatggcaaatgcctgcttcacatttaatggcatttggagatgcaaataacgataaagatatgttggaacttgccgaacatagttatgtcatggctaatagtgaagataaatcattatttaatatagcgcgtcatgtggcaccttccaatgatgaacaaggcgtactatcaacaatcgaaaatgttgttctcggttattccaataaataa

SEQ ID NO: 5678 - DNA, 993 bp, Staphylococcus epidermidis
atgacaaaaattatgtttttcggtacaagagcatatgagaaggacatggcattacgttggggaaagaaaaataatatcgatgtcactacatcaacagaacttttaagtgtagatactgtcgatcaattaaaagattatgacggtgttacaacaatgcagttcggtaaattagaacctgaagtttaccctaaattagagtcctatggtattaaacaaattgcacaacgtacggctggatttgatatgtatgacttagaacttgcaaaaaaacatggaattattatctcaaatatacctagttattcacctgaaacaattgctgaatattcggtatctatcgctctgcaactcgtacgaaaattcccaacaattgaaaaacgtgtgcaagcacataatttcacatgggcgtcccctattatgtctcgtccagtaaaaaatatgactgtagcaatcatcggtacaggacgtattggtgctgcaactggtaaaatctatgctggttttggtgcgaaagtagttggttatgatgcatatcctaatcattctttatctttcttagaatataaagaaacagtagaggatgcaattaaagatgctgatattatctcattacatgtacccgctaataaagatagtttccatttatttgataacaatatgtttaaaaaagttaaaaaaggtgccgttttagtcaatgccgcaagaggagctgtgataaacacgcctgatttaattgaagcagtaaataatggtacattatcaggtgctgccattgacacatatgaaaatgaagctaattatttcacatttgattggtcaaatcaaacgattgaggacccaatattattagaactaattagaaatgaaaatattttagttacacctcatattgcctttttctccgatgaagcagtacaaaatttagtagagggtggtttgaatgcagcattatcagtaattaatactggcacatgtgatacgcgattaaactag

SEQ ID NO: 5679 - DNA, 663 bp, Staphylococcus epidermidis
atgaatcagatgaatcaaacgattattgatgcattccattttagacatgcgacaaaagaatttgaccctacgaaaaaaattagtgatgaagattttaatacgattttagaaacaggtagattatctccaagttcactaggtttagaaccttggcactttgtagtggttcaaaataaagaattgagagaaaaattgaaagcctatagttggggagcacaaaagcaacttgatacagcaagtcactttgtattaatttttgctcgtaagaatgtgacggctcatacagattacgtgcaacatttacttcgtggcgtcaaaaaatatgaagaaagtacaattccagcaattgaaaataaatttgatgatttccaagaaagtttccatattgccgataatgaacgaacattatatgattgggcgagtaaacaaacatatattgcattagcaaacatgatgacaagtgctgcattactaggtatcgactcatgtccaattgaaggatttgatttagataaagtcacggaaattctttctgatgagggtgttttagatacggaacaatttggtatttcagttatggtaggctttggttacagagcacaagaacctaaacacggcaaagttagacaaaacgaagacgacatcattagttggattgaataa

SEQ ID NO: 5680 - DNA, 132 bp, Staphylococcus epidermidis
atgatgatgcaaacagataattttgcattatttacaaaagaggttaaaataggtattacattaagtaaacgcttacattttattgagattaagcgattacttcaaatatcactaaaaaaggatgggttttaa

SEQ ID NO: 5681 - DNA, 1494 bp, Staphylococcus epidermidis
atgacaaatattaacgtaagaaattatatagatgaaagttacggcttgtttattaacaatgaattccaagctagtgatagtggggaaacattaactgtttctaatccagctaatggtgaagatttagctaaagttgcacgcgctggtaaaaaagatgtagataaagctgttcaagcagctcatgatgcatttgatagttggagtaagatttctaaagaagaacgtgcagattatttattagaaattagtcgacgtattcatgagaaaactgaacatttagcgacggttgaatcactgcaaaatggtaaaccttatcgtgaaacatcaacaattgatgtaccacaagcagccaatcaatttaagtattttgctagtgttttaacaactgacgaaggttcagttaatgaaattgatcaaaatacaatgagtttagttgttaatgaacctgttggagttgttggtgcagtagtagcatggaatttcccaattttattagcatcatggaaattaggaccggctttagcagcaggtaatacagtagtaattcaaccatcatcttcaacgcctttatcattaattgaacttgctaaaattttccaagaagttcttcctaaaggagtagttaatgtcttaactggtaaagggtctgaatcaggagacgctattttccatcatgaaggtgtagataagttatcatttacaggttctactgacgtgggttacggtgtagcacaagcaggtgctgaacgtatcgttcctacaacattagaactaggtggtaaaagtgctaatattatctttgatgacgctaatttagagcaagtgattgaaggtgttcaacttggtatattatttaaccaaggtgaagtatgtagtgcaggttcaagattattagtacaatcatctatttacgatgaattattgccaaaattgaaagaagcatttgaaaatattaaagttggcgatccatttgatgaagatactaaaatgagtgcgcaaactggaccagaacaattagataaaattgaaagttatataaaaattgctgaagaagatgacaaagcgaacatcttaactggtggtcatcgaatcacagataacggcttagacaaaggttacttctttgagcctacaattattgagattaacgataacaagcatcaacttgctcaagaagaaatcttcggtccagttgtagtagttgaaaaattcgatgatgagcaagaagctatcgaaattgcaaatgattctgagtatggtttagctggaggtatctttactacagatattcatcgtgcattaaatgtagctaaagctatgagaacaggtcgtatttggattaacacttataatcaaattcctgcaggtgcgccattcggaggatataaaaaatcaggtattgggcgcgaagtatataaagatgctatcaaaaactatcaacaagttaaaaatatctttattgatacaagcaaccaaactaaaggtttatattaa

SEQ ID NO: 5682 - DNA, 798 bp, Staphylococcus epidermidis
atgacaaattttcattctatagatgctacacaagtaacaaacgtcactttaaatgttaaagatttaaataaattaactgatttctattctaatgtattaggtttttctattgaaaaacaaacgaatcaacaaaccgtattcaacatcggaaatcttggttatactttaactttaaatgaacttaacaacggtcgacaaccggaatttagagaagcagggttattccatgttgcttatcttttaccgactcgtagcgatttagcagacttcctttatcatgctaacaatctcaacatcgcaatgggtggtggagatcaccttgtcagtgaagcgctatatttcactgatcctgaaggcaatggtattgaagtctatcatgatcgcccttcagaagactgggtgtggcgagacggttttgtcaaaatggatacattggaagttaatgtcaatgatttaatggctcaacggtcaaatgaaggttggcaaggttggccggaagaaggaaaaatcgggcatttacatctcaaaacacacaatttagaatctgcttatgaattttatgttgaaaagctagggttcgaacatatatctaatttcccacaagcactatttatgtctactcaaaagtatcatcatcatatagctacaaatacttggcagtcaaataagattagaactcaaaatgaacaaacttatggtttatgtcactttgacatatatcaacctaatgcaaatactactcatgttacctcacctgaaggctttgacattacaattcatggtaacgaaacaaaataa

SEQ ID NO: 5683 - DNA, 282 bp, Staphylococcus epidermidis; identical to SEQ ID NO: 2864

SEQ ID NO: 5684 - DNA, 948 bp, Staphylococcus epidermidis
ttgaagaaattaattatagtgtcaatcatcattttaatgttaagcggatgcagtagctttgatcatcgtaaacgcgaaagtattaatgacaagaataaaatgaaagtatacacgactgtatacgcatttcaaagtttgacacaacagattggtggaaaatatgttgacgcgcaatcaatctatcctgctggtgctgatttacactcatatgaaccaacacaaaaagatatgattgatattgccaaaagtgatctgtttgtctattcaagtcatcaattagatcctgtcgctgcaaagattacgaattcgatgaccaataatagcatgaaattagcgcttgccgaaggactcaaacaaagtgattttattcactctaaagaccatgatgaaaatcatgagcatcattcacatcatgaagaatcgaatcaagatcctcatgtttggttagatcctgttctaaatcaaaaattcgctttcatgattaaagagaaattaatagagaaagaccctaaacatcaagcttattacaataaaaattataaaatagtaaataaagatattgtgcatattgatcaacaactacaatcaataacgaagcattctaaaagagataaagttgtgatatcacacgattcgcttggatatttagcgcatcgttatggttttaaacaacaaggtgttaaaggtatgaatgatgaagaacctagtcaaaaagagattttgaatatcgttaaagatatacagcattcgcatgcgccttatgttttatatgaacaaaatattacctccaaaattacagatgttattaagaaagaaacagatactaaaccattaagttttcataatttagctgtattgactaaagaggagcaaaatgatgattcaatttcataccaatcattaatgaaaaagaacatttacgtattaaatcgcgcactcaataattaa

SEQ ID NO: 5685 - DNA, 1425 bp, Staphylococcus epidermidis
atgacaaatcaattatttattaacaatgaatttatagaaagtcagtctaaagagacaatggatgtcattaatccagctactggcgagccatttgatactatcactcttgcaactgaagaggaagtaaacgacgccattgaaaaatcgcaacaagcacaacttgaatgggagcgcgtgcctcaacctacacgtgcggaacatgttaaattacttatacctttattagaaaaaaatcgcgatgaaatagctcaattatacgtaaaagaacaaggtaaaactttaacgcaagcttatggagaaattgacaaatcaatctcatttatcgattatatgacaagtctgagtatgtcagataaaggacgtattctacaaaatagtattgcaaatgaaacgattcaaattatcaataaacctatcggagttactgctggtattgtgccatggaacgcaccgatacttgtccttatgcgaaaagtcattccagctatagtaactggttgttcagtagtgattaaacctagtgaagagacaacgttactcactcttcgattagctgaattattcagagcatcaactataccagcaggattgattcaaattgttcctggcactggagaaacagtaggtacacaattagcttcgcatagagacattcaacttatttctttaactggaagtatgagagctggtaaatctgtttacgaaaatgctgctcaaactgtaaagaaagtaaatttagaattaggtggaaacgcaccagtcattgtcacatcaaatgccgatttagataaagcagttgactatatcgtgacagcccgtataagtaatgcaggtcaagtttgtacgtgccctgaacgtatctttgtacatgaagatgttcacgatgactttttaaataaagtaacttccaaaatgaaaagcttaactgttggagatccatttgatgaaaacaccgattacggcgcaattattaaccaaaaacaacttgatagtattcatgaaaaggttcaagatgctattaaaaatggtgcaacattgatgactggtggacatcaattaaaacgccatggtttcttctacgcaccaacggtattagataacgttagaaaagacgataatgtgtttaaagatgaaatttttggtccagttcttgcgataacaacataccgcgattttgaacaagtgattgaagacgctaatgatacaaacgctggcttatcttcttatatcttctctgaaaatttaacagaagtaatgacagcaaccgaacgtctaaaatttggtgaagtatatgcaaattgtgaggctgaagaagtcgttaatggctatcacgcaggttggcgtgaatcaggcttaggtggcgctgacggtattcacggttttgaagagtactacaataccacagtaagttatatcagatactaa

SEQ ID NO: 5686 - DNA, 1050 bp, Staphylococcus epidermidis
atgaacaatgttaaagaatccatcattgttgccttcgcctttgtaggcgttgtagttggagcaggatttgcaacaggtcaggaaatctttcagttcttcactagtcatggtatttacagtattggcggtatttttattactggacttatcttaactcttggaggaatattcgtattaaatactggctttcgtcttagatctcaaaaccactccgaatctattcgttattatttacatccaacaatagctaaattatttgatattatacttacagtatttttattttctctagcaattattatgacagccggcggagcatcgactataaatgaaagtttcggtttacctttttggttaagttctctcattttagtgatacttattttgttaacattatttctaaagttcgatcgtcttatcgctgttttaggaggggtaacaccatttcttgtggcagtcgtagtaatgattgcagtgtattactttattaccggtgatttaaactttagtgatatcagtcaatattcaaatcaaaataagtcgatttcacctggttggtggtttgacgcaattaattatgctagcttacaaattgctgctgcatttagctttttaactgtaatgggcggtaagctacgatatcaatcgtccacaatttatggtggacttatcggtggtattattgtgactttactattacttttgattaattttggtcttgttacagaatttaatcaaattaaagaggcagcattaccatcattgctacttgctaagcagatttctccatccattggtattatcatgtctgtcattatggttttagtcatatacaatacagtagtaggtttaatgtacgcctttgcatcacgctttagtcgaccgtttacgaaacgttattatattcttatagttatgatggcgataataacatttgcttgtacttttgtgggattcatttctctcattggtaaagtgttccctattatgggactttttggttttatcttattgattcctgtgatatacaaaggaattttacgaaaataa

SEQ ID NO: 5687 - DNA, 1788 bp, Staphylococcus epidermidis
atgtcattggaattgcccgtgatgctaacgattgtattgttcttagcactaggcatttttagtcaatggttagcgaatagaataaaatggccatcgattgttgtcatggccatcgtaggtttgcttgtaggacctatttttggactagcaaatccaaaagaggcacttggacctgaggcatttagttcaattgtatctcttgctgtagcaattatattatttgaaggtagtagtaatctagattttagagaattaaaaggcatttctaaagctgttataagaattattacaataggagcgggaattgcatggattttaggagcaatcgctttacatgtcactatgaatttccctctgtctatttcatttgttatcggaggactattcctaatcactggtccaaccgtgattcaacccttgctgaagcaagcgaaagtaaaaagaaatgtcgattcagtattaagatgggaaagtattatcttagatcctattggacctattattgcactcactgcattttatgtattccagatttttgaggaagggataggctttgtcgttattattctctttatcttgaaactcttagctgcaattttaataggttttggtgcagcctttctatttaattggcttataggtcaagataaaattcctcaaagtttaatgccacccattcagcttgtatttattcttttaacatttagtatctgcgatgagatattatcagaatcaggtttactagctgtaacaatttttggcttaatgatggcgcgtaaaaaacgtcacgatctcatctttaaagaatcagaccactttatagataatgcatcatctatacttgtgagtactgtatttattttaattacgtcttctctcactaaagatgtgttgctcaatgtgttatcttggcagctcatactctttagtttggttatgattgtattagtaagaccaatttcagtgcttctttcaacattaggtactgaaataactaaaaaggaacgtgtagtagtagcactaatggcgcctagaggtattgtggttttaacagtggcacaattcttctcaagtttatttatggacgataaaattcctatggctcaatatattacaccagtaacttttggtcttgtatttatcactgtagtcatttatggatttggttttacacctttaagtaaactgttcggtgtagcaagtacggagccaccaggcgtgatcattgtcggagaaagtgaattttcgttccatcttggtattaatctaagggatcatggtatacccgtcatgatgttcaacttatttgaaaacacatcagaaaaagcccacgaagctgggttcgaagtatttaaaggtaatcttttatctagcaatgatagaatttattctgatttattacgttataataaatgtattttgatgacacaatcgtttatctttaacagtttagcatttaatgaattggtgcctgaatttggcttgaataatgtagatatgatgccagtatcttttaatgatgagcaagcacgaaacaatttaaatggtccaatcagaaatcatatattatttgatgaaaatcataccccacgttggtttaatcaatttattacacaacataatattgttgaagtaccggcagaagattatgaaaaaattacagaaaatgatatgttaatctatcatatcaatgaagataaagaagtgacgtttaaacgaagcaatagagatatacctgaacatgaaacaggtgtttatggtattttaaaaaatgcttatttaacttaa

SEQ ID NO: 5688 - DNA, 1965 bp, Staphylococcus epidermidis
atgacccatattacagaaagtgaaatgaaacaaaaatatctagatttactctcacaaaaatttgacagtgcagaaaaacttgctactgaaattattaacttagagtcaatcttagaattacctaaagggactgaacattttgttagtgaccttcatggtgaatacgaatctttccaacatgttttaagaaacggatctggaaatgtgcgtgctaaaattaatgatatcttcaaagataaattatcccagcaagaaatcaacgacttagcagcattagtatactatccggaagaaaaactaaaattagttaaaaataatttcgattcaatcggaacattaaatatttggtatattacaaccattcaacgattaattgatttaattacatattgctcatcaaaatatacacgttcaaaattacgcaaagcattacctgaacaatacgtttatattattgaagagctactttacaagagcaatgaatttcataataaaaagccttattatgaaacattagttaaccaaattattgaattagaacaatcagatgatttgattattggcctttcctatactgtacaacgtctagtcgtagaccatcttcatgtcgtgggcgatatctatgaccgtggtcctaaacctgataaaattatggatacattaataaattatcattctgtagatatccaatggggaaatcatgatgtattatggattggcgcctatgctggttcaaaagtatgtcttgctaacctactacgaatctgtgcacgttatgataatttagatattatcgaagatgcatatggcatcaatctacgtcctttacttacgcttgctgaaaagtattacgatgctgaaaacccagcgtttaaacctaagaaacgaccagataaagacgtcagtcttacaaaacgcgaagaaagtcaaatcacaaaaattcatcaagcaattgcgatgattcaatttaaacttgaaatgcctattattaagcgccgtccttcttttgagatggaagaacgtttagttttagaaaaaatagattatgataataatgaaatcactatatataataaaacatatccgcttaaagatacttgtttccaaactgtaaaccctaacaatcccgctgagttactagcagaggaaaaagaagttatggataagctattactttcattccaacaatctgaaaaattaagacgtcatatgtctttccttatgcgaaaaggaaaattatatcttccatataatggcaaccttttaattcacggttgtattcccgtcgatgaaaatggagaaatggaatcatttgaaattgaaggtgaacgtttaagcggtcgtgaactactcgatgtttttgaatatcatgtaagaaaagctttcgaccataaagaatctaccgaagacatatctacagatttagtatggtatctttggactggtaaatattcatctttatttggtaaacgtgccatgacaacgtttgaacgttattttatagaagataaagcatctcataaagaggagaaaaatccttattattacttacgtgaagatgttgatatgatacgtaaaatgttaaaggattttggtcttaatccagatgaaggacgtatcataaatggtcatacgcctgttaaagaaattgatggtgaagatccaattaaagctaatggtaaaatgttagtcatagatggaggattttcaaaagcttatcaatcaacaactggtattgccggatacacacttttatataattcatttggtatgcaattggttgcacataaagagttcaatagaaaagaaaaagtgttatcaatgggggcagatgaattgtcagtgaaacgcgttgtagatgaagaattgcaacgtaaaaaaattagagataccaatatcggtaaacaacttcaagatcaaattgatatcctcaaaattttaatgcacgaccgatatttaacataa

SEQ ID NO: 5689 - DNA, 615 bp, Staphylococcus epidermidis
atggaacaaattatcactgattttattagtaagtggggttatacagcgatattcattttaatcttattagagaacgtattacctgtcgttccatctgagattattttaacttttgcaggcttattatctgtgaaatcacacttatctatttggacattattaatcatagcaacaattgcttcattcattggtttactcattttgtattatatttgtagacttatctcagaagagaaattatatcgtttcgttgatcgacatggtaagtggatgaagttaaaaagtaaagatttgaaacgggcaaatgattggtttaaaaagtatggtgcatgggctgtatttttatgtcgttttgtcccagtacttcgagtattaattacaatacctgctggcattaatcgaatgaacgttatacagtttacaactttatctttaataggtactacaatttggaattttgctttaatactgctcggtcgtttgctcagtgacagttttgacgctttgatgaatggtattcatacatattcacgtatcatgtatgtcattattattattgcagtcatatattttgttatacgttatttaatgaaacgtcgtcggagtgttaaataa

SEQ ID NO: 5690 - DNA, 999 bp, Staphylococcus epidermidis
atgtcgcgttatgaacgtcaaacacgctttgcaccatttggagaagagggtcagcaaaagctatcctcctctcaaatacttatttttggcgctggtgctttaggaagccatattgtagatcaactcgcacgcatgggggctcatcatattgcaattgtcgatatggatattgttgaaatttcaaatttacatcgacaaacactcttcgatgaagaagacgcacatactttaatatccaaagtagaagcaatcaagcttaagattaatcaaattaataccaatgtcaatataacaacttatgatttagaagttacttcatcaaatatcgaaaatttgataaaaaatgtcgaaccagacatcatcattgatggcatggataacttcaaaatacgatacctgattaatgaggtttgtcacaagtatcaaatcccatgggtttatggtgcagctgttggtagtaaaggatcagtatatggaatagatcaccaaggaccatgtctaaaatgtttattgcaaacaattcctgacacaggggaaagttgcgctattaatggcgtaattccccctgttatatcaatgattgcaagctatgaagtagcagaggccgtacgttatctttcaggaaaaggattttcaaagcaattaatcactattgatgcatttaatatcaattataagtcaatgaatgtagatgcactcaaaaataaagattgcccagtgtgtgaaaaacatgaatatacgttactagaaagccaacaagaacgtactattgaggacttgtgtgggaatgcttatttatttagattcccacctaaagcttttaaacacgctgcccatttccctgggaatatggtgaaatctacttcctttgccaaattaattcaatatcaaacttatgaattcaccttgtttaaagatggtcgtatgaatgcatatggtatacacaatgatgaagaagcacatcacctatacaatacgttgttaaaatccatacgctaa

SEQ ID NO: 5691 - DNA, 768 bp, Staphylococcus epidermidis
atgtttaaaataggaaatttagaattacaatctcgtttacttttaggtactggaaaatttgaaaatgaagaggttcagtcaaaagcaattgaggcatctgaaacaaatgtacttacatttgcagtaagacgtatgaatttatatgatcgtaacctacctaacccacttgcaaacgttaatttaaaagattttatcacttttccaaatactgcaggtgccaaaacagctcaagaagctatcagaattgctgaaattgctaatcacgcaggtgtatgtgacatgattaaagtcgaagtcattggtgatgacgaaacattattacctgatccattcgaaacatacgaggcatgcaaagtattgttagaaaaaggttacactgtttgtccttacatctctaacgatttagttttagctcaacgtttggaagaattgggtgtacacgcagttatgccacttgcatcccctattggtacaggaagaggtattaataacccattaaatttaagttatattatcgaaaatgctagtgtacctgtcatcgtagatgctggtattggttcccctaaagatgcgtgtcatgccatggagcttggcgcagatggtattttactcaacacagccatttcagcggcaaaagatcctgtgaaaatggctgaagcaatgaaattaggtataaatgccggcagactttcatatgaagctggacgcattcctgttaagtatactgcacaagcatctagtccatcagaaggtttagggttcttgtaa

SEQ ID NO: 5692 - DNA, 201 bp, Staphylococcus epidermidis
atgaagtgtatcattaatggcgacctcttcactttcgatcagaatcaatcgatacaagaggttttacattcacttgaattagacccaaaacgagtgattgttgaactaaacaaagaacttatcaagcaagacaaatatgaagaatatactgtaagagaagacgacagattagaattactagaaattgttggaggcggttaa

SEQ ID NO: 5693 - DNA, 1119 bp, Staphylococcus epidermidis
atgcatgatgtactaatcattggttcaggagttattggtatgtcaattgctagacacctcagtgcaacacacttagatgttgcagtcatagatagagatgtacctggaaagcatgcatcatataaagctggaggtatgcttggcgcacaaaatgaatttacagaggatagtgacttgtttcaattagccatcgaatctcgtgctatgtttccacaattaagtaaatcattattagatgaaacaggcatagacattcaatttaaaaattcaggacttatcaaaattgctaatgaacacgatgatatctcatctataaaacgacaatatcaatttctgaatagtcaagaccgtagtgtcaaacaattatcagatgatgatttgctacaacttacacatggtgaagttaaaccttcatacgcggccattcacataccacacgatggtcaaattaatgcacatcattacacactggcattattagaatcaatgaagttaagagatattaagcgttatgcgtctacagaggtcacttcaatagaacggcataatggctattattcagtgaaaaccaatcaatcttcaacaattgaagcgcacaaaattatcgttgcaggtggcgcatggtcttcgcaattattaacacaatatcatctacaacgacaagtgattggcgttaaaggtgaagttatcttattagaaaataacgatctttcacttactgagacattatttatgactaatggttgttacatcgttccaaaacaacccaatcgttttttaattggtgcgacgagtgaatttaataattattctgtcggtactacagatgaaggtatggattggcttcttcgccatgcatatcatcgtgtacctcaactaaaagacagtcatatactgaagaaatggtcaggagtaagaccatacacagaaaaagaaatgccagtcatggatcaaattgatgatggtttatacgtgataagtggtcattatcgaaacggaatattattgtcacctattatcggtcgtgacattgccaattggctactttctggtattaaaccatcacgttattcaagttttacagttacaaggaggaataatcatgaagtgtatcattaa

SEQ ID NO: 5694 - DNA, 621 bp, Staphylococcus epidermidis
atggcgttttttattgtagaaattggggggatatttatatttattgcgattacacatcataaacaactgactagggacgatttacagcattataaacatatcgaagaagctattgatggcttgttatttcgcacttctatgaataaagaagaaaccaaagacataatacaatctttgcttcaattgggttttagtaaggataaaataatcattcatagcgacgtcacactgttagaggatttacaccttaaacgtatccattttaaagaaaatgacacaactgctttcacatataaagaagctcatcctgatatttgtgtaagtatgtctacacatgacgttgaaacagtaaaacgatgttacgaaaatggtttggattctgtcttttttggacatatttttcctacctcttcacatccaaatgtaccaccgcgttctaaagaagctattcaacaggcattaaatgttcctatccctatttatgctattggtggtattaatgaacattcacttcaaaagatgccacctggatttaaaggtatatgtgccatatcatattttaacaatgcttcactagaagaaattaaacaattaagaaaggagtggtctactcatgcatga

SEQ ID NO: 5695 - DNA, 1275 bp, Staphylococcus epidermidis
atgaaagaaaaacgtagtaatgttcgttggtattttgcaatagggttcttctttattggggttattgcttacatggatcgatctaacatatcttatattgcagtaccgatgatgaaagatttggggttaactaagacacaatttggtttattagcatcatttttctccctaggatatgcattaatgcaagtaccttcggggatgttagcagagaagtttggaccacgtaaaatgattactgtcgctttagtttggtggagtgcatttaccatcttaacagggatgattaaacatcatggtttactttactttattagattcttatttggtgttggtgaagcgccaatgtatccatccaatgcagtttttaactctttttggttcgctaaaaatgaaaaaggtcgtgcatctagtgcgttgttagcaggatcttattttggtccagttttagcacctatcatcacgatagccattgtcaatgcttttaactggcaagccgttttctacattttcggggtagtaggaattttaatggcagttctttgggcaattattgctaaagacttaccagaacaacataaaatggtaaacgatgccgagaaaagatttattactcaaaatcgtgatattgtcgcaactgagaaatctttaccaccgtggaaacgttttttaagtcatttcagtttctacgcaatcgcattgcaatactttgtagttcagtttgttatcgcgttgttcctaatatggttaccaacatatttaactgaacaatatcatgtgaatttcaaagaaatgactatcagtgcattaccttggttatttatgttcttcttaattttatttgctggagctatttcagacaagattttgaatacaggtcaatcacgttttgttgcacgtggggtaattgcgattgcgggatttgtggtattctcaatttcaattttcttagcagtacatacagacaacttatatgtaaccattttctggttatcactttgtttaggtggcgtaggtatttctatgggaatgagttgggctgcagccactgacttaggtcgtaatttctccggaactgtgtcaggttggatgaacttatggggaaatgttggcgcacttattagtcctttacttgcaggaattgttgtagatcatttaggatggtcaatgacattacaactcttaatcgttccggctattatagcagcaattctatggttcttcgttaaaccagataaacctcttgttgttagtgaagaacacgttaataaataa

SEQ ID NO: 5696 - DNA, 291 bp, Staphylococcus epidermidis
atgattataattaatgctaaattaaaaatcgatgctaataaacgcgaggattatctaaaacttatgaaagaattagtcaaaaattctagaaaagaagacggtaatttattctatcatcattacgaagatgtaactgagaaaaatgtctttgtcgtagttgaaaactataaagacgaacaagcggttcaagtacacaatcaatcagatcactttaaagtttttagtgataatattagtcaatatttaattgaagaacctcaaattgatgtaagtcaacctattcaattataa

SEQ ID NO: 5697 - DNA, 1917 bp, Staphylococcus epidermidis
atgcaacaaatcattaactctttgatacacttcgaccgttcaaaaattgatatagctaaaggaatacgacaaggatttttaatgatattaccagcattgataggttacttattaggattccctatgtttggtattttaatatcaacaggtacgctagcacatgtctacgtttttagtggatcaccgcaatctatgttaaaaacagtcatcacctgttcactatcatttactatttgcatgattcttggcaccttaacagtatctcagcctattttatttggattactattactggttgttgttacaatcccatattatacgtttaatgcactaaaaatcgctggtccatcatcgacattctttttagtaacgttttgcttatctataaacttaccgatagccccagaagaagcgcttttacgtggatctgcaattctcattggtggtatattggctaccataacagtaattttaacaatcatatttgctaaagagaaagcagaagacagagcaattcatgcggattttaaaacattacataacttgctatatcattttgatgagccagaggatttcaaagcatatgctcgaaacgctgttacagaatttagaaattctgaaaaacttttaattacctcaacatcaggtggtaatggaaaattaagtaaaaggtttcagaaattaattttattacacacatcagcacaagggatatattcagaattactagaactcaatgaaaatcatattcgtccattaccaagtgacttagttgaaatgatggatcatatcattaatagtgttcaacaacctaaacaacaatatcgaccgtggtcaaaagttgttgatgtggcaccagaatttcaaaatttaatggatcatattttgaaaatagatgaaatgattcacgcaaacgataatcaaattaaatatgaagcagatattcgcaagcctttatatagtaagcgaatatatcaaaatctaactttcgactcaattgtatttagaaatgctttgcaatatacagttattatggcaatagctatatttattgctctagcgtttaacattcaaaaagcgtattgggtgccattgtcagcgcataccatcatgttaggtaatgtgacaacgattcgtacgttagacaggtcacttgctagaggtattggaacgataatcgggactattgttttgtcgggaatcttggcatttcatatcgatcctattttcgctattatcattatgggattttctgccatgatgacggaagcgtttgtagcatctaactatgcatttgcagtcatttttattacgacacaagtcattatgctcaatggtctagcctctcaaaatttaaatattgagatagcgtacactcggattattgacgttctgataggtatagctattgcagttattggtatattcatactcgcgcgtaaaactgcatcctcaatgttatctgatgctattgccgaattggtacgtaaagaaggtattttatttcattatttattttcaaaaaataaacaggaaacgaatgaacgtgatagggtagaaagtttaaatttaaacgtcaaaatcagtaatgtgacacagatttacaattcagcgaatggtgaattgtttagtaataaagaagcggtaaggtattactatccaagcatatttgctctagaggaaataagttttatgctagagcgtgccatgaataataaacatcgacaaacaataaatgatgatttaatgggtgaatatttagtcgtatttgaaaatatagctaagcatttccaatttcaagcagatttaaatctcagagacatgcaaccattacctcaatacaattacatccgtgcttcccttatgaatatacaacgtaattgtgttgaacaacgtcaggccatcacaaaagattaa

SEQ ID NO: 5698 - DNA, 414 bp, Staphylococcus epidermidis
atgccttggacgatggaagattatcctcaaagttggaaaaactttgaagaactcgaacggaaaaaagcgattgatattggtaatgcgatgctcaaagatggctataaagaatctgatgtgatacctattgctacaaatcaagctgaaaaatggtatgaacatgcttcaaaagaagaattagagacgttaaaaaacaaacatatcacgcaacatcaagaagatgaatcagctaatcctaaacttaacgaagaaaatgttcatgtatattatgaagatcagctatggaaagtaaaatctacagaggctagacgagcttcagatacatttgacacaaaatctgaagcagttaaccgtgcacaacatatcgcagagaataaaggtaccaaagtgattgagcatcgaaaagatgagtga

SEQ ID NO: 5699 - DNA, 702 bp, Staphylococcus epidermidis
atgtatgtagagagaaagcctgcactttatatcgaagatttacgagacgaattcaaaaatagcttaaaacattttaaagatgatgatgaagcatttaatacattagttggatttgtggaactggaccacctatattcttcagcacttaaagaaataagtacaaaattaagtattttagatgataactttaactatcaatataaacacaatccaattcatcatatggaacgacgagtaaaagagatgcacagtttagttaaaaagttgaatcgtaaaggatttgaagtaagtgcacaaagtgctaaagataacattatggatattgctggtatacgggtcgtatgtaactatttagacgatgtttatgtcattgaaaaaatgttattaagacaagaagatgttaaattattaaaacgtaaagattatatcacacatcctaaagaaaacggctatcgaagtttacatatcgtcgtatctattccagtatttttagcagattcagtagaagtaacaccagtagaaatacaaattcgtacaatcggcatggatatgtgggcaagtttagaacacaaaattcgttataaaaatgatacagacactgaaaaatataaaggactattagaacaatgtgcatcagaaattacaaatgtagaaagtaaaatgcaacaaatacattcagaaatttcaaatcgagagaagtag

SEQ ID NO: 5700 - DNA, 774 bp, Staphylococcus epidermidis
ttgaatatatatagaaagataatagaaagttacattttatacgatgatgatattctcggagcattttacggtggaagtattgctcgaaatgattcggacaagttttcagatatagatttaagaattataattaaagctaatcaaaaaaagtgtaaaattttaaaggaatttattaatttatttgataatattttatttgttgaaaatcagactaatgaattcgctataatacacttagaaaatcttttgaaaattgatgtcttaatattttataagcaagaattaatccccagtatttggtttaacaatattttgattgttaaagataaagatttctttttaagtgaattaaagaagaaatctgatgttacgactaatataacaagtgaaaggttatgtaatatttgtaataagtacttagcatacttgatagagtcttacaaaagatatcaaagagatgaattattttatctgcaatacgccattaatatgatggctaattctctttgccatttatggtatttagaaatgactgaagaacccaattctttgggagattggtctaaatatgaagggagaaggagtaaattaaatgaattgcagttagaaacattaaataaagtatacactaaatcgtattatgaaaaattagcaatattaaatgattcctttttggaagtattaaaatatattgatattaaacatcactttaatcattacaatgaatataaaaaactagttaaaattattatgagtaaaagaatagctgaataa

SEQ ID NO: 5701 - DNA, 918 bp, Staphylococcus epidermidis
atggttatttcaaagaaattagcatttatcactataggtatcttagtatgtattcttttaagttcacctctgatcgatcaacagatttcaaattatttcatgaatcaagattcaattttcggtactttatttcaaaactacggtttatttccacctacgctcatattaattatttcaactgtaattttaaattattatattttcactacatttcaaaataaattagcaaaaacgttaactttgattttatcttttatctttacgttgataaaaaccaatgaattcgtgtcagaaactgctcaatatatgttatctacatcagaaaacatcaaaaatcataagccaatgggtatggcaaataatgaaggaaacgctggaaatgctttatctttaggaatgagtttttttatttctttgattatcattataattatcacttttatttgttatcagttttggttaaaacatacaaataaccaagaacttgatcatttattcaaagtttcacttattagctttatgattttatttattggattagaactcgttgatagcttgaaacatttatggggacgttttagaccatatgaaatcactgacaaagccggacatttcactcactggctcacaataaatggaaacactggacatagttccttcccttcaggacatactggaaatggtgcatttctaatgtttatcgcattttactttaagaaattacgcactcaaaaaatagtgtttagtatcggattatgttatagcattttaatggcattgagcagaattcgtattggtgcacatttcactagtgatgtaacaatgagcttgctcattatgttttcactcatggttattgcagattttatcattaataaagttaacatcctgaataaaattcatggtaataattcatag

SEQ ID NO: 5702 - DNA, 876 bp, Staphylococcus epidermidis
atgattaagcaaaattttacaactaaagtttatccacttaaacaatttgagggagaatatagtgaagttgcctacgcaggagatagccaagctgatgatgtaattgtatttattcatggtgcactcttaacatataaaattatgacgatgttcgagccttacttcagagattacaaattaatatttattaattgtccaagtcgtggtagaagttcagatttagatcgtgacactcatacattagatgattacgctgcacgtatatatgatgtattaacgcaaattgttaaggagcaacaaataaaagaactgagtattgtcggttattcaatgggaggaatgattgcgacacggttacttaagtataatacattaccagtctctcatcttatttatttacatagcgcagcgaaaattactccagatgcaagtatgttagcacgattatttactagtgagagtaagagagcagtgttaaaagatgaaattaaggcagtgaaaaatcttcctcaatatatactagataaaacgatttatgcacaaaaggaaaacgcacttgatttggtacaatttattgcacctattaaaactataattacggatatgatttacacgattaatacagattatttaccagatatcgatgagattaaacaatttccgaaaatattatttatgtctggaaaagaagatcaaattattccttatacggattctcaagctacgttagaaaagtttaaggcgttaggtggagaaactaaagaaattatttatccaggaattggtcatatcgatttcccaagtgttttagaaacccaatcggatggacaaactggcgtggtagatgaaattaaagcgtggatttcaaaaaaataa

SEQ ID NO: 5703 - DNA, 723 bp, Staphylococcus epidermidis
atgtctatgtcgatttatacttcaggagatatagctcataaatgccatgtgtcaacacgcactattcagtattacggtaaacaaggaattttatcgccaaactatactactgaaactaacagacgcttttacactgataaggaagtggagaaacttgaactgattttactacttaaggaaataggttgcacaattaaagaaattaaagtgttattaaaagatgattcatcaatgaaatctctttacacgtttcttcaaatcaaaaagcatgaaatacaacagtcaataacagataaagaaaacaaggtatgtaaaatagagcaaattcaacgctatgttcatcaaaattcaatttctccaattcattatttacaagatatagctatttatatggaagaatctcatagactcaaaggtgtcagaaagaaattatggttaagtataactctgattggttcattacaatatggtggtttgatcacctcaattgtaactcaaaggaaaaagcctttcttgtcgatgatgcctgtggtagctatgtattcactttggttaacgaaaaagtataaaaagaatgtttcatatgtttgtcctaattgccaccatgtgtttaatcctagtgtcattcattttgtaacagcatcacatacacctaaaacaagaaagcttcaatgtcctgattgtcacgaaatgcattactgtgtagaaattgctaagctatga

SEQ ID NO: 5704 - DNA, 1359 bp, Staphylococcus epidermidis
atgtttaatttcttaaaaccagctagacatatcaaatcattgccatcagaaaaagtagatgatacgtataaaagactacgctttcaagtctttttaggaatatttatcggttatgctggttactatttattaagaaagaacttctctttagcaatgccttcattaattgagcaaggctttagtaaaggtgaattaggtattgcattatctgcagtatctatcgcatatggctttagtaaatttgtaatgggaactgtcagcgatcgaagtaatgctcggatgttcttaactttaggtttagtattgacagcaattattaacttattattaggatttattccattctttacttcaagcataactattatgtttatcatgctgtttttagttggttggttccaaggaatgggctggccaccatctggacgtgtgttagttcattggtttagtgtcagcgaacgcggaagcaaaacgtcaatatggaatgtagcacataatgtaggcggaggtttaatggcacctattgctacgtggggtatttccatgactgcattatacaacttcggttatttaaaagggtttgaaggcgtctttatataccctgcactattggctatcattattgccatcttgtcttacatactaattagagatacaccacaatctcagggtttaccaccaattgagcagtataaaaatgattatgccacttcaactaaacaaacaattgaaacagaactaactacgaaagaaatattatttaaatatgtacttaataacaaatgggtatgggcgattgcttttacaaacattttcgtttattttgtgcgttatggtgttttggactgggctccgacatacttaagtgaggaaaagcattttgatttaagtgcttcaggttgggcttacttcttatacgaatgggcaggaattccgggcacgctactctgtggttatctatctgataaactatttaaaggtcgccgtggtcctgcaggcttcttctttatgttaggcgtaacaatctttatccttatatattggttaaatccaccaggtcacgcatggttagataatctttcattaattggtattggtttcttaatttatggtccagtcatgttaattggtttacaagcgttagattatgttcctaaaaaagcagctggcactgcggctggtctaactggtctatttggatacttattcggtgcagttatggctaatattgtattagggtttgtagttcaacattttggatggcatattggctttgtgttattaacagtcatcagcatactcgctatgttatgtttcattttaacttggaataaacgtggtcaagaacaaatcgactag

SEQ ID NO: 5705 - DNA, 681 bp, Staphylococcus epidermidis
gtgacgtatggttatccgaaaaagtggaaggaaaacatgacttcaggagaagtaatagctgctgagttacgtttaggaatagtgagtggtgaaattgaatcccatatacaactaagtgaaaatcaagttgcacaacaatttaatgtgagtcgttcaccagtcagagatgcatttaagttacttcaaacagatcaactgattcaattagaacgtatgggcgcacaggtacttccttttggtgatcaagagaaaaaggaaatgtatgatttgcgtttgatgctcgaatcattcgccttttcaaaattaagtggaacagatacacaacatattgttaaggaaatgaaaaagcaattagaaatgatgaaggttgcagtccaatttgaggatgctgaagcatttacacaacatgattttgagtttcatgaggtgatgattcaagcaacaaaccatcagtatcttaaagtgttttggaatcaccttaagcctgttatggaatcactcatactcatttccatgagacaaagaatgactaatgaccccaaagatttcgagagaattcatagtaatcatcaagtttttatagatgctgttgagaacgatgatgcctccatattgagaaaagcattccatttaaattttgatgatgtaggagaaaatattgaagcattctggttacgttaa

SEQ ID NO: 5706 - DNA, 1542 bp, Staphylococcus epidermidis
atgaaatatatgattggtgtagatatggggacaacgagtacgaaggctgtgctatatgatgaaaatggtaagtttataatgaaacataatattggctatgacttacatacaccaaacgtagatgtgtctgaagaaaatcctgatgaaatatttgatgctgtgcttatgacggttaaatatattgtaagagaatctggcatagcaaaagaagatattaagtttatttccttgagtgcacaaatgcatagtttgattgctatgaacgagaataatcaacgtttaactgaaaatatcacttgggctgacaatcgtgcgaatgattatgctgatttaatagaaaaatcatatggcggttttgaattgtatcaacgaactggtacaccgattcatcctatgtcaccattatctaaaatcttttggatgagacatgaggaaccgaaaatatttaaacaaacagctatgtttgcagatttaaaaacatacgtactgtttcaattatatgaaagattcgtcattgattattctttaggatcagctacaggtatgatgaatttagaacaattagattgggataataaggctttagaattgttaggtattgaaagaaatcagttaccacaacttgttccaactacacatgttttaactggaatgaaaaaacgctacgcaacgttgatggggattgatgagcaaacgcctgtgattgtcggagcgagcgatggcgtattatctaacttaggtgtaaatagttatcaaaaaggtgaagttgctgtaactattggcacatcgggcgcaattcgtacggtaattaatcagccaaaaacagacgagaaggggcgaattttctgttatattctcgataaagatcaatatgtgattggcggtcccgtcaataatggtggtgtcgtcttgagatggttacgagatgaaattttagcgagtgaagttgaaacggctaaaaggttgggggtcgatccttatgatgtgttaactcagattgccagcagagtaaaaccaggtgcagaaggattaatttttcatccctatttagctggagagcgcgcaccattgtggaacgctgacgctaggggttcattcttcggattaacattatctcacaaaaaagagcatatgattcgtgcagcattggaaggtgtactgtataacttatatacagtttatcttgcattaattgaagtgatgaatgaaacaccgacaacaattaaagcaacgggtggttttgctaaaagtgaaatttggcgacaaatgatggcagatatttttgatacagacttaatcgtacctgaaagctacgaaagttcatgtctaggtgcatgtgtacttggaatgaaagctctgggagaaatagatgatttttcagtcattaaagatatggttggtacaacacatgcccatgaacctaaccaagaaacagttgccatctaccaacaacttgttaccattttcattaacattagtcgttctatgactgagaactacagtgatattgcgaatttccaacgagaacatttaagtgattaa

SEQ ID NO: 5707 - DNA, 1359 bp, Staphylococcus epidermidis
atgtttggagagatttggccactcatcagtgttgtattaggaattattatcttattaacattaattattggattgaagcttaatacgtttatttcattaatcattacctcaatgataacggcgttattattaggtatgccacttaacaaaattatggaaaccattgaaaatggtatgggcagtacgttaggtcatattgctttaatctttggcttaggtgcgatattaggtaagttattagccgacagtggtggcgcaacacgtattgctgatacacttattgcaaagtttggtcagaaacatgttcaatgggctatgttgatagcagcatttatcgttggtattgcgctattttttgaagtaggtcttgtactattaataccactcgtatttacagtagctaaacgcgcaaatgtatcaatattaaaattgggactaccaatggtcacagcgttatctgttacacacggattcttaccaccacatcctggacccgttgtcatcgctaaggagcttaaagcaaatataggtgaagttttgttatatggtatgattattgctatccctgtaacacttattgcaggtccaatctttaatcgatttgcacaaaagatggttccaacagcctatacgagagaaggggatatttcttctttaggtactcaaaaggaatttaaagaagaagagatgcctggtttcggaataagtttattgactgctattttacctgttattcttatgttgatttctacaattgtgcaactgattacaggacacgaagaagcaacaaatgtattcgaacaaattgtttacttcataggaactgctggtactgcaatgcttatcgcagtgatatttgcaatctttacaatgggaatgaagcaacaacgaaaaatggaagacattatgaaatcagttacacatgctatttatccaatcggcatgatgttactcatcatcggtggtggtggtacatttaaacaagtgctcatcgatggtggcgtaggtgatacaatcgctaagatgtttgaaggaacaagcatgtcgcccattttattagcatggattgtagctgcagtcttaaggatttcattaggatcagctacagttgctgcagtatcaacaacaggcattgtgttaccacttttagaacattcagatgttaatgtagctttggtcgttcttgcaataggtgcaggtagcgtaattctctctcacgtcaatgatgctggattctggatgtttaaagaatattttgggctgacagtcaaagaaacatttttaacatggtcgttattagagacaattatttcagtatcaggtattttatttattttatttatcagtttatttgtatag

SEQ ID NO: 5708 - DNA, 867 bp, Staphylococcus epidermidis
ttgaaaaacataaaaaaagcaatcataccagctgctggtttaggtactcgttttttaccagcaactaaggcgatgccaaaagaaatgttaccaatattagataaaccaacaattcaatatattgtagaagaagcttttaatgcaggaatagaagatattattatagtgactggcaagcataaacgtgcaattgaggatcactttgacaatcaaaaagaactagagatagtacttgaaagtaaaggaaaagcagatttacttgaaaaagtacaatattcaacagatttagctaatattttttacgtgcgacaaaaagaacaaaaagggctaggacatgcaattcatactgcaaaacagtttataggtaacgaaccatttgcagtgttattaggagatgacattgtagagtctgatacaccagctattaaacaattaatggatgtttatgaagaaacaggccattcagtaataggtgttcaagaagtgccagaatctgatacacatcgctatggtgtgattgatccttctgctaaagagggaagtcgatatgaagtacgtcaatttgtagaaaagccgaaacaaggtactgccccgtctaatttagcaatcatgggtcgttatgtattaacaccagaaatttttgattatcttgaaacacaacaagaaggtgctggaaatgaaattcaattaactgatgcgattgaacgaatgaatagcaaacaacaagtgtatgcatatgattttgagggtaatcgttatgatgttggagaaaaattaggatttgttaaaacaacgattgaatatgctttaaaagatccagaaatgagtcaagacttaaaagcattcattaaacaactagatatttaa

SEQ ID NO: 5709 - DNA, 1641 bp, Staphylococcus epidermidis
atgatagataattggatagatgtattagatgaaagtttagtcaaagatttttataataatcaaacttccgaagagcaacaagaaggacttgatactacactgtcttttggcacggctggtattagagggaaattcggtttaggcgaaggccgattaaataagttcaccgtatctaaagtagcgttaggctttgcccattatttaacatcaagtatcgcgcatcctgtcgtcgtcatacattatgacacaagacacttatcacctgattttgctcaaattatcgctaatattctagcaagtcttgatattaaagtttatcttgctgatacatacagaacaacacctgatttatcatttgcagtcagatacttacaggcggatgcgggtattatgattacagctagccataatcctaaagattataatggaatcaaagtgtatggagaagatggtgctcaattatcaaccgacgattccgcacgactaagcacatatatcgataagttaggtcatccgcttcatattaatttacctagtttaactactgaacaacaaacattaattcattcagtcccgagcgaagttagagaagattatttcaaaaacgtacaagacttagttggaacgattccacagtctgatttaaaagttgtctttacaagcttgcatggtacgagtgtgccagttgtacctgacatcttatcttctcttaactttaatcaatttgagttagttgcatcacaatgtgaacctgattcagatttcagctctgtagtcagtgcaaatccagaggatcataaagcgtttgatcaatcgatagaacttgctaatcatattgatgctgatttacttattggcacagatcccgatgcagaccgtttaggaatagttgaacgtgatgctgaaggtaacatccactattacaacggaaatcagattggtgcacttttgttaaattatcgtatcaaacaaacagaaggattacctaacagaattatgttccaatcaattgtaagtggtggcttagctaaatctcttgctcaatatcataatgtcaatttcaaagaagttttgacaggttttaaatatatcgcagctgaaataagacatctgtctcctgaacaaaactttatttttggctacgaggaaagttatggcttcttagcccgtcctttcgtgagagataaagatgcgattcaaattgtgccattaatgattaagtatgcagctgaattaaaaaacaaaggacgcatgcttaaagatgaattagaagacattactcgaaatgtcggtaactttaatgacaagcttttctcacatacatttgaaggtactcaaggcaaggcaaaaatcgaaaatattatgactcaattcagaagtgaaacaccttcggaaatgtgtggtcttaaagtcattgcaatcgaagattttgaaacaggtaaaaagactgacttacaaaatgatgaagtcagcgatataactttacctaaagcgaatgtaataaagatatactttaatgaaggatttattgctttgcgtccttctggtacagagcctaaaattaaactttatgtatcactttcttgtgaccattttgacgtagttgcacaaaaaatgaatgatgctatatttaactcttaa

SEQ ID NO: 5710 - DNA, 459 bp, Staphylococcus epidermidis
atgtcgtattggtttgaagagccttatcaatcattaagcgaattagaaaatttatatacaaagcatattttagatgaaacagagcgacgtttcattgttgaagagggatcaacatctgtaggcgtggtagagttattagaaattaactttatacatagaacttgtgaagtgttaattattatcgatccgcagtatgcaaataatgggtacgcgaaaaaagcctttaaaatggctattgactatgcttttttagtattaaatatgaataaggtatacttatatgtggatattaagaatgagaaagcagtacatatctatcaaagtaataatttcgaaatagaaggaacgttaaaggaacacttctatacaaggggagaatatagagattgctatgtaatgggcttgttaaaaaggaattgggttaataagaatgatgatgatttgtctcatataagatga

SEQ ID NO: 5711 - DNA, 1338 bp, Staphylococcus epidermidis
atgaaaagaccaataattcaaaaattaaatcacttgatagagaaaaaagctatctctatgcatgttcctggacataaaaacatgacaatcggctacttaaataggcttgatttagcaatggatatgacagaaattactggattagatgatatgcattatcctgaaggaattattttagaaagcatggagaattttaggaaacataaaaactatgatgctttcttattagttaacggaacgacttcaggtatattatcggttatccaagcgttttcgacaagaaaaggtaaatatttaattagtagaaatgttcataaatcagtatttcacggtttagacataacacaacaacaagcgacaataactaagacagatgtcagtaagaaaacgaatcaatatgtaaatccaaagataaatcaagataaaaatcaatattataaacttgccatctgtacataccctaattattacggtgaaacttttgatatttctcaatatatcaaacaattacatcacagagggataccgatattagtagatgaagcgcatggtgcacattttggtttatatggatttccagaatcctcaatgaattttaatgctgattacgttgtgcagtcatatcacaaaacactccctgcactaacaatgggatcagttatatatatacataaagatgcaccattaagacaacaagtcatagattatttaacttatttccaaacgtcaagtccttcgtacctcattatgtctagtttagaattagcgaataaattttataaagaatatgattctacattatttgaccaacgaagaaagatgttaattgatttattagtaaatatgggatttacagttatagaaccagaggatcctttaaaattggttgtgagttttgagggtgttgaaggttatgatgtgcaaaaatggtttgaggataaagaaatttatgtagaattagctgatatgtatcaagtgttactcgttctccccctatggcatgaaggagataaatttccttttaagttgttgattgaaaaaattagagaaattaacgtgccaaaaaaatgtacgcgcgacataaaacctcttaattttatgacgggttttagcgaatacaaaactgttcattttcaaaatacgaaagaagtgtctattaaaagggcagaaggtaaagttttagcacaacatatcgttccataccctccaggtataccggtgatgtttaaaggagaagtcgtgacgtctcatatgatagacttattaaataaatatgataaacaaaatattaaagttgaaggtttaaatcataaaaaaatattagttaaggatgaataa

SEQ ID NO: 5712 - DNA, 612 bp, Staphylococcus epidermidis
atgtctacatttataacgtttgaaggtccagaaggagcaggaaagacctcagtaattaaaaaagtaagcgaaagattagctaaagaatatgatattgttacaacacgtgaacctggtggagtattaactagtgaagaaatacgtcgtattgtacttgatggagatagtatagacattcgaactgaagctatgctgttcgctgcatctagacgtgaacaccttgttgaaaagattatcccatctttacaggcaggtaaaattgtcctttgtgatagatatattgatagttcattggcttatcaaggttatgcaaggggtataggaattaaagaagtaaaattattaaatgaatttgcaattaatggtttgtatccagacttaacgatttatttagatgttgatgcggaaattggtcgtcaaagaattctaaaaaataacagagaacaaaacagattagataaagaggaaaaagcttttcatgaaaaagtgatcgaaggatatcaaaaagtgattagtgataatcctcatcggtttattaaagtcaatgctaaccatagtttggataaagttgttgaagaaacataccaatctatcatcaaatatttaaaataa

SEQ ID NO: 5713 - DNA, 330 bp, Staphylococcus epidermidis
atgaaaatgattatagcgatcgttcaagatcaagatagtcaagagctttcagaccaactcgtaaaaaacaatttcagagctacaaagttagcaactactggtggatttttaagagcaggcaatacaactttcttatgtggggttaaggatgaccgtgtcgacgaggttctatctgtcattgataatacttgtggtaatagagaccaacttgtttcaccaataacaccaatgggtggtagtgcagattcatatattccttatccagttgaagttgaagtaggtggcgcgacagtatttgtaatgccgattgaagcatttcatcaattctag

SEQ ID NO: 5714 - DNA, 927 bp, Staphylococcus epidermidis; identical to SEQ ID NO: 2898

SEQ ID NO: 5715 - DNA, 804 bp, Staphylococcus epidermidis
atgcccaatgttgtaggtgttcagtttcaaaaagcagggaaattagaatactacgcgccgaatcaattagatgtaaaggttggtgactgggttgttgtccaatctaaaagaggtatagaaattggccacgtaaagtttccattacgtgaagttgatgtagaagatgtcacattaccgctaaaaaatatcattcgtaaaatgaatgaagatgatcaagaaacatattatcgtaatgaacgcgatgccaatgatgcgttagaattatgtaaaaaagtagttaaagatcagcaattagatatgcgattagttaattgtgaatatacattagataaatctaaagtgatttttaattttaccgcagatgatcgcattgattttcgcaaacttgttaaagtcttagctcaaaatctaaagactagaatagaattacgtcaaattggggtaagagatgaagcgaaattattgggtggtatcggtccttgtggacgttctttatgttgttctacatttttaggagatttcgaacctgtatccattaaaatggcgaaagatcagaacctatcattaaatccaactaagatttcaggagcttgtggtagattgatgtgttgtcttaaatatgaaaatgactactatgaagaggctcgaactcaattacctgatgttggagatatgattcaaacaccagatggtcacggaaaagtgataggattaaatattttagatatttctatgcaagttaaaatagagggtctagaacaacctttagaatataaaatggaagagatagaagtattgaattaa

SEQ ID NO: 5716 - DNA, 348 bp, Staphylococcus epidermidis; identical to SEQ ID NO: 2900

SEQ ID NO: 5717 - DNA, 726 bp, Staphylococcus epidermidis; identical to SEQ ID NO: 2901

SEQ ID NO: 5718 - DNA, 249 bp, Staphylococcus epidermidis; identical to SEQ ID NO: 2902

SEQ ID NO: 5719 - DNA, 840 bp, Staphylococcus epidermidis; identical to SEQ ID NO: 2903

SEQ ID NO: 5720 - DNA, 1971 bp, Staphylococcus epidermidis; identical to SEQ ID NO: 2904

SEQ ID NO: 5721 - DNA, 771 bp, Staphylococcus epidermidis
atgttaatcgatacgcatgtacatttaaatgatgaacaatatgatgaggatttaaatgaagtgatatctcgtgcgagagaagcaggcgtagatagaatgtgtgtagtaggttttgatacacctactattgaacgtactatggagctaatagataagtatgactttatctatggtattatcggttggcatcctgttgatgcaatagattgtactgatgaaagattggaatggatagaaagtctttctaaacatcctaaaattattggtattggtgagatggggttagattatcattgggataaatcaccttctgatgtacaaaaagaggtatttaaaaagcaaattgcattagctaaacgtgttcaattacctattattattcataatcgtgaagcgactcaagattgcatagatattttgattgaagaacatgcagaagaagtgggcggaataatgcatagttttagtgcttcacctgaaattgctgatgtcgtgattaataaattgaacttctatgtttcgcttggaggacccgtcactttcaaaaatgcaaaacaaccaaaagaagttgctaaacacgtaccaatggatcgtttgttatgcgagacagatgccccgtatctatccccgcacccttatagaggtaaacgtaatgaaccagaacgtgttactttagtagcacaacaaattgcagatttgcgtggtatgacttatgaagaggtctgtcgccaaacaaccgaaaatgctgaacgtttattcaatttgaattaa

SEQ ID NO: 5722 - DNA, 546 bp, Staphylococcus epidermidis
atgaaaataaacgaatttattgttgttgaaggtaaagatgatactgaacgagtaaaaagtgctgtagattgtgatactattgaaacaaacggtagtgcaattgatacatatactttagaagtgatacaacacgcgcagcaaactagaggtgtgattgtactgacagatccagatttcccaggtgataaaattagaaatactatacgggaacatgtttctggtgttaaacacgcatatgtagatagagaaaaggccaaaagtaaaagaggtaaaataggaatagaacatgcaaacattaaagatattcaagaagcattaatgcatgtaagttcaccacttgaagaagctaaagaaactattgataaaagtgtactcattgatttgggattaattatcggtaaagatgcaagataccgtagaaatatcttaggtcgaaaattacacatcggtcactctaatggaaagcaattattaaagaaacttaatgcttttggctatactgaagatgatgtcagaaaagcgctatttgaagaagaggagaattaa

SEQ ID NO: 5723 - DNA, 891 bp, Staphylococcus epidermidis
atggaatataaagatatagcaacaccatctcgaacacgtgctttgcttgatcaatatgggtttaattttaagaaaagtttaggacaaaattttctaatagatgtaaatatcattaataaaattatcgaagcgagtcatatagattgtacaacgggtgtaattgaagttggaccaggtatgggatcattgactgaacaacttgcaaagaatgctaagaaggtgatggcttttgaaattgatcaaagattaatacctgtgcttaaagatacactttcaccatacgataatgtaacaattatcaatgaagatatacttaaagctgatattgctaaagctgtagctacacatctacaagattgtgacaagattatggttgttgctaatttaccgtattatattaccacacctattttacttaatttgatgcaacaggatgtacctattgatggttttgtcgtaatgatgcaaaaagaggtaggagaacgtttgaacgctcaagtaggtaccaaagcatacggttcgttatcgattgttgctcaatactatacggagacaagtaaagttttaacagttcctaaaactgtatttatgcctcctccaaacgttgattctatcgttgtaaaattgatgcaacgccaagaaccacttgtacaggttgatgatgaggaaggcttttttaagttagcaaaggccgcttttgcacaacgacgtaaaacaattaataataactaccaaaacttctttaaagatggtaagaagaataaagaaactatacgacagtggctagaaagcgctggtattgatcctaaaagacgtggagaaacactcacgattcaagatttcgccacattatatgaacaaaagaaaaaattctccgaattaacaaattaa

SEQ ID NO: 5724 - DNA, 264 bp, Staphylococcus epidermidis; identical to SEQ ID NO: 2908

SEQ ID NO: 5725 - DNA, 849 bp, Staphylococcus epidermidis; identical to SEQ ID NO: 2909

SEQ ID NO: 5726 - DNA, 825 bp, Staphylococcus epidermidis
atgagatataaaagaagcgaacgtattgtatttatgacacaatacctcatgaaccacccaaataagttgatacccctcacttattttgtaaagaaatttaaacaagcaaaatcgtcaattagtgaagacgttcaaatcattaaaaatacgtttcaaaatgaaaaattaggaactattattactacagcaggtgctagcggtggagtaacctataagcctatgatgagtaaatcagaggccacagaggttgttgatgaggtgatagagcaattacaagagaaagaccgtttgctacctggaggatatttatttttatccgatttagttggtaatccttctctattaaataaagtaggtaagttaattgctagtatatatatgaacgaagaacttgatgctgttgttaccatagcgactaaagggatatcacttgcgaatgcagtcgcaaacgtattaaatttacctgtagtggttataagaaaggacaataaagttacagaaggttctacggtttcaatcaattatgtttcaggatcatctagaaaaatagaaacaatggtgttatcgaaacgaactttagctgagaattctaatgtcctcgtagtagacgattttatgagggctggtggctcaattaatggagtaatgaatttaatgaatgagtttaaagcccatgtaaaaggggtatcagtacttgtagaatcaaaagaagtaaaacaaagattaattgaagattatacttccttagtcagattgtcagatgtcgacgagtacaaccaagaatttaaagtggaaccaggcaacagtttgtctaaattttcttaa

SEQ ID NO: 5727 - DNA, 381 bp, Staphylococcus epidermidis; identical to SEQ ID NO: 2911

SEQ ID NO: 5728 - DNA, 309 bp, Staphylococcus epidermidis; identical to SEQ ID NO: 2912

SEQ ID NO: 5729 - DNA, 1356 bp, Staphylococcus epidermidis; identical to SEQ ID NO: 2913

SEQ ID NO: 5730 - DNA, 966 bp, Staphylococcus epidermidis
atgttaaataatgaatataagaattcatcaatgaagatcttttcgctcaaaggaaatgaacctttggcacaagaagtagcagatcatgtagggattgaattaggtaaatgttctgtaaaacgttttagtgatggagaaattcaaataaatattgaagaaagcattcgtggttgtgatgtttttattgttcaaccaacttcatacccagtcaatcttcatttaatggagttacttattatgattgatgcgtgtaaacgcgcgtcagcagcaaatattaacatcgtagtaccatactatggttacgctcgacaagatagaaaagcccgtagtcgtgaacctattactgctaaattagtagctaatttaatcgaaacagcaggtgccaatcgtatgatcgcattagacttacatgcacctcagatccaaggattcttcgatattcctattgatcatttaatgggtgttcctatccttgcacaacactttgagaatgatcctgatattaatccagaagaatgtgtagttgtgtcccctgaccatggtggggtaacacgagctcgtaaattagccgacattttaaaaactccaattgcaattatcgacaaaagacgtccgaaaccgaatgtggcagaagttatgaacattgtgggtgatattgaaggacgtactgcaattattatagatgacattattgatactgcaggaacaattactttagctgctcaagctttaaaagataaaggtgctaaagaagtctatgcttgctgtacacatccagtgctttctgggccagcgaaagaacgaattgaaaactctgcaatcaagcaacttatagtaacaaactcaattcaattagaagagaatagaaaacctaataatacaaaagaactttctgtagctggtttaattgcgaaagcaattattcgtgtatacgaaagagaatcagtaagtgtattatttgactaa

SEQ ID NO: 5731 - DNA, 660 bp, Staphylococcus epidermidis; identical to SEQ ID NO: 2915

SEQ ID NO: 5732 - DNA, 573 bp, Staphylococcus epidermidis; identical to SEQ ID NO: 2916

SEQ ID NO: 5733 - DNA, 3501 bp, Staphylococcus epidermidis
atgattgcaaattacattagcgaagataatcgttttcaagaattagatgaagtcttcggccaagagaatattttagttacgggattatccccgtcagcgaaggcaacaattattgctgaaaaatatttaaaagatcataaacaaatgctactcgtaactaataatttataccaagcagataaaatcgaaactgacattttacaatatgtagatgactcagaagtttataaatatcctgttcaagatataatgactgaagagttttctactcaaagtccacaattgatgagtgagcgtgttagaacgttgactgcgttagcccaaggcgaaaaagggttatttattgtgcctttaaacggctttaaaaaatggctaacaccggttgatttatggaaagatcatcaaatgacgcttaaagtaggtcaggatattgatgttgatgcgttcttaaataaattagttaatatgggttatcgtcgagaaagtgtagtgtcacatattggtgagttttcattgcgtggtggaatcatagatatatatccgttgataggaacacctgtgagaatagagctatttgatactgaagttgattccatcagagactttgatgtagaaacacaacgttctaacgataatataaatcaagttgaaatcacaacagctagtgactacattattactgatgaagtgatacaacacttacaaaatgaacttaaaaaagcatatgaatatacacgccctaaaattgaaaagtccgtacgtaatgatttaaaagagacatatgaaagttttaagttgtttgaatctacctttttcgatcatcaattgttacgacgtcttgtttcatttatgtatgaaaaaccatcaacccttattgactattttcaaaaaaacgcgattattgtagttgatgagtttaatcgtattaaggaaacagaagaaacacttacaacagaagttgaagattttatgagtaacttaattgagagtggaaatggatttatcggacaaggatttatgaagtatgaaagttttgacgcattattagagcaacatgccgttgcatatttcacattatttacatcttcgatgcaagtaccattacaacatattattaagttctcttgtaaaccagttcaacaattttatggtcaatatgacattatgcgctcggaatttcaaagatacgtgcatcaagattacactgtcgtagttcttgttgaaactgaaacaaaagttgaacgtattcaatcaatgcttaatgaaatgcatattccaacagtatcaaatattcacgaagatattgatggtggtcaagttgtagtgacggaaggtagtctttctgaaggctttgaattaccttatatgcagttggtagtcatcacagaaagagaattatttaaaacaagacaaaagaaacaacgtaaacgaacaaaaacgatttctaatgctgaaaaaataaaatcatatcaagacctaaatgtgggcgattatatagtgcatgtgcatcatggtgtcggacgatacttaggtgtcgaaacactagaagttggagatacacatcgcgactatattaaattgcaatataaaggaactgatcaattattcgttccagttgatcaaatggatcaagttcaaaagtatgtggcttctgaagataagtcgcctagattaaataaattaggcgggacagaatggaaaaaaacaaaggcgaaagttcaacaaagtgttgaagatatagctgatgaattaattgatttgtataaagaacgtgaaatgtctgtaggttatcaatacggccaagatactgcagagcaatcagcatttgagcatgattttccatatgaattaacacccgatcaaagtaagtcaatcgatgaaattaaaggtgacatggaaagagcaagacctatggaccgtcttctttgtggtgatgtgggatatggtaaaactgaagtggctgtccgcgcagcgtttaaagctgtcatggatggtaagcaagttgcgtttttagtaccaacaacgattcttgcacaacaacactacgaaacactacttgaacgtatgcaagattttccggtcgaaattcaattggtaagtcgattccgcacagctaaagaaataagggaaactaaagaagggctcaaatcaggatatgttgacattgtcgtaggtacacataaattattaggtaaagatattcaatataaagatttgggattgcttattgttgatgaagaacaacgttttggagtgcgacataaagaacgcattaaaactttgaaaaaaaacgttgatatactgacgcttactgcaacaccaataccaagaacattgcatatgagtatgttaggtgtacgtgacttatcagtgattgaaacaccacctgaaaatcgttttcctgtacaaacttatgtcttagaacagaatacgaactttattaaagaggcattagagcgtgaattatctcgcgatggacaagtattttatttgtataacaaagtgcagtccatttatgaaaaaagagaacaacttcaaatgttaatgcctgacgctaacattgctgtagcacatggccaaatgactgaacgtgatttagaggaaacaatgttaagctttattaatcacgagtacgatattttagtaacgactacaattattgaaacaggtgtagatgtaccaaatgctaatactttaatcatagaagaggctgatcgttttggtttaagccagctataccaattaagaggacgtgtaggacgttcaagtagaattggttacgcttatttcttacatccagctaacaaagtgttaaatgagactgctgaagagcgattgcaagctattaaggagtttaccgaactaggttcaggttttaaaatcgctatgcgagatttaaatattcgtggtgcaggcaatttactcggtaagcaacaacatggctttattgattcggttggtttcgatttatactctcaaatgttagaagaagcagtaaacgaaaaacgtggcattaaagaagaatcgccggatgcaccagatattgaagtagaattgcacttagatgcttatttaccagctgaatatatacaaagtgaacaggctaaaattgagatttataaaaaacttcgaaaagtagaaactgaagaacaacttttcgatgtcaaagatgaattaatagatcgttttaatgattatccaattgaagtcgaacgattattagatattgttgaaatcaaagtccacgctctacatgcgggtgtcgaattgataaaagacaaaggcaaatctatacaaatcattttatcacctaaagcgactgaagatattaatggagaagaattgtttaaacagacgcaacctcttggtagagcaatgaaagttggcgtgcaaaataatgcaatgaatgtaacgctaacaaaatcaaaacaatggctagatagtttgaaattcttagttagatgtattgaagaaagtatggcgattaaagatgaagactaa

SEQ ID NO: 5734 - DNA, 1365 bp, Staphylococcus epidermidis
atgaatgccattccaagtgctgtgactcaagtgataggtgttaatcgatccgatgaagtctatacaagggttatgtttcgattacaatgcataggttttatcgtctttattttgctttttatgtttgcgaatatgattacccgatggatgggcgattctaatttagcacccatgttaaagatggccagttttagttttattttaataggtgtcttaggagtgttaagaggattttatcaatcaaagcaagtaatgaccataccagcaatttcccaggttatagaacaggtaattagagttagtttaatcattgttgcaattattatgttttcaatgaaacattggtctatttatcaagcaggagcattagctatattggcatcttcgattggttttttaggttcaatgttatatttattacttaaaaaaccacttaaacttaagttatgctatcgctttaataatacttccattcaatggaagcagttgtttatttccatatccatatttgcattgagtcaacttatcgttattttatggcaagttgtggatagttttacaataatacgtttattacaacatagcggtattgcttttaaagaagcaattattcaaaaaggcatttatgatcgtggtgcttcatttatacaaatgggtttgattgtaactacgacttttagtttcgttcttatcccattacttactcaagcaattcgtgaacataatcaaattcatatgaatcgttatgcaaatgcatcaattaaaatcacggtagtaataagtacagcagctagtataggattaattaatctgcttccacttatgaatgttgtattctttaaaagtaatcatttaactctaactttgagtatttatatgtttacagtgatatgtgtttcgttaataatgatgaatatctcattattacaagttcaaaccagtattcgtcccattattatgggtgtgataataggaatactgtccaaaattattttaaatgttatattaatacctttttggggtatcgtgggtgcaagtgtgagtacagtcttatcactactactttttgtcataatattgcaagttgcagtcttaaagtactaccgttttaatcgtatatctttatttatcgttaaacttattttaggtatgataattatgagtatagttgttcaaactgtcatgcttgccttaccttcaaaaagtaggatgttaggattactagaacttatagttagctcaattataggcatagtgattataatgttgtatattgttatatttaatgtattaggatacaaagaaataaagcacttaccttttggagacaaattatatcaaatgaagagaggaagacggtcatga

SEQ ID NO: 5735 - DNA, 1191 bp, Staphylococcus epidermidis; identical to SEQ ID NO: 2919

SEQ ID NO: 5736 - DNA, 264 bp, Staphylococcus epidermidis
atgagattagataaatatctaaaagtgtcacgattagttaaacgacgtacattagctaaagaaattagcgaccaaggtcgagtgactgtcaatggaaatgtggcaaaagcaggtacagatatcaaagaaaacgatgaactcattattcgttttggacaaaaattagtcacagttaaagtaacaggattaagcgaccatgctacaaaagaaaatgcaaaaggtatgtatgatttgattaaagaagaacgtattaatgaagagtga

SEQ ID NO: 5737 - DNA, 402 bp, Staphylococcus epidermidis; identical to SEQ ID NO: 2921

SEQ ID NO: 5738 - DNA, 402 bp, Staphylococcus epidermidis
atgtcaatcgaagtaggaaacaagcttaaaggtaaaattacaggtatcaaaaagtttggtgcattcgtagaattacctgaaggaaaaagtggtttagttcatatcagtgaagttgccgacaattatgttgaaaatgttgaagaccacttatcagtaggtgacgaagtagaagttaaagttttatcaatcgcggatgatggtaaaattagtttatcaataaaaaaagctaaagaccgccctcgtaagcctcgtcacagtaaagctaatcacggtaaaccagttcaaaaaactgaagactttgagaaaaaattaagtaacttcttaaaagatagtgaagataaattaacgtcaattaaacgtcaaaccgaatcacgcagaggcggtaaaggttctagacgttaa

SEQ ID NO: 5739 - DNA, 1299 bp, Staphylococcus epidermidis
atgaatatcaaaacagatggttggtctaaaaaagcacatattgttgtggctgtctcaacaggcattgatagtatgagtttattatatagcttattaaacgactatcaacatacatatcgtaaattaacatgtgttcatgttaaccacggattgcgtgaacagtcatatgaagaagaagcgtttttgagagagtattgccatcaacatcatattgacatttatataaagcgtttagacttaagtgatattgtagcagacggtaatagtattcaacaagaagcgcgtcaacgtcgttatgaatggtttggagatatcatagctcaattaagagcagatgtattgttaacagctcatcatcttgatgatcaatttgaaacgattatatatcgtttgtttacagggagatcaacacgtaattcattaggtatgacatatgagtcgtattttaatcaatacaaagtgtatcgtcctatgttaaatttaaaaaaaactgaaatattagcgtatcagtatgcgaaccaaattccatactatgaggacatgtctaatcaagatagaaaatatgttagaaatgacattagacaacgcatcatacctgcaattaacgagaacccgcatttaaacgcgcatcagctactcaaacttaaggattggcatgatattgaattgcaatcgttaaaagaacaagctgaaacgttcatcaataacgaagtttcaaaaagtaaatatttaacctattccttttctagaactgcttttaatgaattgaatgtgaatatcaaaagcgtagttatggatttgttattcgaaaaattagattgtcatttagcaatgccacaacatgcttatgacgagtggtttgaacagattagaaatgataaatctcaatttaatattcacgtaacagatgaatggataattcaaattgcatatgataaattaataataatggctaaaagtgaaatggatcaatatatattagaccgtatatgtattagaaagccaggtacatatgaatttaatgattatcaaattgatattcatcctgacttaccacaacagttatatccgcttactgtgcgtgtccgacaaaatggagatgtgtataaattaaatggtcaaaaaggtcataaaaaagtgagtcgtttatttatcgataaaaaagtgactcttgctgaacgtcagcgcatcccactcattattaatcaagaaaatgcagtgttagctattggcgatttatatgttaaagaaaattttaaagaatttattttgatttcgaataatggagatgaattataa

SEQ ID NO: 5740 - DNA, 540 bp, Staphylococcus epidermidis; identical to SEQ ID NO: 2924

SEQ ID NO: 5741 - DNA, 2103 bp, Staphylococcus epidermidis
atgcagaaagcttttcgcaatgtgctagttatcgcaattattggcgttattatatttggcctcttttcatttttaaatggaaatgggaatatgccaaaacaacttacatatactcagtttgttaataagttgaataaaggcgatttaaaaactttagaaattcaaccagagcaaaacgtatatatggtaagtggtaaaacaaaaaaagatgaagattactcatcgacaattttatataacaatgaaaaagatttacaaaaaatcacagatacagctaagaaacaagataatcttaaatttacagttaaagaagaagaaaaacaaagtgtattcgttagtattttaacgacactgattcctgtattaatcattgcattattatttattttcttccttagccaagcccaaggtggcggcggtggtggtcgtatgatgaactttggaaaatccaaagctaagatgtacgacagtaataaacgtcgagttcgtttctcagatgtagcaggagctgacgaagagaaacaagaattaatagaaattgtagatttcttaaaagataacaagaaatttaaacaaatgggttcaagaattccaaaaggtgtcttacttgttgggcctccaggtacaggtaaaacattattagcacgtgcggttgcaggtgaagctggtgcaccattcttctcaattagtggatctgacttcgttgagatgtttgttggtgttggtgcgagtcgtgttcgtgatttatttgaaaatgctaagaaaaatgccccatgtatcatttttattgatgaaattgatgctgttggacgtcaacgtggtgcaggtgtaggtggcggtcatgatgagcgtgaacaaacattaaaccaactattagttgagatggatggttttggagaaaatgaaggtattattatgattgcggctacaaaccgcccagatatcttagaccctgcattgttacgtcctggtcgttttgatagacaaattcaagttggacgaccagatgttaaaggtcgtgaagcaattcttcatgtgcatgcgaaaaataaacctcttgatgaaacagtagatttaaaagctatttctcaaagaacgccaggtttttctggtgcagacttagaaaacttgctaaatgaggcatctttaattgcagcacgtgagggtaaaaataaaattgatatgcgcgatattgaagaagcaactgaccgtgttattgcaggtccagctaaaaaatctcgtgtaatttctgaaaaagaacgtaatattgtagcgcatcacgaagcaggtcatactatcatcggtatggtgcttgatgaagctgaaattgtacacaaggtaacaattgtccctcgtggacaagcaggcggttatgcaatgatgttaccaaaacaagatcgcttcttaatgacagaaccagaattactcgacaaaatatgtggtttattaggtggacgagtatctgaggatattaactttggtgaagtatcaacaggtgcttcgaatgactttgaacgagcaacgcaaattgcaagatctatggttacagaatatggtatgagtaagaaattaggaccattacaattctcaagcaatagtggtggacaagtattccttggtaaagatatgcaaggtgagccgaattattctggtcaaattgcttatgaaattgacaaagaagttcaacgaattgttaaagagcaatatgaacgttgtaaacaaatcttgttagaacatgaagaacaacttaagttaattgctaaaacactactttcagaagaaacattagttgcagaacaaattcaatcattattctatgatggtgttttaccagaagtagattatgactctgcaaaagttgtgaaaaatgaaaatagtgattatagtgatggaaagtatggaaaatcatacaacgacattcgtaaagaacagttagaagatgacgataaagaagatgatgacaaccatgaaaaagatgaagtaaaccaagacaacacagacagagaagctgataatacttcacatacgaatgaaccaggtcatcaacaatctccgaacatcgataaaccatacaatcctaacaatccaaatcatagacaatag

SEQ ID NO: 5742 - DNA, 882 bp, Staphylococcus epidermidis
atgacacatgattatatagtgagaggtttagcatacggtggggaaataagagcatatgctgcaatcacaacagagtcagtacaagaagcacaaacacgtcattatacatggcctactgcttctgccgctatgggaagaactatgacagctactgttatgatgggtgcaatgttaaaaggaaatcaaaagttaacagttactgttgatggcaaaggtccaattggcagaattattgctgacgcagatgctcaaggaaatgttcgtgcatatgtagaccatccacaaacgcattttccactcaacgatcaaggtaaattggatgtacggcgagcagttggtactgatggttccattcaggttgttaaagatgttggaatgaaagactacttttctggtgcgagtccaatagtatcaggtgagctaggagatgatttcacatactactatgccacaagtgaacaaacaccatcatcagtaggattgggtgtattagttaatccagacaactcaatcaaagtagcgggaggatttattattcaagttatgccaggtgctactgatgaaacggtgactaagttagaagaagccattagtcaaatgcaacctgtatcgaaattaattgagcaaggacttacacctgaaggaatattaaatgaaattttgggtgaaggtaatgttcaaattttaaattcaacgtcagcgcaatttgaatgtaattgtagtcatgagaaatttttaaatgctattaaaggtttaggagaggcagaaattcatagcatgattaaagaggatcatggagctgaagctgtatgtcacttctgtggtaataaatatcagtatagtgaaagtgaattagaagatttattagaaacaatgaaatag

SEQ ID NO: 5743 - DNA, 933 bp, Staphylococcus epidermidis; identical to SEQ ID NO: 2927

SEQ ID NO: 5744 - DNA, 804 bp, Staphylococcus epidermidis
atgattaaaacaaaaataatggggatattaaatgtgacacctgactcattttctgacggaggacagtaccactcagttgatcaagctgtgaagcgtgctaaagagatgatagatgaaggtgtagacatcatagacgttggaggtgtctcaacacgaccaggtcataaagaagtatcgcttaaagaagaaatgattcgtgtattgcctgtggttgagtctatcgttaaatatgatgtgcaaatttcggttgatacatttcgaagtgaagttgcggaagcttgtcttaaacttggtgtttcaatgattaatgatcagtgggcaggcctatttgattcgaatatgtttaatgtggtatctcaatacggtgctgaaattgtacttatgcataatggtgacggtcatagagataaacctgttgttgaagagatgcttgtatcattacttgcgcaagcgaataaggctgaactagccggtataccacataataaaatctggttagatcctggaataggttttgctaaaacacgagaagaagaaaatgaagtaatggcaagattagatgaattagtagcgaccgaatatccagttttacttgcaacaagtcgaaaaagatacattaaagaaatgatgaatcaagattcttctccttcagatagagatgaggcaactgcagctacaacggcttatggtataatgaaaggcgttcgtggggttcgagttcataatgtattattaaatacgcgactagcccaaagtatggattttctaaaggagaatgaatatgaacgacatcatctttcttaa

SEQ ID NO: 5745 - DNA, 366 bp, Staphylococcus epidermidis
atgaacgacatcatctttcttaatggaatgcgtttttatggttatcatggagtattagctgcagaaaatgatattggacaaatttttgttgttgatattactttaaaggttgatcttagttatgcaggtcaatcagatgatgtaaaagatactgtaaattatggagaggtttataaagatgtaaagtctattgttgaagggccacgttcatgcttaattgagcatctggctgaacgtattgcaaaacatataaattcacactataatcgtgtaatggaaacgaaagttagaatcactaaagaaaacccacctattcctggtcattacgatggtgttgggattgaaatagtgagggagaatgactaa

SEQ ID NO: 5746 - DNA, 480 bp, Staphylococcus epidermidis; identical to SEQ ID NO: 2930

SEQ ID NO: 5747 - DNA, 1488 bp, Staphylococcus epidermidis
atgtcagaagaaatgaacgaccaaatgcaagttcgtcgtcaaaaattacaagaattaattgatttagggattgatccttttggtcatcgattcaatcgctcatctacttcaagtgagttaaaagaacagtgggaccaattctctaaggaagaattgcatgaaaaagaagacgaaagccacgtgtcaattgcaggtcgtcttatgactaaacgtggtaaaggtaaagcgggatttgcacatattcaagacttgaaaggtcagattcaaatttatgtaagaaaagatcaagttggagatgatcaatttaacatttggaaaatggctgacttaggtgacatcataggtgttgaaggtgtcatgtttaaaactaatacgggcgagatttctgtcaaagctaagtcatttactttactatccaaatcattacgacctttacctgataagttccatggtttacaagatatagaacaaagatatcgacaacgttatttagatttaattacaaatgaagatagtacgcaaacgtttattaatcgtagtaaaataattcaagaaatgagaaactatttaaataaacaaggattcttggaagtagaaacaccaatgatgcaccaaattgctggaggtgctgctgcacgtccgtttgttacgcatcataacgcattagatgctactctttatatgcgtatagctatagaactacatttgaaacggttaattgtcggaggtcttgaaaaagtctacgagataggcagagtttttcgtaatgaaggtgtatctacaagacataaccctgaatttacaatgattgaattgtatgaagcttatgctgattatcatgatataatggatttaactgaaaatatggtcagacacattgctcaagaagtgtttggatcagctaaagtacaatataatgatgaagaaattgacttagaatcttcatggaaacgacttcacattgttgatgctgttaaagaagttaccggtgtagatttttataatgttaattctgatgaagaagctattagattagcaaaagaacatgatattgaaattactgaaaatatgaaatatggccatatattaaatgaattttttgaacagaaagttgaagaaacacttattcaaccaacgtttatttatggtcaccctattgaaatttcaccgttagcaaagaaaaatccaaacgatgaaagatttactgatcgttttgaattatttattgtaggaagagagcatgcaaatgccttcacggaattaaacgatccgattgatcaacgccaacgttttgaagcgcagcttgttgaaaaagaacaaggaaatgatgaagctcatgatatggatgaggattacatcgaagcattagagtatggaatgcctccaactggtggtctaggtatcggtatcgacagattagtaatgctattaactgattctccgtcaattagagacgtattactattcccatacatgagacaaaaatag

SEQ ID NO: 5748 - DNA, 924 bp, Staphylococcus epidermidis
atgaataaaaataaagtgattgtaattggatcaacaaatgtagataaatttcttaatgttaaaaggtttccaaaacccggtgagacattacatattaatcaagctcaaaaggagtttggtgggggcaagggagccaatcaagccatagcagctagtagattagcagcagatacaacatttatcagtaaagttggtaaagatggcaatgccaactttatattggaagatttcaaaaaagcaggtattcatacacaatatattttaacttcagaaagtgaagaaactgggcaagcatttatcactgttgatgaagcaggacaaaatacgattcttgtttacggtggtgcgaatatgacattaagtgcaactgatgttgagatgagtgcggatgcgtttattggtgcagactttgttgtagcgcagcttgaagttccatttgaggcgatagaacaagcatttaaaattgctcgtaaacaaaatatcactactgtattaaatcctgcaccggcaattgaattgcctaagtcacttttaaagttaactgatataattattccaaacgaaacggaagcagaattattaacaggtatttcaatcaataatgaaagtgatatgaaagaaacagcaacatattttctcgatttaggtatatctgcagtattaattactttaggggagcaaggcacgtattgtgcatatcaagaacaatacaaaatgattcctgcgtgtaatgtaaaagcaatagatacgacagcagcaggagatacatttataggtgcttttttaagtgagttaaataaagatttgagcaatttagaatcggctattcgacttgcaaatcaagcgtcgtctctaacggtacaacgaaaaggagcacaagcttctataccaacacgtaaagaagtagaggcagaatataattaa

SEQ ID NO: 5749 - DNA, 405 bp, Staphylococcus epidermidis
atgaagaaaacagcagtattaaatagtcacatttcaagcgcaatttccacactaggtcactatgatttattaacgattaatgatgcgggtatgcctatacctaatgatgacaaacgtatagatttagcagtgactaagtcattgccacgtttcattgatgtgttggagacagtgttaactgaaatggaaatacaaaaaatatatttagcagaagaaattaaaactgcgaatgcacagcaattaaaagcaattaagaaattaatcaatgatgatgtagaaattaaatttattgcgcattctgagatgaaagaaatgttaaaatctcctttaaataaaggaaatatacgtactggtgaaatcagccctttttctaacattatcctagaatctaatgtgactttttaa

SEQ ID NO: 5750 - DNA, 882 bp, Staphylococcus epidermidis
atggactttatagctattttaatcggattagggccactattaggttggggattatttccaacgattgcttctaagtttggtggacgtccagtcaatcaaatctttggagctactgttggtactttgattttcgcaattgttctagcactatttaaaggtataggtttaccaggaggtatggcattagtattttcgctcatatcaggtgcaggatgggcatttggtcaaattattacttttaaagcgttcgaattagtaggttcatcaagagcgatgccaattactactgcatttcaattacttggtgcatcattatggggcgtttttgcgcttggcaactggcccggtataacaaacaaaatcattggatttctagctttactcgtaattcttataggtgcacgtatgactgtatggactgaaacaaagcaacaagaatatagtaaaaatctacgaagtgcagtgctcttattacttgtaggtgaaattggctattggatatattctgctgcacctcaagcaacggatattggtggatttaaagcttttttacctcaagctataggaatggtcattgtggctgtcatctatgcgttgttgaatatgtctaaaggtaatgcttttaaagagaaagtaagttggcaacaaataatatccggatttttctttgcgtttgctgctttaacttatttaatttcagcacaacctaatatgaatggtttagcaacaggatttgttctatctcaaacatctgtagtattagcaacgctaacaggcatttttttcttaaatcagaaaaaaacatcaaaagaattaatgattacaattgtgggattagttcttattttagttgcagcatcaatcacagtgtttattaaataa

SEQ ID NO: 5751 - DNA, 1605 bp, Staphylococcus epidermidis
atgaatatatataataaagtgacattatctgtcattttagttataacaattatcatttcgttcctcttttacttttatacaacagagaaaaaagtggacaaagataaattgtatgaaaacaaaattacaaatcataaacaagcaggtaaacctaaaaattatggtgtcgcatctaataataaaatagctacgaaagtcggaaataagattattgaagatggtggaaatgcggttgatgcggcaataggtgtttcttatgcactagcagtgacagaacctcattcatcaggactaggaggtggcggtgcgacacttacatataatggtaaagagaatgaaacgcctaaagcttatgaatataaaacaatgtcctcatatgaatataaagaaggcgacaaaattggagttcctggcttcgtgagaggattacatgatatgcacgcgaaagaaggaaaaatggatgagaaaaagattttagattacgttattccgcttgctaaagatggttttgaggtagattcagaactagaaagaagtttgaaattatatggtcgtgatattgatcacaactcaccattctatagaggaaataaaagtgttcgcgaaggagatattgtaaaacaagataaactcgctaatacattaactaaaatcaaagataaaggtcctgattacttctatgaagatattggtaaaagtgtttcaaaacaattagataataaattaactgaaagagatttcaaagaatttaaaacagaagaaaaagaagcggtaagtactgattataagaataatcaagtgtattcagcacctaatcctttaggaggcacattaatgcttcaaggattgaaaattgatgaaaaagaaaatgtagataatatggatcgcaataattttatcacagcaatgattaaatcacgtgatgttatgtataagaatagagacattgttaatggtaatgagcctagtaatgaacaacatctgactgatgattatttacttggtgaacttaacaaagttaatattggtgaaaacacagataatggcagtgattttgatcaaattagaacggataatacaagtacaacccattttgtagttattgataagaatggtaagttagcaagtacgactaatacactatccagttactttgggacaggagactatatgaaagagggcttctatatgaataactctttaggcgactttagtaaggataaatcaagtcctaatcatggtgaacctcacaaggcgcctagatcatttatttctccgtcagtaattgttggccctaatttctatatgggtattggtacaccaggtgggaacaagattccaacaattcttaatgaagtgattgtcgattatttaaacagtgatggttcattacaagaatctattaataaaccaagattttataatgacggcggcacgatattttacgaaaatgctatgactgatgaagatataaatatctttaaaagtcttggttatggtgttgaagaaaagcataatgatccaaactttggcagtgtccaaggtgctgtttatgataaagataaaaatactgtagatgtcggtcatgatgtaggtaaccgttaa

SEQ ID NO: 5752 - DNA, 162 bp, Staphylococcus epidermidis
ttgaatattaaaaagcattggttaccaattgttgtagtcattcttgtcgttgttatctttttattagttactttcgctagggcaaatgaaggtttagataattatgagcaacatgaattaaataatggtgaacagcaatatctttcaaaaggggcaagctaa

SEQ ID NO: 5753 - DNA, 1074 bp, Staphylococcus epidermidis
atgacaaagaaaaaacgtttatcgcctagtgagtggttgcttaaacaatctaaaagacataaaaggaaaaatacactttacacggcaattgtacttttagtagcgttagttctactcatatttgctgttaaatcaatacaagtagaacctgtaaaaagtgatacgagagacaaagatagcattcgtatcacctatttaggtaacgtcactttaaataaacatattcgacaaactaacttgaatgatgtttttaaaggtattcaagatactctagatcatagtgatttttcaacaggttcattaatagtaaatgatttttcaagaaatcaaaaagataacataaataaaaatattgaaaatatcatgtttctacgcaagcataatgttaaaagtgttaacttaatcaacgaatctatggataatattcaagcgacagcaatgatgagaaaaatagattcccaagcaggttataattttttaacaggtaatggttcaaatccaattaatagtaaaactgtacaacaagacattaaaggtaaaaaaatagctaatgtttcatttaccgatatcgaatctaactatactaactctttaaaaaacacgacatcaattagtttagatccagatatattttatcctttaataaaaaaattaaaggaaaataatgattacgtcgtagtcaatgtagattggggaatacctaatgaacgaaatgtgactacacgtcaaaaagaatatgcacatgcgttagcgaatgctggtgcagatgtcattattggtcataatacagttattcaaaaagttgaaaattataagcgaacgcctattttttatagtttaggtaacacaacgtctgataacttcttatcaaaaaatcagaaaggaatgattgtacaacaagactggaaaggttcgcataatcagttccatatcacaccaattcaatcaaaagatggaaaaatctctaaagataatatgaacaaaatggatcatattcgattcaaaaataacattaaagataaatcaattgatttaaaatctgatcaaaatggaggttatacttttgaatattaa

SEQ ID NO: 5754 - DNA, 453 bp, Staphylococcus epidermidis
atgataggttcagaattatatttctccttattcgtaggtgtcgtactcagtttgatatttgctgagaaatttgggattaatccagcagggttagtcgttccaggttatttagctttgatttttgatcaaccgatcatgttgttatcagtattaatcattagttgcttaacttattttatcgtaagcaacggtattagtaagtgggttattttatatggtagaagaaaattcgctgccatgatactgacaggaatggtgattaaatttatatttgatctcttgtacccattgaccccatttgaaatggttgaagtttcaggtataggtgttgtcatccctggtattattgcgaatacaattcaaaaacaaggtgtagtcattacactttctacaacaatgttattaacatgtattacatatatcatcttatttttatatagttttattaattaa

SEQ ID NO: 5755 - DNA, 1158 bp, Staphylococcus epidermidis
ttgttactcattatagcgtgtgttgcgcttattctctggctaggaattaaagagaagaagcgtcatgcaaatcgacttgaaaaaattccattacgtattaacataaatggaattcgtgggaaatctacgattactcggatggcttacagtgttctacgtgaggaccagtatagagttgttggtaagacaacaggaacagatgcacgaatgctctattggtttactgaaaaggaatatccagtaatcagaaaaccacaaggcgccaacattggagaacaacgagatattattcgtaaggtggttaaacaaaaagcaaatgccctagttaatgagtgtatggctgtaaatccagattatcaaattacctttcaaaatgatttagtaaaagcaaatatcggtgtaattgttaatgtgatggaagaccatatggatgtcttaggaccgacacttaaagatgtagcgcaagcttttactgcaacaattccatataacgggaaattagttgtaatgaaagataactatactagtttctttgcaaaggaagctaaaaagcgtaattcagaactcattgttgtagataaagacgtcataccagaatcatatttacggaagttcgattatttagtatttcctgataatgtagctattgtgttaggaatagcgcaagcagttggtgtagatgaagaaactgcattacaaggtatgttaaatgcaccagcagatccaggtgctgttagaattaaatatttccatgcaaatcgcacaaaaaatgtatttgttaatgcattcgctgctaatgaaccgcagtctacaaaagcgattttaaataaagtggaatcatataattatccatacgataagaaaataatcattctcaattgtcgttcagatagggttgatagaacacaactctttgttgataactttttaggtgaagtcgattacgatgttctcatttgtacaggaaaaagtacacaaatggtgacacagtttatggaaacaatgccagaaaaaacatatatcaattatgaagggcgagactttgtagagattgaaaaaggtattctacatgaagctgagaatgcacttgtattttgtgtaggaaacatccacggcccgggtggtagaatagcggaattcatagaagggatagaataa

SEQ ID NO: 5756 - DNA, 318 bp, Staphylococcus epidermidis
atggagaagtcagttaaacttgctgttggcatctatctagcaattattttaattatttgtagtatttacctcgcatttatacttattggaagtttaaatggtaaagacatgagtaattctgttctagatactgatcactctcgtatcaacaatacttcaagaaacagtaacgaagatgttacgtcatcaaataatgagtcaaacaatacaaaagcacactcattttcaaactctgaatataaagctgtaaatataaacgaagcatataaaaataataaacatattaaaaaagcgaattcgagttatcaatactattga

SEQ ID NO: 5757 - DNA, 981 bp, Staphylococcus epidermidis
atgtttaaaaagattgctactataataggttcgacattatttggtacagttttattcgcaaaagtgaaagaaaagcgtagttataaaagttttttacaagagaaaatgattagaatatcaggaatgaaaaagacatttgaaagtatagatgacgcgaaaaaagctttgaatgagactaaatatcaaactgcaggtaaatataatggaacaacatatgaatttaagcataaagttcaaataagagattattatggttctttagtctatgttgttaatgatcatggtcttccagatcaacgtactatattatatgtacatgggggtgcatggtttcaagatcctctagaaaatcattttgaatacttagacctacttgttgatactctagatgctagggtaattatgcctgtatatcctaaaataccacacagggattatcgcacaacatttgagttgttaacaaaaatatataagagattattgactaaaatagataatcctgaaaagttaatcatcattggagattcagctggaggacaaattgcattagcttttgcacaaatgttaaaaaaagagcaactcagtcaacctggccatattgttcttatttcaccggtgcttgatgcgacatttaagaatccagaagcaagaaaatatgaaaaagaagatccaatgcttggtattgacggcagtaaatatcttgtagagttatgggctggtgatgcaccactagatgactataaaatgtctccaatgaatggtgatttagaaggcctaggacatattacacttactgtaggaaccaaagaaacattatatcctgatgcagttaagttctctcatatgctgaatgagcaaaacattaagcatcagtttataccaggatacaatttatttcatatttatcctttattccctatcccagaacgccaacgctttttagaacagcttaaaaaaatcattgtcacaaaagagttataa

SEQ ID NO: 5758 - DNA, 849 bp, Staphylococcus epidermidis
atgaagaagcaacagaataaagtccatatgattaatatatctttatgccttatagggacattacttattgcaatcgcagtaaatagttttgttataccgggcaatttaggtgagggtggttctataggcctttcattaattctgaattatactctaggtatttcacccgcactcagttccttcatcattaacgcaatattaattattgtaggttggaaatttctcagtagaacgacagcgatttacactgctataacaatcaccgcaagttcaatttttcttgatttaactcacacattcggattaggtattcatgataattttattaattcaatttttgcaggtttaatgttgggaatcggttctgggttagtaattactgctcatagtacattgggtggtacatctgtcattgcacgtatcatttcaaaatatagtgagatgaagacgtcacaagcactacttatattagatgcaatcatcgtgttatcatttatcgttgttttacctataacgaatgtattatatactattgtgatgctatttattgttgaaaaatcaatgtcttttgttgttgaaggatttaatcctaaaaaagctgtgacagttatttcaaaatataataaagaaatcagtgctgatatatatgaaatgactggaagaggggcaaccttattaagtggtaaaggtgcttatcaaaaaagtgatacagaggttctctatgccgtggtatcccaaaatcaagttggagcaataaaaaagattgttaatcaatatgatgaaaatgcctttttagtgattcatgatgtgcgtgatgtcttaggtaatggatttattaatattaaataa

SEQ ID NO: 5759 - DNA, 327 bp, Staphylococcus epidermidis
atgtatgagaatatacaaaatattgaagatttttaccgatttataaatgcacacgctttagctgttgttcatattatgagagataattgtacagtatgtcatgcagtattaccccaaattcaagatttactaaaggactatccgaaagcacaattaggtgtgattaatcaatctaatgttgaagagattgccggagaactttctatttttacagtacctgttgatttaatttttttgaaagggaaagaaatgcatagacaagcacgttttatcgatatgcaatcgtttgaaaaacaattgtatatgatgcaaaatgccatcgattaa

SEQ ID NO: 5760 - DNA, 1053 bp, Staphylococcus epidermidis
atgaaagcgtatgaatacttaaaacctggtcatgcacaacttacggataaagagaagccaaccattacgagcagtactgacgctattattcgcatagttaagacgacaatatgtggtacagatcttcatatcataaaaggagatacacctgaagttaaatcacatactacactaggtcacgaaggtattggaatcattgaagaaattggtgacaacgttaacaacttcaaagttggagataaagtgattatctcttgcatttcatcatgtggcaaatgctactattgcaaaaaaggtatctatgcacattgtgaaaacggaggaggatggatattaggacatttagtgaatggtactcaagcagaatatgttaaagttccttttgcagataattctttatatcacgccccttcaaatttaaaagacgacgcccttgtaatgttatcagatatacttccaacaggttatgaaattggtgttttaaaaggtaaagttaaacctggctgtacagtagccattgtaggtgctggtcctgtaggtttagcagcattacttacagcacaattctattcaccttcaaaaattattatgattgatttagatgataatagattagaaaccgctaaagaactaggtgctacgcatttaattaactctaaagagactgaaaccgcaattaaaaaggtaaaatcgttaaatccaagtggtgttgatgttgctattgaagctgtcggaattccacaaacctttgatttatgtcaaaatttaattggtgtcgatggtacgattgctaatgttggtgtgcatgggttacctgtacaacttgatatagataaattatggattaaaaatattaacgtaactactggtttagtttcaggaaatacaactgaagaattacttgaagcgttaaaaagcaaaataatacaaccagaacaactcgtgacacattatagtaaactgagtgaaatcgaaagtgcctatgatttatttagaaatgcaacagatcataaagcgattaaattaatcatagagaatgatatcacaatttaa

SEQ ID NO: 5761 - DNA, 768 bp, Staphylococcus epidermidis
atggtaatcatggatgacttgaagcaaaatcaatcttctaacgaaaaacctaaaggtaataaaataattaatattttgatattcatcggaatgattttattaattcaaatacctattggcgtgtcactaatagctttacctttttcagtgaaattcagtaagttaacatccatcgcattaagtatgctaataactggtacagcactattaatcatatggttagttaggaattattatttgagtcatacatatgaaagacaatatcaatcaatgaggggaaaagatatctttattaatattggttttctggtattatcaatggtttttagtattctaagtagtgtattaatggtcatatttactggcaacgatactacagcgaatgagaaagaaatcaatgaaagtttagatttacttttacaaaaagaccatttaccacatatttcaattgttgcaactgttgttttaatgatatgtattataggtccgtatttagaggaattactcttccgaggaatttttaaagaaacattatttatgaaatatcgattttggctaccattcattatatcttctattatttttagttcacaacatttatcaacaaatatattttcatatgcaatttattttctaatgggttgtgtattataccttgcctataacagaagacgtaatatcaaagatagtatgatggttcacatgttgaataattctgtttcaacattaccggtatttgttagttatttatggctatattttagatag

SEQ ID NO: 5762 - DNA, 2028 bp, Staphylococcus epidermidis
atgtttaaaaagctatttggtcaaatgcaacgtatcggtaaagctttaatgttaccagttgcgattttaccggctgcagggttgctattagcaattgggactgcgtttcaaggtgaagcgttacaacattatcttccatttataaaaaatgatattgttcaacaaatcgctaatatgcttacaggtgctggtggtattatatttgataatctacctattatctttgctttaggtgtagctattggtcttgcaggtggagatggtgtagctgctattgctgcatttgttggttttatcattttaaataaaacaatgggggcattcttgcatgtaactccagataaattatctgatccaactaatggatatgcaaatgtattagggatgcctacacttcaaacaggtgtgttcggaggtattattattggtgcactagcagcctggtgttataacaaattctataatattaccttaccatcatatttaggattctttgcaggtaaacgttttgtaccaattatgatggcaacaacatctttcattttagcctttccgatggcaattatttggccaacgattcaaaacggtttaaatgcatttagtgaggggttattagattcaaatacaggtttagctgtatttttatttggatttattaagcgattattaataccatttggtttacatcacattttccatgcaccattctggtttgaatttggttcttggaaaaatgctgctggagagataattagaggcgaccaacgtatttttattgaacaaatccgtgaaggtgctcatttaacttctggtaaattcatgcaaggggaattcccagtcatgatgtttggattaccagctgcagcattggctatttatcaaacagcaaaacctgagaataagaaagtagttgcaggtttaatgatttctgctgcattaacatcatttttaactggtattactgaaccattagaattctcattcttatttgtagcaccattcttattcgtaattcacgcagtattagatggtttatcattcttgacactatacttgttaaatgtacatttaggatatactttctctggaggatttatagattatgtcttattaggtattctacctaataaaacagcatggtggcttgtcatcccagtaggtattatttatgcagtgatttactactttgtatttagattccttattgttaaatttaactataaaacaccaggtcgtgaagataaaaaatcatctgtaacaactacatcggctagtcaactgccattcgatgttttgaaagcaatgggtggtaaagaaaatattaaacatctagatgcttgtattactagactaagagtagaagtaaatgaaaaatcaaaagttgatgttgccggccttaaatcattaggtgcttcaggagtacttgaagtcggtaacaatatgcaagctattttcggtcctaaatctgatcaaatcaaacatgatatggctaagataataagtggagaaattacaaaaccaagtgaaacaacaattgatgaagaagtgtcagatgatcctgtacatgtggaagatattgtagaaacagaaatttacgcacctggacatggtgagataataccgttatctgaagtacctgataaagttttctctgaaaagatgatgggtgatggtatcggatttgtaccagattcaggagaaattgtagcaccatttgatggtacagttaaaacaattttccctacaaaacatgcgataggattggagtctgatagtggtgttgaagtgttaattcacattggtatcgatacagttaaattaaatggtgaaggttttgaaagtttggtaaatactgatgaaccagtaacacaaggtcaaccattaatgaagattgatttagaatacttaaaggaacatgctccaagtattattacaccagtaatcataacaaaccaagaagacaaaacattaacaattgaagatgtaaaacaagtcgatcctggtaaagcgattatgacaattaaataa

SEQ ID NO: 5763 - DNA, 1740 bp, Staphylococcus epidermidis
atggcacaaattaaagcaaatgaagcattagttaaggcattacaaacctggaatattgatcatttatatggtattcctggcgactcagtagatgctgttgttgatagcttacgtacggtcagagatcaatttaaattctatcacgtacgtcatgaagaggtagcgagtttagctgctgcaagttacacaaaaatgacagggaaaattggtgtagctttaagtatcggaggacctggtattgtacacttattaaatggtatgtacgatgctaaaatggataatgtacctcaacttattattgctggacaaacaaatagtacattattaggtacaaaattcttccaagagacaaacatttctaaaatggttgatgatgttgctgtatatcaccatcaaattcaaaaaggtgataacgtatttgaaattacaaatgaagcaattcgtacggcatacgagaaaaaaggtgtctctgttatcatttgtccaaatgacttattaactcaaaaaattaaagacactacaaatcgtgcagttgatacaactaaaccaaaaccagcttcaccaaaattcaaaagtattaaaaaagcagctaaattaattgataaagctaaaaaaccagtaatgcttattggtttaggtacacaacacgctaaagatgaattacgtgaatttattgaagctgcaaaaattccagttattcacacattacctgcaaaaacaatcttacctgacgatcatccttatagtattggtaacttaggtaaaattggtactaaaacatcttatcaaacaattcaagatgcagacttattaattatggctggtacgaactatccgtatgttaactatttacctaagaaaaacattaaagctattcaaatcgatacgaacgaagaaaatattggtgcacgctttaaaattaatgtaggtattttaggtgatagtaaagttgctttccatcaactaactgaaaacattaagcatgttgcaaaacgtccattcttagataagacattagaacgtaaagcagtttgggataaatggatgaaacaagatttgaataatgacaattcaccattacgtccagaacgtttaatgaaagcaatcaatgctaacttaaaagatgatgcaattatctcagcagatgttggtacttctacagtatggtctacgcgttacttaaacttatctgtaaataataaattcattatttctagttggttaggtactatgggctgtggtttaccaggtgcgatggcagctaaaattgcttatccaaaccgtcaagcagtagctatcacaggtgacggtgcgttccaaatggtaatgcaagattttgctacagctgttcaatataacttaccaatgacaatcttcgtattaaataacaaacaattgtcattcattaaatatgaacaacaagctgctggtgaattagagtatgccattgatttctctgatatggatcatgctaaatttgctgaagctgctggtggtaaaggctatgttgtgagagatgtaagtcgtcttgacgacatcgttgaagaagcaatggctcaagatgttccaacaatcgttgacgttcatgttgatcctaatgctgcaccattaccaggtaaaattgtaaacgaagaagcatttggttacagtaaatgggcttatagatcaattactgaagataaaaacttagactttgatcaaatcccaccaatctctgtagcagctaaacgtttcttataa

SEQ ID NO: 5764 - DNA, 690 bp, Staphylococcus epidermidis
atgaatgaatacttacaagcagttctaatgattttgttaactattgttctgtactatgtttccaaaaagattcaagataaatacaataatccactattaaatccagctcttattgcatcaattgcaataattattgttttattggtttgcggagtaagctataaggggtatatgaaaggtggtacctggattaaccatgttttaaacgctacagttgtatgtcttgcatacccactttatcaaaataaaaagaaaataaaaaaatatttaacaattattttcacaagcgtgttgactggtgtagttctcaattttgtgttagtatttacaacgttgaaaatctttggttattctaaagacacaattgttaccctgttacctagatcaattacggcagcagtaggtatagaggtttctcaagaattgggaggaacagatacaattactgtgctctttatcataactacaggtttaatcggcagtattttaggttcaatgcttttacgtatgggaggttttaaatcttccattgcgcgaggactaacttatgggaatgcttctcacgcatttggtaccgcaaaagcattagagcttgatattgaatcaggagcgttcagttcaattggtatgattttaacagcagtcattagttctgttctcataccagtactgattttattgttttactaa

SEQ ID NO: 5765 - DNA, 393 bp, Staphylococcus epidermidis
atggaaaaagcaaaatttgtcattaagttaatacttcaacttgcccttatcatgcttattacttttataggcacagaagttcaaaaattacttcatatacctctagcaggtagtatcgtagggcttatgctttttttcctattgttacaatttaaaattgtacctgaatcatggattaatgtaggagcagactttttacttaaaacaatggttttcttctttatcccatcagtggtaggaattatggatgttgcatctaatatcacgatgaattatatattattctttattgttattataattggtacatgccttgtagcactatcatcaggttatatcgctgaaaaaatgctagaaaaaagcaatacacgtaaaggaactgatcactcatga

SEQ ID NO: 5766 - DNA, 885 bp, Staphylococcus epidermidis
atggatataaaacacatgaaatactttgttgaagttgtcaaacaaggtggtatgacaaacgcttcaaaatccttgtatattgcgcaaccaactatcagtaaagcaattaaggatattgaagcagagatggctgtccctttatttgaccggagtaaaagaagtttagtacttactgatgcaggtaaaatttttttcaagaaatgtcaagaaatcatcgcactatatgataatttgcccactgaaattaatagtttgtatggtttagaaacaggtcatatcactattagtatgtctgcagtgatgagcatgcgtaaatttattggcgtattaggagactttcatcaactttatccgaatatcacgtacaacttaatcgaaagtggtggtaagacgactgaaaaccttatacttaatgatgaagtggatattggtgtgacaacattgccagtagatcatcaaaaatttgaatgtatatctttaaacaaagaagaactgactgtagttttaaataaagaacatcctttagcacaaaaatcttctattaaaatggaagaattagctgatgagaacttcattttatttaatgaagatttctatctcaacgataaaattattgaaaatgcgaagaatgctggattcgtgccgaacatggcctcacaaatctcacaatggaatgtgattgaaaatcttgtcattaatcaattaggtatttccatattgccagccactatagcacaattacttaatgatgacgtcaaaattgtacatttggaaaatgcacatacaacttgggagcttggtgtcgtttggaaaaaagataaacgtttaagtcatgctacaaataaatggatagaatttttgaaagaaagattatccgaagaataa

SEQ ID NO: 5767 - DNA, 216 bp, Staphylococcus epidermidis
ttgagcttttacgaatttatgcaaaatttcctaggtgatgacacgccattaggtgaattggttgattggattaatcaagatatcaatttccctaaagacgtgacgagccaaaatgaaatcttgacatattttcgaaatcatccatgtccggaaaacataccagtgacgagtatcaaacgggcactagctgttttcaaccaattcactaaagtataa

SEQ ID NO: 5768 - DNA, 432 bp, Staphylococcus epidermidis
atgaaattcaaaaaattattatctcgtattattatcgctacaataattacatttactggaacactctcatatcaagctattgaacaaacgcatatttcccatgcagcacataattattatggtaaaaaacaatgcacttggtgggcatttaaacgtcgtgctcaattaggtaaacctgtatcaaatcgatggggtaatgctaagaattggtatagcaatgcacgtcgatctggttatgcaactggacataagcctcgaaaatacgctgttatgcaatcaacgagaggctattatgggcacgtagcagtggttgaaaaagtatataagaatggaaaaatcaaaatttctgaatacaattataatgtgccattaggctacggcacacgcattattagtaaatcgtctgcacgaaactataattatatttattaa

SEQ ID NO: 5769 - DNA, 1278 bp, Staphylococcus epidermidis
atgaaaagtttagataaaggatttagacatttaacacgaaaagataaattaaaaaaacttgttgaatacggttggctagatgatgaaaactatgaaatattacttaatcatccgttaattaatgaggaagtcgcaaacagtttaattgaaaatgtcattggtcaaggtgcactaccagtagggttattacctcgaattatagttgatgataaagaatatgtagtacctatgatggtagaggaaccttctgtcgtagcagcagcaagttatggcgcaaaactcgttaatcaaagtggtggatttaagacaatttcaagtgaacgtctaatgattggacaaattgtctttgatgatgttgaagacacaggcacattagctaactcaatatatcaaattgaatcacaaattcatcaaatcgctgatgaagcttacccttctattaaagcaagaggtggaggatatcaacgtattgaaatagatacattccctaatcatcgattattatctttgaaggtttttgttgatactaaagatgctatgggtgctaatatgttaaatacaatattagaagcaatcactgcacatctaaaagttaaattttcaaatcaaaatgttttaatgagtattttatctaatcatgcgacagcatcagtagtaaaagtacaaggggaaatagatattgaagatttacatagaggagagagaagtggcgaagaggtagcacaacgtatggaacgagcgtcagttcttgcacaagtagatatacatcgtgctgcaacacataacaaaggtgtgatgaatggtatacacgctgtagtattggctacaggcaatgatacaagaggagttgaagcaagtgctcatgcatatgcaagcaaagatggtcattatagagggatagctacttgggaatatgatcgctcacgtaataaattggttggaactattgaagttcctatgactttagcgacagtaggtggaggtacgaaagttttacctattgctaaagcctcattaaatttgcttaatgttgaaaatgcacaggaactagggcaagttgttgctgctgttggattagcacaaaatttctctgcatgtagagcgctagtgtctgaggggatacaacaaggacatatgagtttacaatataaatcattagcgattgttgtaggtgcaaaaggcgaagaaattgcgcaagtagctgaagcgctcaaatatgaatcacaagctaatactgccaaagctcaagaaatcttgatgaatataagaaagtcataa

SEQ ID NO: 5770 - DNA, 1167 bp, Staphylococcus epidermidis
atgaatataggtatagataaaataagtttctatgtacccaaatattatgtagacatggctaaacttgcagaagcgcgccaagtcgatcctaataaatttttaattggaattggtcaaactgaaatggctgtgagcccagtgaaccaagatatcgtatctatgggagccaatgctgctaaagatattataacagaagaagataaaaagaatattggtatggttatagtagcaactgagtctgcgattgataatgccaaagcagcagccgttcaaattcaccatcttttaggtattcaaccctttgcaagatgctttgaaatgaaagaggcttgttatgcagcaacacctgcaattcaacttgccaaagattatcttgctcaacgccctaacgaaaaggttcttgtcattgctagtgacacagctcgttatggtattcattctggtggtgagcctactcaaggtgccggtgcagttgcaatgatgatttcacataacccaagtattttaaaacttaatgatgatgccgtagcatatactgaagacgtttatgatttctggcgtccaacgggtcatcaatatcccttagttgctggtgcattgtcgaaagatgcctatatcaagtcattccaagaaagttggaatgaatatgcacgtcgccataataaaacactcgctgatttcgcttcactatgtttccatgtaccattcaccaaaatgggacaaaaagctttagattctattattaatcatgccgatgaaactacacaagaccgtcttaactctagttaccaagatgcagttgattataatcgttatgtcggtaatatttacacagggtccttatatttaagtctcatctctttattagaaacacgtgatttaaaaggcggacaaacgattggtctctttagttatggttctggttctgtaggcgagttctttagtggaacattagtagatggattcaaggagcaattagatgttgagcgccacaaatctttattaaataatagaatagaggtttctgttgatgaatatgaacatttcttcaaacgctttgaccaattagaattgaatcatgaacttgaaaaatcaaatgcagatcgtgacattttctatttaaaatctattgataacaatattcgtgaatatcatatagcagaataa

SEQ ID NO: 5771 - DNA, 519 bp, Staphylococcus epidermidis
atgtatcaatcaatgtatgactcgcccgttggcttattgcaattaattacaaacgatggcatctcgttgtcacatgtcttataccctaatcaacatttgaaaggaattaaaacaaatgatacgttagatgtttttaaagatactaaagcgtggttaagagagtattttaaagggaattatcctgagataaaagtaccgttagcaccaaaaggcactgattttcaacagaaggtatggaatgaacttcagacaattcgttatagagaacttaaaacatatggagagattgctaaaacagtaggacgagcaatgaataagccagcaatgtctgctcaggctgtaggaggtgctgttgggagtaatcctatttctatacttataccatgtcatcgagtggttagtaaagatggaaatttaacaggatacggaggtactttagacaacaaaataaaattattaaaattggaagaaatagatatgacacatttatacagacctaaaaaaacaacgaaaccttga

SEQ ID NO: 5772 - DNA, 465 bp, Staphylococcus epidermidis
atgaagggtagcaaaaaattaaatgagttactagaagataatcagaagaaactaaaaaaattatttaagtacgatcataaaaaggctttggcgtttacaccagaggatagagaaaaagttaaggataagtttggtgtctatgtgattttcgatgagaaaaaaccagtgtttgtaggtcaaactggaggatattcatccacacatcaacctataaatagtgatttgtatacaaaattaggacaatacaattcacgttcagaaacaggtacaactaaatttagaaaagcttatgctcaaaataaggacttaaatccaaatcatttaaaagacattactgcagataaatacggcttcacttttcaatatataaaagtaaaagacgaacctgcgtttattaatgttttagaaattctcgcattagaatatgcaaaaaataaagggtatgaactttataattttcaataa

SEQ ID NO: 5773 - DNA, 183 bp, Staphylococcus epidermidis
atgtttattttagtcaatacaatattgttcatagcgatttttggttatacagcaatgacattagtaaaattctttaaacgttcaaaagaaggtgattgtggtgggtgtaaatctaattgcaaatgcgatacgaatacttcatctcataaaaataaattaaatattccacatattaagttatag

SEQ ID NO: 5774 - DNA, 1995 bp, Staphylococcus epidermidis
atgactcaaagctactgtattcttggaaaccctaatgtaggcaaaacatcattatttaatgcgttaaccggttcttacgaatatataggtaactggagtggcgtaaccgttgaaaagaaagtaggaaaattgaaagataatgtaggtgatttagttgatttaccgggcatttatgatttatcacctatttctaaagatgagacggttgtcacagattatttaatgtcaacgtcattcacaggaatgattaacattattgacgcatgtcagcttaaaagaaatcttaatcttacaatacagttgatggaactcaacaaacctatgattattggtttaaatatgatagatgttgcaacacaaagaggtattaaaattaactatcaagctttgatgagaaaattaaaagtaccggtatttccaattgttgctagaaaggcaaaggggacacatagtcttttaggagagcttaattatttagaaccacatcaacgtcgtgcatttaagattaattatgggactgaaattgaaactgcaattcaacaaatttgttcaattatcaaacaggataatatgtatccaacagaacgtttacgttttatagccatacagtatttaatagacaatgttcaaatttatcaagaactcgatgccatgattttagaacagttagaacccattaagcgaaagttaagtaacgcgacagaacaatcaacacgccaaagaattgaagctgtgcgaaatgattacattaatcagctattggaagatatcgtagaatatcccgaagaggataaacaattctttacttcaaaagtggatcgattattattaaatagatatctaggtatacctatatttttaggtattatgtggcttatttttcaaacaacctttacatggataggaacaccattatctgatcaattagacgcttttataagtggtcctttatcagaatggattaaatctgttatgaatacattacatattacgtcgtttcttcaagatcttattacagatggtattatcgctggtgtgggttctgtattggtatttgtaccacaaattgttgtgttattcttttttatttctttattagaagattcaggttatatggcaagaatagctgtattaatggataaaacaatggaatctataggtttaagtggaaaatcatttattcctatgattattggatttggatgcaatgtaccaagtattatggcagcaagaagtatagagaatgagaaagaacgtttgattacaatattggttgcacccttcatgtcatgttcagcacgcttaccggtttatgcactttttgtaggagcgttcttttcagcacatcaatcactagttgtattaagcttatatattttaggtatagttgtcgctttactagtaagtacgttattgaataaattgatattaaaagataatcagtctgtttttattgtggagttaccgacataccgtgttccatcatttaaaacactttggcgcagtacttgggaaaaagcaaaaggttttgtcaaaaaagcaggtacctttatttttggtggttcagtcgttatttggacactcacatacatcggtccgcacggtgttaatgtcccgattaatcaaagttttatgcatatgattggtcaagggttcgcgaatttaattgcacctttaggatttggctcttggcaggcaggagcaactttaatacctggctttcttgctaaagaagtgattatcagttctatggctattttatactcttctagcgaaagtggtttaacacaagtcattcaacagcaattcactccactttcagcttatgcattcatgatttttattttactttacgttccttgtatttcaacagtcgctacgattcgtaaagagacaagttcttggaaatggacattactagcggttgtttatccaatagtaacagcatatatattaacgttcgtattctatcaagttagtcaattatttatataa

SEQ ID NO: 5775 - DNA, 228 bp, Staphylococcus epidermidis
atgattagtgtaaacaatggggtaaaaaataaaaaatataaagtgaagcatatagggatttcaaataaaaatatgttgtatcgtttaggggcattaggcttaaacattggaagtgaaattagcatcaaacagaaatgtttactcaacggtcctagcgttgttgaagtaaatggtcaacatttaagtttacgacaacgtgatgcacgactcataacattagaggagtag

SEQ ID NO: 5776 - DNA, 1545 bp, Staphylococcus epidermidis
atggtagtacctttcaaaaatgaacctggtattgatttttcagtacagacaaatgttgagcgttttaatgaagaattaaggaaagtaaaagcgcaactaggacaagatataccacttgtgattaacggagaaaaacttactaaaactgatacttttaattcagtgaatcctgcgaatgcatcacagctcattgcgaaagtgtctaaagcaacgcaagatgatattgaaaaagctttcgaatcagcaaatcatgcgtatcaatcatggaagaagtggtcgcataaggaccgtgcagaattactgttacgtgtagccgcaattatccgtcgtcgaaaagaggaaatttccgctattatggtttatgaagccggcaagccttgggatgaagcagttggagatgcagctgagggtattgattttatagaatattatgcaagatcaatgatggaacttgcagatggtaagccagtattagacagagaaggtgaacataatcgctatttttataaacctattggtacaggcgtgacaattccaccatggaattttccatttgcaattatggctggtacaaccttagcccctgttgttgcaggtaacactgtattattaaagcctgctgaggatacagttttgactgcttataaattaatggaaatattagaagaagcaggtttaccccaaggtgttgtaaattttgttcctggtgatccaaaagaaattggagattatttagtcgaccataaagatacacattttgtcacatttacaggatcccgagctacaggtacacgtatttatgaacgtagtgctgtagtgcaagaaggacaacagtttttaaaacgtgttattgcagagatgggtggcaaagatgcgatagttgtagataataatgtagatacagatttagcggctgaagcaattgttacatctgcttttggtttctctggtcaaaaatgctctgcgtgttctcgtgccatagtccatcaagacgtacatgatgaaatattggaaaaagcaattcaattaactcaaaaattaactttaggtaatactgaagagaacacatttatggggccagtaattaatcgaaaacaatttgataaaatcaaaaattatattgaaattggtaaaaaagaaggcaaactagagactggtggtggaacagatgattctaccggttatttcattgaaccaacgattttctccggactacaatctgcggatcgtatcatgcaagaagaaatttttggaccagtcgtaggctttattaaggtcaaggattttgatgaggctattgaagtagctaatgatactgactatggtttgacaggcgctgtaattactaatcatcgtgaacattggattaaggctgtgaatgaatttgatgtaggtaacctttacttgaatagaggttgtacagctgcagtagtgggttatcatccatttggtggattcaagatgtctggtacagatgctaaaacaggaagtccagattacttacttaatttcttagaacaaaaagttgtttctgaaatgttttaa

SEQ ID NO: 5777 - DNA, 870 bp, Staphylococcus epidermidis
gtgaatttattaaaatttcacaacaaaatcaaaggatatactcaaaatagacaaccaggtattgaagcggatatggaacctaaacccattgcagaattagaagaatataaagcagcaggaaagttagagaataaagttgctctaataacaggaggagattcaggtattggacgtgcgatagcaatactatatgctaaagaaggggcaaatgttgctattggttattatgacgaacatcaagatgccgaagacacagttaatcgacttcaagaaatgggtgtaaaagctaaagcttatgctcatgacttaaaagatgaaaagcaatctcaaaagttaatcaaagatgtcataaatgacttcggtagtttaaatatattagtaaataatgggggcgtgcaatttccacgcgatcattttgaagatatcactccacaacaagtgaaagaaacttttatgacgaatatttttggtatgatgtttttatcccaggcagcagtaccttacctatctgaaggagatacaattataaacactacaagtgtcacagcatatagaggatcggggcatctcattgattattcagctacaaaaggtgccatagtatcgtttacccgttctcttgctactactttaatggaaaagggaattcgcgttaacgccgttgcgcccggcccaatctattcacctttaattcctgcgacatttgatgaagaaaaagtagaacatcaaggtgacgaaacgccgatgggtcgtcgtggacaaccagcagaacttgcaccatcttatgtcttcttagcaacacatgcagatagttcctatattactggtcaagttattcatgtcaatggtggcgattttatcacatcttaa

SEQ ID NO: 5778 - DNA, 207 bp, Staphylococcus epidermidis
atgagaaaaatacttaagggtattatattatcattaataatcatcggcttaatcaaaacgttcaatgaatatgatgttatacattgtgcaaatcattatttcgaacaaatcaaaagtggaaaaataattgaagatatcaaaatcgatcatttcaataattatcataatattaattttgaagatctaaatccttctgactttttttaa

SEQ ID NO: 5779 - DNA, 2385 bp, Staphylococcus epidermidis
atggcgaatacaacgttgactttggatattattggtatgacatgtgctgcgtgctcaaatcgtattgaaaagaaattgaatcgtatgaatcatgttcaagctaaagtgaatctgactactgaaaaagcaactatcgactatgagtctgacgattatcatctcgaagattttgtagagcaaattcaaagtctcggctatgatgttgcagttgagcaagtagaattaaatataaatggtatgacatgtgcagcatgttctaatcgtatagaaaaggttctaaatcaaacgcaaggtgtacaacaggcaacagtaaacttaactaccgaacaagcactcatcaaatattaccctagtgctacgaacacggaagcattaattaagcgtattcaaaatattggatacgatgctgaaactaaaacttcatcaaaagcgcaatcaaatcgtaaaaaacaagagttaaaacataaacgcaataaattaatcatttcagctattttatcgttgccactattattagtaatggtggtgcatatctcaccaatttccattccatccattttggtcaatccttgggtacaattaattctttcaacacctgtccaatttattattggttggcaattttacgttggcgcgtataaaaatttgcgaaatggttcagctaacatggatgtattggttgctgttggtaccagtgccgcatatttttatagcatttatgaaatgatgatgtggctcacacatcaaacacatcacccacatttatattttgaaacaagtgctattttaattacgttaattcttcttggtaaatatttagaagcacgtgccaaatcacagactaccaatgcattaagcgaattgttaaatttacaagcaaaagaagcacgagtaattaaagaaaataaagaaattatgcttccacttgataaagttaaagtcggagatactttactaataaaacccggcgaaaagatacctgtagatggcaaagtcactaaaggtgatacttccattgacgaatccatgctaactggtgagtctatacctgttgaaaaaagtagtggcgattcagtgattggttctaccatgaataaaaatggttcaatcatgattgaagcaactcaagtaggtggtgatactgcattatcacatataattaaagtggttgaggatgctcaaagttctaaagcaccgattcaacgcttagctgatattatttctggatattttgttccgattgtagttagcattgcggttattacttttatcatatggattatattcgttcaccccggacaatttgaacctgcacttgtttcagcaatatctgttttagttattgcttgcccctgtgcacttggtttagcaacgcctacatctattatggtaggtacaggacgtgctgcagaaaatggcatattattcaaaggaggccaatttgtagaacgtgcacattatgttgatacaatcgtgctggataaaacaggcacaattactaatggtcaacctatagtaactgattatgttggtgacaatgatacattacaacttttagcaagtgctgaaaatgcttcagaacatcctcttgctgatgctattgttacttatgctaaagataaaggtcttaatttacttgataatgacacttttaaatcaattccgggacatggcattaaagctacgattcatcaacaacaaatccttgtgggcaatcgaaaattaatgaatgattacaatatatctattagtaataaattaaatgaacaattaaatcactatgaacatttaggtcaaacggcaatgatgattgccgtggataatcaaattaatggaatcattgctgttgctgatacagtaaaaaatgatgctaaacaagcgataaaagaactaagaaatatgaatatcgacgtggttatgctgactggtgataacaatcgaacagctcaaaccatcgccaaacaagttggcattgaacatgtaattgcagaagtgttgcccgaagaaaaggcacatcaaatctctttattacaagacaaaggtaaacaggttgccatggtcggtgatggaattaatgatgcgcctgcacttgtaaaagccgatattggaatggctataggcactggagctgaggtagcgattgaagctgcagatattacgattcttggtggtgacttgctattagttccaaaagctatcaaagcaagtaaagctacaattaaaaatattcgacaaaatttattttgggcatttggatataacgtagctggcatcccaatagctgcttgtggtttattagcaccttggattgccggtgctgctatggcattaagttctgttagcgtagttatgaatgcattaagactgaaaaaaatgaaactatag

SEQ ID NO: 5780 - DNA, 207 bp, Staphylococcus epidermidis
atgacacaaaaaatcataaaagttgaaggaatgagttgcgaacattgtagaaacgccgtagaatcggcactagctaaactaaatggcgtatcaagtgctgaagtaaatttagatgaaaatcatgtacgcgttgagtataatgattcaaaagttacatttgaaaatatgaaagaagcaattgaagaacaaggttatgatgttaaataa

SEQ ID NO: 5781 - DNA, 999 bp, Staphylococcus epidermidis
atgactaaaattaaattaatgggtgtcagagaagaagatgaacattatattgaaatgtggtcacaacaacatgaagtggaagtggatatgtcgaaagaacagttaactgaagacaatgtccaatctattgaaggatttgatggactatcattgtctcaaacattaccattatcagaaacaatttataataaattaaatcaacttggaattcggcagatcgctcaacgaagtgctggatttgatggttatgatttagagttagcatctaaatatggtcttattatatctaatgtgccttcctattcacctcgaagcattgctgagtttaccgtgactcaagccatcaatattgtacgtcactttaatcatattcaaagaaaaatgagattgcatgattttaggtgggaagcatcaattttatctcaatcgatcaaagatttaaaggtagcggttattggcacgggatatattggtggcattgttgcacaaatattctcagaaggatatctatgtgacgttgtagcgtatgatccttttccaagtgaacatgtgaaaccttacgttacctataaacaaagtataaatgaggctattaaagatgcagatattgtcacaatacatatgccgtcaacacgatataacaattacctgtttaatgaaaatatatttcaaatgtttaaaaagggtgctgtgtttgcaaattgtgctagaggatccttagtagataccaagactttgttatctgcaatagagcaaggtcaaattaaaggtgcagcacttgatacttatgaatatgaaattggagtatatacgacagatagaagtgaagaaggtttgaatgacccacttttagaggaattaattactagagaagatattattgttacaccgcatatagcattttatactgaagaggcaatcaaacatcttatttttgatgctttagatgcaacaatggaagtattaaatactggcacgacggagttaagagtaaattaa

SEQ ID NO: 5782 - DNA, 1161 bp, Staphylococcus epidermidis
atggaaatgtcagaaaggctagcttcaattcctgatagctactttggcaaaacaatgggccgtatagttgaacatggtcctttaccacttataaatatggcagttggaattccagatggagaaacgccaaagggtattatcaatcatttttcagaggcgctatgtattccagaaaatcaaaagtatggtccatttcacggcaaagatgcctttaaacaagctattgttaacttctaccaaagacattacgatgttgaattagacaaagaagatgaagtttgtattttatatgggactaaaaatggtcttgttgcattacctacttgtgttgttaatcctggtgaaattgtacttttacctgatccgggatatacagattatttagcgggggtcatgttagctgatgctaagccactccctttaaaattgtcgccaccaaattatttgccgaattggaatactataagtgctaaagttcttgagaagactaagctaatttatttaacatatcccaataatcctaccggttcgacagcgacacaagatgattttgatgaagcgattcatcgttttaaaggtactcaaacaaagatagttcatgactttgcatatagtgcttttggatttgacgccaaaaatccaagcatattagcttctaaaaatgcaaaagatgttgctatcgagatattctctttatctaaaggttataatatgtcaggctttcgtgttgggtttgctgttggtaataaaaaaatgattcaagcgttaaagaagtatcaaactcatacaaatgcaggtatgtttggagcacttcaagatgctgctacgtatgcactcaatcattatgatgagtttttagaaaagcaaaatgaaatatttagacgtagacgtgataattttgaatcacaactaaaacatgcacatttaccgtttgttcactctaagggaggtatttacatttggttacatacacccccgggttatgatagtgaagcatttgaacagttgttattaaaagaaaagtcaattttagttgcacctggtaaaccatttggtgaaaatggtaatcaatatgtgagggtttcattggcgctcgatgataaacaattagaagaagcggcgaatcgcttaacacaattacggtatttgtatgaaagataa

SEQ ID NO: 5783 - DNA, 1899 bp, Staphylococcus epidermidis
ttgggaggaattaaaattactaaacttatatctataattatacctgtttataataaagaactctttattgacaaatgtgtacaatcattaattgatttagatatcgacaaaaatcaaatagaagctatttttgtcgatgatttatcttctgataattcactcagaataatcgaaaattacgctcaaaagtatgaatttataaaatgtatacaacttagtcaaaattctggagatccttcaacacctagaaatgttggtattaaaaatgctaaaggtgaatttattactttactagacgcagatgattggcttgatcctataggattaccaaaacttgttaaacaaatgattcaacataattcagatatcggatttggtcagtgttataaacacacagataataatattaaaaaaatcgcaactttttcttcttatcaaattgcaaatggtcttattccatatgaaatacccaaaatttttagagcagtaggaccaccaggaaaagttttcaaaaaatctacagtagttgataataatatacaattcaaaaaaatgaaatttggagaggacaaattattttttgcagaactaattagtaaaagtaaaagtgcatcaatgtcttcacatgctacatatcatgtgaatcgttactctgaaaatgtatcattagtaaaatcaactactgtaatcgaaaaatctgaaattaatttaaaggtattagaatgtgttcttcaattaaatataacggatttagcaaaaaagcacgtgttaagtcgtattattgaaatggattttatgagtcgtttcttagttacaaaaacatttttaaaatctaataacaaagaatatttttataatcaattttcaaaaatggaaaatattatattcgaagcgggctatgacgttaaatcgttgcttactatagataaatataaaaatttatatcaattatttcactctaatagaacattggtaaacgaatatgtgcactaccttttatttgatttagataaaaataaattcataaaaaataatgttgtgtattatgaaccgaaagaaaaatttattaatctaattcctttgtactcaatttgtacacctgtttatagtggtacaaaaatgattgataatcatttatatgaatgtattaaattatttaaaaaaccgaaaataaaaattaatgacgttaagttagttgaaattaataacgctacacagtcaactcatattgactataaacttttggatgattatatttatatcaaaaccagtgatttaactttcggtgaaaaagattttaatattgaagttcagtttaatgattataactcagaactagtcttcgctacttatcctaatcataattctatagttgaattgaaaaggcaaaattttaaattagaatttaaaaatcctaaaaataaaaatttaaagtcaaattctactaaaacaaagtatatatcaaaaaatccgaaacaagtattaattaaaaagaatataaaaaaatactctgatacagactttaaaatagcacaaagttctattagaaagggaagcctaatcaacattattggtatagatcattcaacaaaggggactcctagattgattactgacgatcaatattttatcacggcaaatacagattttgtttctccttctattaatataaataaagaagggtatatttgtgacactcccaaaaaaatcaaagtattaaaaaaatgtaaattgtaccatgacgtttcatttaaaaatgatcatttaggtactttaaaaccgggtgatgaaattaatataatagatattgcttatacaaaaaatctaacaccacgtttaaaaacaaaagatggttattttataactgctaataaaaaattcattgaagttttaaattaa

SEQ ID NO: 5784 - DNA, 747 bp, Staphylococcus epidermidis
atgaacacaaaaaatgtgcttgtatttcataatagccacatcgatggcgataatattaaatcttcatacaaaattgcactggaaaattctgataaagtagctcaatacctcttgctcacacatatgcaaaaagacgatatacaacatgcatatggtattagcgatgaaaaaatatcgattgtacctcactttattaaaagctatggacaacaagatactcatgacaaagaggatagattcgtatttattggtagactaggcaaacaaaaacaagtggaccatttaatcaaatcttataatcaattcttaaaatatggacatcaaacgaaattagcgatttatggtgcagatgaacaaaatcaaaaacaagtcatactagatttagttaaagaatatcaaattgaagataaagttgatttaaatgattttaccaagcatccacttgaagaatttaaaaaatctaaagcctcactattaaccagtgaatacgaaggttttggtttaaccgttatggaaagtattgaagtaggttgcccagtcattgcttacgacgtaagatacggtcctggtgaaatcatagagcacggtgaaaatggctatcttgttgagccagataacattgaagcattcgcagcctatatggataaaataattaaaaatccactcaaacatgttaaaacaaaagaaacattaaagtatgaacaagcaaagaataactatcaaaagttgtttgagagagtaaagtaa

SEQ ID NO: 5785 - DNA, 393 bp, Staphylococcus epidermidis
ttgaaaaaggaaattaatgtagtaggtgctattatatattctgataacaaaatactatgtgcgcaaagaagcgaaaatatgagtttacctttaaaatgggagtttccaggtggaaaaatagaaaatggggaaaccgaaaaagacgcattaataagagaaattaaagaagaaatgaaatgtgatttaattgttggtgataaggtaacaaccacaacttatgagtatgattttggaatagttaacttaacaacctataagtgtgaacttaacaataaaaaaccaactttaactgaacataaggaaataaaatgggtaggaaaaaatgaactagataaattagaatgggctccagcagacatacctgctgtaagacgtataatagaggagaattag

SEQ ID NO: 5786 - DNA, 2859 bp, Staphylococcus epidermidis
ttgagtaatttgatacaagatattaagcaatctttatataagggatttatagataaagatagttcccataaaggcaattttgttccaagattactagtaaataacaaagaagaaaatgtactttctactattatagatcagctgcataattgccaatcattttgtatttcggttgcatttataaccgagagtggtttagcaagtctaaaatcacatttttatgatttaagtaagaaaggcgtaaaaggaaggataataacatcaaattacttaggttttaatagtccgaaaatgtttgaggaattattaaaattagagaatgtagaggttaaattaacaaacattgaggggttccatgctaaggggtacatatttgaacatcataaccacacttcttttattatagggagttcgaatttaacttctaatgcattgaaattgaattatgaacataatttatttttatctactcataaaaatggagatcttgttaacaatattaaatataaatttgatgaactttgggattctagcttttctttaactaatgaatggataaatgaatataaacagtcttttgaatatcaaacattgcaaaaagtatttgataacactgttgttcaaaattcagatattaaaaagtttaatgaatcaaaacttataaaacccaatttaatgcaagaacacgcattaaagtcattagagtctttgagaaatgtgggagaagaaaaggggttaattatatctgcgacagggactggaaaaactattttatgcgcacttgatgtaagagcttattctccagataaatttctatttattgttcataatgaaggtatattaaatagagctatagaagaatttaagaaagtatttccatatgaggatgaaagtaattttggattattaacaggaaagcgaaaggatcatgatgctaaattcctttttgcaacaattcaaacactttctaaaaaggaaaattataaattgtttaactctaatcattttgactacatcgtttttgacgaggctcatcgaactgctgcatctagttatcagaaaatatttaattattttaaacctaactttttgctaggaatgactgcaacaccagaaagaactgatgaattaaatatttttgaattgtttaattataatattgcttatgaaattcgtttacaagaggctttagagagtaatattttatgtccttttcattattttggagttacagattatattcaaaatgaaatgagtcaagaagatgcatttaatctaaaatatttagcatctaatgaacgtgttgaacacatcataaaaaagactaattattatggttattcaggtgacgttttaaagggtttaatatttgttagtagtaggggtgaggcgtatcaattagcaaaccaattaagtaaacgtggtatatcatcggttggtttgacaggaaaagattctatagcttatagagctgaaacaattcaacaactaaaagaaggatctattaattatataattactgtagatttgtttaacgaaggaattgatattcctgaaataaatcaagttgtaatgttaagacctactaaatcaagtattatatttattcaacagcttggtagaggattaagaaaaagtactaataaagaatttgttactgttattgattttatcggtaattataaaactaactatatgatcccaatagccttatctggaaataaatctcaaaataaggataattacagaaaattcttaacagatactacggttttaaacggtgtttcaacaataaattttgaagaagtagctaaaaataaaatttataattcactagattctgttaaattaaatcaaccaaaattaattaaagaagcttttaacaatgtaaaagaccgtataggtaaattacctttacttatggactttataaataatgattcgattgatccaagtgtgattttctcacgttttaaaaattattatgagtttttaataaaaaataaaattattgagaatgaattaagtattaatgaatttaaaaatttaacatttttatcaagacaattaacacctggacttaaaaaagtagatattgatgtattgaaagaaattatacaaaatgacgtaacttatgaaaatttaacaaaaaaatgtttaaacattaataacgatatttcggaatatgatattaacacttcattaagcattttagattttacttttttcaaaaagactataggtaaaacttacggattacctttaatacaatataaggataatcttatttgtctagcaaatgaatttaaagaggctttaaataaaccactatttaacacatttgttcatgatttaattgatcttgctaattataataatgacagatatcaaaataagaaaaacagtttaattctatataacaaatattctagggaagattttgttaagttattaaactgggataaagatgaatctggaacaatcaatggttatcgtatgaaacatcgtacacttcctttatttatcacttatgataaacatgagaatatcagtgataatactaagtacgacgatgaatttttgagccaagacgaattgaaatggtacacgcggtccaatcgtaaattaacttcaccagaagtacaaaatattttaaagcatgaagaaaataatacagatatgtatatatttgtgaaaaaaagagatgatgaagggaaatatttctactatttaggtaaagccaaatatattaaaggaactgagaagcaagattatatgcctaatggaaatagcgtggtaactatgcatttatcaatgaatacgtccattcgagatgatatttatagatacatcacttaa

SEQ ID NO: 5787 - DNA, 192 bp, Staphylococcus epidermidis
atgagaaatgctatagaagaattaatcttctccgatgtaagtagttatgacatctatgtaaacacaggcgttaaccaagggttggttggagacattaaagatggatatttgacgattgattctatcccgtatattgatgctgaaagattatattattatagtttagagcgcaaagccctcgttacaagttga

SEQ ID NO: 5788 - DNA, 297 bp, Staphylococcus epidermidis
atgtcgttttatgaaggggtattaaaactaggtgaaaataatcatcgtactgcttttgaatttcgctttgaagagttattttcaaatgaagaatggtgcgcattatcgctagcagaacgtcagaaacaagaaaaagcttttagatgtgaagtgaacaagcgagagtatatacgtatgccattttcaagtgaaaacgatgctaaaaataagttgtttaatattgtttatacttacaatgccgtaaaaaactttaaacaggctgaagactctagaaatcctagagctcgaaacgtttaa

SEQ ID NO: 5789 - DNA, 693 bp, Staphylococcus epidermidis
atggcaaaagttaaagagaaagttgcagtcgttacaggtgcgagtagcggtataggagaggcgattgccaaaaagttaagtcaacaaggtgcatcaatagttctggttggtcgtaacgaacaacgcttaaacgaaatagcccagcaattaaataatccggctaaagttgtttcagcagatgtcactgtaaaatcgaacatagatgatatgttaaaagctgtaatagaccattttggtcatatagatattgttgtgaatagcgcaggtcaaagtttatcatctaagattacagactataatgttgagcagtgggatactatgatagatgtaaatattaaaggtacactccatgttttacaagcaacattgccttatttgttaaaacaatctagtgggcatatcatcaatcttgcatcagtatcaggatttgaaccaacaaagacgaacgccgtttatggtgcaacaaaagcagcaatacatgcaatcacacagtctcttgaaaaggaattagcacgtacaggtgttaaagtgactagtatttcaccaggaatggttgatacccctatgacggaaggtactgattttggggaacgcaaaaaacttgaagctcagaatattgctgatgctgtagtatatgttttaacacagcctagtcacgttaatgttaatgaagtaacgataagacctgtttaa

SEQ ID NO: 5790 - DNA, 1242 bp, Staphylococcus epidermidis
ttggataaacgtcaatttgaaattttagatatgctagtgagatttaatactgaaagtccacctggacgtaatacagatccattgcaagatgaaatcgaaacgttacttaaacaactggatttttcaatacagagagaacagttatatgacaatgatagtgtgatagtagccaccttaaaagggcgcaatcctcaagcgccaaaactgatattgaatggacacgttgatgtagcttctgtagatgacaatcaatattggcagtatccaccttttaaacttaccaacaaagatgaatggttatacggtcgtggcgttagcgatatgaaaggtggtatgtcttcattattctacgtcttggagcaattacatcaagaggggcaacgtccagaaggtgatattattgttcaatcagtagtcggtgaagaagtaggtgaagcaggaactaaacgtgcatgtgaaataggacctaaaggtgacttagcccttgtcttagatacgagtgagaatcaagcacttgggcaaggtggcgtgattaccggatggattacagttaaaagtaaaaatacaatacatgatggtgcgcgtagtcaaacgatacatgctggtgggggcttgtttggtgcaagtgccattgaaaaaatgacaaaggtgattcaatcgcttaatgaacttgaaaggcattgggctgtcatgaagaagagccctggaatgcctccaggtgcgaatacaattaacccagctgtcatagaaggtggacgtcaccctgcatttattgcagatgaatgtcgattatggattactgttcattacttaccgaacgaaagttatgaatctgtagttaatgaaatagagcaatatttaaataaggttgcagaagcagatgtatggctcagagagaatccacttgaatttgaatggggtggtacatccatgattgaggataaaggagaaattttcccaagtttcactgttccgacacatcatccaggttttaagcaattagaagaagcacatgaacatattcataataaaaagcttgaacatggtatgagtacaactgtaactgatggaggttggacagcacattttggcattcccacgatattatatgggccaggtagtttagaagaggcacatagtgtagatgagaaaataaaagcaaaggaattagctcaatatagtgatgttttatatacatttttaaaagaatggtatgaacacccacaatcctataaatcataa

SEQ ID NO: 5791 - DNA, 2166 bp, Staphylococcus epidermidis
atgcaaactcgattgggagaaaaagatattaatttaccgcagtattacaacaatagggagttaagttggctagattttaactatagggtattacaagaatcatatgataaaaataatccgttgcttgaaaaacttaattttatttctatcttcagttcaaatttagatgaattctttatggttcgagtggctgggttaaaagaccaagtcaaaatgggatatgacaaacctgaaaataaagcacaaatgacgcctcaagaacaacttgatgctattaaaattaaaaatacagactatgtgaacactcaatatcaacgttataacgaattaattaaagaattagccaattacgatattgagatggtaaaacctgaagacttatcagatgcattgatagaaaaattagaacaagagttcaagttaagtgtcttgccgacactcactccgttaggtattgatgcgtatcatccatttccaaagttaaataataaaagtttaaatatttttgttgatatcgatacggaagatgccattaattcagctatcgttcaaattccttcattaattccacgctttttaactttaaatgagggtacaaaacaatacgttgtcatggtagaagatgtgattacgtatttcatcaattatttatttacaggatacgaagtactaaatacttttactttccgaatcacacgtaatgcagatttaaccattcatgaagatggcgctgaggacttgcttatagaaattgaacgtttcttaaaagaacgtaagagtggttcggctgtacgtttagaattagattgtcgcacttctgaaaaagagaatgtagaatggttaatcaatcaattagaaattgaagataatgatatttattatttagatggtccacttgatttaacattcttatttggattggttgatcatctatctcataagctcaaatatttaacgtatgagaaatatactcctcaaccacctagatcattaggcaacaagaatatctatcaattatcattagaaagagatatattcttccaccatccgtatgaatcatttgaaccaatagttgactttattcgacaagcagcagatgacccaaatacaatcgctatcaaacaaaccttgtatcgagtgagtaaggattcgccgattattaacagcttaaaagaagctgctgaaaacggcaagcaagtaacggtgctcgtagaattaaaagcacgctttgatgaagaaaataacgtacattgggcacgtatgctagaagatgctggctgtcacgttatttatggtatgacacatctaaaaacgcatagtaaaattgcgctagtcgttaaacgcatcaacaatgaacttacgtcatttgttcatttaggcacaggtaactataatgataaaactgctaaattatacacagatatgggtatcattacgacaaataaagatatcgctgaggatgcaattaacttctttaattacttgagtggttactcaacaaaaccagaatacaataaattgattgtagcaccatacgatattcgagacgtcttcattgatcgtatcgataaagagatacgtagtcatttacaacatggtaacggtaaaattatgatgaaaatgaactctttaaccgataaaacgattatcgaaaagctcttcgaagcatcccaagcaggcgttaaaatacaactcatcattcgtggtatatgttgtcttaaaccaggcattccaggtattagcgaaaatatagaggttgttagtattgtgggtcgtttgcttgaacattcacgtatttactacttccataataatggtgaggcgcatatttatttatcttcagctgacgttatgacacgtaatatgattaaacgtgtcgaaatattattccctgttgaagataaatcaataggacaacgattagttaactatatgaatttacaattatctgacaaccaaaaaggtcgttaccaagatgcacaaggcgtttatcattatgtcgaaaacaattcatctcctttaaactctcaatcttacttgatgcaagaagcaattaagtatggagaagaactaaaaaaacaatcggtacaaccttctggacaacccgttcattctagacgtggtggtagttggatgcgaaaattaaaaaacacatttaaaagataa

SEQ ID NO: 5792 - DNA, 1533 bp, Staphylococcus epidermidis
atggaagaaagaattggtttgatagacattggttccaacacgattcgacttgttatatttggctacaataaaaaaactgggctcaatgaaatactgaatataaaaacacctgcacgattaagtcaatatctcactaagtccaatgaaatgaatgatgaaggtattcatgttttaaaagagacattaagcagttttagaaaagttgcggataaatttaacgttgatgcattatatcccatcgcaacagctgctatccgtcaatcaaaaaatcgtgaagctatcattaaagaaattaaacaagatattcatatcgaaattcaaattgtacctgaagaagatgaagcattttacggttactatgcgattacacatactactgatattgaaaatggaatttctgtcgatatcggtggcggttctaccgaagttacccttttcaaagacaagcaacttaaagaggctcatagctttccattcggcgtggtatcacttaagcgtcagttttttggtgataaagcacacaatgacaaaacggccattaaaaatatggaacagtttttacgtgagcaatttagtcagctagactggctatccaatcaacatattgcgcttgtaggagtaggtggttctgcacgtaatgttgcacgcattcatcaatcagcacatgcataccctatcggtggcgttcataactatacaatgacttcgaaagatattaacaatgtttatgatctaatccgtaaaagttctcgcgatgaacttacaaatttagacggtttaagtcgcgatcgcgtcgatattattttgccggctatctccgtatttaaaacacttttcaaaaaaattgacgctacacaattcaccttctcaagaaaagggattcgtgaaggatttattatgaaccacatcagcaaacgatatcctgatgagtttaataaaagtaacgtacgtaaagatgcattacgtcatttagcgaatgaatatcatattgaagaaacgagtgctaatcgtcgtgtgaaattagctcaatccttattgaatcaaattataagtgaacgatcacttaatatttcagcaatggaaaaagaattatttattgaaggtgcctacatttattacctaggtagtttcattgattcagactcaagttcaccacatacgtattacttaatcgcaaattcaatgattaacggcttttcacataaagatcgtgtgaaattagctttgttagctagttttaaaaacaaatctttacttaaattttattgcaaagaaacacagtggtttagtaataaagaaatagatacaatacaagctttaggggggattattaaatttgcaaacaccttgaatatctcacatactagttttgtagaggaagttaaactaaaagcaaagaaagatgacaaatacgatttattagtttattacaaaggttcacctattgcagaagaataccaagcaaatcgtcagaaaaagcatattgaaaaaattttaaaaggtaaggtttctattatatttacaaaatcttaa

SEQ ID NO: 5793 - DNA, 819 bp, Staphylococcus epidermidis
atggaacgtttagaaaacaaaatcgcagtgattactggtgcgagtactggtattggacaagcatcagccgtggcgttagcaaaagaaggagcacatgtgttagcgcttgatatatcaaatcaattagaagaaactgttcagtctattaatgataatggtgggaaagcaactgcatatcgcgtagacatttcagatgataaacaagtcaaacaattctcagaaaaaatagcacaagaatttggacatgtagatgttatttttaataatgcgggtgtagataatggcgccggacgtattcatgagtatccagttgaagtgtttgataaaattatggctgttgatatgagaggaacgtttttagtaactaaatttttattacctttaatgatgaaacaaggtggttctattattaatacagcttcattctctggacaagctgccgatttataccgttcagggtataatgctgcaaagggcggtgtcattaatttcacaaaatctatcgctatagaatacggacgtgaaaatattcgtgctaatgccatagcacctggaacaatcgaaacaccacttgttgataatttagcaggtacatcagatgaagaggccggacaaacattccgagaaaatcaaaaatgggtaacaccattaggtcgactaggaacaccggatgaagtcggcaaacttgtagcctttttagcttccgatgatagttcatttataactggtgaaactattcgtattgatggtggcgtgatggcttatacatggcctggagaaatgttaagtgatgaaagttggaaaaactctactaaataa

SEQ ID NO: 5794 - DNA, 189 bp, Staphylococcus epidermidis
atgttttcttctagtaataaagctaaaaagactatatttggagctatgacttgttcaaaatgtggtaagacactcaataatgatgaaaacattaccatcaaaatcaatactaaagaattaaaaggttatactcacttatcaagttgggctgatgcacagtataaattgtgtgaaaactgctcagaataa

SEQ ID NO: 5795 - DNA, 1077 bp, Staphylococcus epidermidis
atgccagaatctaaagcgttacttaaatctttaacagatgttaatggtatttctggacatgaaatgcaagttaaatctttaatgaaagattatttaacacctgtaagcgatgatatcgttgaagaccaattaggtggtatttttggtaaaaagaatgctactcatggaactaaatctttaatgatttctggccatttagatgaaattggctttatcgttacacaaattgatgaacaaggatacatttatttcacgccaattggtggatggtggaatcaagtcatgttatctcaaaaagtgacgattactactgaaagtggcaaagagatacgtggaattattggttctaaacctccacacgccctctcgccggaagaacgcaaaaaaccagttgatattaaaaatatgtacatcgatattggtgtgcgtaataaagaagaagcgaaagaagcgggaatcgaattaggtaatatgattacaccttatagcgaatttgaatctttagcgaatgataaatacttaactgctaaagcttttgataatcgctatggatgtgcactcgctgttgaagtacttcaacaactaaaagatgaaaacatagacatcaatttatatgccggtgcaactgtacaagaagaagtaggtttacgtggtgctaaagttgcagcaaatttgattaaacctgatttagcaatcgctgtggacgtcggggttgcatacgatgttccaggtatgacgggtgaaaaaaatgaaggtaagttgggcgatggtccattagcaatattaatggatgccactagtatcgctcacgatggtttgcgcaaacatattaaagacgttgctgagcatcataatattccagtacagtgggcaacaacacctggtggtggtacagatgcaggtagcattcatgtagccaatgaaggtatcccaacgattacaatcggcgtaccattaagatatatgcactctaatgtatctgtgctcaacattgatgattatacaaattcagtgcgcttaattactgagattgcgcgctcattaaatgatgacagttatcaagcacttatgtggtaa

SEQ ID NO: 5796 - DNA, 468 bp, Staphylococcus epidermidis
atgaaaaaagtcatatcgcttttagtagtattagttataagtgctgtatctctttcggcatgtgggaaagaacgcacaaaaacttatgaaggcgaagtcaacggaaagcaagtgattacatctttgacatacaaagatgatgaagttctcaaacaatctactatagcaacaattaaatatgatgatttaggcatcgataaagatgaagctaaacaaatgtttaaaaatgatgaacaagcattcaaagggatagaaggtgttacatataaaacagattataaagagcgaaaggccatcgaacatatcgatattgattataaagatgcggatatagatcagcttaagaaaaatttaggtttcatatcatcagatgccaaaaaaggtgaccatgtgagtgtggatagggttgttaaacaactcaaacgtaatggtttaaaagataaaagtaaaatgaatgaagataattaa

SEQ ID NO: 5797 - DNA, 1578 bp, Staphylococcus epidermidis
atgtcagttttaactgtcatgcaattcatagtcaatattatcatcatgattgtgttattaacgattatgattcttggggttatttggttatttaaagataaaggtcaaaatcaacacagtgtactaagaaattttcctgttttgggtcgaatccgttatatttctgaaaaaatcggtccggaattaagacaatatttcttcgcaaacgataatgaaggaaaacctttttcacgaagtgattataaaaacatcgttttagctggaaaatataaatcaagaatgaccagttttggtacagggaaagattacttagagggattttatattcaaaatacgatgttcccacttcaagcaactgaattacatatcgatcatactgaattcatttctacatttttatatcatattgagaatgagcgcctatttagtagagaagaatacagaaaaagcgctcaggttgatccgtttttcttaactgatgaacatgcagtagtattgggctctaaccttaagcatccctttaaaatcaaacgcttagttggtcaatctgggatgagttatggcgctttaggtgaaaatgcaattactgcactgtcaatggggttagctaaagctggtacatggatgaatacaggtgaaggtggattatctgaatatcatttgaaaggtaatggtgacatcatctatcaaattggtccaggactctttggagtaagagatcatgatggcaattttaatagagacatgtttatcaatcttgccgaacacaataatgtacgcgcatttgaaattaagttagctcaaggtgctaaaacacgtggtgggcatatggaggggaacaaagtcacagaagagattgcacgcattagaaatgtgaaaccatatgaaactattaattcacctaatcgttttgattttattaaaaatccaacagatttactgaatttcgttaatcatttacaatcgataggtcaaaaacctgtcggcttcaaaattgttgtcagtaaagttgaagaaatagaggcgttagttaaaacaatggtagagatagacacctatccaagctttattactgttgatggtggtgaaggtggtacaggcgctaccttccaagaacttgaagatggtgttggtttaccgttatttacagcacttcctatcgtttcaagtatgttagaaaagtatggcataagaaacaagattaaaatttttgcgtccggtaaattagtgactccagataaaatcgctattgcattaggattaggtgcggatctcgtcaatattgctagaggtatgatgataagtgtaggttgcatcatgagccaacaatgtcatttaaatacatgtccagttggagtagcaacaaccgatcctaaaaaggaaaagggacttattgttgatgaaaaacaataccgtgttacaaattatgttacaagtttgcatgaaggtttatttaacatcgctgcagctgtaggcgttcatagtccaacggagattacttccgaccatattatctatagacaattagatggcactacaacgtccattcaggattataaacttaaattaatttcttaa

SEQ ID NO: 5798 - DNA, 783 bp, Staphylococcus epidermidis
atggatattaaacaatcttcagagaaacaaggtcgaccgcatcatttatcagacagtaggacagttttaaaaagaaattttatattaataccaacttatattttattacaaagtatcttaccaatcattgttgttttcggctcattaggcatcactgccatgataacacaacaggcaccaccacaatggttgtatcatttttcattaagtttaagttttgtgattgctcaaggtctaatattagttatcttttataaaatgcatcaatctgtaataaatgatgtgatgaagcaacaatggatagttgcaaagaataaaataattaaaattgtaatagttgcgattgtcgtatatttattattacttataattcgggtgattggaacatcattacctaatcatttaagttatcatctcacgcaatacgaacaacgtacgctagggctatttaaatcaccatatgtgttgttagttacttttatatccatggtattcttacgtccaatggtagaacaaatcatttatagatatctcatcatccatgaattaggaaaagtatggaatagacaatttgtaattggtttgtctattcttattgaaacgatcgtacatgtttacgacatggcatcgatttttgaaatttttccatatatcgttattgcttcggcagctacaatactatatattaaatcgcgggataatttaattgtcgcttatatatttcaagtgattttgcaatgtatcctttttatagaaattttatgtaagtataccaacttttaa

SEQ ID NO: 5799 - DNA, 180 bp, Staphylococcus epidermidis
atgtatattgtgtcaatagtgggatttacatattttcattgtactgatgcagtttcaccatttgaagcaggaccttactttattgcagcagtcgtatttgttataggttaccattttagccaccgtaatttagcagtacccattgctttgcatatgattacaaatttaatagcattttaa

SEQ ID NO: 5800 - DNA, 663 bp, Staphylococcus epidermidis
ttgctacttaaggttgaacatcttacatacaaggttgataatcgtacgattttagatgatattaatttgaatattaataaaggagacacgattgctattgtaggtccttctggaagcggtaagagtactttactcaaacaattgaatcatttaattagtcccacgagtggagatttatatttgaatgatcaatcttactttaattataagccggaagagataagaacacgtgtgagttatttaatgcaacaaagtgagttaatcggttatacaattgaagataatatgaaatttcctgctgaggctagaagtgaagcttttgaccgtgataaagcgaaacaactcatctctcaagtaggattaggtaattatcagttagatgctcaaattgagcacatgtctgggggagagcaacaacgtattaccatcgctagacaactcatgtatgaacctgaagttttattattggacgaagctactagcgctttagatacacataataaaaagaaaattgaagaaattatatttaaactagcagataaagggattgccattttgtggattacgcatagtgatgaccaaagtatgcgtcattttaagcgtagaatcacaattactgacggtaagatatcgagtgatgaggagttgaatggtaatgagtaa

SEQ ID NO: 5801 - DNA, 777 bp, Staphylococcus epidermidis
atgagtaatacagcactttgtctgacagcacttttattactaatccctatctttatttcttataaagaaggattacatattatcaaagatttagttattgctacaattagagcaaccatacaactattgattttaggctttttattacattatattttcgaaattaatgaaaaatggttattagtgctatgtgtgttagtcattattatcaatgcatcttggaatacaataagtcgtgcttcacctgtcatgcatcatgttttttggatatcatttgtggctatatttgtgggaacagcgctaccattggcagcaactgttgctacaggtgcaattaaatttacagcgaatgaagtgattccaattggaggtatgttagctaataatggtttaatcgcgattaatctcgcttatcagaatttagaaagagcatttgttcaagatgtttctgatattgaatccaaacttacgttagcagcgacacctaagctcgcatcaaaatcagctattagagaaagtatacgcttagcaattgttcctacaattgattctgtaaaaacatatggtctagtttcaattccaggtatgatgacaggattgattatcggaggcgttgacccacttcaagcaattaaatttcaattgcttgtcgtgtttattcatacaacagcgacgattatgtctgcactcattgcaacgtatatgagttacggtcagttctttaatgctcgtcatcaactcattgctagaacgcaacgcacaagacaaagtagttaa

SEQ ID NO: 5802 - DNA, 1179 bp, Staphylococcus epidermidis
atgactgtcgcacgcacaacaacatttatattaagtgttttcatcgtaggtatggttgagatgatggttgcaggtattatgaatttaatgagtcaagatcttcatgtttctgaagcggtggttgggcaactggtaacgttgtacgcgcttacctttgcgatatgtggtccgttattagtgaagttgactcatcggtttacttcgcgatcagtattattatggacgttaattgtctttatcttcgggaatggtatgattgccattgcacctcattttggaataatagttgtaggacgtattttatcttctgccgcagcttcactcattattgtgaaagttttagcactcacagcgatgctcacatcagcaaaaaacagaggtaaaatgattggtattgtttatacaggttttagtggggcgaatgtctttggtgttcccatcggtacagtgattggcgactgggtaggatggcgatttacatttttattcattattattgtaagtgtatttgttggtgttttaatgttaatttatctaccaaaagaagatgaattgtcacatccaaatcaaacacctcgttcatctagtattgaatcacaaactggctcaagcgtcataagacctcgtgaggtttttaaatatctgatgattacatttttagtgctggttgctaattctgtaactttcgtgtttattaatccattaattttatcaaatggacatgaaatgtcttttgtgtctttagcactacttgttaatggtgtagcaggtgtgattggtacttcattaggcggtgttttatctgataagtttactagtaagcgttggttaataatttcgatttcaatatttataataatgatgataattcttaacttattattaccaggaacaggattattattagttggcttatttatgtggaatttaatgcagtggagtacaaatccagctattcaaagcggtattattgaacacgtcgaaggtgatacaagccaagtgatgagttggaatatgtcgagtctcaatgccggtattggcgttggcggaatcgtaggtggactcgttatgacacatttatcagtggaatatgttacttatactagtgcattgataggtttaattagtcttatcattgtattcactttaaaaaatagacattatgctaaaaatttatga

SEQ ID NO: 5803 - DNA, 1356 bp, Staphylococcus epidermidis
atggttcaagtcaagataggtaactgtaccatcaatggcatacacaaaaagaatattgatgtattcttaggtatcccgtatgccaaatcattcaataagatatctcgattccaacattcaaagcttatggaactaagcaaaccaatgattgatgcaactcatattcaatccattccaccacaaccctacaattcacttgaagattttttttcgatgacagattcatcgtttaattcttttaaacaaaatgattattgcctatttttaaatatttggaaaccatcgtccaatcaaaatcatttacctgtagtgatttacttttatggtggtagttttcttcaaggacatggcacagctgaactatattgtcctgaacacatagtagaacaagaaaatataatagtagttacttttaattatcgcttaggtgcactcggctacctagattggtcttattttaatcaacatttgaactataataatgggatttctgatcaaattaacgttttaagatgggtacatcaatatatcgaacattttggcggtgatccaaataacgtgacactaatgggtcaatctgcaggtagtatgagtatcatgacattaatgcaaatgcccgaacttgatgattattatcataaagtgatgttactaagtggaacgttaactactgatacaccactcaatgcacatactaaagtacaacatttttcacaactcatgaggcattattttcctaataaaacacttaagacacttaacagtgatgacattttatatctaatggaatctcaaaaaatagagcgtggaagatctcgtggacttgatttgatttatcaacctattaaagatcatcatatgtcacgatccattaaaaaatttcccaaaccgacattcatgagttatacacacgatgaaggtgatatttatattgaagacgcaacacgcaccttaccttctgaacgttttattcacttgatgtctcaatatggtacacacgtcgaaaaaaatgatgccctcacaatgaaacaacaaagaaatgtaataacagagtattgttttgttcgtcagatttatctatttttaaatcaaatgaatagttgcgacacttggctagcacgttttgattggcaccaaccccatacctcctactttaaaagtgcatatcatatattggatttagtattttggtttggtcacctctctattttgactaaaaatcattattctataactcaacatgatatgaatttaagtcgtaacatgatatctgacttagcttattttgcccgaaaaggtaagatgccatggaaatgttatgaacctcaacatcaagcgttacatatctatagataa

SEQ ID NO: 5804 - DNA, 1680 bp, Staphylococcus epidermidis
atgaaaaataatagcaaatcaaaaagtaataagataagtctttctcaactcgtcctccttggtcttggttcactaataggatcaggttggttatttggagcgtgggaggcatcttcaatggccggtccagccgccattatttcctgggttatcggtttcttagtaattggaacgattgcctataactatattgaaataggaactatgttccctcaatcaggcggtatgagcaactatgcacagtatactcacggctcattacttggttttattgcagcatgggcgaactgggtatcattagtaacaattattcccattgaagctgtgtctgctgttcaatatatgagttcttggccttgggattgggctaaaccaatgggatctttaatgaaagatggctcaatcagtacttacggtttgattgctgtttacatcattattgcaatcttttcattattaaactattggtcagtaaagttattaacatcatttacaagtttaatttcagtattcaaattaggtgtccctattttaaccataattatgttattagtttccggttttgatacaggtaattatggacactctatcggtacatttatgccttacggaagtgcacctatttttgctgcaacaacaacatctggaattatcttctcatttaatgcattccagacaattattaacatgggatcagagattaaaaatccagagaaaaacatcgcacgtgggattgttatctcacttacattaagtgctatattatatatagttttacaaagtacgttcattacatctatgccaagctcaatgttgcatgagcatggatggagcggtatcaatttcaattcaccatttgcagatatggcaattttattaggtcttaactggttagcaatattactttatatggaagcagttgtgtcaccgtttggtactggggtttcttttgttgccgttactggacgtgtgttacgcgctatggaagaaaatgggcatattcctaaattcttaggtaaaattaataaaaagtataatatcccacgtgttgccattgcatttaatgcaattatcagcatggttatggtgacattgttccgtgactggggtacactagctgcggttatttctactgcaacattagttgcatatttaactggtccaactacggttatttcattacgtaaaatggcaccaaaaatgactcgtccattcaaagctaatattttaaaatttatggcacctttatcctttgttttagcatcattagctatctattgggcaatgtggccaacaacagcagaagttattttaattattattttaggtttacctatttatttcttctatgaatataaaatgaattggaagaatactaaaaaacaaattggcggaagcttatggattattatctaccttattgttctcgcatttttatcatttattggaagtaaagagttcaaaggcttaaattggattcactatccatgggatttcttagtcattgtaatcgttgctttaatcttctatcaactaggtacaacaagttactttgaaagtatttatttcaaacgtgcaaacaagttgaataagaaaatgggcgataaattgcgtaaaacacgcaaaaaagcgcgtcataaagattggaaagaacgcgatcgacaagagcaaaatcaataa

SEQ ID NO: 5805 - DNA, 234 bp, Staphylococcus epidermidis
ttgagaaatttaatttttaatgaaactgaacttgaagaaaattataaatggatgcatccttgttatacgataaacaataaaaatgctgtgctaatacatggatttaaaggttatgtagcgttgctttttcaaaaaggagcaatacttgaagaaaagtatcatacattgattcaacaaactgaaagactacaggccctaagaaagcgagccaacaatacgaagtattgtaaataa

SEQ ID NO: 5806 - DNA, 1053 bp, Staphylococcus epidermidis
atgaaagcagcagtatggtatggacaaaaggatgtacgcgttgaaaatcgcgaacccaaagcaataaaagacaatgaagtgcaagttaaagtctcttgggccggtatctgtggtactgatttacatgaatatttggaaggacctatctttatttcaactgatcaaccggatccactacttggtcaaactgcacctgtgactttaggtcatgaattttcaggtgtcgtagaaaatgttggtaaagacgtatcacgttttaaaaaaggggatcgtgtggtagttaatccaacagtgtctaaaagagaaaagccggaaaatgttgacttgtatgatggttattcatttataggactaggttctgatggtgcatttgccgagtttactaatgctcctgaaacaaatgtttatcatctaccagataatgtttcagcacgagaaggtgctcttgtagaaccaacagccgttgctgtccaagcagttaaagaaggcgaattattattcggtgatactgtagcagtatttggcgctgggccaattggtttgttaactattgttgcagcaaaagctgctggtgcaagtaaaatatttgtctttgacttatcagaagaacgtttagcgaaagctaaaagtgtcggtgcgactcacgtgtataactcaggtaacgtcgatccagtacaaacggtttatgaacatactgacaacggtgtagatgtgtcatttgaagttgctggtgtaggtattactttacaacaatctattgaagtaacacgtccacgtggtactgctgtcatcgtatcaatcttcggtcatcccgtagaattcaatccattattacaaatgaataaaggtgtcaagttaacaactacaattgcttatacaccaactacattccaacaaacaatagatttaatcgctaacggtagcttaaatgttaaagacgtcgtaacagatcaaattgaattagataatattgttgaaagtggcttcaatcaacttgtaaacgataaatctcaagctaaaattttagtccgtttaaatggtgaccaaaaataa

SEQ ID NO: 5807 - DNA, 1257 bp, Staphylococcus epidermidis; identical to SEQ ID NO: 2638

SEQ ID NO: 5808 - DNA, 636 bp, Staphylococcus epidermidis
atgaaagcattcttacaagaatacggtagtcaacttttatcaaaagcagtagaacatttttatatttctatgtttgcattattgttagcgattgtagtagctgtccctttaggtattttattatcaaaaacgcaacgcacagctaatgtggtattaacagttgctggcgtgcttcaaaccattcctactttggctgtgttagctatcatgattccaatatttggggtaggaaaaacaccagctattgttgcattatttatctatgtattattaccaattttaaataatacagtattaggtgttaaaaatatcgataaaaatgtcattcaagctggtcaaagtatgggaatgactaaatttcaattaatgaaagatgtagaaatgcctttagctttaccacttattattagtggtattcgtctatcaagtgtatacgtcattagttgggcaacactcgcaagttatgtaggtgcaggtggacttggggatcttgtatttaatggattaaatctctatcaaccacctatgattattagtgcagcgattgttgttactttattagcattagttattgactttatactttcattagttgaaaaatgggttgtacctaaaggattaaaagtatctagataa

SEQ ID NO: 5809 - DNA, 945 bp, Staphylococcus epidermidis
ttgaagaagtatcttaactatacactgattctgattgcattatctctcatcgtgttatctggatgcagtttaccaggcttaggtgatggaaatgctaaagatgatgtgaaaattacaacgactgaaacaagtgaaactaagattataggtcatatggaaaaattattaattgaacatgaaactgatggaaaaatcaaaccgacgttaattggtaacctagggtctagcattattcaacataatgcgttacaacgtggagatgcaaatatgtcagcggtacgttacacaggtactgaattgacgagtgtattagcagctaaacctactaaagatcctgataaggccatgtctgaaacacaacgcttatttaaaaagaaatatgatgaaaagtattatcattcacttgggtttgcgaatacatacgcattcatggtgacaaaagaaacggctaaaaagtatcacttagaaaaagtatcggatttagagaaatataaagatgaactacgtcttggaatggatacccaatggatgaaccgtgcaggtgatggatatccagcttttgttaaagattatggatttaaatttgatagtgcacgtccaatgcaaattggtttagtatatgatgcattaaaaaataataaattagatgtagcagttgggtattcaacagatggacgtattgcagcttatgatttgaaaatattggaagatgatcgcaaattcttcccgccttatgacggtagtccacttgcaaatgaacaattaataaaggataatccagaaatcgataaggcactaaaaaaattagaaggtaaaatctcaacagaagaaatgcagaagttaaattatgaagcggatggaaaaggtaaggaacctgcagtgatagctgaagaatatttaaagaaacatcattactttgaagaaaagaaaggtggtcataagtaa

SEQ ID NO: 5810 - DNA, 696 bp, Staphylococcus epidermidis
atgaaaggtaatttgttacattcaatcatcgaatattactcactgaactgggcctttcttctagaactgttcttcaaacatctattaatgtcggtatatggtgtgttgtttgcatgtataattggaattcctattggtattttcatagccaagtatagacgtttatcgtggccggtaattacaattgcaaatattatacaaactgttccagcaatcgctatgttagccatacttatgttggctatgggattaggaccaacaactgttgttgtaactgtattcctatattcgttattacctattattaaaaatacttatactggtattgtagaagttgatgaaaatattaaagacgctggtaaaggtatgggaatgacggggaatcaaatattaagaatgatagagttacctttatctttatctgttattattggtggtgttagaattgcacttgttgttgctatcggaatagtagcgattgggtcatttatcggtgctccaacactaggtgatattattattcgtggtacaaattcaacagatggaacaacattcatcttagcaggtgccataccaattgctttaatagcaattatcatagatataggattacgttatctagaaaaacgtttagatcctactcgtaaaaacaaaaaaggatcaatgcaaaaacatcaagtacaaaaattacattaa

SEQ ID NO: 5811 - DNA, 702 bp, Staphylococcus epidermidis; identical to SEQ ID NO: 2642

SEQ ID NO: 5812 - DNA, 450 bp, Staphylococcus epidermidis
ttggaacaaacgcatctcgttaaaaacaaagcggctgataacaagaagtcaatgaaatatagtatttttcaacaagcattaacgattgcagtgattttacttatatcaaaaattattgaatcatttatgcctataccaatgccagcttcagtaattggactcgtactattatttatcgcattgtgtacaggcattgtgaaattaggtcaagttgagactgtgggaactgcattaaccaataatattggattcctattcgtaccagctggtatttcagtcattaactctttaccaatccttaagcaaagccctattttaattattttacttattattatttcaacacttttattattaatttgtactggctttgcgtcacaattattagtgacgaaatcacttttcccttctaaagagaaaaatgaagaaacaagtcacataggagggtaa

SEQ ID NO: 5813 - DNA, 759 bp, Staphylococcus epidermidis; identical to SEQ ID NO: 2644

SEQ ID NO: 5814 - DNA, 1776 bp, Staphylococcus epidermidis
atgcttaatttatttattttattacttgaacgcgtgggattaattattttactcgcatatatactcatgaatattaatcattttaaaacaatgatgagcgaacgtgacaaatggcgttcaaaattccaactaatcattatttttggtatattctctatgatttcaaattttacaggaattgaaatagaaaatggccatatcgtatctggtgatatttattaccacttaagcaaagacgcctcaatggccaatacccgtgtattaacaatcggtgtttctggtctaataggtggaccgtgggtagctataattgtaggcattatttcaggattatgtcgtttatatattggcggggctgacgcatatacctatcttatttcatccatagttatcgctatcatatctggttactttggtcatcaaacaataaaacaaaatacatatccgtccattaaaaaaggtgctattatcggtgcaataactgaaattattcaaatgggctgtatattattatttacaaataacctacatcacgcaattacattagtcagttttatagcactaccgatgattatcattaatagtttaggtacagccatatttttaaccatcattttgtcgaccatcaagcaagaagaacaaatgcttgcagtccagacgcatgatgtattacaactcgctaacgaaacactaccttactttcgatctggacttaatgaaaaatcagcccaacaagctgctgaaattattttaaaattaatgcaagtgtcggcggtcgctattacaaataaaaaagatattttaacacatattggtgcaggcagtgaccatcacgtagcacgtaaagagataattactgatttatctaaagaagtgattcaatctggaaaattaaaagtcgctcatacgagagaaggaattggatgtcaccatcctaattgccctcttgaaggagccattgtcgtccctctttatatacataatgaagtcgcagggactttaaaattttatttcacagataacaatattatttcaacttcagaccaacagctcgcaaaaggtctcgccaatatattttcctcacagctagaactaggtcaagctgaaatgcaaggacaattattgaaagacgctgaaattaaatcattacaagcacaagtcaatccacatttcttttttaatgctattaacactatatcagcactagtaagaattgatagcgaaaaagcacgacgtttactgattcaactcagtcagttcttccgctctaatcttaatggtgcacgtaataatacgattactttacaaaaggaattacaacaagtagcagcatatttatccttagagcaagctcgctatccaaatagatttaacatacactatcgaattgatgatcagtgtcaagatgcgctcatccccccttttataattcaaatattagtggaaaattctattaaacatgcatttaaaaatcgtaaaaagaataatcatattgatgtggatgttagcatgaagcaagactacttaagtatatctgttcaagataatggtcaaggcataccagctgatcaattagatactattggatatacgacagtaacgtctaccattggtactggtaatgccttagtcaatcttaataaaagacttactggactatttggaacaacatcggcactgaacattcaatcttctcaatcaggcacgactgtaagttgtttaattccatataaatcttctaaggaggaacactttaatgaaagcgttaatcgttga

SEQ ID NO: 5815 - DNA, 648 bp, Staphylococcus epidermidis
atgacaatcgctcaaaatggaggatttttaatgtttagtaagaaaaaggataagttcatggttcaattagaagaaatggtattcaatctagaccgtgcagctattgaattcggcaaaatggatttcaatacacacttagatttgaaagcttattctgataatattaaaacgtatgagtcacatggtgacgaacttatgcatcaagttatttctgatctcaaccaaacattcattacaccaattgaacgtgaagatatcttatctttatgcaatgcaatagatgatgttctagatgctatggaagagacatcagcaatgtttgaaatgtattcaattgaatatacagatgagtacatggctgaatttgtagaaaacatacaaaaagcagttgccgaaatgaagctagctgtaggattacttgtagacaaaaagttatctcacatgcgcattcattctattaatattaaagaatttgagacaaattgcgacggtatcttaagacagtcgatgaaacacatcttcaatagtgaaacagatccaatcacattaattaaaataaaagatatttatcaaagcatggaagaaatagcagataagtgtcaagctgttgctaataattttgaaactataatcatgaaaaatagctaa

SEQ ID NO: 5816 - DNA, 1011 bp, Staphylococcus epidermidis
atgtcatatattttaattgtcacgatagctatagttatattttcattaatatttgactttatcaatggtttccatgatacagctaatgctgtagctactgcggtttctactcgagcattaacaccaagaagagctattttattagcagcagtcatgaactttattggggcattgaccttcacaggtgttgctggaactattacaaaagatatcgttgatccattcaaattacaacatggtttagttgttgtgttagcagctattattgctgccattatttggaatttgatcacttggttgtatggaataccaagttcatcttctcacgcactaatcggttctatagcaggtgcagccattgcatcgcaaggttcatttgcagtattacactatcaaggttttacaaagattattatcgtattaatcatttcaccaatcatagctttttgtgtaggttatatgatgtatacgattgttaaaatcgtttttaaaaattcaaatttaacacgtactaatcgtaattttaggtttttccaaatctttactgcagcattacaatcattctcacatggtacaaacgatgctcaaaaatctatgggtattatcacattagctttaattgtaggtaatttacaagatggtagtaatgttgaacctcaagtatgggttaaagttgcgtgtgcaacagctatgggattaggtacagcagtaggtggttggaaaatcatcaaaactgttggcggaaatattatgaaaattagacctgctaacggtgcagccgctgatatttcttcagcattaacgattttcgtagcgtcatcattacatttcccattatctactacacacgttgtgtcttcatctattctaggtgtaggtgcttcaaatcgtgcgaaaggtgttaaatggagtactgctcaacgtatggttgtaacatgggtgattactttacctatctcagctgttttagcagcaattatttattttattattcatctgttcttaaaataa

SEQ ID NO: 5817 - DNA, 801 bp, Staphylococcus epidermidis
ttgaaaaagttagcctttgcaattacagccgcttcaggcgcagcagcagttctatcacatcatgatgctgaagcttctacacaacataaggttcaatctggagaatccttatggactattgcacaacaatacaatacttcagtagaaagcattaagcagaataataatcttagcaacaatatggtattcccaggacaagttattaatgtaggtggaagtgcttcacaaaatactagttcaaacacttcttcaagttcagcatcttcacatactgtagtagcaggtgaatcattaaacatcatagctaataaatatggtgtttcagttgatgcattaatgcaagcaaatcatctaaatggttatttaattatgcctaaccaaacattaactatccctaatggtggttctggttcaggatcaggtggtacagcaactcaaactagcggtaattatacttcaccttcattcaaccatcaaaacttatacactgaaggtcaatgcacatggtatgtgttcgacaaacgttcacaagctggtaaacctatcagtacttactggtctgatgcaaaatactgggcgtcaaatgcagcgaatgatggttatcaagttgataatactccatctgttggtgcaattatgcaaagtacacctggaccatatggtcatgtagcatacgttgaacgtattaatggtgatggtagtattttaatttcagaaatgaattatgcaaatggtccatacaatatgaactatcgtactatcccagcttcagaagtatcttcatatgcatttatccactaa

SEQ ID NO: 5818 - DNA, 660 bp, Staphylococcus epidermidis
atgtcacaatcgacacaccaatcaactgatcataaaagacaatctcaagataagaaccaaacacatgcctatgcaaaagtttggttatattttatgtattattggatgatttttgggattggttgttattttggacaatatcttcctatgtcatggagaaaaccattgtctctaggattgttaattcttatattagcaacgttgtttattaaacgtgcgcgaaaatatggattagtgatctctcatatatacgctattattgtaggtttgctttcgtatgctctttttacgacttacttacaaaatttaggagcagaagtattctataaaaatattattcttgctattggtgcatttatagcttttggtattataggttactttttaataaaagacgcttcgagtatgggaaaatatttgtttgtgacattaattgcgctaattatagctgggattatagggatatttattaataatccaatttttcatactgtcattacaatagtgagcttattattgtttctcctttatactttatacgattttaatagaatgaaaagaggtcaattctcaccaagagaaatgggatttaatttgtttatcaacttattaaatatcatcgaagatatacttagtttagcaaatcgctttaaaaactaa

SEQ ID NO: 5819 - DNA, 2175 bp, Staphylococcus epidermidis
atgtcaaattcttgtttgcatatactttcaaaaaaagaatatacggcaacacgatgtcaagacggcattttattattttggcctatcgaagggagtatgtactttcaacaatttatgaaagaaaggatactctcagatgagttatatattgtgaataatatggatgtgtttagtatcagtgacaatggcaacacactagaagtatatatttctagtgattggtttacagagttaggctattctttttttaattaccattatacttcggatttaatacaatctaagaacgaaattaaagaactagttgctcaacttacgttgaattttttagatggtgatgtggataaagagcaagatattatcaataaaattgttcatattcttgctaatgaggctattattgacaaaaaaattgctgaagaccaatatatgtatgattattatggtgagttaaaggatgaattgaattatatatataatcacatcgaagaaagacttactctaaaagatatttccaataaattatatgtttctaagtccaacctttctacgcagtttcatttgttattaggtatgggatttaaaaaatatatagatacacttaaaattagtaaatctatagagatgctacttacgacaactaaaacgataagccaaattagtgaaacgttaggatttagtaatgtatctacatattctagacaattcaaaaattatttaagtgtaacgcccaatgcatatcgtgcaatgaaaaaatatgataagtacaatggatgttctgatgatgatgtttcagaacacttaaaatcacgtgtacaatcattaatatgttctaaaatgccaacgaatgagttagataattatgatgaaattgttattgaccaatatccaatttctaatgtttcaacgttttattctgtcgttcaaattaattcaattgatgaaattaaaatgttgtttttgcaaggtattcataaaaaaatagggtatgaaggttcaaatattattttttgtattatgcctaacttatgccaatataagaattcgttctctcaagaagagatgaatgatatcattaaaattattattgaatatcgcttgcacgtcgcatttagcatcgataaaatcgagcaaatatatgaacttaatcaactttttacatatcaatatgaaaacttaaaaattatgaataaatgttctgtttcagattacaatgtgcaatttatatttaatttgaacgaaaaaagtattcgagaaatttatcgtaatatcttgaagatacaaaacatcgaattggaatataaaataggtttagatattagttgcatgtttaatgacactgcacaatttaaatcattagcttcgcaaataaagcgtttaaaatttgactatctttatattgataatgctagattaaagtcaccctatttacttgataatgaggaaggtttattactcaaaaatattctacaatttaagcatttaatagatgatttaaagcagtttgattttagtagtgaaaatttaatttttctaaatttatataatcatcaattactgaataataatgaaattgatttaagtaatagcgctccattactatttaaaacgatttcaaaactaaaaaaacattttaaaggctacggattaaatgtattttcaaatcctaaagtctttaacgctgtacatttatttgatgagaatgggtttaaaacaacgtttggactgatttttaatcatttgagttggatgactaatcaaaaccaaattgaacaacgattctataatattattgaaaatgctgatcaatattatctctacttatatgattggcgtgtgattgaaagtgaatctaatgagagcgactttaaagacgttgatatatggattaactttgaagatgaagcgttaatagatgaatatatttgtgtgattgctaaagttgatgatgaaggtggcaatattaatcatatgatttctcaaaacttacgtcacaaatatgtttggtctacaccgttcttgatgagagttgaggagaactttagaccatacatgcacattatggaacatgactttaaaaagggcccattgaaaatcagaatgaaatataatgcagtatatttagttgaaatatataaaaaagataaaataaataaaaggcgtagcacaacttaa

SEQ ID NO: 5820 - DNA, 360 bp, Staphylococcus epidermidis; identical to SEQ ID NO: 3865

SEQ ID NO: 5821 - DNA, 717 bp, Staphylococcus epidermidis; identical to SEQ ID NO: 3864

SEQ ID NO: 5822 - DNA, 477 bp, Staphylococcus epidermidis; identical to SEQ ID NO: 3863

SEQ ID NO: 5823 - DNA, 675 bp, Staphylococcus epidermidis; identical to SEQ ID NO: 3862

SEQ ID NO: 5824 - DNA, 1146 bp, Staphylococcus epidermidis; identical to SEQ ID NO: 3861

SEQ ID NO: 5825 - DNA, 186 bp, Staphylococcus epidermidis; identical to SEQ ID NO: 3860

SEQ ID NO: 5826 - DNA, 594 bp, Staphylococcus epidermidis
gtgaaagtaaaatatatagacaaacgtcactggcgtcgcctggtagagagagaatatacagaggttaaagttaataataatagatttaaaggtattataggcttggtcacgatgaaaaaggttcgtgagcctttagaggtgacggtagttggacaaaacataatagttgcagatgacaattataaatggttacagatactaccggataagaagcggtatagtatgactgtcatgtttgataataaagggaatccattagaatactactttgacattaatataaagaacattactcaaaaaggaaatgcacgtaccatcgatttatgtttagacgttctcgttctacctaatggtgagtatgaacttgtagatgaagatgatttaatgtacgcactacaaaataaacaaatttcaaagaagcaatatcatgaggcatatattatcgcccatcaattaatgactgaaatagaagataatttttcagaaatacaagataaggttatgcgttgttatcataaaatcaatcataaagcacagaaaatgaaacataaacgtccctataaagctaaaaagaaatcacaccgacgacattaa

SEQ ID NO: 5827 - DNA, 855 bp, Staphylococcus epidermidis; identical to SEQ ID NO: 3858

SEQ ID NO: 5828 - DNA, 1209 bp, Staphylococcus epidermidis
atgtttacagcattattgcaaataaagaattataaattgtttgtggtcaatatgttgttactaggtatgggaatagcagtgactgtaccttatttaattttatttgctacaaaagatttggggatgacgacaacacaatatggactgctacttgcacttgctgcgataagtcagtttatagtcaattccattattgcaagattttctgatacacatcaccttaatagaaaaattctaatcatcactgctttgtttatgggggcagtgagcttctcaatttatttctacgttcatcaaatatggttattcatcgtgttatatgcgttgtttcaaggattatttgcaccagcaatgccacaattgtatgcctctgccagagaatcaatcaatgcttcaagttcacgtgatcgtgctaagtttgctaatactgttttacgttcaatgttttcacttggttttttatttgggccatttataggtgcacaacttattgagttaaaaggttattctggattatttggtggcacaatagctattattttatttactttaattttacaagtgtttttttataaaaatttaccggtaaaaaatcaaacttctgaacaacagcatattgagaaaatcgcaccaaatatgtttaaagataaatcattatttattccatttatagcgtttatattacttcatattgggcaatggatgtatacgatgaatatgccactttttgtgacagattatttaaatgaaaaggaaagatatgtaggctatttagcaagtttatgtgcaggtttagaagtgccgtttatggttatattaggtatattatcagctaaattgccaacacgaactttattgataattggttctgtatttggtggcgcattttactttagtattggtgtatttaaaaattttcatatgatgcttgttggacaaatatgtttagccatctttctagcaatattactaggtcttgggattagttattttcaagatattcttcctgattttccaggttatgcatcaacactttttgccaatgtcatggtaataggacaacttggtggtaatttgctaggtggtgtgatgagtcattgggttggtttggaaaatgtattctttgtctcagcaagttctatcttcgtagggatgatactcatcttgtttacgaaagatcaaaaaattacaatagaagatgtggagtag

SEQ ID NO: 5829 - DNA, 489 bp, Staphylococcus epidermidis; identical to SEQ ID NO: 3856

SEQ ID NO: 5830 - DNA, 690 bp, Staphylococcus epidermidis; identical to SEQ ID NO: 3855

SEQ ID NO: 5831 - DNA, 423 bp, Staphylococcus epidermidis; identical to SEQ ID NO: 3854

SEQ ID NO: 5832 - DNA, 297 bp, Staphylococcus epidermidis; identical to SEQ ID NO: 3853

SEQ ID NO: 5833 - DNA, 549 bp, Staphylococcus epidermidis; identical to SEQ ID NO: 3852

SEQ ID NO: 5834 - DNA, 567 bp, Staphylococcus epidermidis; identical to SEQ ID NO: 3851

SEQ ID NO: 5835 - DNA, 450 bp, Staphylococcus epidermidis; identical to SEQ ID NO: 3850

SEQ ID NO: 5836 - DNA, 681 bp, Staphylococcus epidermidis; identical to SEQ ID NO: 3849

SEQ ID NO: 5837 - DNA, 465 bp, Staphylococcus epidermidis; identical to SEQ ID NO: 3848

SEQ ID NO: 5838 - DNA, 873 bp, Staphylococcus epidermidis; identical to SEQ ID NO: 3847

SEQ ID NO: 5839 - DNA, 1635 bp, Staphylococcus epidermidis; identical to SEQ ID NO: 3846

SEQ ID NO: 5840 - DNA, 1695 bp, Staphylococcus epidermidis
atgaaatcacatattcattttagtatagatagagatttaatatgcgctatcatggtaggtgttttaggcggaattgtaacattagcaatgttctttttaagtggttatatgattactcaaagtgcgctaggtgcgccactctatgcattaatgattttagttgtatctgttaaattgtttggttttttaagagcaattacacgctatatagaaagattactttcacacaagacgacatttacaatgttacgtaatgtacgagttcaatttttaaaaatgctatatccagtcgttccagatatctatagaagatttaattcaagtgatcttattacaaaaatgataagccgtgtagaagctttacaaaacatatatctgagagtatattacccaccgattgtaatcggattaactgcaattgtttcagtaataactatgttgtttttatctccactacatgcattagtgattactttaagtatgttattaactttatggattgttccttggttaagtgctaagaaagcgcgtaaattaaagcaacaagtgacccaaacgcaaaaaacatttcttaaaagatattatgattataaagaaggtcatgaagaattaaaacgtttcaatcgcagcgatgacttcaaaaatacagtttcccagtctttacgacaatttgatgatatgcaacttaaggaacgccgatttctttctatttatgactacttgttaaacttaattgcgatgttctcaatatttatgtgtttaatgttaggtgcgcaacagattcatgatggtcagctcaatgctatttatattacaagtattatattgatgatattaactttatttgaacaagcagtacctatgagcaatgtggcatattataaagcagatacagacctggcacttgaagagatacacgaggtaattgtacctaagtataaaattccttcagaacatacaaacttaaagcgttcgcaaaatcttttattagaaattaaaaatgtcacatttaaatatgaacatcaacatcattctactttaaaacagattaatctaaccattgaatatggtgataaggtggcaatcatcggtccttcaggatcaggtaaaagtactttacttcatgtattacttgggctatatcaaatagaagaaggagaagtgagattaaatggtaaggatatgaacagtatcaatgacaatgataaatatcaaacatttaatgcaatgcttcaatctcaatatatttttgatggttcaattcgtgataatttattttctgagcaatcagatgataacctcaaaaaggttctcgaagatgttggattagaatatttaaatttagatagtatagttacgttagacggtcataatttatcaggtggggaagctcaacgtctaagtttagcgagattgctattaagaccttcggccggtttttggatattagatgaacctactacagcactagatattaataatacccaaaaaattataaatttgattgaatccttatcccaaacactcatcatagctacacatgatttagaaatacttccaagatttaataaaattatagtcatgaatgacggagaaataatagaaaatggttcatatcaagaattaatgcagcatgacggttatttaaaaaaagtaatagaaatgaatggaaacgaaatgaaattttttaattaa

SEQ ID NO: 5841 - DNA, 444 bp, Staphylococcus epidermidis; identical to SEQ ID NO: 3844

SEQ ID NO: 5842 - DNA, 927 bp, Staphylococcus epidermidis
atgaaaaataataaaaatgaaaagttgaaaatcacaatcgttagcggtttcttaggcagtggtaaaactacgttcctgacacattatattaatgaattattaaaaattgatgagaaaataacagtaattatgaacgaatttggatcatttgatgtagatggtaaccatttgagtgaattagtcaaagtgtatccattgttgaacggttgtgtttgttgtgatatgaaatcagatttagttcaacaaattgagatgctcagtcacaaccatgaaacggaccatattataatagaagcaactggtatcgcgcatcctattgaattgattatggcgtgtcaagatcctcgcatagttcagtttgttgaacgtccccacgttgttagtattgttgatgcacttcgctttttacaaagacaacagtatactgactccacaaagcgtctcatggaagaacaactcgaggtaagcgatgtgctcgtcgttaataaattagatttaatatctgttgaagacagagatgctttaaagaaccaacttaacgaagtaaacaaatatagttcaaaaatatatactacttatggacaagttaatatcgaggagttgtcacaatttcgtgatcaattagtaatgacacacacacattctcatcatcatggtataaatagtatgcaatacacatttacaacagctattgaccgacaattattttaccaatttattttgcgtatgcctgataatgttttaagattaaagggatatgtacaatttaaagatgaacccaatgtgacatatgagtttcaatattcatttggtatgccggattatgaagttattaatggggattatccgttaacaatagtattgattggtgaacaacttgatgttaacagactaaaaaataaactcgatgttttgcaattctcataa

SEQ ID NO: 5843 - DNA, 294 bp, Staphylococcus epidermidis
atgaatgaagataaccgtaacaaacaaattaaatttgaaagaaacctaatcacttttccatatttaggttttgcctttattgttttattatttaatattttttatactgatgtaaaaattacaatggtcttatttggtctattctttgcttacaatttaggaatgctttttatagccttcataagacattttaaacgtacacttatattaaccttaatactaacaatattaagtggtatagcattttttgtactactttatgtttttggattaaatcacgatatttttggatag

SEQ ID NO: 5844 - DNA, 942 bp, Staphylococcus epidermidis
atggtcaatagaagaaagatatcaattattggcgcgggacatacaggggggactctagcattcattcttgcacaaaaggaattaggagatattgtgttgattgaacgccagcaatcagagggtatggctaaaggaaaggcgttagatattttagaaagcggacccatttgggggtttgacacatctgtacatggttcagtaaatatagaagatattaaagattcagacatagtggtgatgactgcaggtatacctaggaaatcaggaatgacaagagaagaattagttcaaactaatgaacaaatagtacgagaaactgcattacaaattgcaacgtatgcacctcattcaataattattgtattgactaatccggttgatgttatgacatatactgcatttaaagcatcaggttttcctaaagaacgtattattggtcaatctggaattttagacgctgcaagatatcgaacttttattgctcaagaacttaacgtgtctgtcaaagatgtaaatgggtttgttttaggtggacatggtgatacgatgttacctttgataaataacacacacattaatgggattccagttaagcatcttatttctgaagaaaagattgatcaaattgttgaacgtacacgtaagggtggtgcagaaattgttgcattactaggtcaaggctcagcatattatgcaccagcaactgctatatatgatactatagatgcaatttttaatgatcggaaacggttattaccaagtattgcttatctagagggagaatacggatgctcagatatttgtttcggagttcctactataataggatatcaaggaatagaaaagattatagaggtagatatgaataatgatgagtatcaacaactacaacactctgcgcaagctgtgagtgaagtcaaaaactcactaaaattcaaataa

SEQ ID NO: 5845 - DNA, 1557 bp, Staphylococcus epidermidis
atggctaaaggggaccaatatcaaactcatactgaaaaaattcatgataaaaagtctaaaaaaagttataaacctgtgtggattatcattagttttattattttaattacaatcttgttattacccacaccagcaggattacctgtaatggctaaagcagcactagctattttagctttcgctgtagttatgtgggttacagaagcagttacttatccagtttctgcaacattaattttaggattaatgatacttttactaggtttaagtccagttcaagatttatccgaaaaacttggaaaccctaaaagtggcgacataatactaaaaggtagcgatattttaggaacgaataacgcgcttagtcacgcttttagtggtttttcaacctcagccgtagcacttgtagctgcagcattatttttagcagtagctatgcaggaaaccaatttacataaacgacttgcattacttgtgctatcaattgttggaaataaaactagaaatatagtcattggtgctattttagtatctattgttctagcattctttgtaccatcagctacagcacgtgctggtgcagttgtcccaatattactgggaatgattgctgcatttaatgtgagtaaggatagtagacttgcttcattattaattattactgctgtacaagcagtttcgatatggaatataggtattaaaacggctgcagcacaaaatattgtagccatcaattttattaaccaaaatttaggatttgatgtatcatggggagagtggtttttatatgctgcgccgtggtcaatcattatgtctatagctctttattttataatgattaagtttatgccacctgaacatgatgcaattgaaggtggaaaagagttaattaaaaaggaacttaataaattaggaccagtcagtcatagagaatggcgactaattgtgatttcagtgcttttattattcttctggtcgactgagaaagtattgcatccgattgattcagcttcgattacactagttgctctaggtattatgctaatgccaaagattggtgttattacttggaaaggtgttgaaaagaagattccttgggggacgattatagtatttggtgtaggaatctcacttggtaatgtattacttaaaacaggagccgctcaatggttaagtgatcaaacatttggtttgatgggtcttaaacatttaccgatcatagcaactattgcgttaattaccttatttaatatattaatacatttaggttttgcaagtgcaacgagcttagcctctgcgttaatacctgtgtttatttctttgacttcaacgctaaatttaggtgatcatgctattggttttgtattaatacaacaatttgtgattagttttggtttcctactacctgtcagtgcaccacaaaatatgcttgcatatggtactgggacttttaccgtaaaggattttttaaagacaggtatacctttaacgatagtaggttatattttagttatcgtatttagtttgacgtattggaaatggcttggtttagtgtaa

SEQ ID NO: 5846 - DNA, 1374 bp, Staphylococcus epidermidis
atggctataggtgtcatattaaatagagtttttaggttaaataataatccattatttgattatatatatagtaataaagaatctataaatcattgttattttattattccaactgaagagtttgaagaagaagcaaaaaagaaagcacaatactattatgggtccatacagaagtttatgtatgaactacaacgatatgatatagaaccctttttgatgtcttatgataaattaatagacttttgtaaaaaacaagctatagacaaagttgttgttgcaggtgatattatgagttatcatcacgaagaatatgacattttacatcaaaggaaacgatttaaacaagctaatattcaagtaatatcattaagagcaaatcattattttaacccccgcaaaacacataataaacaaggggaaccatataaagtatttaccagtttttatagaaaatggcgtccttacttaatgattagagatgaatatgactatcatttagaagatatttcaaaggttgtagtgaaatctcaacataaaattaaagaagattatcattcatatggtataagtgaacgtgatgttcaaaatcgttggtctgaatttttatctcaagatatcgaaaattataaagaaaacagggaatacttgcctgaagtattaacaagccaactaagtatttacttagcttatggaatgatagatattatacaagttttcaacgatttacttcaaaattatgataaaaatgaacaaaattacgaaacttttatacgtgaattgatttttagagagttttattatgtattaatgaccaattatcccgaaacagctcatgttgcttttaaagaaaaataccaacaattgaaatggtcttataatgaagagaattttaaactgtggaaagatgggaatactggttttccaattattgatgcagcaatggaggaacttaaaacaactggatttatgcataatcgcatgagaatggtagtttctcaatttttaactaaagatttgtttattgactggatttggggtgagtcatttttcaaacaaaaattaatagattatgatgcagcttcaaatgttcacggatggcagtggtcagcttctactggaacagatgctgtaccatactttagaatgtttaatcctataagacaaagcgagcgttttgataataatgcacgatatataaaaacttacattccaagattaaatcaggtagatgctaagtatttacatgatactcataaattcgagcaacaaataaaggggcaaggtgttgaaataggtaaagactatcctaaacaaatgattgatcacaaagaaagtagacaacgtgtaatgtcagaattcaaagcattagattaa

SEQ ID NO: 5847 - DNA, 618 bp, Staphylococcus epidermidis; identical to SEQ ID NO: 3838

SEQ ID NO: 5848 - DNA, 138 bp, Staphylococcus epidermidis; identical to SEQ ID NO: 3837

SEQ ID NO: 5849 - DNA, 1164 bp, Staphylococcus epidermidis
atgaaaaaacaattattcattctttattttaatatatttcttatatttttagggattggattagttattcctgtacttcctgtatatttgaaggatttaggattaaaaggtagtgacttaggaatgctagttgctgcttttgcattatcacaaatgattatttcaccatttggtgggacactagctgataaattgggtaaaaaattaattatatgtatcggtttagtattctttgctgtctctgaatttatgttcgcagccggtcaaagttttaccattttaatcatttcacgtgttttaggtggctttagtgcaggcatggtcatgcctggtgtaacaggtatgattgcagatatttctccaggagctgataaagctaaaaactttggttacatgtcggcaattattaattcaggttttatattaggacctggatttggaggctttttagctgaaatttcacatagattacctttctatgttgctggaacattaggtgttgttgcattcattatgtcagttttattaattcataatcctcacaaagcaactacagatggattccaccaatatcaacctgaattattcactaaaattaattggaaagtatttattactccagtcatattaacacttgtattagcatttggtttatctgcttttgaaacattattttctttatatacagctgacaaagtaaattatactcctaaagatatttcgatagctattatcggtggaggcgtgtttggcgcattattccaagtattcttctttgataaatttatgaaatatatgagtgaacttaattttattgcatggtcattactatattcagccattgttctcgttatgttagtgctggcaaacggttattggacgattatgattattagctttgttgtttttataggttttgatatgattagaccagctttaaccaattacttctcgaatatagcaggcaaacggcaaggttttgcaggtggattgaattcaacttttaccagtatgggtaactttataggtcctcttgtagctggtgcattattcgatgttaatttagagtttcctttatatatggctattgcggtttcattaagtggaattatcattatttttattgaaaaaggacttaagtcacgccgtaaagaagcaaattaa

SEQ ID NO: 5850 - DNA, 471 bp, Staphylococcus epidermidis
atgaaattgaaaaacttatttttaagttctgttgcagttattttatcaatttgtttagtacttttattatttttagctacaaaccaaaatgcattagcgaaagtccataaaacaatttgtacttttactaaagtaaaaacagtatctcataacgatatattccctaacttaaatatgaatcatgttgctgaagcttcagaaaaaaactctgatcaccaaaagaatgttaataaaacaaatcaacaaagtgtaagaacgcaagcatcttatgatttcaacccacaggaatgtaaagtaattgctttgaattacgctgagaatcatttaagcaaaaaatataatatagagcgtactttcaacgagtcgcttcattcagtatatgtattttctagtgaaaataaacttcatcaaactaaggttaaagtcaataaaagtgggactgtacatgcatcaaacatcaataatcattaa

SEQ ID NO: 5851 - DNA, 138 bp, Staphylococcus epidermidis
atgtactatgtgaaaagtaatttaactaacgcactaatccctttaaatcaaattgaaaaagcaatcaacgctcacgattgcaaaacacttcaagacttgagtaattactttaacttacctactacacatttattttaa

SEQ ID NO: 5852 - DNA, 666 bp, Staphylococcus epidermidis
atgcaacaagaaacgacatcatggtacaaacaagagtggtttatagttttatcacttttattcatttttccactaggtttatttctcatgtggaaatttagcaagtggccatctattgcaagaacaatcattactgttgcaatttcagttatcgtattagcaagcattacctattatggtaatctacaaatgattgtaccagcaacatcaaattcaaataacgaaactaaagaaactacagagaataatgtaaatgataaagacgagcgaaatcataaagctgcagtagaagaaacaaaaactaattatgactccaccaaagaaaatactaaagaacctggaaaagaaaataaatctgcaacacgattggagaactctgcgcttgaaaaggcaaagtcatattctgatgattttcacatgtctaaactaggaatttatgatattttaacatctgaatatggagaaaaatttgataaagaagatgcacaatatgctatagatcatctagaggctgattatgaaaaaaatgcacttgaaaaagcaaaatcatatgccaaagatatgcatatgtctaatgactcaatttacgatcttttggtgtctaactacggtgaaaaatttacagaatcagaagcaaaatatgctattgagcatttggataattaa

SEQ ID NO: 5853 - DNA, 288 bp, Staphylococcus epidermidis; identical to SEQ ID NO: 2769

SEQ ID NO: 5854 - DNA, 117 bp, Staphylococcus epidermidis
atgacaaaatcagctaataaaatcatttcaattgctagaaaagatattaaaaaatatacaaaatgttttaaactgactattacagatttctgccaaaataaaaaacatcccttttag

SEQ ID NO: 5855 - DNA, 732 bp, Staphylococcus epidermidis
atgagaaaattatttctatcaattttatctattataataatttcaagtttttgtgttgcaacagggtttcaaaacgttaatgctgcaaataatgaggtgagcaaacctcaaagtaatgtggatagtaaaactaaacaaaatattattaaaaaaataaaaaaatctaatgcttataaaaagcacgctaattcaacttctattgactcaataaaagatgacgatattattgttcatttggataaaggtaaaaacaccaatgtatattctattaactatgtatttggtaaaaaattagctaaaatgaatgataaccttgcaatgattgaattaaaatataacgaagcaaacaatgaagttttctacaatcatatgatgtattcaaaatttgttaaatataataataaagaatatattaatatgaaaggcattttaaatggcacaccttattatgaatttaatatagatcagaaaggtcattacgataaaaactttaaacatacctctaaagatgaaatcgaaaaagattctgctaaaaacttaccacctaaagagcgtggttggtgtgaatgggcagtaggagctttatgtggtaccggtggagctgcaggttgttgggcaactgctacagctttaggtattactactggttggggaggcttttcattagctacaatttgtggtctgataagctctctaggctgtactggtgcaaccaactatatttgtaaataa

SEQ ID NO: 5856 - DNA, 327 bp, Staphylococcus epidermidis
atggactatataactaagaacatcaacagttttactaagagacttgcagaggctatcaatggtagacaaataaacgcactaaaaagcaacccatctagcaaaaagataacttggaactggggaggtactttctaccctaacgcacctaaaagtggtattagagttagaaggtcgctaggtatcaatggcgctattgttgaaagtggctcgtggttatacagaaagacagattgggttaaattcgaccaagttattaaaaaagatggatattggtggcaccactttaaatatcaagcaccaggttcaagtaataaacatttctattga

SEQ ID NO: 5857 - DNA, 561 bp, Staphylococcus epidermidis
atgagcatagaaaattttgtaaatttaaaaaagtatgtatctgatacccctattcaatcatatgtatttgtttatattttaatcatcactggagctcgctttggagaagttcaaaaactaagtagaagtgatttagattataaaaataatacaatacacttaccaggaacgaaaacagaaacttcagatagaaccgtagatataccttctgcagatatgaatatgttgagaaaaacattatctaaaatgccagtaagtttatcaaatcaattattcaatacaggtgtaggattgattacacacaatgcagtatctaaagtgttacaaaaattttgtttagaaaataaaataggtaaatatactttgcatagtataagacacacgcattgttcttatttactacacaacgacgtatctatctattacatttcaaagagactaggtcacaaaaatattaaaactactatggatgtatattcacatttattggatgaagtcgagcagaaagaaagagaaaaagcagtgaatgtattggaaaatatgaacgggaacgtaatttaa

SEQ ID NO: 5858 - DNA, 555 bp, Staphylococcus epidermidis
atgacagacattataattgtacactcaaaacatggtaattctaaaaatcattggtatgaatggttaaggcataatttaactttggaagggtatgatgtttctttatttaatcttgaagcaaatgatcatgctcaaattgatgagtgggttaatgaaatgaaacaacaactacatatccgtaaaaaagatacatattttgtgacccacggatttggctcaatcgctgctttaaaatttcttgaagaaacgcatcatcacattgaaggtttctttagtatcgcaggatttaaagaagatgcacaagatatagacgaagatgtagatttaaaaggggtaaccatcgattacgataaaataaaagagcaagtagataaattttatggactcacgtctaaagatgatcaatatgtttcatacaaggaaacacaaaggctgatgaattcacttaatggacatacacgtgtagtagaagatgggggacactttttagaagaggaaggttttgtaacatttacttctttaattaatagaatgcaaggatatatgactaggtag

SEQ ID NO: 5859 - DNA, 1449 bp, Staphylococcus epidermidis
atggcgtattttaataaatttttaagcaattctgaaaggaagcgtggaaaagtgagtaagaaagtggcaattattggagcgggaatcactggtttatctagcgcatatttcattaaaaaacaagacccttctattgaagtaactatcttcgaagcctcaaatagagtaggtggaaagattcaaacatatagatcagatggttacacaattgagttaggccctgagtcttatttaggtcgtaagacaattatgactgatgtggcaaaagatattggattagaaaatgaccttataacaaatactactggccaatcttatatttttgctaaaaataaattatatcctattcctggtggctcaattatgggaattcctacagatattaaaccatttattaaaacaagacttatttcacctattggtaaattaagagcggggcttgatttgtttaaaaaaccgatagaaattgaagatgatatttctgttggtagtttctttagacaacgattaggtgatgaagtattagagaacttaattgaaccactaatgggtggtatttatggtactgatattgatcaattgagcttaatgagtacatttcctaactttaaagaaaaagaggaacaatttggtagtttgattaaaggaatgaaagatgaaaaagaacaacgtattaaaaaacgtcaattatatccaggtgctcctaaaggacaattcaaacagtttagacacggattgagttcttttatagaggctcttgttaaagatattgaaagtaaaggtgtccacatacgatataacacgccagtcaaagatatattgatttcgcaaaaagattatgaaattttattagaagatgacagtaaagagaaatttaatggcttacttgtaacaacaccacatcaagtatttctgaattggtttagtcacgatcctgcatttgattactttaagaacatggattctactactgtcgcaacagttgttttggcctttgatgagaaaaatattaccaatacgtacgatggaactggctttgttattgcaagaacaagtcaaacggatattactgcatgtacttggacatcaaagaaatggccatttactactccagaaggtaaagttttaattcgagcatatataggaaaaccaggtgatactgtagtagatgatcacaccgatgaagaaatagtatcaattgttagaaaagacttaagccaaatgatgaccatctcagggaatcctgattttacaattgtaaatcggttacctaagagtatgccccaataccacgtgggtcatattaaaatgattaaagaaattcaacaacatattaaaacaacttatcctagattacgtgttacaggggcaccgtttgaagctgttggtttaccagactgcatacaacaaggtaagaatgcagttgatgaaatattagaagagttataa

SEQ ID NO: 5860 - DNA, 924 bp, Staphylococcus epidermidis
atgactaaaacaataggcttattagtaatggcgtatggtacaccatataaagaaagtgatatagagccttattatactgatattagacgtggaaaaaaaccaactgaagaagaactgcaagatttaaaggatagatatgaatttattggtgggctttctcctttggcaggaacaaccgatcgtcaagccgaagcattactcgaagcacttaataaagaacaagatgatgtgaattttaaactttatctcggattaaaacatatatctccatatattgaagaagcagtagagcaaatgcataatgatggaattaaagaagcagtaacagttgttcttgcgcctcattattctagtttttctgttggctcttatgatcaacgtgctcaagaaaaagcagatgaatatggcatccagttaacacatattaaacactattatcagcagccaaaatttattaaatattggacggaaaaaattaatgaaacattagagcaaatacctaatcaagaacatgatgaaactgtattagtagtttctgcacatagtttaccaaaagggttaattgaaagaaataatgatccatatcctcatgaattgcatgaaacagcggaaattcttaaacaggaatctaacatcatccatgtcgctgaagggtggcaatcagaggggaatactggaacaccttggttaggcccagatgtccaagatttaactcgtgatttgtataaggaacaccagtttaagcactttatctatacgccagtaggttttgtttgtgaacatttagaggtgctttatgataatgattatgaatgtaaagtggtttgtgacgatattggggtaaattactatcgtccagaaatgcctaacacacatccattatttatcggtgctattgttgacgaaattcaatcacatatataa

SEQ ID NO: 5861 - DNA, 1035 bp, Staphylococcus epidermidis
ttgcgcagtaaaaacgatacaattttaaaagctataaaaggagaaagtacgtcacatacacctgtttggtttatgagacaggctggacgttctcaacctgagtatcgaaaattaaaagaaaaatattctctatttgaaatcacgcatcaaccggaattgtgtgcatatgtgacacatttaccagtagataattatcaaaccgatgcggctgtattgtacaaagatattatgacaccactcaaaccaattggtgtagatgtcgaaattaaatcaggaataggacctgtaatttccaatcctattcaaactgttaaagatgtagaaaggctatcccaaatagatcctaaaagagatgtcccatatgtattagatacaattaagttactcactgaagaaaaacttaatgtacctttaataggttttacaggagcgccatttactttagcatcttatatgattgagggagggccttcaaaaaattataattttactaaagcgatgatgtatagagatgaggaaacatggtttgctttaatgaaccatctcgtcaacatttctattgattatgttgtagcacaagtggaagcaggagcggaaatcattcagatttttgattcctgggttggtgcactcaatgtgaaggattatcgctattatattaagccagccatgaataaattgatttctggcattaaagcttattatgatgtacctatcattctttttggtgtcggtgcaagtcatttaattaatgaatggaatgatttaccgatagatgtactaggccttgattggagaactacaataaagcaagctgacaaaatgggagtcaataaagcaattcaaggtaatttagacccatctgtactgttagcgccatgggatgtcatagaatcacgactcaaagacatattaaatcaaggtttaaatcgtggaaagcatattttcaatttaggtcacggtgtatttccagaagttaaaccagaaactttgcgaaaagtgactgaatttgttcataattatacagctaaatag

SEQ ID NO: 5862 - DNA, 504 bp, Staphylococcus epidermidis
atgtatttatatacatcttatgggacttaccaatttttaaatcaaattaaacttaatcatcaagaacgtagtttatttcaattttccactaatgattcctcaataatcttagaagagtctgagggaaaatcaatcttaaaacatcctagtgcatatcaagtgattgatagcacaggtgaatttaacgaacatcatttttatagtgctatttttgtccctacatctgaagatcatcgtcaacagctagagaaaaaattattacacgtagacgtacctttaagtaattttggtggttttaaaagctatcgtttattaaaacccactgaggggtctacctacaaaatttactttggttttgcaaatcgaacagcatatgaagatttcaaagcttctgatatatttaatgaaaacttttcaaaagatgcattgagccaatactttggtgctagtggtcaacattccagttactttgaaagatatttatatccaatagaagatcattaa

SEQ ID NO: 5863 - DNA, 624 bp, Staphylococcus epidermidis; identical to SEQ ID NO: 2779

SEQ ID NO: 5864 - DNA, 1224 bp, Staphylococcus epidermidis
atgaataacgaggcgttaactttgtttagaaaacgacaacaagctatacgtaaggagaaaaactattataataaatttatatttaatggtcactttacagtttttctacttatactattaggagcatttatatttggatatggcgaatggttaagtcacattcctccccaaatagactatgcactatttgctagtatagcattagctgttgtttcattattcccaattcgtacactcttaaaagaagcggaccaaatcttcttactaccttttgaaagacacatgaaaaattatattaatgcaagtctgttttatagttatatttcaagaatcagtttaccgttcattttgctaatcgtattctttccattgttttataaattaagtcacaatcattatggattttatatcgcattttctataagtacattgctatatccatatttggtattactcatcaaatggcaatgggttaaattaaataaaaatgtgttcattatcaacatattattatttatacctttagcagtaacgcattacatgattttaagatttcataactatttagcttttttaataatgattatattatttgtaatttatttagtcctaaagactaaagcagatcactatttacttccttgggaaaaagtgattgcaattgaacaacaacatcacacaaattattataaattcgttaatatgtttacagacgtaaaacacctaagagaatcagcagtacgtcgtagttatcttgatttcttactacccgttcctaaaggtgccaaatttaatgagaatcggatgtatttatatttatttataagaagttttgtcagaggacgcgatgctttttctattattttaagattagttattatcgctattatattaatggtatggttatcacaaccggttgtttcattaattatcggtagtttgtttatgtatattattttattacaaatgtctcaattttatacgcaacaagcatacggtttatggcctcaagtttggcctgtatctgatacaaaagttattgcgggatatcagcaatttttaaatcgcttgatgattataatcgctattacatttacgattgtttatgtaatcaaacaccatgaattattcttttttgctgtattattctttatagtaggctggctaaccattcgaaatgcagttaaaaaattaaaatatcaagaaacattattacgtgactaa

SEQ ID NO: 5865 - DNA, 741 bp, Staphylococcus epidermidis
atgacagtaaaagttgaacatcttacagggggatatggaaaaaaacctgtaattaaagatttgaattttgaattagaaaaaggtgaaattgtaggtttaataggtttaaatggtgctgggaaaagtactacaattaaacatatgttaggattgattaatccaatggaaggcaaattatcaatttcaaatattaaaattaatgaagatattgaaaattatagaagaaagttatcttatatacctgaatcaccagtcatctatgatgaactaactttagaggagcacattgaaatgacggcgatggcttatcaattaagtagagaagaggctatgcgtcgagctaaaccattgcttaaagtttttagattagaaaatgaacttaaagtatttccaagtcatttttctaaagggatgaaacaaaaagtgatgattatttgtgcatttatagttgatccagaattatatattattgacgaacctttcctcggtttagatcctttgggaatacagtctatgttagatttaatggtagaaaaaagaaatgaaaatcgaacagttttaatgagtacacatattttggctacagccgaaaggtattgtgataggtttattattttggataaaggtgaaattgttgcatttggtaatcttgatgagttacgggaacaaacaggattaaaagataaaactttagatgatatttacatccatgtcacacaaggtagtagtgcttatgaataa

SEQ ID NO: 5866 - DNA, 426 bp, Staphylococcus epidermidis
atgtcagaaacgatattcagtaaaattatctcaggtgaaattcctagttttaagatatatgaaaatgattatgtttatgcattccttgatatatctcaagtttcaaaaggacatacgctactagtacctaaaaaacctttagcaaatatatttgaaactgatgaagagacaatgaaacatataggagttgctttacctaaagtggcaaatgcaatcaaaaacgcatttcaccctgacggcttgaacattattcaaaataatggtgaatatgccgatcaatcagtatttcacattcatttccatttaataccgagatatgaaaatgatatagacggatttggctataaatgggaaacacatgaagatgtaatcgatgatgaaactaaacaaaaaatagcaacacaaattcaagcacaaatgtcttaa

SEQ ID NO: 5867 - DNA, 372 bp, Staphylococcus epidermidis
atgaaagtctcaagaatattatttggtttaggtgtaggtgctgttgcaggatttgcagttgctttaagacatcgtgatgaccaaagcgtaaaaaatcatacgattgatgctagtcaacccactggagctcaatcagaattacaacgtgaaatagagaatatgaaacaatccttcaatgatattcttaattacggttcacaaatcaagaatgaaagtattgaatttggaagttcagttggtgaagagtttaaaggattgattggtaattttaaatcagatattaatccaaacatcgaaaaattacaaagccacatcgaaaatttacaaaaccgtggcgaagatattagtaataacctttcaaacgataagtag

SEQ ID NO: 5868 - DNA, 561 bp, Staphylococcus epidermidis
atgtttttatgtactcggcaaatcgatatacatgcacggttcggtattcaaagaattgcattcttaagtttagttgcgacaatatttacatttttagttagttatgaagtgatgtattattttttagatacaccactttcagatagacatttttttgtactcatagtgtttatattgctcatgtaccctattcataaaatagtacatcttttattctttttgccctattataaatcttttaaaatccataaattatctagtaagaaatgggtaccatattttaatacttatgttaatacgcctgttcacaaaatttatttttgtattaatctcattctacccatctttttcctatctggtatatttataatgctaagtatatatttacctcaatatggacattattttatgtttttattatcacttaacataggctgttcaatgatggatattttatatttaaagatacttctattttcaaatgatggacattatgtcgaagaacatcaatcaggtcttcatattttaaacaaggtagacaatccttatatacaacactga

SEQ ID NO: 5869 - DNA, 978 bp, Staphylococcus epidermidis
atgaaattaatgaataaaattatcgtacctgtaacagcaagtgcacttttgttaggtgcctgtggttcaaatgcaactgaatcgaaggataacacacttatttcttctaaagctggtgatgttaaagttgctgacgtaatgaaaaaaatgggcaaagaacaaattgctaacacatcttttagcattgtattaaacaaagttttagcagataaatataaagataaagtagatacaaaagatattgataaagatattaaaaaagaagagaaacaatacggcggtaaagatcaatttgaaagcatgttaaaacaacaaggtatgtcacttgatgattataaagaacagaagaaattatcagcttatcagaaacaattgttactagataaagttaatgtatcagataaagaaatcaaagaaaactctaaaaaagcatcacatattttaattaaagttaaatctaaatctagcgataaagaaggtttatcagataaaaaagcgaaagaaaaagctgaaaaaattcaaaaagaagtagaaaagaatccaaataagtttggagaaatagcgaaaaaagaatcaatggatagttcttcagctaagaaggatggttcattaggttatgtgattaaaggtcaaatggtagatagcttcgaaaaagcactatttaaattaaaagaaggagaagtttctaaagtcgtaaaaacagactatggctatcacattataaaagcagataaagaaactgattttaatagtgaaaaatcaaatatcaaacaaaaattaatcgaagaaaaagtacagaagaaacctaaattattaactgatgcatacaaagaattattaaaagagtataaagtggactacaaagatagagatattaaaaaagcaattgaggattctattcttgatccagataaattaaaacaacaacagcaacaacaatcacaaggtggttctggattaactaattcaggttcgtaa

SEQ ID NO: 5870 - DNA, 942 bp, Staphylococcus epidermidis
atgagaaatgtagaaaaattaaatcccggcgactcagtggatcattttttcttgatccatcgtgcaactcaaggtgttacagctcagggtaaagattacatgacactatttctgcaagataaaagtggtgatattgaagctaaattatggactgctacgaaagatgatatgcaaactttaaagccagaaacaatagttcatgtcaaaggtgatatcatcaattatcgtggacgcaaacagatgaaaatacatcaaatacgtcttgcacaagctgaagacaaagtgtcaactaaagactttgttgacggtgcgccaatgtcgccctcagaaatacaagaggaattatcgcattttatgttagatattgaaaatgctaacttacaacgcattactagacatttaattaaaaagtatcaagatcgttttttcacttatccagcagcaagttcgcatcatcataattttgcgagtggattgagttatcatgttttaacaatgttgcgtatagcaaaatctatatgtgatatttatcctctgttgaatagaagtctattatacagtgctatcattttgcatgatttaggtaaagtaagagaattgagtggtccagtggcgacgacctataccgttgaaggaaatttacttggtcatatctctatagcaagtgatgaagttgctgaaacagccaaagagttaggtattgatggagaagaggttatgttacttagacatatgattttagcgcatcatggtaaaatggagttcggatcgcctaaattgcctcatttaaaggaagctgaaatactttattttatagataatattgatgctaaaatgaacatgtttgataaagctttcaaaaaaacagaaaaaggtcaatttacagaaagaatttttggtttagaaaatagacaattttataatccaacaacacttgattaa

SEQ ID NO: 5871 - DNA, 2940 bp, Staphylococcus epidermidis
atgataattaaatcattagaaatatacggatatggccaatttgttcaacgtaaaattgaatttaatcgtcaatttactgagatatttggtgagaatgaagctggtaaatctactattcaagcatttattcactctattttgttcggatttcctactaaaaagtccaaagaaccacgtttagaaccaagattaggtaatcaatatggtgggaaattatcactcattttcgacgatggcattgaagcagaggttgagagaatcaagggaagtgctcatggagatgtcaaaatttatcttaaagatggtactattcgagatgaagtttggctaaataaaaaacttaattacatttcaaagaaaacatatcaaggtatattctcttttgatgttttaggtcttcaagatattcataaaaatctagatgaagagcaactacaagattatttattagaagcaggtgcacttggatcaactgaatttacaagtatgagagatagaattggacaaaagaaagaagaattatataaaaaatctggaaaaaatccaattattaatcaacaaattgagcaacttaaacaattagaaaatcaaattcgaaatgaagaaagtaaacttgatacatatcatcgacttgtagacgataaagataaatcatcaagaagactagaaaatttgaagcaaaatttaaatcaattatcaaaaatgcatgagcaaaaacaaaaagaggttgctctacacgatcaaacacaagaatggaaaaggttagaacagtcgcttaatatagagcctataaattttcctgaaaaagggatagatagatacgaaactgctaaatctcacaaacaatcacttgaacgagataaaagtttgcgagaagaaagattaagcatattaaataaagaggcggagtccatcaatccagtagaccaaaagtatattgattcgtttaatagcctttatcaacaagagactgaaattaaacaaaaagaatttgagttacgttcaatagagaaagatattgctgataagcaacgtgaactagaagctcttcaatctaatataggttggcaagaagtgttttacgacacagacagtactgaagcgatgaaaagtcatatgagtgatttagtattaggcaagcaagaacaaattgcttatatcaatcagttagaacgtggacttgaagaaaataaaattgaaagaaactctaattctaatgagattaatcaagttgagaatgagcttgttcctgacgaaacctttgaaaagaaaaaggaatatacacaacaagttttagaattacatgaaaaagagaacttgtatgaaaagttaaaagaaacttttgaagaagaacaaacacaaaaaaataaaagacaaaagtttttgagaataggatttattgttttaactattctatcagcagcactttctattttttcttttttcactgcaaatcttatttttggtataatatttgctctattaactgtgatttttgtagtaggtatcattttttctagatctaaagcagtagattatagcacagcaataagtcaggaaattaatgatttagaaaaccaactcacgcaacttgaaaaagaatataatcttgacttcgatttagaatatcaacaacaagttcgtgaacaatggcgtcatgctaaaaaaaataaaaaaatacttgaagaaaaacatcaatatatcaatcaatcattaacgactgcaaatgagcgattagatagtttaaaacatagcattattgaaataaaaaaagagttacgtttatcagaaaaactttctgatgaattagtggttgaaagtatctcaaccattggtcaaattaaagcgcatgataaatacattattgatttaaatcaacaacgcaataatctgctaaaagatatcaatcacttttatgaacgtgcacaatctgtaactgaaccacatttaaaactatttaatcagatgtctttcttccatgatgtgaaacagtggttaaaaaatgcagaagaacaaaatgaggcttggaataaaaatcaaactgaaacgcaattactcaataatgaattaaagcaattgaagtcacgcttaagtgaaacgaatcaaatgattaagcaattatttgattatgttgatgtaaataatgaagaagattattatacacatcatcatcattttgaaacatatcaaagtgatttaaatcgatttaatgatttaaatcaatatttagaaaatcaaaattacacttatgaaatgagttcgcaattaagtgagaaaactactgctcaactagaagaagaagatcatagattggctaaacaagttgacgattacaatgatcaatttttagaaatgcaagcagaagttagtgatttaaatgctcagattaatcatatggaaacagatagaactttagcacaattaagacatgaatattatagcttaaaaaatagacttaacgatattgctaaggattgggcaagcttaagttatatgcaagctttagtggaagaacatatcaagcaaataaaggataagcgtctaccacaagtgattaatgaagctgtatctatttttaaaaatttaacaaatggtacttacaatatgatccattatactgaaaatcataaaatacatgtaaagcattctaacggacaagtatttgagccagttgagttgagtcaatctacaaaagaattattatatgtggctttacgtattagtcttattaaagtattaaaaccgtattatccattcccagtgattgtagatgatgcatttgttcattttgataaatatcgtaaagaacgtatgttgaaatatttgagagaactatcagaacattatcaaatactttattttacttgtacaaaagatcatgtcataccggctaaagaagtattaactttaaataaattacaggaaggcgggaaaaaatga

SEQ ID NO: 5872 - DNA, 1197 bp, Staphylococcus epidermidis
atggttaaatttatacactgtgctgatttgcatttggacagtcctttcaaatctaaaagttatcttagtccaaatatttttgaagatgtccaaaagagtgcatatgaaagttttaaaaacatagtcgacttagctttaaaacaggaagtcgattttattattatagcaggtgatttatttgatagtgagaatcgtacattgcgtgctgaagtctttttaaatgaacaatttgaaagattaagaaaagaacaaatatttgtttatatttgccatggcaaccacgatcctcttacttctaaaataacaagtcagtggcctaataacgtatccgtattttcaaatcaagtagagacatatcaagctatcactaaatcaggagaaacaatttatattcatggattcagctatcaaaatgatgcgagttatgaaaataaaatagacgcatacccatcaagtcaaggtcagaagggcatacatattggtgtattacatggaacttatagtaaatcttcagtgaaagaccgttatactgaatttaggttagaagacttaaatcaacgtttataccactactgggcattaggacatatacaccaacgtgaacagttaagtgacatgccagtcattaactatccaggtaatatccaaggaagacatttcaatgaattaggagaaaaaggttgtctattggtcgaaggtgatcatcttaaactcactacacaattttatcctactcaatttattaaatttgaagaagctacaattgaaactgatcatacatctaaacaaggactttatgatgttattcaatcttttaaagataaagtaagaactgaagggaaatcattttatagattgaacgtacgcattaatagtgaagacattattgcaccacaagatttaattcaattaaaagaaatgattactgagttcgaagaaaacgaaaatcaatttgtttttattgaagatttaaatcttcaatatgttcaaaatgacgaaatgccaatagttaaagagttttcaccagaattacttgatgatgcgtcactttttgattcggcaatgactgatttatatcttaatccaagggcttctaagtttttagatgactataatgaatttgataaagttgagttagtcaatcatgcagaaagacttttaaaggatgaaatgagaggtgaacaaaatgataattaa

SEQ ID NO: 5873 - DNA, 345 bp, Staphylococcus epidermidis; identical to SEQ ID NO: 2789

SEQ ID NO: 5874 - DNA, 1131 bp, Staphylococcus epidermidis
atgcataccttattattagtagtttttatgataattttaggagcaataattggtggagtaactaatatgattgcaattaaaatgttatttcatccatttaaaccgtattatatttttaggtttcgtattccattcacaccaggtttgatcccaaaacgtcgtgaggaaattgccagaaaaattggacaagttattgaggaacatcttattactgaagaactaattcgacagaagttaaatcaaccgcaatcgagaaatatgatacagcaattaatccataaacaaataagtaaattaaaaaatgatgatgtgacaataaaaaaaatagctggatttttagggatagatgttaatgagttggtagattataaattgactactaaatttctaaataaactaaacttttggtatgagtcaaataaatatagaaagttaagtgaaatattacctcagtctttcttagatcaatgtaaaggtcaaatagaatatattactgacttcctatgtgaaagggctagaaattatttaagttctgaaaaaggtgaacgtgatatttatgaaatgttagacacatttttcaatgaaaagggacgcatcattggtttactacaaatgtttatgacaaaagaaagcattgctgacagaattcaacatgagttgattagactaactcaacatcctcaatctcaaaaaataattactaaagtattaaatgatgagtatgaaacatttaaagataagaacttagatgagatcattaaagaacaacaatttaaaaattatagtcaattagtacttaatgaattaaaaacttatttaaatctaaaagataaaacagagagacctatcaaacaagttgttccgcagtttattcaattcctagaagatgatacatcaaaacgtatgactgattttattattaaaggtacttcaaaacatttaacaaacattatgaaaaagattaatttacgtcaattagttgaagaacagattaatacatttgacttaaagtatattgaaaatctaattattgatattgccaacaaagaattaaaattaatcatgacattagggtttatattaggaggtatcattggatttttccaaggagtgattgcaatctttgtctaa

SEQ ID NO: 5875 - DNA, 465 bp, Staphylococcus epidermidis; identical to SEQ ID NO: 2791

SEQ ID NO: 5876 - DNA, 624 bp, Staphylococcus epidermidis; identical to SEQ ID NO: 2792

SEQ ID NO: 5877 - DNA, 1134 bp, Staphylococcus epidermidis
atggagaaaccaactagacttgcattacttaaggaaatagccgaatttctaaatgaagaaactgaaatatatagcatgatgcaaggagctttgcgtttacttataaatgggagcgacttttcaactggttggattttctatattgatgaagaggggcaccatgatttagtttcctctgtagatttacctgaagctttatctaaaaaccattgttactatttgacaaatggttcttgttggtgtgtgcaagcatatcaaaatcataaattaactaaagcttctaatataataaattgttctagaatcaatttagctaatcatgcttatgacaaagaaacgaatcatattactcatcatgctactgttccattgcagtctgggagcgaaagattcggtttgcttaacgtagcatctcctaacaaagaacattatagtgaagaagacttagaactattagaatctgtagcatttcaaattggttcagctataaagagaattcagctaactaataaagaaaaagaaaatgccaaaattaatgaacgtaatcgactagctagagacttacatgattcagtaaatcaaatgttattttctttaaaattaacggctcacgctgcaaaagggataactactgacgagcaagcgcaaagagcttttaagactattgaggaaacaagtcaaaatgcagtaaatgaaatgagagcactgatttggcaactaaaaccagttggattagaacaaggcttaattcatgcattacactattatagtaaaatgttaggattagatttgaaagttactattaatggactaatagatttatctaatgatatcgaagaaaatgtatacagaattattcaggaagcaatgaataatgttattaagcacgctaaaactaacaaagtttatcttgatttatcacaaaatgttgattatcttgaggtagatattagagataacggtcaaggttttgacacgcaatcaattaatacgtttttatttaatggtttaaaaaacataaagcaacgtacacagtatttgaacggtaaagttactatagaatcaaaaataaatcagggcactcggatttatattaaaattccattgaagttaaaggagcatccttatgcataa

SEQ ID NO: 5878 - DNA, 825 bp, Staphylococcus epidermidis
atgaaatttacaatacctaaacaatttaacgattatacattgagagagattttccaatatttaaaattacctaaaaaagacttacatcaactgaatatgtctaaagaaattttaattaataaagagtacggtacattattaaataatgttaaaactggtgatcatgttgagataccaacccctaatgaagtaagtaattatttaccaagttatcgatatgctcaaatttattacgaggatgatgacttggccattgtcatgaaaccaaaaggtgttaaaacgcatcccaatgatttaaaagagagcaacacacttatgaaccatgtgatttacactgttgatagtgaatatgttgagcccatacatcgactagatcaagaaacagtaggtttattgatagttgctaaaaatccgcttatgaaaaaaatcttagaccgaatgttagaatataatgaaattacgcgtatatataaagcaaatgtcaaagcgttgttacctattaagccacaaacgatagatatgcctattggtaaagataaatttcattcaaacaaacgaagaatttccaacacaggtcaacgtgcaatcactcacattattaactctaaaatgattaaagaaggcgtatgtcaactcgacattaaactagatacaggtcgaacacaccaaattcgtgtgcaccttgctgagattggccatccagttattggggatccactttatggaacttcaacattacgacaattagagctaaatagtcatcaaattgaatttactcatccactgactcaagaaattatttctgtaagtctagatgataaatag

SEQ ID NO: 5879 - DNA, 1386 bp, Staphylococcus epidermidis; identical to SEQ ID NO: 2795

SEQ ID NO: 5880 - DNA, 405 bp, Staphylococcus epidermidis; identical to SEQ ID NO: 2796

SEQ ID NO: 5881 - DNA, 180 bp, Staphylococcus epidermidis; identical to SEQ ID NO: 2797

SEQ ID NO: 5882 - DNA, 600 bp, Staphylococcus epidermidis; identical to SEQ ID NO: 2798

SEQ ID NO: 5883 - DNA, 471 bp, Staphylococcus epidermidis; identical to SEQ ID NO: 2799

SEQ ID NO: 5884 - DNA, 1131 bp, Staphylococcus epidermidis
atgaacaataaactaaaaaaagaaattatagactttgctcattctataggcattgatagtattggatttactactgcagatccttttgatgaattgaaacaaaaattagaggaataccatgcaaaagggtatgcatcgggttttgaggaatcaaatatatcattacgtacagaacctaaactaagcttacctagcgcacgttctattattgcaatagctgtgggttatcctaataaacttaaaggtgcaccaaaaagtgttaaaggtgatcgtagaggcatgtttgcaagagcatcatggggccaagattatcatagcattatgcgtaagagacttgataaattagctgatttcatcaaagaaaaagtacctgatgtcgaaatccaatcgatggttgataccggtgtattgtcagatagagcagtagcagaaagagctggattaggattcacgggtaggaatggatttgtgatttctcctgaattagggacttggtcttacctaggtgaaatgttagtaagtataccgtttgaacctgatgatcctttattagatagttgtggtgactgcacaatttgtgttgatcgctgtccaacaggtgcacttgttggaaatggtcagttaaatagccaaaaatgtattagttttttaactcaaactaaaggttatcttcaagatgaatatcgatataaaattggaaatagattatatgggtgtgatacatgtcaacaagtttgtcctaaaaatcgtggtattaatactcagcatgatgatattgtcttggaacctgaaattttgaaaccacgtcttgtacctttacttcaaatgagcaacaagaaatttaaaagtacatatgggcatttggcaggtgcttggagaggtaaaaaaccaatacaaagaaatgctattatagctttggcacattttaaagaagaaagtgctataccagaactaaaagaagttgcattaaatgatccaagacctatgattagaggtactgcatattgggcaattggacaaattttagaggatgatgctatatcttttattgatgagcattatgaaaatgagattgaagaagtgcagctcgaaatgaaaaaaggtttgcaaatgaggagagaacaaaaatga

SEQ ID NO: 5885 - DNA, 150 bp, Staphylococcus epidermidis
atgtataaagactataacatgactcaacatactctactaatggaaacttcagctcttatccccgcgaatgatatttcacgacatgtaaatgatattgcaaaacaattcccgatactgaattcgatgaattcagacattatcgttgcttaa

SEQ ID NO: 5886 - DNA, 1608 bp, Staphylococcus epidermidis; identical to SEQ ID NO: 3194

SEQ ID NO: 5887 - DNA, 897 bp, Staphylococcus epidermidis
atggcactagataaagatatagtaggttcaatagaatttttagaagtcgtaggattacaagggtcaacatatttacttaaagggccaaatggtgaaagtgtcaaactcaatcagtcagaagttgctgatgaagatgattttgaattaggtgaggaatatagttttttcgtttatccaaaccgttcaggagatttatttgcgacgcaaaacatgcctgatattacaaaagataaatatgattttgctaaagttataaaaaccgatagagacggtgcacatattgacgtaggacttcctcgtgaagtcttagttccatgggaagatttaccgaaacttaaagaactttggcctaaagcaggtgattacttgctagttactttgagaatagacagtacgaatcaaatgtttggacgattagctagtgaaacgattgttgagtcaatgttcaccccagtaaatgacgatagcaaacaaaacgaatatatttctgcacgcgcttatagattactcagagtaggtagcttcttattaagtaatgagggttataaaatctttgttcacgaatctgaacgtaaacatgagcctcggttaggtgaggcagtagaggtccgaattataggtcataatgaaaaaggtgaattaaatggttcgtttttaccattagctcatgaacgccttgatgatgatggacaggtcatatttgatttacttgttgagtatgatggtgaattacctttttgggataaatctagtcctgatgcaatcaaagaagtctttaatatgagtaaaggctcgtttaaacgtgcaatcggacatttatataagaaaaagataatcaatatagaaacaggaaaaatcactcttaccaaaaaagggtggagccgtgtagatgattaa

SEQ ID NO: 5888 - DNA, 978 bp, Staphylococcus epidermidis; identical to SEQ ID NO: 3192

SEQ ID NO: 5889 - DNA, 927 bp, Staphylococcus epidermidis
atggcttcacaaacaaaggtgagagaaatgatagctaagaataatgctaaaaagggcgggctaagtgataaaattgttccaattattttagccattatttcagctatatctatattaactacaattgctattttatttacacttttaaccgagacgattacgtttttcacacgagtgccattatctaaattctttttatctggtacttggaacccaactggttcatcaccagaatttggaatttgggcactcatcatcggcacattgaaaattactgttattgctacaatcgtagccgttccgattggtttaggagcagctatctaccttaatgaatatgcatctgatcgttcacgtagaatcattaaaccaatattagaaattttggctgggattcctacaattgtatttggcttctttgctttaacatttgttacacctatattgagaaatctaattcctaacttgggagagtttaattcaatcagtccgggtattgttgtgggtataatgattgtccctatgattacaagtatgagtgaagatgcaatgtcatctgtacctgataaaattcgtgaaggtgcatttggattaggcgcaactaaatttgaagtcgctacaaaagttgtattaccagctgcgacttctggcgttgttgcttcaattgtattaggtatatcaagagcaataggtgaaacaatgatcgtttctttagctgctggtagttcaccaacatcatctctaagtttaactagttcaattcaaacgatgacaggatatattgttgaaattgctacaggtgatgcagcatttggttctgatatttactacagtatttacgctgtaggttttacacttttcattttcactttaattatgaatttattatcacaatggatctctaaacgattcagagaggagtattaa

SEQ ID NO: 5890 - DNA, 906 bp, Staphylococcus epidermidis
atgtctacacattcaaatactgctaacaaaacattgattgataaagatgccgtagaaaaaaatatttcttctcgtgataggaaaaactcggtaaacaaatggttatttttattatgtacattaattgggctcattgttttagtagcactattaattcaaactttcgttaaaggggcgggacatctaactcccgaatttttcactaatttttcatcttcaacaccagcagatgctggtattaaaggggctttagtaggttctatttggttaatcttaagtattatcccaattagtatcattttaggaataggtacagcaatttatttagaagaatacgcaagagacaatatttttacacaaatcgtaaaggtgagtatatctaatttagctggtgttccttcaattgttttcggtttactaggttatacattatttgtaggcgcggcaggtttaggtaatagcgtgctagccgctgcgcttacaatgtcactactaatcttgcctgttattatcgttgctagtcaggaagctatcagagcagttcctagttcagtcagagaagcatcatatggtcttggtgctaataaatggcaaacaattagaagagttgttttacctgcagcattacctggtattttaacaggtttcattttatctttatcacgcgcattaggagaaacagcaccacttgtaatgataggtatacctacgatacttttagcaacaccaagtggattactcgaccaattctctgcgttaccaactcaaatttatacatgggcaaaaatgcctcaagcagaattccaaaacgttgcatcagcaggtattatcgttctactcgttatcttattattgatgaacactgtagcgatacttcttcgtaataaatttagtaaaaaattctaa

SEQ ID NO: 5891 - DNA, 876 bp, Staphylococcus epidermidis
atggctaattcacaagtagcagaaaaagagaaattagacgcacaaacaaataatcaagactcagttgccacaatagtaactactgaaaacaataagaaaaatacaattccagacagtgaaaagaagattgtttattcaactcaaaatctagatttatggtatggagaaaatcatgcgttacaaaacattaatttagatatattggaaaataatgtaactgcaataatcggaccttctggatgtggtaaatctacatacatcaaagctttaaatagaatggtcgaattagttccatctgtgaaaactgcaggtaaaattttgtatcgtgaccaaaatatatttgatgcaaagtattctaaagaaaagctacgtactaacgttggaatggtctttcaacaacctaacccattccctaagtcaatttatgataatattacttatggccctaagactcacggtattaaaaacaaaaaaattctagatgaaatcgtagaaaaatcattacgtggcgctgcaatatgggatgaattaaaagatagattgcatacaaatgcttatggattatcaggtggacaacaacaacgtgtttgtatagctagatgtttagcaattgaaccagatgtcattttaatggatgaacctacatcagcattagatcctatttctacgttaagagttgaagaacttgtacaagaattaaaagaaaattactcaattatcatggttacgcacaacatgcaacaagctgcgcgtgtttcagataaaactgctttcttcttaaatggatatgtcaatgaatatgatgatactgataaaatcttttcaaatcctgccgacaaacaaactgaagattatatatctggtcgttttggataa

SEQ ID NO: 5892 - DNA, 648 bp, Staphylococcus epidermidis
atggcaattatcagacaaaaatatgaaggtcagctagatggattaattaaagatttacggcgtcttggtcttcgtgtatattttaatattaacaatgcactagtatctttaggggaagaaaagaaatcattcgcaagacaaaccattgagaaagacaaagaaattaaccatttagatcatgaaattaacgagaaggtaatcatactaattacgagacaacaacctattgccaaagatttacgtatgatgatggcagcactcaaaatctctactgactttgaacgaatgggggataatgctgctagtatcgctcatatacgtttaagagttaaaataaatgataactatgtgtttacacgtttaaaaaccatgggtaaattagcgatgctcatgttagaagatttaaataacgctattagaaataaagatttaccactgataaaagaagtcattgagagagatgaagatattgatgatttatacgttaacatcgtcaataccagttacttaattgataatgacccattcgtagctggtcaagcacacttagcagctagacacttagaacgaataggtgatcatataagcaatattgctgaaagtgtttattattatttaacaggccaacattttgaaacttttgattaa

SEQ ID NO: 5893 - DNA, 1812 bp, Staphylococcus epidermidis
atgagtgaaggtttacctttgagagaagaagttccggtaaaagaaacttgggatttgaaagatttatttacaagtgatcaagcattctatcaaatattggaacaagtagtacaaatgtctttagattttaatcatacatattatcagaaacttaataacatagaaacaatagaaaaggcattagatgaatatgaaaggatacttatagaaatagatcgtttatataattatccagaacttagattaagcgttgatacgtctaatgaagaagcacaaaaagttaacgcaaaacttaatacgacttctggaaaacttgctggtttattatcttttgttgattccgagattttggagttacccgatgagataataagcgaattgaggtctcaaacaaaataccctcattttattaaacaacttcaagatcgtaagccttatcaattatctgctgatgttgaaaaagtattagctacattaacaccaacattgagaagtccgtttgaattgtatggtactacaaagagtttggatattaattttgaatcgtttgattatgagggtgttacctatccattggattatgcaacatttgaaaatgaatatgaagatcatccatctcctgaatttagacgtaaaagttttagagcttttagtgatgcattacgacaatatcaacatacgacggccgcaacatataatatgcaagtccaacaagaaaagattgaagcggatttacgaggatatgattctgttattgattatctactacaagatcaagaagtaacaaaagatatgttcgatagacaaattgatgtcattatgagtgatttagccccagttatgcaaaagtatgcaaagattattcaacgtgtacataacctggataaaatgcgatttgaggatttaaaaatttcaatagaccctaactttgaaccagaaatatcaattgaagaatcgaaaaaatacatttatggagcgctcaaagtacttggtgatgattatgtcaaaatgttagagtctgcctatgattaccgttggattgattttgctcagaataaaggaaaagatactggagcatattgtgcaagtccatacattacacattcatatgtatttatttcatggactgggaaaatggctgaaacattcgttcttgcgcatgaattaggacatgcaggtcattttacattagcgcagaatcatcaaaatttgttggaatctgaagcgtctatgtattttgtagaagcaccttccacaatgaatgaaatgttgatggcaaattacttatttaatagtagtaataatcctcgatttaaacgttgggttattggttcgattttatctcgaacttattatcataatatggttacccaccttttagaagcagcttatcaacgtgaagtgtatagccgagtcgacaatggagagtcattaactgccccactgctaaatgaaataatgttgaacacttataaagcatttttcggtgacactgttgaaatgacagatggggttgaattaacatggatgagacaaccacattattatatgggattgtactcatatacgtactctgctggattgacaattggtacagttgtatcacaatgtatcaagaaagaaggtcaacctgctgttgatcgctggttaaaaacgctacaagctggtggtagtcaatctccaattgaattggcgcaaatagctggcgttgatattacgactgacgcccctttaaaagagacaattaactatatttcaaatttagtagatgaattagaagtattaacatatcaaatagaagaaaattcataa

SEQ ID NO: 5894 - DNA, 339 bp, Staphylococcus epidermidis
atgacaatatttgatatgccaaactatttgtggattaccattcttggtatgattttattaactgtattttacacacttgtattaaataaatggttccagtctgcaatcattacttttgtagttttagcagtacttgccttttttataccaaattttcaaaacatttcatatcaaccactgcttggatatgcaggattcttaggcataatgagcttaatcataagctttcttatttggtatttttctagaaactggagaaaaaatcgtagaaaaataaaattggaaaaagagattcgcaaatatgatgatgaagagtcacttcgtcgtcatcataaataa

SEQ ID NO: 5895 - DNA, 1002 bp, Staphylococcus epidermidis
atgtttaaaatgataatttataaactttcacaaatgattgtcgtactatttatattaactacaatcacatttatattaatgaaactctctccaggtaatcctgtagacaaaattttacatcttgatatttcgcatgtatctaatgagcaaatagaaacgacagagaataagcttggcttaaatgattctatttttattcaatggtggcactggttaaatcaattgtttcattttgatttaggaacaagttatcaaacaagcgagcctgtaattaaggaaatagcaaattatcttggtcctacacttattattacttttggtacgcttatagtgtcattagttatttcaataccattagggattatagcagcagtttactaccataaaatttgggataggataatccgtgttatgacatcattatccgtaagcctaccatcattttttatcggtcttatcttattatatatatttagcttgaagttgaatgttttaccaacttcaaatgaggggcgtttcgcttcatatattttaccaataattaccatgagtattggaatgtgtgcttattatattcgatttattcgttctactttattagaacaatatcaaacacctatagttgaatcgtctcgtctcagaggtatgcccgaaagatatatactttttcaagatatccttaaacctacgatactaccaatcatacctctattaggtttatccattggtagtttgataggtggaacagtagtcattgaaaatttatttgatattcctgggttaggctattttttagttgacagtataaagtcgagagattatccagtcattcaaggttgtgtattatttattggtttctttgtagtgattataaacacaattgcagatttactttcattacttatcgatcctaaacaacgttatgctattactcagaaagaaacatcaaagtttaaatggtttaattcacatagaaaagaaggtcgtaacgatgaagtttaa

SEQ ID NO: 5896 - DNA, 714 bp, Staphylococcus epidermidis
atgaatcatttacttggcacagatgattacggacgtgatttattcagtcgtttagtcgtgggctctcgtgcaacattgtttgttacactacttactttacttttcactgtagtggttggagtacctttagggttacttgcaggctataaaaaaggttggattgatacgattatcatgcgaattattgatataggattaagcataccagaattcgttattatgattgccttagcaagtttttttcatcctagtctttggaatttagtaatagctattacaatcataaaatggatgaattatactcgcgtgacaagagggattgtcaataccgaaatgaatcaatcgtatatacagatggcacaattttttaatgtctcaactttgaatatcttatttaaacacttattaccaaaagttttaccatctatatttgttattatgatagttgattttggaaaaatcattttatacattagttcattatcatttttaggtttaggtgcacaaccaccgtctccagagtggggggcaatgttacaagcagggcgtgaatttattacttcacatcctatcatgattatcgctccagcatctttgatatcaggtacaatattgatatttaatttaactggtgatgcagtaagagatcgtttattagaacaaagaggtgtaaaagttgaaacttttaacaataaaaaatctaaacatcaatga

SEQ ID NO: 5897 - DNA, 777 bp, Staphylococcus epidermidis
ttgaaacttttaacaataaaaaatctaaacatcaatgataaagaagggcaagcaattattaaaaatgtcgacttaaatatatataatcaatctctaaatgtcattataggtgaaagtggtgctggaaaaagtttgactgttaaagcaatattaaatcatttacctactcagttacatatgagtttcgatgaatttaaaatgcaaggtcaaaatacttctggtatcaagcaacttttaggtaaacatatcggctatatctctcaaaattatgctcaaagttttaatgaatatactcgtttggataaacaacttatagctatatatcgttatcattttaatgtttctaaggataatgcattgaaaaagataaaaaaagctttaacttgggttaacttaaatgatgaatcaatcattaataaatatagtttccaactttcaggaggacaattagagcgagttaatattgctagcgttttaatgttagatccagaattaattattgcagatgaacctgttgcatctttagatgtagtgaacggtcatcaaataatgcaactccttcaacacattgttaaagatcatcataatactgtattacttatcactcataacatgaatcatgtcctcaaatatgctgattattttaatgtaatgagaaatggcatgatgattgaatctggagaaatagacaaattatttaatcaccatcatcttcatcggtatacagaacaattattaaactatagaagcaagctgcaaaaggaggacaacatctaa

SEQ ID NO: 5898 - DNA, 699 bp, Staphylococcus epidermidis; identical to SEQ ID NO: 3182

SEQ ID NO: 5899 - DNA, 1008 bp, Staphylococcus epidermidis
atgaaaaaattattaacattagtatctattattctttttgcaatagtattaacagcatgtggaaatgataaatcaggtaatagttatgattcaaaaaaacagctattaaaaataacatatgaattcaaggataagaataatacacatcatcgtggtgaaatgaaaactgacactgttaaagtgccttataatcccaatcgtgtagcggttcttgattatggtgcactagatgtaatgaaacaattaggattacaaaataagattgtttcaattgcaaaaggtcaaggaaattcatttttaccttcctcattagctgaatttaaagatgataaatattctaacttaggcaacccaggtcgaccaaattttgatcaattagctaaatctaaaccagagctcattctagcatcttttagacaagcccatactaagacaattgacgaaatgaaaaaagcagcacctaatgctaaaattctattcgtaagtccagacaatgataattatttaagttcaataaaatctcatacatcaacaattggtaaaatattcaataaagagaatgaagccaatgatttaaataaaaaattagaacaacaagtaactgaaactaagaaaagtattaatcatgactcagtattattcctagttgttgatgataaagggataaaagcatttagttcaaatggtcgctttggaggatttttaaacaaagatttgggtattaaacatgttgataaaaacatgaaagataattcagctggaaataatattaattatgaatatcttaacaaagttaaccctgataaaatatttgtaatagatcgaacgaagaatggcactgataataagataccaagcatcttacaaaataaagttattgaaaatgtaaaagctataaaaaatcatcaagtttatcaatttgaatccaatgcatggtattttggtgaaggtggcaatcaaataacgattgaacaactaaaaagaattaaagatgcattcctaaagtaa

SEQ ID NO: 5900 - DNA, 765 bp, Staphylococcus epidermidis; identical to SEQ ID NO: 3180

SEQ ID NO: 5901 - DNA, 1254 bp, Staphylococcus epidermidis
atgaaatttacagagttaacagttaaagaatttgaaaactttgtacaaaatccatcattagaaagtcattatttccaagtgaaggaaaatattgctacacgtgaatcagatgggtttcaagtagtgttattaggtgtaaaagacgacgacaatagagtgatagcagctagcctgttttctaaaatccctacaatgggcagttatgtgtattattccaatagaggccctgtaatggactattcagatttaggtttagtggatttttatttaaaagagcttgataaatatttacatcaacatcaatgcttatatgtaaaattagatccttactggttgtatcaagtttatgataaagatattaatcctttaacagaaaaaaatgatgctttagtaaatctatttaaatcacatggttatgatcatcacggatttacaacccaatatgattcttccagccaagttagatggatgggggtattagatttagaaggcaaaacccctgcatctctaaggaaagagtttgatagtcaaagaaaacgaaatattaataaagcgataaactacggtgtgaaagttagatttcttagtaaggatgaatttgatttattcttagacttataccgagagactgaagctagaactggatttgcttctaaaactgacgattatttctataactttatagagcattatggcgataaagtattagttcctttagcttacatagatttaaatgaatatatacaacatttgcaagaatcactaaatgataaagaaaatcgacgtgatgatatgatggcgaaagaaaataaaacagataaacagttaaagaaaatagctgagttagataaacaaattgatcacgataaaaaagaattgcttcaagctagtgaattacgtcaaacagatggcgaaattttaaatttagcttcaggagtatactttgctaatgcatatgaagtgaactatttctctggagggtcttcagaaaaatataatcaatatatgggaccatatgcaatgcattggcacatgattaattattgttttgataacggttatgatagatataatttctatggcttatcaggtgattttactgaaaacagtgaagactatggtgtttatcgctttaagagaggttttaatgttaggattgaggaattaatcggtgatttctataaaccaatcaataaagtgaaatattggttattcaatacattagatcgcatacgtaataaattgaaaaagtaa

SEQ ID NO: 5902 - DNA, 1254 bp, Staphylococcus epidermidis
atgaagtttacgaatttgacagctaaagaatttagtgactttactgatcgtatgacatatagtcattttacacaaatggaaggtaattacgaattaaaggttgctgaaggtaccgagtcacatttagttggaattaaaaataatgataacgaagtgattgcagcttgtttattaacagctgttcctgtaatgaaaatatttaaatatttttattccaatcgcggtccagtaatagattataataataaagagcttgtacattttttctttaatgaattgagtaaatatgtaaaaaaatataattgtttatatttaagagttgacccataccttccatatcaatatttaaatcatgagggagaaataactggaaatgcaggtcatgattggatttttgatgaattagagagtttaggatataaacacgaaggattccacaaaggatttgatcctgtattacaaatccgatatcattctgttctaaatttagcaaacaaaagtgctaatgatgttttaaaaaacatggatggtttaagaaagcgtaatactaaaaaagttaagaaaaatggagttaaagtccgctttttatctgaagaagagttacctatatttaggtcatttatggaggatacctctgaaactaaagattttgcagatagagaagatagtttttattacaacagattcaaacattataaagaccgtgttttagtaccactagcctatattaactttgatgagtatatagaggaactaaataatgaaagaaatgtgcttaataaagattataataaagctttaaaagacattgagaaacgtccagagaataaaaaagcacataacaaaaaggaaaatttagaacaacaactcgatgcaaatcagcaaaaaattaatgaagctaaaaacttaaaacaagaacatggcaatgaattacccatctctgctggcttctttataattaatccgtttgaagtagtttactacgctggtggaacttcaaatcgttatcgccattttgcagggagctatgcggttcaatggaagatgattaactatgcaattgaacatggtattaatcggtataatttctatggtattagtggtgactttagtgaagatgctgaagatgctggcgtagttaagtttaaaaagggctatgatgccgatgttatagaatacgttggtgactttattaaacctattaataaaccaatgtataacatttatagaacacttaaaaaactaaagaaatag

SEQ ID NO: 5903 - DNA, 114 bp, Staphylococcus epidermidis; identical to SEQ ID NO: 3177

SEQ ID NO: 5904 - DNA, 660 bp, Staphylococcus epidermidis; identical to SEQ ID NO: 3176

SEQ ID NO: 5905 - DNA, 732 bp, Staphylococcus epidermidis
atgagtaaattattcattccgtatattatgggtgatttaaattttattcatcatttaaaaacattaactgagaatggagcagacattgttgaaattggtgtgccattttctgatccaattgcagatggacctataatcatgaaagcagggcgcaacgctattgtcgagggttcaaacattaaattcatttttgatgaattaataaaaaataaaaatactatttcatctaagtatgtattaatgacttattataatattctaagtgcttatggagaagaattatttttggataagtgtgatgaagctggtgtttatggtttaattattccagatttaccttacgaacttacaaaaaagtttaaaaaagatttttatcatcattctgttaaaataatatcgttaattgccatgaccgcaagtgatgctaggattatgcaaattgcaaagaactcagaaggatttatttacacggtaacaatgaatgccacaacaggtaacagtggggagttccatccagatttaaagagaaaaattgaatatataaaaaaagtttcaaaaattcctgtggttgctggatttggtatcaaaaatcctgaacatgttaaagatatagcgtccgttgcagatggtattgtaattggtagtgaaattgtaaaacgtattgaaatagattcaagaaaagaatttatcacttatatcaaatcaataagaactacgttgaattctttataa

SEQ ID NO: 5906 - DNA, 1209 bp, Staphylococcus epidermidis
atgaaaattcaaacagaagtagatgaactgggctttttcggtgaatatggtggccaatatgtacctgaaacattgatgccagctattattgaacttaaaaaagtatatgaggacgcgaaatcagatactcacttcaagaaagaatttaattattatttaagtgaatatgttggtagagaaacgcctttaacatttgctgaatcatacacaaaattgttaggtggtgccaaaatatatcttaaaagagaagacttaaatcacactggtgctcataaaattaataacgcgataggacaggcactattagctaaaaggatggggaaaactaaattagtagccgaaacaggtgctggtcaacatggtgtagcaagtgccaccatcgctgctttattcgatatggatcttattgttttcatgggaagtgaagatatcaaacgtcaacaacttaacgtatttagaatggaattgctaggagctaaagtagtgtctgtgtcagatgggcaaggaacactatcagatgcagtaaataaagctttgcaatattgggtgaatcatgtcgaggatacacattatttattaggctcagcgttgggacctgatccgtttccaactatggtcagagattttcagagtgtgattggtaatgaaattaaaagccaaattttaagtaaagaaggacgacttccagatgcgttagtcgcgtgtgttggtggaggatccaattcaataggtacgttctatccatttatacaagatgacgttaaattatatggggtagaagctgcaggaaaaggaagtcatacgcacaatcatgctttagctatagggaaaggtaaaccaggtgtattacatggttccaaaatgtaccttattcaaaatgatgatggacaaattgaattggcacactctatatcagcgggactagattatccaggtattggacctgaacattcgtattataatgatattggtcgtgtatcatatgtaagtgctacagataatgaagctatggaagcacttataacattctcaaaagttgaaggtatcattccagcaattgaaagtgcacatgcattgagttatgttgaaaaattagcgccaaatatggatgaaaaagaaattattgttgtgactatttcaggtcgtggagataaagatatggaaacaattaaacaatacaaagaaaacggtggtgaacaaaatgagtaa

SEQ ID NO: 5907 - DNA, 624 bp, Staphylococcus epidermidis
atgatagttaaattttgtggttttaaaaccgaaagtgatattaagaaaattaaaaaattagaagttgatgcagtagggtttatacattatcccgatagtaagagacatgtctcactgaaacaattaaaatatttggctaaaatagtgccagatcatatagagaaagtagtggtcgtcgtaaatcctcaaatgtccaccataaagagaataattaatcaaactgatattaacacaatccaattacatggaaatgaaagcattcaattaattagaaatattaagaaacttaattcaaaaataagaatcataaaagcaattccagcaacaagaaatttaaataataacatacaaaagtataaagatgagatagacatgtttattatagatacaccatcaatcacatacggagggacaggtcaaagttttgactggaaattattaaaaaaaataaagggcgttgattttctcattgcgggtggtttggattttgaaaagataaaacgattagaaatatattcatttggacaatgtggttatgacatctcaactggcattgagtcacataatgaaaaagattttaataagatgactcgaatattaaaatttttgaaaggagacgaatga

SEQ ID NO: 5908 - DNA, 789 bp, Staphylococcus epidermidis
atgactattttaaatgaaattattgagtataaaaaaactttgcttgagcgtaaatactatgataaaaaacttgaaattttacaagataacggaaatgttaagaggagaaagctgattgattcacttaactatgataaaacattatcagttattgctgaaataaaatcgaaaagcccatctgtacctcaattaccgcaacgtgatcttgttcaacaagttaaagattatcaaaaatatggtgctaatgctatttcaatattaactgatgaaaaatactttggcggtagttttgaacgattaaatcagttatcaaagataacatcgttaccagttttatgtaaagattttattattgataaaattcaaatagatgttgcaaaacgagctggtgcatctattattttattaatagtaaatattttaagtgatgaccaattaaaggaattgtattcatatgcaacaaaccataatttagaagttctagtagaagttcatacaattagagaacttgaacgtgcacaccaaattaaccctaaaattattggtgttaataatcgtgatttaaaacgatttgaaaccgatgttctacatacaaataaattacttaagtttaaaaaggctaattgttgctacatttcagagagtggcattcatacaaaagaagatgttgagaaaatagtagattcaagtattgacggtttacttgtaggggaggcattaatgaaaacaaatgacttaagtcagtttttgcctagtttaaagttaaagaagaatctctatgatagttaa

SEQ ID NO: 5909 - DNA, 996 bp, Staphylococcus epidermidis
atgacccttcttgagaaaattaaacaaaataaatctttatctaaaaaagatatgcaatcatttattgttacactgtttgattcaaatatagaaaccaatgtaaaggttgaattattgaaagcttatacaaataaagacatgggtcaatatgagctaacgtatttagttgaatattttatccagacaaactatccaaaccaaccattttataataaagctatgtgtgtttgtggcacaggtggagatcaatcaaatagctttaatatttctacaactgtagcttttgttgtagcaagtgcaggagtgccagtcattaaacacggtaataaaagtattacttcacattcaggaagtacagatgtactacatgaaatgaatataaaaacaaacaaaatgaacgaagtagagcaacaattaaatttgaaaggattagcattcataagtgcaactgattcttatccaatgatgaaaaagcttcaatcgattagaaaatcgattgcaacacctacaatttttaacttgattggaccattaattaatcctttcaaattaacttatcaagtgatgggggtatatgaagcttcacaacttgaaaatatagcacaaacattaaaggatttaggtagaaaacgagcaattttaattcatggtgcaaatgggatggatgaggccacgctctctggtgaaaatatcatttatgaagttagcagcgaaagagcattaaaaaaatatagtttaaaagcagaagaagtcggtttagcttatgcaaataatgacacgttgataggtgattcacctcaaacaaataaacaaattgcattgaatatcctaagtggcacggatcactcaagtaaacgagatgtagttttgttaaatgctggaattgctttatatgttgctgagcaagtggaaagtatcaaacatggcgtagagcgagcgaaatatctcattgatacaggtatggcaatgaaacaatatttaaaaatgggaggttaa

SEQ ID NO: 5910 - DNA, 567 bp, Staphylococcus epidermidis
atgatattaataatagataactatgattcttttacctacaatcttgtagatattgtagaaaaacaatgtgaaacgattgttaaatatccagatgatacagatatatgtaatctgaaaggtattacagcagttattatttcaccaggacctggacatccattagacaatcaattattaattaaattaattgaaaatttcgaaaatttacctattttaggtgtttgcttaggtgcacaagcgctcacttgttattacggtggcgatgttatacaaggtagttgtgtcaaacatggaaaagtagatactttaactattgttaatcagtcaccactatacaaaggaattaagtcaagtttcaaagttatgcgttatcattcattaattagtgatccatgctcatttccagaaagtttattaatcactggccaaacatatgatagtatacaatctttccaacacaaaaacagaaaacattatggcatacagtttcatccagagtcattcgatacagaaaatgggaaacaaatcattattaattttataaatatagcaacgagaggaagttga

SEQ ID NO: 5911 - DNA, 1407 bp, Staphylococcus epidermidis
atggatattgtatacaaaaaagtgaatgctcaaattacgccagaagctttagcaaaattaaaacaaaaaaagatcatttttgaaagtacaaatcaacagaaacttaaaggtaggtactcgatagtagtattcgatcattatggcaaaattacattagataattctcaacttttaattaagttagacaatcattgtgaaatagttaagaatcaaccgtatcaacgacttaaggaatttgtagataaatattattttgaaatcaaagataaatatttaaaagatttaccttttatttcgggctttatagggacatgtagctttgatttagtacgacatgaatttaaaaaattacaagatattaaattagaagatcatcaaactcatgatgtccaattttatctagtggaagatgtatttgtttttgatcattataaagatgaattatatattatcgcaagtaacttattttctgatagaacaaaagagagattaaaggaatctattgaacgtaaaattgaagatttaaaaaacatacatttttcggttgaggatataaattataaatccatccctcgacatataaccaccaatatatcagagcaacaatttgttcaaactattagaattttaaaaaagaaaattactgaaggagatatgtttcaagtagttccttcaagaatttatagttataaacaccattttcaacacaatttacatcaattaacttttcagttatatcaaaatttaaagcgacaaaatcctagtccatatatgtattacattaataaagatgtaccgattgtaataggaagttctcctgaaagttttgtaaaggtaaaagatggaaaagtttatacgaatcctatagctggaacaattaaaagaggtcaaaataaaaaagaagatgaaaataatgaaaagacattaatgaaagatgaaaaggaattgagtgaacatcgtatgctcgtagatttaggaagaaatgatattcatcgaataagtaaaacaggcacttcacaaattaccaaactaatgacaatagaacgttatgaacatgtcatgcatatcgttagtgaagttattggagaattaaaaccccatctatctcctatgagcgtcatcgcaagtctgctaccaacaggtactgtctcaggtgcacctaaacttagagctatacagagaatatacgaatcttatccatataaaagaggtatctatagcggtggtgttgggtatatcaactgtaatcatcatttagattttgcattggctatacgtaccatgattatcgatgaggaaaaagtcagtgtcgaggcaggatgtggagtagtatatgattctattccagagaaagaacttgaagaaacaaaacttaaagctaaaagtttattggaggtaactccatga

SEQ ID NO: 5912 - DNA, 1089 bp, Staphylococcus epidermidis
atgcgaaatattttatttgtagggttaggccttattggcggtagcttggcgagtaatttaaaatatcattacagtaatttcaatattcttgcatacgattcggactacacacaacttgatgaagccctttctataggtattattgatcaaaaagttaatgattatgctactgctgttgagatagcagatataatcatctttgcaactcctgttgagcaaacaattaaatatctatctgaacttacaaattacaatacaaaaactcatttgattgtaacagacacaggtagtaccaaacttactatacaatcattcgaaaaagaattattaaaacatgatattcatttaattagtggtcatcctatggcaggaagtcataaatctggtgttttaaacgcgaaaaaacatttatttgaaaatgcttattacattcttgtatttaatgaaatcgaaaataatgaagccgcgacatatttaaagaaattacttaaacctacgttagcaaaatttatcgttactcatgcaaatgaacatgatttcgtaaccggtatagtgagtcatgttccacatatcatcgcttcaattttagttcatctaagtgctaatcatgtcaaagaccattctttaatcgaaaaattagcagccggtggctttagagatataactcgtatagcaagtagtaatgctcagatgtggaaggatatcactttaaataatcaaaatcatattttatctttacttaacgagattaaagaacaaattactggtattgaaaatttgatacgagaacaaaatagtaatagtatttacgatttcttcgttaaagctaaagattatcgtgatcaacttcctgttaaacaacacggtgcaatatctactgcgtatgatctttatgttgatatccctgataagccgggtatgataagtcaaattacaaacatcataagttcacataatatttctattataaacttaaagattttagaagtacgtgaagatatttatggagctttacaaatcagttttaaaagtcccgaagatcgagagaatgctataaaagccctcgcaaattttgatacttattattaa

SEQ ID NO: 5913 - DNA, 1263 bp, Staphylococcus epidermidis
atgtatgattacaatttattagaagatagggatgtactctgcatagaccaaaaaagtttttttgcgagtgtatcatgtatggaaaaaggattggacccattaacaactaaactagcagttgtagcagatacgaaaaggcaaggttcggtcgttctagcagcaactccaaagttaaaagaattaggtattaaaacgggatcaagactttttgagataccacatcgtaatgacatttatattattaatccaagtatgagaaagtatttaaatgtatctgttgcaatttcaaagattgcactgcggtacgttccacctgaagatttacatcagtatagtattgatgaatttttcatggatgtaacggatagttaccatagatttaattcaacagtttttgctttttgtaaaagatttcaaaatgaaatattagaagaaacaggtattcactgtaccattggaataggctcgaatatgctattgagcaaggttgcaatggatattgaagctaagcattcggaaaacggtatagctgaatggcgttatcaagatgtacctgaaaaattatggccaattcaaccacttagagatttttgggggattaataagcgtacagaaaagaaattgaataaaagaggaatatttacaataggagatttagcaaagtatccatatcattatttaaaaagagattttggagttttaggtatagatatgcatctacatgcaaacggtattgatcaaaataaagtaagagaaaaatataaaataacaaatccttcaatatgtaaaagtcagattctaatgcgagattatcaatttgaagaatccaaagttgtcatgcaagaattgatagaagatgtagcaagtcgtttaagagcagaaaagaagcttgctcgaacaattcatttttctttcggttatgctgaaggtggtggcatacataagcaatatactttggaggaccctacaaatttagaaagagatatattcaaagtcattaattattttgcaaatcgtctgtgtgacaaaaaagcattgtatagaacgttaagtgtatcgttaactcagtttattaaagaaagcgatcgacaacttaacttattcattgatgaatatgaacgtaagaaagatgaaaaacttgctaaaaccattgatcacttacatttaaaatatggaaaaggagttgtgtcaaaagcgacttcatacaccgaagctggtacaaagcatggtcgattaggactaatggctggtcataaaatgtag

SEQ ID NO: 5914 - DNA, 186 bp, Staphylococcus epidermidis; identical to SEQ ID NO: 3166

SEQ ID NO: 5915 - DNA, 339 bp, Staphylococcus epidermidis; identical to SEQ ID NO: 3250

SEQ ID NO: 5916 - DNA, 567 bp, Staphylococcus epidermidis
atggttaaaactgtttatattactggctataaatcttttgaactgaatatctataaagacgatgcgccagaagtatattatttaaagcaatttatagctcataaattaaaacatcttttagatgaaggtttagagtgggtattgatacaaggacaaatgggtatagaattatggtctgctgaagtagtgattgaactaaaaaaagacttcccagatattaaactaggtataattacgccatttctaggtcatacacaacgatggaatgataagaatcaagctaagtatacaaatattatacaacaagccgattttactgaaagcattcatcacactgagtatatgggtgcctatcaatttaaacaagcagatcaattcatgcttgatcataccgattacactattttaatttatgatgatgaacaagaggcaagccctaaatactttaaggctatgttagttgaatttatggaaaaaacaaactatacttgtgatattgtgacgtttgatgaactcactgacttcatcaacgacttgcagtggtctcaagatcaaagtttcgaatga

SEQ ID NO: 5917 - DNA, 333 bp, Staphylococcus epidermidis
atgtatcaaatcattaaacaattgttagaggatattgatgaaatgaattataggtatcaacatgtaaaaattaatggcggttcattcgatttttataaagatgttgaaccctatgtcaaaaatattgataatcatttagaggcactcaactgttactcaaaaagcattacagaaacacaatatatgagccaacaaaagttagatatattgatattaaatatacaaaagctttctgtagattgtcattttcctagaacgagccgtaaattatttgtcgaaaaacttaaaagtgcccagtacgatttaaaaaatattttatcgaattatgtttag

SEQ ID NO: 5918 - DNA, 627 bp, Staphylococcus epidermidis
atgaattatccaaatggtaaaccatactctaaaaataagcctttggacggacgtaagagttcgccattttcaagtaatattgaatatggtggacgaggtatgacactagagaaagatattgaacaatcgaatactttctatcttaaaagtggcatagcagttattcataaaaagccgactccggttcaaatagttaatgttcactatccgaaacgtagtaaggctgtaataaatgaggcttattttcgcactccttcaacaactgattataatggtgtctataatggatattacattgattttgaagctaaagaaactaagaacaaaacttcatttccactcaataatattcatgcacatcaagtagaacatatgaaaaatacatatcatcaaaaaggaattgtctttttaatgatacgttttaaatcacttgatgaagtgtatcttttaccctattcaaaatttgaaaaatattggcaaagatacattaataatattaaaaagtcgataactgttgaagaaattcggaaaaatggttaccatattccttatcaatatcaaccaagattgaattacctcaaggcagttgataagttgatattagatgaaagtgaggaccgcgtatga

SEQ ID NO: 5919 - DNA, 2232 bp, Staphylococcus epidermidis
atgacggaaaataaagggtcttcccaacctaaaaagaacaacaatgggaagtccaatggaaaaaagaataggaatgtaaagagaacgattattaagattataggttttatgattattgcctttttcgttctattgctactcggtatcttgttgtttgcttattatgcgtggaaagctccagcatttagcgaatcaaaattagatgatccaattccagcaaagatttacgataaaaacggagaacttgtaaaaacacttgataacggacagcgacatgaacatgtgaatatcaaagatgttcctaaagacatgaaaaacgctgttttagctactgaagataaccgtttctaccaacatggagcattagattacaaacgtttatttggtgccattggtaaaaacttaacaggtggatttggttcgcaaggtgcgtctacacttacacaacaagttgtaaaagactcattcttgacacaacaaaaatctatcggtcgtaaagcacaagaagcttatctttcttatagattagaacaagagtacagcaaagatgaaatattccaagtttacatgaataagatttattattcggatggcgttactggaattaaggccgccgctaaatattacttcaacaaagatatgaaggatttaaatttagctgaagaagcttatctagctggtttacctcaagttcctaacctttacaacatttacaacaatcctaaggaagctaataatcgtaaagatactgtgctttatcttatgcataaacataaccgtattaatgataaacaatatgcggatgcgaagaagattgatcttaaagctaacttagttgaacgtactaaaaaagaacgtcaagtcactggaaatgaaaaaaatcctgagtatgattcttacgttaatttcgttcaatctgaattaatgaataacaagtactttaaggataaaaatttaggttcagttcttcaaagtggtataaaaatttatactaatatggataaagatgttcaacaaacgttacaagatcgaattaacaatggttctttctacaagaatgaagaccaacaagttggtgcaacaattctagatagtaaaactggtggattagttgcgatctcaggtggacgtaattataaaaatgttgttgaaagaaaccaagctactgaccctcaccctactggttcatcattaaaacctttcttagcttatggacctgcaatagaaaatatgaagtggtcaacaaatcatgcgattcaagacgaatcatcatattgggtagatggttctcaattcaagaactatgatacgaaaggccatggaacagtttctatctatgatgcattgcgtcaaagtttcaatattccagctttaaaaacttggcaacaagttaaaagtcaagctggtaatgatgcacctcagaaatttgcatctaaattaggattggattatagtggcaaaattggaccttcagaagtattaggtggatcttcatcagaattctcacctactcaactagcttccgcttttgcagcaatagcaaatggtggtacttataataacgcgcattcaatacaaaaagttgttactcatgaaggagatacaattgagtatgaacatacgagtcacaaagctatgaaagactatacatcatatatgttagctgaaattcttaaaggtacatttaaagcatatggttcggcttatggacatggtgtgtcaggcgtaaacatgggtgcgaaaactggtactggtacgtatggacaagaaatatacgaaaagtataatttacctgataatgctgccaaagatgtttggattaatggtttcagtccagaatatactatgtcggtatggatgggcttcaataaggttaaacaatatggaacaaattcatttatcggtcattcagaacaagattatccacaatacttgtatgaagatgtgatgtctagtatctcatctaaagatggtgaagatttcaaaaagcctaatgatgtacaaggaagttcaccggacagtctatctgtatcaggtcattctgataataatactactaaccgtagtgttcatggaagtagcgatacatcttcttcatcaaatggtggctctaactcagcatcaagtggaaacaactcgaatagttcgaatggtaccagtcaaggtaactcaggcaatgcatttacacgtctgttcaatttaaactctatattcgattataaagtttcataa

SEQ ID NO: 5920 - DNA, 333 bp, Staphylococcus epidermidis; identical to SEQ ID NO: 3255

SEQ ID NO: 5921 - DNA, 660 bp, Staphylococcus epidermidis
atgataagtaagaaaaaagcattacaaatgattgacgttatagcagatatgtttcctaatgcagaatgcgaattaaaccatagaaatgcattcgatcttacaatagctgtattattatcagcacagtgtactgataatctagtcaatcgtgtcactcaatcattatttagaaaatatcgaacacctgaagattatttaaatgtgagtgatgaagaattacaaaatgatatacgctctattggattatatcgcaataaagccaaaaatataaaaaaattatgccactctttaattgaacaatttaatggtcaaatcccacaaacacataaagaattagagagtctagctggagtggggcgtaaaacagcaaatgttgtaatgagtgtcgcatttggagaaccttctttagctgtcgatactcatgttgagagagtttctaaacgtttgggaattaatcgttggaaagatagtgtaagacaagtagaagatcgattatgtgatattatcccaagagatagatggaataaaagccatcatcaattaatattttttgggagatatcattgtcttgctagaaaacctaaatgtgagatatgtccgctgttaaatgattgtagagaaggacaaaaacgacataaagcaaagataaaggaggcgtga

SEQ ID NO: 5922 - DNA, 687 bp, Staphylococcus epidermidis
atggatctaattcaattaaaaacaagacctgttgttataagacgagaattgtttgatcattattcagagttaggtttggatgaacaagatttagttattttgataaaacttttatatgcatctgaaacttctaataagcaaccttctattgagtttcttcaaaaaggatcaaatatggaacctcgtcaaattacttccgtaatacaaaacttaattcaaagagaattattagaactcaatgttagtaaagacgaagaaggtaaattcactgaatacatgaatttggatcccttctatcacaaattaaatcaattattaaaacatcaatacttaaaacatgaggaacaagataaaaaagagcagtttaagcaattgtttcagatagttgagcaatcgttcggcagaccactatcgccgtatgaaattgaaacattaaatcagtggattgatgtcgatcaccatgacttatcagttatacaagccgctcttgatgaggcacttagccaaaataaacttagttttaaatatattgatcgtattttattaaattggaaaaagaataatgtgaaaacagttgacgattcaaagaaaataagagaacagtttaacaaaccaaaaatgaaacatgttgttaaaaaggtgcctaaatttgactggttgaatggagagaatcctaatgataagtaa

SEQ ID NO: 5923 - DNA, 1293 bp, Staphylococcus epidermidis
atgaaaactacgattaaacaagcgaaaaaatatcttaaccaagaagtaacaattggtgcttggttaactaataaacgttcaagtggtaaaatagcgtttttacaattacgcgatggtacaggatttatgcaaggagtagtagtaaaatctgaagtagatgaagaaacatttcaactagcaaaagatataactcaagaatcatctttatacatcacaggaacgattacagaagataatcgttctgatttaggctacgaaatgcaagttaaatcaatcgaaattgtacatgaagcacacgattatcctattacaccaaagaatcatggaacagaatttttaatggatcatcgtcacttatggttacgttcaaaaaaacaacatgctgtcatgaaaataagaaatgaaattatccgtgcaacatatgagtttttcaatgaaaatggcttcactaaaattgatccacctattttaacagcaagtgcaccagagggaacaagtgagttattccatacaaaatatttcgatgaagatgcattcttatcacaaagtgggcagttgtatatggaagcagccgcaatggctcacggacgtgttttttcattcggcccaacttttcgtgcagaaaaatctaaaacacgccgtcatttaattgaattctggatgattgaaccagaaatggcctttacaaatcatgcagaaagcttagaaatacaagaacagtatgtgtctcacattgttcaatctgttttaaatcattgccaattagaactcaaagctttagatagagatacaactaaactagaaaaagttgctacacctttccctaggatttcttatgatgatgctatcgaattcttgaaaaaagagggattcgatgatattgaatggggtgaagactttggtgcacctcatgaaacagccatcgctaatcactatgatttaccagtattcattacaaattatccaactaaaattaaaccattctatatgcaaccaaatccagacaatgaagatacagtattatgtgctgatttaattgcgcctgaaggttacggtgaaattattggtggttccgaacgtattaatgatttagaattattagaacaacgcattaatgagcacgaattggatgaggaaagttatagctattatttagatttacgtcgctatggtagcgtaccacatagtggttttggcttaggcttagagcgaacagtagcttggatttctggagttgaacatgttcgtgaaacatccccattcccacgtttacttaatcgcttatatccataa

SEQ ID NO: 5924 - DNA, 2709 bp, Staphylococcus epidermidis
atgggaatagcaacatttgcagttgttgatttagaaacaactggaaatcaactgggttatgatgaaatcattcaaattggtattacgtttgtgcgtcagaatcaagtaattgatacataccattcaatgatacgtaccgatttagaaattccaccgtttatccaagccttaacttctatagaggaagaaatgttagtacaggcaccttattttaatgaggtcgcagatgacatttatcaacttatcaaagactgtgtttttgttgcacataatatctcatttgatcttaattttataaaaaaagcttttgaaaaatgtaatattcaatttaaacctaaaagagtaatggatactttagaattgtttaaaatcgcattccctacagacaaaagctaccagttaagtgcattggctgaatctcatcatatcccattaaataatgcacatagagcagatgaagatgcaacaacaactgctaaattgatgattaaagcttttgagaagttcgagcaattgcatttagatacacaaaaacaactgtactatttaagtaaaaatctcaagtatgatctttatcatattttgtttgaaatggttagaaattatcaaactaaaccgcctaacaaccaatttgaacaatttgaacaaattatttaccgtaaacaaattgatttaaaaaaaccggctgtcaattttgatggtaccttaaaagatttatataaaaatgtcactcaatcattaaatcttacatatcggccacaacagttatacctagccgaaattatacttgatcagttgatgcatagtgataaggcaatgattgaagctcctttgggtagtggaaagtctcttgcttacctgcttgcagcaacaatgtataatattgagaccggtcgtcatgtaatgatttcaacaaatacaaaattattacaaagtcagctattagagaaagacataccattactcaatgatgttttagattttaaaattaacgcgtcattaatcaaaagtaaaaatgattatatatctcttggtcttatcagccaaattcttaaagacgatacaaataattatgaagtaagtattcttaaaatgcagttacttatttggataactgaaacaaatactggggacatacaggaattaaatcttaaaggtggacaaaaaatgtatgttgaccaaaaaattgaaacatacgttccagttcgtcatgatatccattattataattatataaaaaggaatgctcaaaacatacaaattggtatcactaatcatgcgcacttaattcattcagacagtgaaaacactatatatcaactatttgatgattgcatcatcgatgaagcacatagattgcctgactatgcgctaaatcaagttactaatgatttaaattattcagatgttaaatatcaattaggacttattggcaaaaatgaaaatgaaaaactacttaaagcagtagacaaacttgagcaacaacgtattttagagaaactagatattgcacctatagacgtttttggactgaaaataaatatcaatgagttacatgatttaaatgagcaactattcactacaatttataacattattcaaacatcagacgtttatgatgatgacattcacaagtatcattacgtttatgactttgaaacgggtgagattttaaaagatttacgtgcaatcatagataaattaaataaaacgatagaaatttttaacggaatgaatcacaaaacaatcaagtctgtacggaaacaattattatacttacatgacaaatttaaacttatcgaacaaagtataaaagatcatcatacaagctttatttcaattaaaaatttaacacaaaaatcaacaatccgactcttagtcaaggattatgatgtaaaggatatcttgacgaagcaagtacttgaaaaatttaagtctcttacatttatatctggcacattaactttcaatcactcatttaaagcatttcaaaattggtttaatgaagatatagactttaatacatttgaaatttcaacacctttaacatcatccaaccatacaaatgtttttgtgcccaatgatgttgaaacgtacaattataaaaatttagacgattatgtagcttcaattgtagactatattgttgaatatatcacagtgacacagtcgaaatgtcttgtcttatttacaagctataaaatgatgcatatggttcaagatttgttaaatgaattacctgagttagaagattatgtcattttaacccaacaacaaaaccaaaattataaaattgttcaacagtttaataactttgataaatctatacttcttggaacatcaacattttttgaaggttttgattttcaagccaatggccttaaatgtgtaatgatagctaaattaccatttatgaataaacataatattaaatactggcttatggattctgaattcacatcaacttttaaagattatgtattacctgatgctgtaacaaggtttagacaaggtcttggacgtcttattcgacacgaagacgacaaaggacttattgtgtcatttgataatcgactagtaaatagcacatataaaagcttttttgctcaatcactagaacattttaaacaacgaaaaggtaatattaaacagtttaataaattactgaatcaaatacagaggtctatcgataacgagagtaaaagctag

SEQ ID NO: 5925 - DNA, 972 bp, Staphylococcus epidermidis
atgtcaaaatatagtcaagacgtcattagaatgttgtatgaacatcaatcaaattacatatcagggcaatatattgccgatcaactcaatatttctagagcaggtgtcaaaaaagttattgacctattaaaagaagatggttgtgatatcaagtcaataaaccacaaaggccatcaactgaattcattacctgatcagtggtatagcggtattgtaaaacctattctcgatgaacttggcctttttaatcatctagaagtttatcacactgtagattcaacacaattaaaagcaaagagagcactcgttggaaataaagatacttttttaattttgagcgatgaacaaaccgaaggtagaggtagattcaatcgtaattgggaatcatctaaaggacaaggcttatggatgtcactagtgctaagacctgacgtacctttttctatgatacctaaatttaatttatttattgctttaggaattagagatgctattcaacaattttcgaacgaacgtgtaacaattaaatggccaaatgatatatatattggtaataaaaaaatttgcggatttttaactgaaatggttgcaaattatgatgaaatagaagcaataatttgtggtataggtataaatatgaatcatgttgaaagtgattttgacgaggatattaaagataaagcaacaagtatacgcatgcattccgatagtaaaattaatagatatacttttttaactgcattattaactcaaattatacatcgctttgatcaatttttacatcaaacttttgagtcaattcgagaagaatatattcacgctacaaatatatggcatcgtcaacttaaattcactgaaaataatcatcaatttttgggggaagccatagatattgattcagatggattccttattgttaaagatgaagaaggtcaattacatcgacttatgagtgcagatatagatttataa

SEQ ID NO: 5926 - DNA, 1203 bp, Staphylococcus epidermidis
atgagtcatgagatatttgaacaagcaaaacctattttaaaaaagattcaaaataaaggttttaaggcttatttcgttggcggatcagtacgtgattacatcatgcaacgacctatacatgatgttgatattaccaccagtgcaacgcctgacgaaatagaatctatattcgataaaaccataccagtggggaaagaacacggtacgatcaacgtggtctttcaaaatgacaattatgaaattactacattcagatctgaagatgaatacatcgatcatcgtaggccaagtgaagtgtattttgtaagagacttatatcaagatgttcaacgtagagattttacaatgaatgctatagcaatggatttaaattaccggttgtatgattattttaatggtcaacaagatataaacaatcgagtaattcgtactgttggtgtaccaagtgaaaggttttcagaagacgcgcttcgtatcattagaggattacgttttcaatcacaactaaattttcaaattgattcagacacattacatgcaatgtcttctcagatttcagatatacaatatttatccgttgaacgtgtagtagtagagcttaaaaagcttatcatgggaaacaatgttaaacaaagttttgaagtcatgcaaaacatgaaagcatttaattatataccttttttcaaatcatttgagatgtctcatcttcatatagatgagcccatcacatttgaactttggattgcaatcttaatcgtccaacaaccaaaagatatacaattaagcaccttgaaaatcagcaatcaagaaaaagcaactatcaaaaaatgggttacactcatccaaacattgcctaagatacagtcaaagcaatctttaataacattagtatatgattacaatttaaatgatattgaaatcctattatcattacatcatttgcttaaacaaaatgggcttacaacagccaatcatttaatcattaatgaaataagtattcgcgaagcaaatgaaaaattacctatccattgcagaaaagaattggcaataaatggtaaagatatactcaatcatacgaataaaaattcaggaccatggctaaaagatacacttagagaaatagaaatcgcagtcatatcaaatcaaatagtcaacactaaagaagaaatattagaatgggtggatgcacatgtcaaaatatag

SEQ ID NO: 5927 - DNA, 1113 bp, Staphylococcus epidermidis
atgggtggttctggcattattgctacagagctcggtattaaaatggcagaacgtggccatgaagttcactttattacctcaaacataccctttagaatacgcaaacctttacctaacatgacgttccaccaatttgaagtcaatcaatatgccgtattccaatatccaccatacgatattacattaagtacaaaaatttctgacgtaatacaagaatatgatttagacatattgcatatgcattatgctgtacctcacgctgtatgtggtatattagcgaaacaaatgtcaggtaaaaacgtcaaaattatgacaacactacatggcactgatataactgtgttaggttatgaccatactttacaaaacgcgataaaatttggcatagaacaaagtgatattgtaacaagtgttagccattctctagcacagcaaacttatgaaattatcaatactaaaaaggaaatcatccctatatataattttgtaagggaaaatgaattcccaactcgacataatgaagaattaaaagattgttatggtatttcacctgaagaaaaggtattgatacatgtttctaatttcagaaaagtaaaacgtattgatacagtgattgagacatttgcaaaagttcatgagagtataccatccaagttgatacttttaggagatggtccagaattaatcgatatgcgacataaagcacgagaacttgatgttgaaacacacgtactctttttaggcaaacaaaatgacgtaagcgcattctaccaactatctgatttagtactactcttaagtgagaaagaaagttttggattaactctcttagaagcaatgaaaacaggcgtcttacctatagggagtcatgcaggtggtattaaagaggtcatcagacatgaagaaactggatttatagtagatataggggatagtacacaagctgcaaaatatgctattaaacttttatcaaatccagagttatatcaaaaaatgcaatcacaaatgctgaaagatattgaagcaagatttagttcagatttaattactgaccaatatgaaaactattatcgaaagatgctagaacaaggtgagaacaacaatgagtcatga

SEQ ID NO: 5928 - DNA, 318 bp, Staphylococcus epidermidis; identical to SEQ ID NO: 3263

SEQ ID NO: 5929 - DNA, 696 bp, Staphylococcus epidermidis
atgtctttaatatcaatgattatatatttcgtaatattaatggtcattccaatgtgggctcaacacaaagttaaatctaattatgaaaaatactcacaagtgagatccacaagtggtaaaactggtcgtgaagttgctgaagaaattttacatgctaatggcatttacgatgttgacgtcgttaaaggcgaaggtttcttaactgatcactatgatccaaataaaaaagttgtttgtttatctcctgcaaactacgatagaccatcagttgctggtactgcaattgcagcccatgaagtaggacatgcaattcaacatcagcaaggatacgcaccattaagatttagaacagcattagtaccattagctaatattggtagttctttaagctacattattattatggtaggtattgttttaacagctctcggtagtgtctttggctctacagttctatgggttggtgctggtttaatgtcacttgcagttttattctctatcgtgacattacctgttgagtttaacgctagttcaagagcgatgaaacaaataacagctttaaatatcgttaatgagaaagaatacaaacacgcgaaaaaagttttatctgcagcagcaatgacatatgtggcatctactgcagttgcgttagctgaacttgctcgtattatattaattgcaagatcaagtgattaa

SEQ ID NO: 5930 - DNA, 594 bp, Staphylococcus epidermidis
atgaatcaatggctttgggaaacttcactttatcaaaaatggttgatttcttttattttaatttgcaatatatttggtacgatatacggttatcattggtatagtagtcaattagctaacacaccaaattattttaaattatttgttccagatagtcccactgctacattatttttatgtttatcattattattcatactatttaataagcgtaatgccctgattgacgctttagcttttataactctatttaaatatggtagttgggctgtaattatgaatattttgatgtttataaaaatgaatgatattgccgtaaatggacttatgttgctcatttctcacgcaattatgatattagaagctatctatttttatcctcgttttaaaatatctaaattggctggattgatgagtttcatatgggtgacgatcaatgacgtaatagattacatatacggacaatatccctactatgattttatcgccaaacatttaattgaagtaggggtattggcttataatctcactatcatatcgtatattttatttttaaaattacaaaagtggttgaaagttaaaacatttgattaa

SEQ ID NO: 5931 - DNA, 564 bp, Staphylococcus epidermidis
atgaatgattctcttattcgtatcaaacaaaattttatagaatatattctgtttaactatcgttttaaatcaagaatcactgtgtgggtattaaattatttaaaggcaaatcaagataagctaaataatgtacatttcgtaaatagtaaaatcaataatcattttaccttagaaattgcagaagtggatgcaactgcttctgcaattcaattgagcaaggataataaagcttatattaatacaaatcaaatttttaattatattgcaaatcatacattaagattagatatacaaatacatttcgctaattgtcacatccaagaacctcgcttagatgatttaatattaatgcagctcatccattcacctagttattcatcttatgtacaagacttatattcaatttctatggataaaagaaaacaaacatttattattcaaaccttacaaaacaatattgatttaagtttacaaatgaatgaacctgattatttttatcaactcacacaaatacttaatgtattaaaatcaaaagatattcaatcaactttacatgaaaggtag

SEQ ID NO: 5932 - DNA, 1245 bp, Staphylococcus epidermidis
atggaagatatctacaaacttatagacgatatcaatctacaaaaaatagaaaacttagattctcgagtaaatgaggcattgagttcaaacaatgatgatgcattatttatacttggtgaaactttatataatttcggtcttacacctcaagggttagaagtttttagaacgttgtatcataaatacccagatgaaagtgaattactcatttactttatcgaaggtctcatgtctgaaaatcaaactgacgaagcacttgaatatttagcacaagtagaaccatctaccgaaaagttgatgctagaagccgatttataccaacaaataaatatgttagaagtagcaattgacaaattgcaagaagcattagatcttgaacctaatgatccaattattcacttcgccttagcagagctattatactacgatgggcaatacttacgagctacaagagagtatgaaacagtattagaaactggtgaatatgaagttaatggagtaaatcttttttcgcgaatggcagattgtagtttacaaagtggtaattattcagatgctattagcctatttgatgaaattaatgaagaagagatgaattctgaagattactttaaaaaatcaattgcttatgaaaaaaacgatttaactcaagaagcaattaaaattatgcaaacattactttcaaaagatcctgattttatacaaggatatttttatcttcaatctctatttgaaaatgaaaaaaattatcctgatgctatagaaactggtaaggaaggattacgtttaagtcaattttacaaagaattaatggtttctacaggtagcttagaaattgagcatggagatgcaaatgaaggtgtagaattgctaaaacaagccttagaagtcgataatgcatatcatgaaccattgttgattttaagtgatttatatcgtaatgaagaagactatgaatcaattatacaattgttgacttatgtagatgaagaagatttagaccctattttcatgtggcatttagcatatgcatacggtcaagaagaacgagataaagaagcgcaacatttctttgaattagcatatccaacattacaaacccaagttgaatttttaagcgattattatttctatttattagaaattggacaaaaagaaaaagcaattttgattttaaatcaattattagaaattgatccaagcaatgaaaattggcatgacgagtcaatgagattgcaaatataa

SEQ ID NO: 5933 - DNA, 1302 bp, Staphylococcus epidermidis
atgaataacagtgaaataattaatattaatggaccactcaaaggtgaaatagaagtacccggtgataaatcgatgacacaccgcgctattatgttagcttcattagctaaaggcatatcaaccatttatgaacccttaatgggcgaagattgtcgacgtactatggatatctttaaactattaggtgtaacaattgaagagcaggacaattctatcataatcaattcaccaggatatcaaaatttcataacgccacaccaagtgctctatactggtaattctggtactactacacggttacttgcaggtcttttaagcggattaggcattgaaagtgtgttatctggtgatgtatctataggcaaaagacccatggatagagtgatgaaacctctgttaaaaatgaatgctaatatatctggaattgataataattacacaccacttataattaagccttcaactattaaaggtataaattatcaaatggaagttgcaagtgcacaagttaaaagtgctattttacttgctagcctattttcaaaagaagccacgacacttacagaatttgatgtaagtagaaatcatacagaaacattgtttgcacactttaacattcctatatcaattcaaggtaaaacaatccaaaccataccttatgcaattgaacatatacagcctagagattttcatgttccaggagatatctcatctgctgcatttttcatagtcgcagccctaattacgcccggttgtgacattacaattcataatgttggcattaatcccactcgttcaggtatcatagatatcgttaaacaaatgggaggaaacattgaattaagtaatgtaagcaagggtgcagaaccaactgcatcaatacatgtaaaatatacaccgaacttaaatgctgttacaattaaaggcgacttagttccaagggctatcgatgaattgccagttattgcactactttgcacacaagcttcaaattcttgtgttatcaaagacgcagaagaattaaaagtgaaggaaacaaatcgtatagatactactgcagacatgctaaatttacttggttttaatttacaacccacacatgatggacttattatacatccatcagagtttagatcaaatgcaactgtagatagtcaaacagatcatcgtataggaatgatgttagctgtagcttcactacttagttcagaaccaatcaaaatagagcaatttgacgctgttaatgtttccttcccaggttttttacctaaactaaagcttttagaaaatgagggaaaataa

SEQ ID NO: 5934 - DNA, 1065 bp, Staphylococcus epidermidis; identical to SEQ ID NO: 3269

SEQ ID NO: 5935 - DNA, 1167 bp, Staphylococcus epidermidis
atgagataccttacatccggtgaatcacatggaccacaacttacagtcatcatagaaggtgtaccagctaatttagaaatcaaggctgaagatattaataaggaaatgtttaaacgtcaagggggatatggtcgggggcgtcgtatgaaaattgaaaaagatactatagaaattgtgtcaggcgtcagaaatggctttactttaggaagtccaataactttagtagttactaacgacgatttcactcattggagaaaaataatgggcgtcgcaccaattagtgatgaagaaagagaaaatatgaaacgtaccattacaaaacctagaccgggccatgctgatcttataggtggcatgaaatataatcatcgtgatttaagaaatgtgcttgagcgttcatctgctagagaaacagcagcaagagttgctgtgggtgctgtttcaaaaattcttttagaacaattagatatccacttatatagccgtgtagtcgaaattggtggtattaaagacaaaggtttatatgatgtagatatgttcaaaaataatgtagataaaaatgatgtacgtgtaattgacgaaaatattgcgcaacaaatgagagataaaatagatgaagcgaaaaaagacggagattcaatcgggggcgtagttcaagtaatggctgaaaacatgcctattggagtgggaagttatgtacactatgaccgtaaattagatggacgcattgcacagggtgttgtgagtatcaacgccttcaaaggtgtaagttttggtgagggatttaaagcagctgaaaaacctggtagcgaaattcaagatgaaattcattataatcaagattcaggctattttagagctacaaatcacttaggtggatttgaaggaggcatgagtaatgggatgcctataattgttaatggtgtcatgaagcctattcctactttatataaaccactaaactcagttgatattaatactaaagaagacttcaaagctactatagaacgctcagatagttgtgcagtgcccgcagctagcgtagtatgtgaacacgttgtcgcttttgagttagcaaaagcagtactcgaagagtttcaatctaaccacatggaccaactcgtagcacaaattaaagagcgtcgacaactcaacatagaattttaa

SEQ ID NO: 5936 - DNA, 450 bp, Staphylococcus epidermidis; identical to SEQ ID NO: 3271

SEQ ID NO: 5937 - DNA, 960 bp, Staphylococcus epidermidis
gtggcaaagttaaacattaacaacgaaataaagaaagtagaaaagcgacttgaagaagcaattataagttctgatcaaacattacaagaagcctcattccatttactatcttcagggggaaaaagagttagacccgcttttgttattttaagtggtcaatttggctctaacaacaaaccttcagaagacacgtatcgtgtagcagtagctttagaactaattcacatggctaccttagtccacgatgatgtgatagataaaagtgataaacgtagaggccgactcactatttcaaaaaaatgggaccaaagtacagctattttaacaggaaatttcttacttgctatggggctcaagcatttatctgaaatcagtgatactcgtgtccattcgaccatttctaaatcaattgttgatgtgtgtagaggagaactattccaatttcaagatcaatttaatagcaatcaaacaattactaattacttacgtcgtatcaaccgtaaaacagcacttcttattcaactgtctacacaagttggtgcgattacttccaatgcgtcaaatgacgttattcgtaaattaaaaatgatcggacattatataggtatgagtttccaaataatagatgatgtgctagattttactagttctgaaaagaaacttggtaagccggttggtagtgaccttatgaatggtcatattacattacctgtactattagaaatgcgaaaaaataagacttttaaagataaaatttcacaacttaatcctgacagtcctcaacatgcctttgaaacttgtataactataattagacagtccgaaagcatagaacaatcaaaacaaataagtgaaaagtatttaaataaagcaatcaatttaatcgatgaattagaggatggtcctaataaagaactatttagaaagcttattaaaaaaatgggaagtcgaaataagtaa

SEQ ID NO: 5938 - DNA, 726 bp, Staphylococcus epidermidis; identical to SEQ ID NO: 3273

SEQ ID NO: 5939 - DNA, 579 bp, Staphylococcus epidermidis
atggaaacgacaataagcaaactaaacaaacatgtagaacaactgcttaagggcattaatgagtatgagcctattgaaatcaatagctctttaagtcatttattagatatgtactctatcccagatgaagctaagattgcttgcctcactattgatacatcaatgcgtcatttggacgctattggtgataatcatctatctaagaaagcaatattaataggggacctattaagcgctcatttctatactctattagcaaatattcaagattccgcttttcaacttgcaatgagcaaggccattgttaaaatcaatgaagataaatcatcaattaatcaaaatgatctcactgataaagagttgaaagatgcgattctagatatagaaacactatttccatatcttacaattaaccattttggaagttctgttgataaaatcaaattattcgctgaattgacttctaaatataaagattaccatcctgagtatctgggtaagtttaacagatatgaaatagataaatatattcaagaaattagcaaaagttataaaaaaagaggtaatgaaaatggctga

SEQ ID NO: 5940 - DNA, 114 bp, Staphylococcus epidermidis
ttgtttagtttgcttattgtcgtttccatgttcacacctcacgatattatcattaacaatattaacattatatgtaaaaaaataaaatctattggattaagtcttttaaaataa

SEQ ID NO: 5941 - DNA, 273 bp, Staphylococcus epidermidis; identical to SEQ ID NO: 3275

SEQ ID NO: 5942 - DNA, 999 bp, Staphylococcus epidermidis; identical to SEQ ID NO: 3276

SEQ ID NO: 5943 - DNA, 1311 bp, Staphylococcus epidermidis; identical to SEQ ID NO: 3277

SEQ ID NO: 5944 - DNA, 1179 bp, Staphylococcus epidermidis
atgactgaagaattcaatgaatcaatgattaatgatattaaagaaggtgacaaagtcactggtgaagttcaacaagtagaggataaacaagttgttgtgcatattaatggtggcaaatttaatggaattattcctattagccagctttcaacacatcatatcgaaaaccctagtgaagttgtaaaagtcggtgatgaagtcgaagcatatgtcactaaaatcgagttcgacgaagaaaatgatactggggcatacattttatcaaaaagacaacttgaaactgaaaaatcttatgaatatttacaagaaaaactagataacgatgaagtgattgaagctgaagttactgaagtagttaaaggtggtttagtcgttgacgttggtcaaagagggtttgtacctgcttctctaatttcaactgatttcattgaagatttttctgtattcgatggtcaaacaatccgtattaaagtggaagaacttgatcctgaaaacaatagagtcattttaagccgtaaagctgtggaacagttagaaaacgacgctaaaaaagcttcaatattagattctttaaatgaaggcgatgttattgatggtaaagttgctcgattaactaactttggtgctttcattgatattggtggcgtagatggtttagttcacgtttctgaattatctcatgaacatgttcaaacaccagaagaagttgtgtcagtaggtgaagcagtcaaagttaaagttaaatctgtagaaaaagattctgaacgtatttctttatctattaaagacactttaccaacaccatttgaaaacattaaagggaaatttcacgaagatgatgttattgaaggtactgtagtacgtttggcgaactttggcgcattcgtagaaattgctccatccgtccaaggtttagtgcatatttctgaaatcgatcataaacatatcggttctcctaacgaagtattagaacctggacaacaagttaatgtaaaaatattaggtatcgatgaagataatgaaagaatttcattatcaatcaaagcaacgttacctaaagaaaatgtcattgaaagtgacgcatccacaactcaatcatatcttgaagatgataatgatgaagataaaccaacattaggcgatgtttttggtgataaatttaaagaccttaagttttaa

SEQ ID NO: 5945 - DNA, 648 bp, Staphylococcus epidermidis
atgagttcaataaatattgcactagatggcccagctgctgcaggtaagagtacaattgctaaacgtgtagccagtcgtctatcaatgatatatgttgatacaggagcaatgtatcgtgccattacatataaatatttacaaaatggcaaacccgaaaattttgattatctgattaataacactaaacttgagcttacttatgatgaagtaaaagggcaaagaatcttactagataatcaagacgtcactgattatttaagagaaaatgatgtaacacatcacgtatcttatgttgcttctaaagaaccagtgcgttcatttgcagtgaaaatacaaaaagaattagctgctaaaaaaggtatcgttatggatggccgagatattggtacagttgtattaccagatgccgaattaaaagtttatatgattgcatctgttgctgaacgtgctgaacgtcgacaaaaagagaatgagcaacgtggcattgaatcaaatttagaacaattaaaggaggaaattgaagcacgagatcattatgatatgaatcgtgaaatttcgccattacaaaaagccgaagatgctattacacttgatacaactggcaaatctatagaagaggtaacaaatgaaatattatctctactttaa

SEQ ID NO: 5946 - DNA, 969 bp, Staphylococcus epidermidis
atgaaacgtctacttatcatacatactggtggcacaataagtatgtcacaagatcaaactaataaagtgataacgaatgaagaaaatccaatatcacaacatcaaaatatcattagtcaatatgcagaggttgacgaaatcaatcttttaaatataccctcgccgcatatgacaatttcgaatgttgtgcgattaagagacgaaatcattacatattctaaagaaaatatatatgatggatttgtcattactcatggaacagatacacttgaggaaacagcttttttaatagatttattaattgatattcaagagcctatagtaattactggagcaatgagatcatccaatgaaattggttccgatggtctctataattttatttctgctataagggttgcttcttcatctgaggctaatcataaaggtgttatggtcgtatttaatgatgagattcacactgctcgtaatgtgacaaagacacatacttcgaatattaatacatttcaaagtcctaatcaggggcctctaggtgtacttaccaagaatcgagtacaattttatcatcatccttacagacaaactacctaccaatatatcgatgtaaatttacgtgttccacttgtaaaagcatacatgggtatggaagatgatgtactatcattttattcacaacaacacgttgatggtatagtcatcgaagcactaggacaaggtaaccttccaaaaagttgtcttaatggactacagcaatgtctaaagaaaaacattcctctagttctcgtatctagatcattcaatggtattgttagtcctgtatatgcttatgaaggtggtggcgcagatttgaaaaataatggtgttattttttcgaacggtttaaatggaccaaaggcaaggctaaaattactagttggtttgagtcaagacatgactcaaaatcaattagagcgatatttcgaagagtaa

SEQ ID NO: 5947 - DNA, 987 bp, Staphylococcus epidermidis; identical to SEQ ID NO: 3281

SEQ ID NO: 5948 - DNA, 1419 bp, Staphylococcus epidermidis
gtgattgaattaattaaaatggaagggatgatagttgtgtctaataataattttaaagatgatttcgaaaagaatcgtcaatctattaatccagacgaacatcaaacagaattaaaagaagatgataaaaaaaatgaaaataaaaaagaagctgactctcaaaacagtttatctaataactcaaatcaacaatttcctccgagaaatgcccaacgacgaaaaagacgcagagagacagcaactaatcaaagcaaacaacaagacgacaaacatcaaaaaaatagtgacgctaaaactacagaaggttcattagatgaccgttatgacgaagcacagttacagcaacaacatgataaatcgcaacaacaaaataaaactgaaaaacaatcacaagataatagaatgaaagatggaaaagatgcagctattgtaaatggaacatctgagtcaccagaacataaatcaaaatcaacacaaaatagacccggccctaaagctcaacaacaaaagcgtaaatcagaaagtacgcaatcaaaaccgtcaacaaacaaagataaaaaagcagctacaggtgctggaatagctggtgcagctggtgttgctggtgcagcagaaacatccaaacgtcatcataataaaaaagataaacaagattctaaacactcaaaccatgagaatgacgaaaaatctgttaaaaatgatgaccaaaagcaatctaaaaaaggcaaaaaagcagcagtcggtgctggcgcagctgcaggagttggtgcggctggtgttgcgcatcataataatcaaaataaacatcataatgaggaaaaaaattctaatcaaaacaatcagtacaatgaccaatcagaaggtaagaaaaaaggtggtttcatgaaaatcttgttaccacttatagcagccattcttattctaggtgcaatagcaatattcggtggtatggctctaaataatcacaacgatagtaaaagtgatgaccaaaaaatagcgaatcaaagtaagaaagactcagataaaaaagatggtgcgcaatccgaagataacaaagacaaaaaatctgatagtaacaaagacaaaaaatctgattctgataagaacgcagatgatgactctgataatagttcctcaaatcctaacgctacttcaactaataataacgataatgtagccaataataactcaaattatacaaaccaaaatcaacaagataatgcaaaccaaaatagcaataatcaacaggcaactcaaggtcaacaatcacatacagtatacggtcaagaaaacttatatcgtatcgccatacaatattatggagaaggaactcaagctaacgtagataaaattaaacgtgcgaatggattaagcagtaataatattcataatggtcaaacattagttattcctcaataa

SEQ ID NO: 5949 - DNA, 1380 bp, Staphylococcus epidermidis
ttgctgaaagataatttaaaggaatggtttggttttgatgaatttaaagaggggcaagaagaaattattgatagtgtccttcatggaaggcatacacttggaattttaccaactggtagcggtaaaagcttatgttatcaactccctacatatatattagaaaaaccgacattaattatatcaccactcatttcgcttatggatgatcaagttatgcaaatgaagttaaaaggtgaaacacatgttgcatgtgtacattccggcatggacgaagtagaaaaaagagacaatattaaacgactaagtaaaagtcgatttatttatttaagtccagaatatatactgcaacctcataattttaagtacatcgctcatatcaactttggattaatagtattagatgaagcgcactgtttatcagagtgggggtatgattttagacctcactatgctttagttggtaaaattattcatcattttaattcagcaacagtgttagcactaacagctacagcaccacctcaattagaaactgatttatctcacattttatcactcaaattaaatgtagttcaaaaaagtatgaatcgagaaaatattagcttacaacactataattttaatgatgatgaggggaagattgaatggctgttaccatttttatctaattctgggcctacaattatatatgtttcttctaaaaaaagatgtttagaactagctcaaatgatttatgactcaggatatctaacaggtatatatcatggagatttaagttatcaggaacgccaaacagttcaacaacagttttttaataatgacatccccgttatagtagcaacaagtgcttttggaatgggaataaataaaaaagatattcgtacagtcatacattttcatttatcatcttcaccatctaactatttacaagaaattggtcgtgctggtagggatggtaaacaaagtcaagccattagtttatttcaacctgatgatagttttattctagaaacactactattcactgatattatcacagatgacgatattacaatgtttgagacgggaaaccacttaccagatgaaaaggaaaaaattttaagtactttaaatatacaattcacatttagccaacttaaagatatatttcatcaatcatatcaacgtaagcgactaggttatatgagaatgatgggctatactaatttagatcaatgtcgacgtaaatacttactagaattttttggcgaacatcctcaaagtccaaaacaatgttgtgatcaagattcaagattagagcctattcagatattgaatcgtaaaaaggtgaaaagaaaactaagttttaatgaaaaattatataatttgttcgaaacctag

SEQ ID NO: 5950 - DNA, 963 bp, Staphylococcus epidermidis
ttgtacaatatactatcatacgctatgagtcatgcatttaactacaaaaccaataaaagtatctataatattttaacaggcaagaagtcacaccaaacgtttttcgatgcgtcaagccaacaacttttgtcattatatcatagtttacctaacttaaagtattcaacttttgagcaatttatactccaaaaggatgattttaaaaaatcaattcaagtaaaaatacatccacaatacacttatgatagtctcactcaaacctttagttgcatacaattacttatccaaacgttatctcatacacgcaaggagtcaaatacatttattccaatcgttcaaaatacctatatccaacaaagggttaaacaactttatcatcaggtcattgaatcaaatcaagtatcaaatactatagacgaaatatatttattatttgagaatttaaataataaatataaccatacatttcttcattattatttacaaggatatgaggaatccatgtatactagacaacaaataagtttaattgagggtataccacaatcagaattatttgaacgagaaatgaatgaactgattgacatattgaatcaattaaaagattcaacgaaatatccaatactttctcaagctatcattctttcaccattactaacaaatacatacttaagctatcaaaagttaaaatctggtctcaatttaaaagaaattgctcaattacaaaatgtaaaacttaacacaattgaagatcatattctagaaatgtatattaaaggttatttgatagactatacattatttataaataaaaaagatattctcgaatttataaactactatcaaaaacatcgcggtgaacgattaaaattttataaagaacattttactgattggacttactttcaaattaagttagttatagtaggaatagaaagaggtgatttaattgctgaaagataa

SEQ ID NO: 5951 - DNA, 249 bp, Staphylococcus epidermidis; identical to SEQ ID NO: 3285

SEQ ID NO: 5952 - DNA, 540 bp, Staphylococcus epidermidis; identical to SEQ ID NO: 3286

SEQ ID NO: 5953 - DNA, 1767 bp, Staphylococcus epidermidis
atgaaccgactaaatagtgttgttataaaactgtggttaactattattttaatagtagcgacagttttaattttattaagtgtttcattaatcacttttatacaatattactttacgcaagaaacagaaaatgcaattaaagaagatgccaaaagaattagttcacttgttgagaagtctcataacaaaacattagctatccaaaatagccaaacactcattgatggtgatggaccgggtggcctcattattatgaaagacatgagcgagaaaccagactcatcgtataaagacactaaaaaacaaatgtttaatgaaataaaaaagagtactaaatttaaaaaagtgtttaaagaaggtgagtatgaaactcaaaatattacaataaaaaataaaggtaattctcaatcttatcttttgctaggatacccaatgaaagctcaaaaaggtgctcaaagtcattatagtggtgtttttatatataaagatttgaaatctatcgaagatacaaataatgctattacaattattatattaataactgctattatatttactatagcaagcacaatatttgcattctttttatctaatagaataacgaaacccttacgtcaattaaaaacacaagcacaaaaagtttctgaaggggattatagtcaaatttcaactgtcgctactaaagatgaaataggtgatttatcacgtgcatttaacaacatgaacgtagaaattcaagaacatatcaaagcaatttcttcatctaagaatataagagatacattattaaactctatggtagaaggcgttctaggcattaataatcaacgtgaaatcatattgtcgaacaagatggctgatgatattatgcgtcacattgatgatttttcaaaagaatctattgaacagcaaattgaagcaacatttgaatcacaacagaatgagtatttagaattagaaattaatacaaggtactatgtatttatctccagttatatagatagaattcaaacaaatggtagaagtggtattgtcatggtcatccgtgatatgacaaatgaacataatcttgatcaaatgaaaaaagattttatagcaaatgtatcacatgaattacgtacgccaatctctttattacagggttacactgagtccatagtagacggtatagttaccgaaccagatgaaatacgtgactcattagcaatcgttttagatgaatctaagcgacttaatcgtttagtcaatgaattactaaatgtagctcgtatggatgctgaaggattatcagttgagaaggaattacaacctattcaacaccttcttgataaaatggagtctaaatatcgcatgcaaagtgaagaattaggtttaacaatgacgtttgattctaataatgacgaacaattatggaactatgatatggatagaatggaccaagtgttaactaatttaattgataacgcaacaagatatacacaagctggtgattctataaagatttctattgatgaagattcagatttcaatattttaacaataactgatacaggcactggtatagcgccggaacatctgaaacaagtatttgaccgtttttataaagtggacgctgctcgaaaaagaggtaagcaaggcaccggattaggacttttcatttgtaaaatgattattgaagaacacgggggacgtattgatgttgagagcgaattaggcaaaggtacttcatttattattagactacctaaatcaaaacaaattagttag

SEQ ID NO: 5954 - DNA, 726 bp, Staphylococcus epidermidis; identical to SEQ ID NO: 3288

SEQ ID NO: 5955 - DNA, 738 bp, Staphylococcus epidermidis; identical to SEQ ID NO: 3289

SEQ ID NO: 5956 - DNA, 543 bp, Staphylococcus epidermidis; identical to SEQ ID NO: 3290

SEQ ID NO: 5957 - DNA, 732 bp, Staphylococcus epidermidis
atgtatgaagtaaaactcgatgcatttaatggtccattagacttattattgcatctaattcaaaaatatgaaattgatatttatgatatccctatgaaagccttaactgaacagtacatgcaatatgttcatgcgatgaatcagctagaaattaatgttgctagtgaatatttagttatggcatcagaattactaatgattaaaagtaaattactattgcctcaaacgagcatcgaagaagatatagaagaggatcctcgtgaggatttagtaggaagacttattgagtatcaaaactataaagaatatactgaaatattaaatactatgaaagaagaacgcgatctttattttactaaacatccgacggaccttactcatttagagacaaatgaatcgtgggatcctaatcaaacgattgatttaactgaattgattgtagcttatcaaagagtaaaaaatcgagttgaacttaacactcctaaatctgtagaaattaaaaaagaaacctttacgattcaacaagctacagcacaggttaccgaacgattaaaacaacatgaatcgtttaactttttcagtttatttacatttcatgaaccggtcgaacaagttgttactcattttttggcaattttagaaatgtcaaaatcaggaatagttaatatcaaacaaactaaacaatttgatgacattgacataattagaggagtgaactatagcattggataa

SEQ ID NO: 5958 - DNA, 525 bp, Staphylococcus epidermidis
atggatcaatcattaatggattattattatcaatttcataagcatcaacattacttcctatgtcatgatattttagaagatgcttggaaatcacaaaatactttttcaaaacatgatgcagtagtaagtctcattttgtttgcaacagctaattatcactatcgtcgtgggaatttaaaaggcgcattaaaatcttttgaaaaagctttattaactattaaccacgctaaagatgacactcaattacaccttaatatcaatgaatttaaacaacttattgtgaaaatgattgaagcagtaaaattacaaaaacaatttactccgttacaattacctattgaaccagagtttcagacacttattaaacgtaaatatccggattatttgtttacctctcaaataattaaggaaccttatattgttgatcatcatattaaacgtgacagaactgaagtgataaaaaatagagaacgtgctctattccatagacagtatcgaaacaaaagcaataaaaaagaccagtaa

SEQ ID NO: 5959 - DNA, 888 bp, Staphylococcus epidermidis
atgaatactatcattgaagaatatttaaatttcattcaaattgaaaaaggattaagtaacaatactataggagcgtatcgaagagatttaaaaaaatataaagattatcttgaagataacaagatttcacatatcgattttattgatagacaaattatccaagagtgtcttggacaccttatagatatggggcaatcttcaaaatctctcgcaaggtttatttctacaataagaagctttcatcagtttgcattacgcgaaaaatatgctgctaaagacccaactgttttaattgaaacacccaaatatgaaaagaaattaccagatgtgcttgaaatagacgaagtaatagcattactggaaacgcctgatttaactaagaataatggatatcgtgatcgtacgatgttggagcttttatacgccacaggtatgcgtgtaactgaaattattcaattagatgttgaagacgtaaacttaatgatgggatttgtaagagttttcgggaaagggaataaggaaagaatcgttcccttaggagataccgtcatcgaatatttaactacatatattgaaaccgtaagacctcaattactcaaacaaaccacaactcaagcgctatttcttaacatgcatggaaagtctttatcaagacaaggcatttggaaaatcattaaacaatatggtttgaaagctaatatcaataaaacgcttacaccacatacattacggcattcatttgcaacacatctcttagaaaatggtgctgatttaagagccgtacaagaaatgttaggtcactctgatatttctacaactcaactttatacacatgtatctaaatcacaaattagaaaaatgtatacgcagtttcatccaagagcttag

SEQ ID NO: 5960 - DNA, 450 bp, Staphylococcus epidermidis
gtggaagaacgattaaatcgcgtgaagcaacaattacaacaatcttcatataaattgactccacaaagagaggcaactgttagagtattaattgaaaatgaaaaagatcatcttagcgcagaagatgtgtacttaaaagtcaaagataaggctccagaaataggattagctaccgtttatagaactttagaattgctagctgaaataaaagtgctagataaaataaattttggtgatggtgtagctcgttttgatttaagaaaagaaggagccaagcatttccatcatcatcttgtttgtatggaatgtggtaaagttgaagaaattgaagaagatttattacctgaggttgaaaatcgtgttgaaaatgagtttaatttcaagattttagatcaccgtttaacgtttcacggtgtatgttctgaatgccaagccaaaaataagcaataa

SEQ ID NO: 5961 - DNA, 543 bp, Staphylococcus epidermidis
atgagattaaacgaaaaaacaatcgatagaacagttatatataatggtagtattattgatttagaagtacatgatgttgaattacccgatggtagcacatctaaacgtgaacttgtatttcatcatggtgcggtggcagtgtgtgcaataactcctgaaaatgaagttttattagttaaacaatttcgtaagcctgcagatcaaccacttttggaaattcccgcaggcaaattagaaaagggtgaagatcgtaaagaagcggctattagagaactacaagaagaaacaggatatattgcttcagatttgcaatttgtcactaatatgtatgggtctcctggattttcaagtgaaaaactttctatatacttcacagaccaattaacggttggagaaaccaatttagatgatgatgaatttgtggagcttcacaaagtacctttaagtcaaatcgattcattgttaaaagataataaaattgaggatgccaaaacaatcattgcattgcaacatctattattaaattataatcattctaaataa

SEQ ID NO: 5962 - DNA, 909 bp, Staphylococcus epidermidis
atgcaaaaaaatattctaaaaagtggcatcgaaatttctgaacttgggttaggttgcatgagtttaggcacagattataaaaaagcgcaaccaattattgaaagtgcaattgataatggtattacgtattttgatactgcagatatttacgatcaaggagttaatgaagaaattgttggtaaagccttaaaaaaatatcaaaatcgtgatgacatcgttatcggaactaaagttggaaatcgattaactgacgatggacatatgacgtgggatccttcgaaaaaacatattaaagaaagtgttaagggatcattgaaacgattaggattaaaccatttagacttatatcaattacatggcggaacaatagatgattctctagacgaaactattagtgcatttgatgaattaaagcaagaaggatatattcgtgcatatggaatttcatctatacggcctaacgtgatagactattatcttaaaaatagtcaaattgaaacacttatgtcccagtttaatttaatagataatcgccctgaaagtcttattaatgacgttcatgataagcaagttaaaattctagcacgtggccctgtatttaaaggtttattaacttcaaaaagtgttgatgttatagatgaaaaatttgaaaacggtgtgttagattacactcaagacgaattaggtagcacgattgcttctattaaagaattggaaagtaatttaaccgcgttatcatttaaatatttaacttctcatgatgctatggggtcaattattgtaggagctagtagcgttgaacaacttgaagagaatgtctgcaattattataaagaaatcagtttagatcaaatcaaatccgcacgtaatagagttaaagatattgaatatacacaacatttgaaataa

SEQ ID NO: 5963 - DNA, 759 bp, Staphylococcus epidermidis
gtgataggtaaacactttattataactggagcaacgagtgggttaggttttgcaataaccaatgaattacttcaaagaggggcccatgttactatacttgcaagaaatatagataagttcaatcgaatcaaagaaaactattttaaacctgaacatatcaatgtgattaaatgtgatttaatgcaacgaaaagatattgaatcattacaaaaatttttaaatacacctataaatggtttcatctacagttcaggtgttggatattttaagtctataagtgagcattcaactcgtgaagtagtagaaacttacgaggttaatcttacaaattttaatttgttatacaaagtgattcaaccacaattagtaaaagcagcatatatcgttggtatatctagtcaagctgctcttgtttcacaggctaatgcggcacattacggtgcatcgaaagcagggtttagcgccgttcttaatgcattgagattagaacaaccggaattaaaagtgctcaatgtacagcccggtccaatagatacaccattccaaaaaaacgcagatcctactctaaagtattttaaaaattatagacacatgatgatacaacctcaacaacttgccaagcaaatagtggaaggaataatactaaataaaattgaaattaatcaaccatcatggatgcaaataatgcttaaattttatcaattatgtccacgtacactagaaaaattatgtccaaatctatttaaaaataaagtttaa

SEQ ID NO: 5964 - DNA, 816 bp, Staphylococcus epidermidis
atgaaacttgtattttatggtgctggtaatatggcgcaggcaatttttactggaattattaattccaacaatttaaatgcaaatgatatttatttaactaataaatccaatgaacaagcattaaaaagctttgcagaaaaattaggggttaattatagttatgatgatgaagcattactcaaagatgccgattatgtatttttaggtacaaagccccatgattttgaaaatttagctaatcgtattagagaacacattactaatgataataggtttatttctataatggcaggtttatctattgattatattcgtcagcagcttaataccaataatccattagctcgtattatgccaaatacaaatgctcaagttggacattcggttactggaataagtttttcaaataattttgatcctaaatctaaaaatgaagtggatgaattaatcaatgcatttggatcagttatagaagtctccgaagaacatctacatcaagttactgcaattacaggaagtgggcctgcatttttatatcatgtatttgaacaatatgtaaaagcaggtacagaattaggtttagaacgaaatcaagtcgaagaatctatacgcaatttaattattggaacaagtaaaatgattgagcgttcagacttaagtatgtctcaattaaggaaaaatattacatctaaaggtggtactacacaagctggacttgatgcactatctcaatatgatattgtatcgatgtttgaagattgtttaggtgcagctgtgaatagaagtatggaattatcacataaagaagatgaataa

SEQ ID NO: 5965 - DNA, 921 bp, Staphylococcus epidermidis
atggaagttacatttttcggtacaagtgctgggttaccgacgaaagagagaaacacacaatccattgctttaaatctagaaccatattcaaattcgatatggttatttgatgtgggcgagggaacacaacatcaaattttaagacactctattaagttagggaagatagatcatatttttataacacacatgcatggtgatcatatttttggtctccctggacttttaacaagtcgttcgtttcaaggtggagaaaataaaccccttactattatagggcctaaaggtattcaaaattacatagaaacatctttacaactttctgaatcgcatttgaattatccgattacctatatcgaaatcaatcaacaattagcgtatcaccacaatggttttactgtacaagctgaaatgcttaaccatggcataccttcattcggatatcgtattgaagccccaatcacgcctggtacaatcaatgtagaggccttgagaggtattggactagagcctggtccaaaatatcaggaagtcaaattacaagaaacgttcgaatataaaggattaatttacaattcggatgattttaaaggtaaagctaaacctggtccaattatcagtatatttggtgatacaaaaccgtgtgaaaatgaatatgaattagcaaagaactcagatttaatgattcatgaagcaacttacattgaaggagataagaaacttgctaataattaccatcatagtcatatagacgatgtatttaatctaattaagcaagctaatgtaaataaaagtcttatcactcatatcagtaacagatataacattgatgaagttacatcaatatacaatgagttatcccttgatcaaacttctccacatttttatttcgttaaagattttgatactttcaaaatataa

SEQ ID NO: 5966 - DNA, 1485 bp, Staphylococcus epidermidis
ttgagtactaaacaaaaacacattccctgtttgattacaatattcggtgccacaggagatttgagtcatagaaagctatttccttctatattccatttatatcaacaagacaatttagatgaacatattgctattattggtataggacgtcgcgattataataacgaacaatttcgcgaccaagttaaagcgtcaattcaaacttatgttaaagatacagatagaattgatgagtttatgacgcatgttttttatcataaaactgacgtgagtgataaagaaagttatcagtcattacttcaatttagtgagcgactagattcagaatttgctttaggtgggaatcgtctgttttacttagcgatggcaccacaattttttggagtgatctcagattaccttaaatcttctggtcttactcaaactacaggatttaaacgcttagttatagagaaaccatttggcagtgatcttaaatctgctgaatcattaaataatcaaataagacgttcgtttaaagaagaagaaatttatcggatagatcactatcttggcaaagatatggtgcaaaatatagaagttttgcgattcgcaaacgcgatgtttgaacctttatggaataataaatacatttcaaatattcaagttacatcatcagaagtattaggtgtcgaagatcgtggtggctactatgaatctagtggtgcacttaaagacatggtacaaaatcacatgctacagatggttgctttacttgcaatggaagcaccgataagtttgaatagtgaagatatacgtgcagaaaaagtcaaagtacttaaatctcttagacaattaaaaccagaagaagttaaaaagaatttcgtgcgtggtcaatatgatcaaggcaatatagatggtaaacaggttaagtcatatcgagaagaagatcgcgtagcaaaggattcggttacaccgacatttgtatcgggtaaattaacaattgataactttagatgggctggagttcctttctacattagaacgggtaaacgtatgaaatcaaaaacgatacaagtcgtagtagaatttaaagaagtacctatgaatttatattatgaaactgacaatttactagattctaatttgctagtcattaatattcaaccaaatgaaggaatttcattgcatttaaatgctaaaaagaacattcaaggaattgatactgagccagtgcaattatcatacgcaatgagtgctcaagataaaatgaatacagttgatgcatatgaaaacttattgtttgattgtcttaaaggtgatgcgactaattttacacattgggaagaattaaaatctacttggaaatttgtagatgcaatccaagatcaatggacaatggttgaaccatgtttccctaactatgaagcgggtacaaatggacctcttgaaagtgatcttttattaagtcgtgatggaaatcattggtgggatgatatccactaa

SEQ ID NO: 5967 - DNA, 882 bp, Staphylococcus epidermidis
ttggacgttatcaagcaaatacaacaggcaattgtatatattgaggatcgtttgttagagccttttaatttgcaagaattaagtgattacgttggtctttctccgtatcatttggatcaatcttttaagatgatagttggtcagtccccagaggaatatgcgcgtgcacgtaaaatgacaatagcagcaaacgatgtagttaatggagctagtcgattaatggatgttgctaagaaatatcgttatgcgaattctaatgatttcgcaaatgattttagcgattttcatggtatctcacctattcaagctacaacaaaaaaagatgaactaaaaatacagcaacgactgtatataaaattatcaacgactgaaaatgcaccctatacatacagacttcaagagactgatgatatttctttagttggctattcaagatttattcctactgagcaattatcaaatccatttaatattccagactttttagagaatctattagtagatggttatattaaagaacttaaacgttataatgatacgagtccgtatgaattatttgtagtcagctgtcctctggaacaaggtttagaaatatttgttggtgttccgagtgaacgttacccttcacatcttgaaagcagatttttacctggtcgccattatgcattgtttaatttacaaggtgaaattgattatgctacaaacgaggcttggtattatattgagtctagcttgcaacttactttaccttatgagcgaaatagtttatatgttgagatttatccacttgatatttcatttaatgacccattcactaagattcaattatggttgcctattaaacaagaaatctatgatttagatgaaggttatcaaaattaa

SEQ ID NO: 5968 - DNA, 1656 bp, Staphylococcus epidermidis
atgaaaagaaattggtggaaagaagcagttgcatatcaagtatatccacgaagttttaatgatagtaatggagatggaataggtgatctacctggattaattgaaaaattagattatctagaaaatttaggaatagatgtcatttggttaagcccaatgtatccatcaccaaacgatgataatggatatgatattagtgactacaaaggcattatgagtgaatttggtacaatgaacgattttgatcaattgttatcaagcatacatcaaagagggatgaaattaatattagacttagtggttaatcacacatcagatgaacacccttggtttattgaatcaaaatctagtaaaacaaatgcaaaaagagattggtatatttgggcagatcctaaaccggatggatctgaacctaataactgggaaagtatctttaatggttcaacttgggaatttgacgaatcgactaagcaatactatttccatttatttagcaaaaagcagccagatttaaattgggaaaatccagatgtaagacaagctgtgtttgaaatgatgaattggtggtttgaaaaaggtattgacggatttagagttgatgccattactcatattaaaaagaattttgaagcaggagatttacctgtacctgatggcaaaaaatttgctccagcatttgatgtagatatgaatcagccaggaatacaagaatggctccaagaaatgaaagataaatcgttaagtcggtatgacattatgactgtaggcgaggctaatggtgttactcctaatgatgctgaagaatgggtaggagaagaaaatgggaaatttaatatgatattccagtttgaacatcttggtttatggagtactggcgatacgaaattcgatgttaaatcctataaacaagtcttaaatcgttggcaaaagcaactagaaaatgtaggttggaatgctttatttatcgaaaaccatgatcaaccacgtcgtgtttcaacctggggtgatgataaaaattattggtatgaatcagcaactagtcacgctactgcctactttttacaacagggcacaccttttatttaccaaggtcaagaaataggtatgactaattatccatttgaaagcattgaaagtttcaacgatgtcgcagtgaaaactgaatatcaaatagtcaaaaaagaaggtggagatgtcaatcaattactagataaatataaaatggaaaaccgagacaatgcaaggactccaatgcaatggaataattctatcaatgctggattcactactggtaagccatggtttcatgtaaaccctaactatacagaaattaatgttaaacaacaactaaatgataagttttcgatactttcttattataaagcgttaattcaactaaaaaaatctgatttgatttacacctacggtaagtttaatatggtcgatgctgaaaataagcaggtttttgcatatacacgcacatttaaaaacaatactgtattaattgtagccaatctcacaaatgaagtatcagaactaaacctatcttttgaattagatatttcatctgtagatataaaattgcataattatcacttaaatgatataaatttagaccatattaaaccttatgaatcattcgtcgttgaaatataa

SEQ ID NO: 5969 - DNA, 1407 bp, Staphylococcus epidermidis
atgacacaacaaattggagtagtgggtttagcagtaatggggaaaaacctagcttggaatattgaatcacgtggttatagtgtttctgtttataaccgatcaagacaaaaaactgatgaaatggttaaagaatcgcctggaagagaaatttacccaacatactcattagaagaatttgtagaatctttagagaaacctcgtaagattttattaatggtaaaagctggacctgcaacagatgccactatagatggtttattacctttattagacgatgatgatattttaattgatggtggtaatactaattaccaagatacgattcgtcgaaataaagctttagctgaaagtagtattaactttattggtatgggagtttctggtggagaaatcggcgcactcacgggcccttctttaatgccaggtggtcaaaaagatgcttataacaaagtcagcgatatcttggacgcaattgctgctaaggcacaagatggtgcttcatgtgtaacttacattggccctaatggtgcaggacattatgttaagatggtacacaatggtatcgaatatgcagatatgcaattaattgctgaaagttatgcaatgatgaaagatttattaggcatgtcacataaagaaatttctcaaacttttaaagaatggaatgctggagaacttgaaagttatttaatagaaattacaggtgatattttcaataaattagatgatgacaatgaagcacttgtagaaaaaatattagatactgcaggtcaaaaaggcacaggtaaatggacttcaattaacgcactagaattaggtgttcctttaacaatcattacagaatctgtatttgcgagattcatctcatcaattaaagaagaacgtgttactgcttctaaatctttaaaaggacctaaagcacattttgaaggcgataaaaaaacattcttagaaaaaatacgtaaggcactttatatgagtaaaatatgctcatatgcacaaggtttcgctcaaatgagaaaagccagtgaagataatgagtggaatttgaaattaggcgaattagcaatgatttggcgtgaaggttgtattattcgtgcacaattcctacaaaaaattaaagatgcctacgataataatgaaaacttacaaaacttattattagacccttacttcaaaaacattgttatggaatatcaagatgcactacgtgaagtagtagctactagcgtgtacaatggcgtgccaacacctggtttttcagcaagtataaattattatgatagttatcgctcagaggatttacctgcaaacttaattcaagcacaacgtgattactttggcgcacatacttatgaacgtaaagaccgtgaaggtattttccatacacaatgggtagaagaataa

SEQ ID NO: 5970 - DNA, 1125 bp, Staphylococcus epidermidis
atgattaatcaaaaacgtttattagattgttttctagaattagtgcaaattgattcggaaacagggcacgaagaaacaattcaaccttatcttaaagatacgtttgaaaaaatggggctccatgttattgaagatgaagcttcaaaaaataatagattaggtgctaacaatcttatttgtacgttaaaaagtaatataagtcatcagaatgtgccgaaaatttattttacaagccacatggatactgtcgttccaggaaaaaacatccaacctgtagtaaaagaagatggatacgtttatagcgatggaactacgatactcggggcggacgataaagccggtcttgcggcaataattgaagcgattaaacaaattaaggaatcaaatttgccacacggacagattcaaataattattaccgtgggagaggaatctggattagtaggtgctaaagcaatagatactcgccttcttgatgcagatttcggctatgctgtagatgcaagtaaagatgttggaactactgttatcggtgctccaactcaagtaaagatttatacaactataaaagggaaaaccgcccatgcaagcacacctaaaaaaggtattagcgcaataaatattgcatcaaaagcaatcagtcgaatgaaattgggacaagtcgatgcattaacaacagccaatataggtaaatttcacggaggttctgccactaatattatagctgatgaagtcactttagaggcagaagcacggtcacatgatgatcaaagcattaataaacaagtgaaacatatgaaagagactttcgaaacgacagcaaatgaattaggcggtcaagctgaagtgttagttgaaaaaagttatccgggatttgaagttagtgaagctgacaaagtaacacaatatgctatatctagtgcattagccctcggtctaaaaggtgatacttgtattgctggtggtggttcagacggcaacatcatgaatcaatatggcattccttctgtgattttaggagtaggatatgaaaacatacatactacttcggaaagaatagcaataaaggatatgtatatgctcacaagacaaataataaaaattattgagctagtagctgaataa

SEQ ID NO: 5971 - DNA, 978 bp, Staphylococcus epidermidis
atgcttaagttaaatccctataaaataggatttagaactatcaaaactgctgtgggaatgactttaggagtaatcatatgtaaacttctaggcttagataattatgcatccagtgctattttagttgtattgtgcataaagcacactaagatgcattcagtacaagcaattttatctcgactagtttcatgtttactcatattatttttaggttcagcaatttttagtcttttaggacaacatgcatttgttttaggtttaattgttttgttgtttattcctttgacagttgttctaaatgtgcaagaaggtgttatcactagttgtgtcatattattgcatgtctttaacgccaaagctattaatgggcaccttattttaaatgaaataatgctattaatagtgggcttaggtatagcatttctaatgaacttaatgatgcctagtttagataagaaattgaatcattttaagcaggatatagaaaatcaaataactgaaatatttaatatttttagtcaagcctgctcaatgcataatgatcatttaaatattaaatttgattcattacttttaaatattaaaaaagcaaaatcacttgcttttagagatgttaaaaatcactttgtacgaaacgaaaattcattttatcattattttgatatgagagaagaacaagttgaattattaaaacgtatgacatcgttattagaaagaataaatacagatgatcctatactcgaaaagatttcacaattaatgtatgaaattggaagtaacgtaaatagcaatgattatacggctctaagactacattcactttatgaaatacgtttatctctcgatgatttaccattaccgactactcataagactttaaattcccgagcacatattattcaaattctaaatgaactagaagaatacttaaatattaaatctcaatttggttctttaaaattgcatagtgaaatataa

SEQ ID NO: 5972 - DNA, 438 bp, Staphylococcus epidermidis; identical to SEQ ID NO: 3306

SEQ ID NO: 5973 - DNA, 1320 bp, Staphylococcus epidermidis
ttggatataaaaatgcctaagcttggtgaaagtgtgcatgaaggtacgattgaacaatggttagtatcagtaggagatcatgtagatgagtatgaaccattatgtgaagttattacagataaagtaacagctgaagtgccttcaacaatttctggaacaataacagaattagtggttgaagaaggacaaactgtcaatattaacacggtgatttgtaaaatcgattcggaaaatggtcaaaatcaaacagaatcggcaaatgagtttaaggaagaacaaaatcagcattctcaatcaaatataaacgtgtcacaattcgaaaataatcctaaaactcatgaaagtgaggtgcatacagcctctagtcgcgcaaataacaatggacgattttcaccagttgtctttaaattagcttctgaacatgatattgatttaacacaagtcaaaggaactggttttgaaggtcgtgttactaagaaagatattcaaaatattattaacaatccaaacgatcaagaaaaagagaaagaatttaaacaaacagataaaaaagatcattcaacgaaccatggtgactttttacatcaatcctcaactaaaaacgaacactcaccattatcaaatgaacgtgtcgtaccagttaaaggtattagaaaagctatcgcacaaaatatggttactagtgtcagcgaaataccacacggttggatgatggttgaagctgatgcaacgaatttggttcagactagaaactatcataaagctcaatttaaacagaatgagggttacaatttaactttctttgcgttttttgtaaaagctgttgcagaggctttaaaagtaaatccaatactcaatagtacatggcaaggagatgaaattgttatccacaaagatattaatatctctattgctgttgcagacgatgataagttgtatgtgccagtcattaaaaatgcagatgaaaaatcaattaaaggtatcgcgcgtgaaatcaatgatttagctactaaagcaagattaggaaaattagcacaaagtgatatgcaaaacggtacatttacggttaataatactggttcttttggttctgtttcttcaatgggaatcattaatcatccacaagctgccattttacaagtagaatcagtcgttaagaaacctgtagttatagatgatatgattgcaattagaaatatggttaatttgtgtatttcaatcgatcatcgtattctcgatggtgttcaaacgggaaaatttatgaatcttgttaagaaaaaaatagaacaatattctattgaaaacacttctatttattaa

SEQ ID NO: 5974 - DNA, 984 bp, Staphylococcus epidermidis
atgactaaattatcatacttagaagctatacaaaatgcacaagacttagcactaaatcattttagtaatgcatttatacttggcgaagatgtaggaaaaaagggtggcgttttcggcacaaccaaaggattacaaagtaagtatggtgatgaacgtgtaattgatacacctcttgcggaatcgaatattattggtactgctattggtgcagcaatgctaggtaagagacctattgccgaaatacaatttgcagatttcattttgcctgctacaaatcaaattataagtgaagcagctaaaatgagataccgttcaaataatgactggaattgcccactgactatcagagcaccttttggtggtggagttcatggtggattatatcattcacaaagtgttgaaagcatttttgcttcaactcctggattaactattgttattccttcatcaccttatgatgctaaaggtcttctattgtcctctatagagtctaacgatccagtcttatactttgaacataaaaaagcatatcgttttctaaaagaggaagttcccgaaacatattatactgtacctctaggtaaagcagatgttaaaaggccaggcgaggacatcactgtattttgttacggattgatggtgaattactgtttacaagctgcagatattttggcaaatgacggcatcgatgttgaagtagtcgacttaagaacagtttatccactagataaagcaactatcattgaacgctctcaacgtactggtaaagttcttcttgttactgaagataatctagagggaagcattatgtctgaagtatctgcaattatagctgaaaactgtctgttcgatttagatgcgccaatcatgcgattagctgcaccggatgtcccatctatgccattttcaccaacattagaaaatgaaattatgatgaacccagaaaagatacaggacaaaatgcgtgaactcgcacaattttaa

SEQ ID NO: 5975 - DNA, 999 bp, Staphylococcus epidermidis
atgatagattacaagtcagcaggccttacagaagaagacctcaaaaaaatatataaatggatggacttaggaagaaaaacagacgaaaggctatggttactcaatcgtgcaggtaaaattccatttgttgtcagtggtcaagggcaggaagcaactcaaattggtatggcatatgcaatgcaaaaaggtgatatctcatcaccttattatcgtgatttagcatttgtcacttatatgggaatttctccattggatactatgttatcagcttttggaaaacgtgatgacattaactcaggaggtaaacaaatgccttctcattttagtcacaaagaaaaaggcattttatctcaaagttctccagtagccactcaaataccacattctgtcggtgctgcattagcacttaaaatggataacaagccaaatattgctaccgcaacagttggagaaggcagttcaaatcaaggtgactttcacgaaggtatgaactttgctgcagttcacaaattacctttcgtctgtgtaataattaacaataaatatgcgatatctgtaccagattcactacaatatgctgctgaaaagttatcagatcgtgcattaggttacggtatgcatggaatacaggtagatggaaatgacccaattgcagtatacaaagcgatgaaagaagcaagagaacgagcgctagcaggtgaaggtccaacattgatagaaactgtcacttcacgtatgacaccacattcatctgatgatgatgatacatatcgtacaaaagaagaaagagacctattgaaacaagaggattgtaatataaaatttaaaacggccttactcgatcaaggcatcataaacgaaaattggttgagtcaattggaaaaagagcataaagaactcattaatgaagctactaaatctgctgaagcagcaccatatccttcagaagaagaagctttgacatatgtttatgaagagggaggtcaacgaaatgactaa

SEQ ID NO: 5976 - DNA, 1422 bp, Staphylococcus epidermidis
atgtcagaaaaacaatacgatttagtcgtgttaggtggtggtacggcaggatatgtagccgccatcagagcttctcaattaggaaaaaaagtagcgatagtagaaaaatcactcttaggtggtacgtgtttacataaaggatgtatacctactaaagcacttttaaaatcggctgaagtcaatcatactattaaaaacgcgcatacatttggaattgatgtcaatcattttaaaattaatttccctaaaattttagaacgtaaagatgctattgttaagcaattgcatgaaggcgtcaatcaactgatgaaacatcatcatatagatatttataacggtattggacgaattatgggaacatctatattttctcctcaaagcggtacaatttctgtggaatatgaagacggcgaatcagatatactccctaataaaaatgtgcttatagctactgggtcatcaccacagtctcttccgttcattaaatttgaccataaacaaatactatcgagtgatgatatcctaaggttaaatacactaccacaaagattagcaatcataggtggaggtgttattggtttagaatttgcatctctgatgaatgatttaggtgctgatgtagtagtaatcgaagcgaatgacagagttcttcctaccgagagcacacaagttgcgtcattgctaaaagaagaattaactaatcgaggcgttacattctacgaaaatattcaattgaccaaagatcattttaaccaaactgataagggtgtaactattaatatttcagatgagcccgtccaattcgataaagtacttgttgcaattggtagaaagcctaatacaaatgatattggtttaaataacactcaaattaagacttctgatgctggtcatattataacaaatgcttatcagcaaactgaagataaacatatatacgcagcaggagattgtatagggcaattacaattggcacacgtcggttcaaaagaagctatagttgcagttgaacatatgtttgattgttctcctatacctatcaattatgacctgataccaaaatgtgtttatacaaacccagaaattgcttcaattggtaaaaatttagaacaagcaaaaaaagcaggcatcaaagcaaaaagtatcaaagttccttttaaagctataggaaaggcaataattgaggatgtaacccaatcaaaaggattttgcgagatggtagttaacaaagatgacgatgaaatcataggtcttaatatgatagggccacatgttacagaattaataaatgaaatttcattgttacaatttatgaatggctcatctttagaacttggtttaacaacacatgcacatccttcattatccgaggtagtcatggaattaggtttaaaagctaatggtcaagcaattcatgtatag

SEQ ID NO: 5977 - DNA, 1677 bp, Staphylococcus epidermidis
atgttacaaaccttatcaataaaacaatttgccattattgacgaacttgatataaacttttctgacggtctaacagttatgagtggtgaaactggctcaggaaaatctatcattattgatgccattggacagttaatcggtatgagagcttcttctgattacgtcagacatggtgaaaagaaagcaattatcgaaggtatctttgatatagacgagagtaaagacgcaattaatatactagaatcattagctatagatgttgatgaagattttttattagttaaaagagaaattttcagttctggtaagagtatttgtcgtattaataaccaaactgtcactctacaggacttaagaaaagtgatgcaagaactgcttgatattcatggtcaacatgaaacgcaatctttacttaagcaaaaatatcatcttcaactattagatgattatgcagacaatcagtattcagatttacttaatcaatatcaactttcttataaccaatataaaaataaacgtaaagaattagaggaattagaatccgcggaccaggctttattacaacgattagacttaatgaaatttcaattagaggaactaaccgaagcttcactgaaagaaggcgaagtggaccaacttgaatccgatattaaaagaattcaaaactccgaaaaattaaatctagctttaaacaatgcacatcaagttctaactgatgaaagtgcaatacccgataggttgtacgaattaagcaactacttgcaaacgattaatgatatcgttccagaaaaattcgtaagattaaaagaggacattgatcaattttactatatgctagaagatgcaaagcatgaaatttacgacgaaatggctaacactgaattcgatgagcaagttttaaatgagtatgaatccagaatgaatttacttaataatttaaaacgtaaatatggtaaggatattactgaacttattgcttatcagagtaaacttgcaaatgaaattgataaaatagaaaactatgaacaaagtacatcacaattaagggaagaaattaaaacgctttataacgaagtgatagatataggaaaaaaactttctcaagaacgtaggcgtgtagcgagagagttaagggaccatattgtttctgaaatacaaaatttacaaatgaaagatgctaaccttgaaatttcgtttaaaccattagatgaacctacaattgaaggtattgaatttgtggaatttttaattagtccaaatcgtggtgaaccgcttaaaagtcttaataaaatcgcttcaggtggtgaactttcaagaattatgcttgctctaaaaagtatatttgttaaatcacgcggccaaaccgcgattctttttgatgaagttgactcgggtgtatctggtcaagcagcacaaaaaatggctgaaaaaatgcgagatattgctcaatatatacaagttatttgtatttcacacttacctcaggtagcttcaatgagtgaccatcatcttctaataagcaaggcatccaatgccgatagaactacaactcaagtcaaagaattgaaagatgaaaacaaaatagatgaaatagcacgtatgatttcaggagcaagtgtgactgagctcacgagagaaaatgcaaaagaaatgattaagcaaaatcacaatatttaa

SEQ ID NO: 5978 - DNA, 453 bp, Staphylococcus epidermidis
gtgccaaaaaagtcagtgagacatataaaaataagagagataatttcaaatgaacaaatagaaacacaagatgaactagttaaacgtttgaatgagtatgatttaaatgttacacaagctactgtttcacgagatattaaagaattgcaattaattaaagttcctgcacctacagggcaatatgtttatagtttaccaaatgatcgtagatatcatccattagagaagttgggtagatatttaatggattcatttgtaaacattgagggtactggtaatctactagttcttaaaacgcttcctggtaatgctcaatccattggtgctatacttgatcaaattgattgggatgaggtacttggtacaatttgtggtgatgatacatgcttacttatttgtcgagacgaagaagcgagtgaagaaatcaaaactcgaattttcaatttattataa

SEQ ID NO: 5979 - DNA, 867 bp, Staphylococcus epidermidis
atgaataaattaataaatataattaatacatcactgaataagtcaatacaatcatcaccattaaaaactaatttagaagaaagtatgaaatattcattaaatgctggtggtaaaagaatcagaccagtcatattattattaacactaaaaatgcttaacaaagattatcaacaaggactaaatagtgctttagcattggaaatgattcatacttattctttaattcatgatgatttaccagcaatggataatgacgattaccgtagaggaaaattaacaaatcataaagtttatggtgaatggaaagccattcttgctggtgatgcattattaacaaaagcttttgaattagtttctaatgatactaccattgaagatagtgtgaaagtaagtattataaaaagactttcaaaagcaagtggacatttgggaatggtgggtggccaagcgcttgatatggaaagtgaagggaagtcaattcgtttagaaactttagaatcaattcatgaaactaagacaggcgctttactaaatttttcagttatggctgcggtagacattgctcaagtagaacaaaatattgctaagaatttagatgaatttagtcatcatttaggaatgatgtttcaaattaaagatgatttactggatgtgtatggtgatgaatcaaaacttggcaaaaaagtaggcagtgatatagtaaatcataaaagtacttatgtttctttacttggaaaagaaggagcagaagaaaagttaaacaatcatcaatatcttgctatgaactgcttaaatcaaatttctgatcaatatgatacttctgaattaagtgatattgtagatttattctataacagagaccattaa

SEQ ID NO: 5980 - DNA, 231 bp, Staphylococcus epidermidis; identical to SEQ ID NO: 3314

SEQ ID NO: 5981 - DNA, 1338 bp, Staphylococcus epidermidis
atgactgaatatttaagtgtttctgcactaactaaatatataaaatataaatttgaccaagatcctcatctacagtcagttcttattaaaggagaattatctaactttaaaaagcattcaagcggacatttatattttaatgtcaaggacaaagaaagtgtcatcagtgcaatgatgtttaaaggaaatgcttctaagttaggctttgagcctaaagaaggtgatgaggttttaattgaagctcgcgtttctgtttatgaaagacgaggaaattatcaaatatatgttaataagatgcaactcgatggtattggtaatttataccaaaagcttgaactactaaaaaagaaattgaaaaaagaaggctattttgatcaaagtaacaaaaaactcataccaaagtatccaaagaaaatagcggttttaacagcgagcacaggtgcagccattagagacatacatagtacgattaacaatcgctaccctttggtcgaacaaattcaaatcagtacccttgttcaaggcacgcaagctagacaagatataatagaaaagattcaatatgctgattcattagatgttgatacaataatagttggacgtggtggtggttcaattgaagatttgtggaactttaatgaagaagatgttgttaaaaccatctttaattgtcaaacacctattatatcagctgtaggtcatgagactgattttacattgagcgattttgtagcagatgttagagctgcgacacctactcaagctgctgttatagcaacacctgatcaatatgagttattacaacaaattaaacagtatgaatatacattatcaagatatataaaacaatatatcgaacatcagaagaaacaacttaatcacatatcatcatattacaaatttaagcaaccgagtttattgtacgatcaacaaattcaaaaacgagatgaattagaaagacaattaaatcatctattaaatactaaagttgaaaagtcaaaacatcacctcaagttacttcaacaaagttttaattttaaaaatttaaatcagcagattactcaggaaaagcaatctatttatcaattgcattctagattgtccaaaataatgtccaataacattactaatttaaaaacagtgctaaaaaacaaattagaaagtcttaataatttaagccccaccaatacgatgcttagagggtacgcaattgtcaataaagacaatgaagtggttacaagcacacataaattgaatgaaaacgaccaaatatctttaacaatgaaagacggaagtgtcgatgcaacggttaagaaagtaaggtgtaatgatgagtaa

SEQ ID NO: 5982 - DNA, 390 bp, Staphylococcus epidermidis; identical to SEQ ID NO: 3316

SEQ ID NO: 5983 - DNA, 363 bp, Staphylococcus epidermidis; identical to SEQ ID NO: 3317

SEQ ID NO: 5984 - DNA, 1359 bp, Staphylococcus epidermidis
atgaaaaagattttaatcgctaatcgtggtgaaatcgcagtaagaataataagagcggcacacgatttaggtattcaaacagtagctatatactcagaaggtgacaaagatgcattacatactcaaattgctgatgaagcatactgcgtcggtcctactttatcaaaagattcttatttaaatataccaaatattttatctatcgctacttctacaggatgtgatggtgttcatcctggatacggctttttggctgaaaatggtgattttgctgaattgtgtgaagcatgccaattaaaatttattgggccaagctatcaatcaattcagaaaatgggaataaaagatattgctaaagctgaaatgattaaagccaatgtacctgtagtaccaggaagtgaaggacttattcaaagtatagatgacgctaaaaaaatagctaaaaaaatcggctatccagttatcatcaaagccacagcaggtggtggtggaaaaggtattcgggttgctcgtgatgagaaagaacttgaaactggttaccgtatgacacaacaagaagctgaaaccgcgttcggaaatggtggtttatacttagaaaaatttatagaaaactttagacatatagagattcaaattattggcgatacttatggaaacgttatacatttaggtgaacgtgattgtacaattcaaagaagaatgcaaaagctcgttgaagaagcaccctcaccagtattaagtgaagataaacgccaagaaatgggtaatgctgcaattagagctgcaaaagctgtaaattatgaaaacgcaggtacaattgaatttatatatgatttagatgataaccaattttatttcatggaaatgaatacacgtattcaagttgaacacccagtaactgaaatggtaacaggagtagatttagtaaaattacaactcaaagttgctatgggtgaggcgttaccttttaaacaagaagatatttccattaacggtcacgctattgaatttcgaatcaatgctgaaaatccttacaaaaactttatgccatcaccaggcaagattacccaatatcttgctccaggcggttttggagtgagaattgaatcagcatgttatactaattatacgataccaccttactatgactccatggtggcaaaacttatagttcacgaacctacacgtgaagaatcaattatgacaggcattcgtgctttaagtgaatatcttgttttaggtatcgacactacgattccattccacttaagacttctaaataatcatatttttagaagtggggaatttaatacaaaattcctagaaaagtataatattatggacgataataaccaatag

SEQ ID NO: 5985 - DNA, 468 bp, Staphylococcus epidermidis
atgaactttaaagaaataaaagaattaatcgaaattcttgatcaatctagtttaactgaaataaatattgaagataataaaggtagcgtagttaatttaaaaaaagaaaaagagactgaaatagttacaccgcaagttactcaacaaccaactcaaccgataactcatacgcataatgaaacacaacaaaagccatcacatagctctaaagatgaacaaagtagtgataatgaatacaataccattaatgcaccaatggttggtacattttataaatcaccttcaccagatgaagaagcatacgttcaagttggagataaagttacgaatgaaagtactgtttgtatattagaagctatgaaattatttaatgagattcaagccgaaacaacaggtgaaatcatagaaattttagtagaagacggacaaatggtagagtatggccagccgttatttaaggtgaaataa

SEQ ID NO: 5986 - DNA, 1131 bp, Staphylococcus epidermidis
atgatgagttatctttttaataattacaagcgtgacaatatagagtttgttgatgctaatcaaaatgaattaattgataaagataataatgtctacctagatttttcgtcaggtataggtgtgacaaatctgggttttaatatggaaatttaccaagcagtttataatcaactgaatttaatatggcattcacccaatttatacctaagtagtatccaagaggaagtggctcaaaaattaattggtcaacgagattatttagctttcttttgtaatagcggaacagaagcgaatgaggcagctatcaaactcgcacgtaaagctactggtaagtcggaaattattgcttttaaaaagtcttttcacggcagaacgtacggcgcaatgtctgcaacaggacagaagaaaattacagatcaatttggtccggttgttcctggattcaaatttgctatttttaatgattttaattcatttaaatcattaacttcaaataatactgctgctgtaattatagaaataattcaaggtgaatcaggagtactacctgctgatcctttatttatgaagcaattaaatgagtattgtaaacaaaaagatatccttataattgtagacgaggttcaaacgggcataggtagaaccggtaagttatatgctcatgaacattatcaattgtctccagatatcatcacattagctaaaggattaggtaatggccttcctattggagcaatgttaggcaaaaagaatttaggtcatgcatttggctacggttctcatggtacaacattcggtggaaatagattatcattggctgctgcaaaccaaacgctttctatcattaatgatgctgatttgctgaatgatgttcaatcaaaggggcaatttcttattgaaaacttaagaaaaagtttagtaaataaaagaaatgtaattgaagtacgtggtgtaggtttaatggtaggaatagaggtcactaatgatcctagtcaagtagtgcgagaagctaaacgtatggggttaatcattttaacagctggtaaaaatgtgattaggttattaccgccattgaccatcactaaaaaacaattagaaaaaggtatagaaatattaactgaaatcatttga

SEQ ID NO: 5987 - DNA, 738 bp, Staphylococcus epidermidis
atgaaaaacatcatcgtaattaagctcggtggtatagctatagaaaatttaaacgacgaatttatacaacaaattaatgcttggcaccttgaaaacaaaaaaataattattgttcacggtggcggccaagtcatcagtaatttattaactaaaaacaatcattcaactattaaaattgatggcatgagagtaactgctaaaaatgatttacctatcatatatgatgctttaattaacatagttggccatcaacttttagaaagacttaaagaatctaatttagaattttttcaattcaaagaaaagataaaagaacttgtaagcgccgaatttttaaataaaaatatctatggttacgttggtaaagttaaagaaatcaacacgatgctattagaaaaaatgttatcacgcgacataataccaattatcactagtttgggtgtaaatgagcaaggggagtatcttaatgttaatgctgatcatctcgctaccgcaattgctaagaaactaaaagtcgaaaaattagtatatatgactgatgtccctggtgtaattgaaaaagataaaacgcttgttactcttacaattaatgaagcaaaaacaaaaattgaaaataaaataattacaggcggaatgatacctaaaattgagagtgcaatccaaacattagaatctggtgttgaatcgattttaattgcaaataatttacaaaaaggaacaatcataaggggtgattaa

SEQ ID NO: 5988 - DNA, 1194 bp, Staphylococcus epidermidis
atgaatataattaagggaaatattgcaagtcctcttggattttcagctgatggtctgcacgctggctttaaaaagaaaaaattagactttggttggattgtttcagaagtacctgcaaatgtagctggtgtatttacaactaataaggtcattgctgcaccattaaaattaacaaaaaacagcatcgaaaaaagtagtaaaatgcaagctattgttgttaattcaggtattgctaattcttgtactggtaaacaaggggaaaaagatgcttttaaaatgcaacaactggccgcaaataaattacaaattcaacaagaatatgttggtgtcgcatctactggtgttattggaaaggtgatgccaatgtctattctaaagaatggcttttccaaactagttaaaaacggtaatgctgatgactttgcaaaagcgatattaacaacggatactcatacaaaaacatgcgttgtaaacgaagaatttggtagcgatacagtaacgatggcaggtgtagcaaaagggtcaggaatgatacatcctaatttggctacaatgctagcatttataacctgtgacgctaacatctcatcacaaacattacaacaggctttaaaagatgtggttgaagttacattcaatcaaatcactgtagatggtgacacttcaacaaatgatatggtgcttgtgatgtcaaatggatgtacaaataataacgaaattaaaaaagacagcgaagactactataaatttaagcagatgcttctatatattatgaccgatttagcaaaaagtattgcaagggatggcgaaggtgcttctaaattaatagaagtcacggttaaaggtgcaaaagaatctagtgctgcaagaatgattgctaaaagtgtggtgggttcaagtttggtaaaaaccgcaatttttggcgaagatcctaattggggtagaattattgctgctgcaggttatgctaaaacatattttgatattaatcaggtagacatttttataggtaggatacctgtattaataagatcctcaccagtaaagtacgataaagaagaaattcaagaaataatgagtgctgaagaaatatcaattcagcttgaccttcatcaagggaattgtgaaggtcaagcatggggatgtgatttatcgtatgactacgttaaaatcaacgcactatacaccacttag

SEQ ID NO: 5989 - DNA, 1026 bp, Staphylococcus epidermidis
atgcatatttctatagtaggtatcacaggctatacaggactagaattgttaagattagcacttaatcaccctcatgtaacagtttcatcgattcatgctacaaaagaagtgggagtgcaaatttctgatatattccctcatttgaaaggtatttgtgataaagaaattcaggttttcgacagtgaatttattatgacacattcagatttggtattttttgctactccgagtggcgttgcaaaagatttatccaaaaatttcgttaaaaataattttcttgtcatagacttatcaggtgaccatcgtttatctccagatgtttatctcaaatggtataaaaattcaccgtgtactgttgatatacaaaagcgttttacatatggtctctcagaagtaatgaatattagtcatcgcaatagatttattgctaaccctggttgttatgcaactgcaactgaattagcgctatatcccttaatcagcaatcatttaatccgtgttgattctataattgttgatgctaaaagtggtcttactggagctggtaaaaaattaaatcagtcatcgcattacgtaaatgtaaacaataattatgtgacgtataaacttaataaacatcaacatattcctgaaattgtacaaacgttgcagttttttaacaaaagtttacagaatattcagttttcgacatcgcttattccggttaacagaggtattgttgcaactatatacacacggcttgaaaacggagttaaaataaatcaaatagaatctacctacaagtatgtatataaaaataagcctttcataagaattaaagatggattaccacagttaaatgaagtaataggaacaaattacactgatattggttttgtttataacgaaaccacgggtgttttaacaatttcatcagttattgataatttaattaaaggtgccgctggacaagcaattcaaaacatgaatctgatgtttaatttcgacgaaactgatggtttaattttggcgcctttatatatctaa

SEQ ID NO: 5990 - DNA, 558 bp, Staphylococcus epidermidis
atgatttcagtaaatgattttaaaacaggtttaacgatttctgttgataacggaatctggaaagttattgatttccaacatgtcaaaccaggaaaaggttcagcttttgttcgttctaaattacgtaatttaagaacaggtgctattcaagaaaaaactttcagagctggcgaaaaagttgagcaagcaatgatcgagaatcgtcgtatgcaatatttatatgttgatggcgataaccatgtattcatggataacgagacatttgatcaaatcgaattacctggtgactacttaaaagatgaattaaattacttaaaagcaaatatggaagttcaagttcaatcttatgaaagtgaagttattggtgttgaattaccaaaaactgtagaacttgaagttactgaaactgaacctggaatcaaaggtgatactgccactggcgcaacaaaatctgcgactgttgaaacaggttatactctaaatgtacctttatttgtaaatgaaggtgacacactagtgataaatactagtgatggaagttacatttctagaggataa

SEQ ID NO: 5991 - DNA, 1062 bp, Staphylococcus epidermidis
atgaataaattaagaaaagttctagatatcattgaacataagcacttagatgcaatcatagtattatcagattataatagacgttacctttcagattttactggtacaagtggtgcactaatcataacacctaaaaaacaatatcttattactgattttagatatatagaccaagctacagaacaggcacaggattttgaaattataaatcgaaaatcaagtttgatttctgaaattaaatccatattagaaagagaaaatttatcaaatattggttttgaaggtcatttaatcagttatgatacttatgttgaacttaataaaggattaattactttaataagcatatctaatgaaattgataagattagagaaattaaaaataaggaagaaattcagctcattcaaaaagcggctaagatagtagatcaaacatatgaatatatcctcactcaagtaagtatcggaatgacagaacgagaaattaaagctaaattagaaagtaagatgttagaattaggcgcagatggcccttcattcgacacaatagtggcttcaggttaccgaggtgcgttaccgcatggtgttgcaagtgataagcgtattgaaaagggtgatatgattacattagattttggtgcatactatagaggatattgttcagatattacgcgcacgtttgcaataggagaaccggatccaaaactcaaagaaatatttaatatagttctaacttctcaaaagaaagctattgaacaaatcaaaccaggtatgactgcaaaagaagcagatgctatatctagagagtatatttcatctcacaactatggtgagcagtttggccattcacttggtcatggtatcggccttgatattcatgaaggtccactattatctcaaaatagttcagatgaattaaaaataaataactgtgttactatagaaccaggcatatacattgagggattgggtggcgttagaatagaagatgacattcttattacagaaaatggatgtcatgtctttactaaatgctcaaaagaccttattattttagagtaa

SEQ ID NO: 5992 - DNA, 579 bp, Staphylococcus epidermidis
atgaaaaagttaatattaatagttggtgcgagcagtttgcttatgggttgtggaagtcagaacttagctcctttagaagataaaacgactgagttacgtgatgataatcatcaattaaaacttgatattcaagaacttaatcaagaaattggcgaacataaatctaaaatagccgcccttaaacaagataaagaaaatactaaagaggcttcatctaataagttaaaaataaaaaatttaaaagcatcatctgattattacgactctattgcaaaagccattaaagattatagagatattgaatcaaaagttaataaaaataataataaagtagcgattcaaagaaaattagatgacattttaaatgatattgacggtactttcatgaaatataaagaatctgtagactctgaatcacaatctgaagaagataagaaaaaagaaaaagaaatacgtaaacttaataaagacttatcttcagcattcaatacaataaaaaaaggatatgaaacgaaagataataaaaaaatagaaaaaggtcaaaaaaaacttgcaacaataaatacaaatttaaattaa

SEQ ID NO: 5993 - DNA, 219 bp, Staphylococcus epidermidis
atgcgtaaattcatcttttatttaatattagcgatagctacatttggtttaatgatgaatcttgatgagtttttattttcgattatgaaagccattattagttttgcaattatagctttaattatttatattatatactatttcttctttttaacagaagatcaaagaaagtataaaaaagcacttcgtaaatataaaagacaaaaaagaaagcaataa

SEQ ID NO: 5994 - DNA, 831 bp, Staphylococcus epidermidis; identical to SEQ ID NO: 3328

SEQ ID NO: 5995 - DNA, 387 bp, Staphylococcus epidermidis; identical to SEQ ID NO: 3329

SEQ ID NO: 5996 - DNA, 141 bp, Staphylococcus epidermidis; identical to SEQ ID NO: 3330

SEQ ID NO: 5997 - DNA, 1509 bp, Staphylococcus epidermidis
atgattagtaaatcaagtcctttaatatttgaaagatccaaaaaagatagatatgcgtattcattaccacaaaatgacattgagaatatcagtattgcttcactcttagatgataagtatattcgtaaacataaggctgaatttcccgaagtttcagaattagatttagttagacattataccgaactatcaaataaaaatttcggggtagatactggattttacccattaggttcttgtacgatgaaatataatcctaaaatcaatgaaaaggtagcccgtatttctggttttagtgaatctcatcctttacaagaagaagaacacgttcaaggttctcttgaaattatatatagtttacaagaagaattgaaggaaattaccggtatggatgaagttaccctacaacctgctgcaggtgcacatggtgagtggactgctttaatgattttcaaagcttatcatgaaaaaaatggacaaagccatcgtgatgaagtaatagtgcctgattcagcacatggtactaatcctgcttctgcctcatttgctggatttaaatcagtaactgtaaaatctaatcaatgtggggaagttgacatagaagatttaaaaagagtagtaaacgataatacagctgcaatcatgttaactaatccaaatacattaggtatatttgaacagaatattattgaaatagggaaaatcgttcatgaagcaggaggtttattatattacgatggagcaaatttaaatgctattttagataaagtacgtcctggtgatatgggctttgatgcggtacatcttaatttgcacaaaacattcactggtcctcatggcggtggtggaccaggatcaggaccagttggagtagtagagaaattagccagttatctacctaagcctatggttataaaagataacgataggtataaatatgataatgatattccaaattcaattggacgagtaaaaccgttttatggaaatttcggcatttatttaagagcatatacttatatcagatcaatgggagccaatggtttaaaagaagtatctgaagctgccgttcttaatgcgaattatataaaatctcgccttaaaaatcactttgaaattccgttcaatcaatattgtaaacatgaatttgtattaagtggaactttacaaaaacaatatggtgtcagaacattagatatggctaagcgactgttagattttggtgtgcatccacctacaatatattttcctctcaatgtcgaagaaggaatgatgattgagccaacagaaactgaatctaaagaaacacttgattactttattgatgcgatgattcaaatcgctgacgaaacaaaaaatgatccagataaagttttagaagcaccacatacgactataattgatcgattagatgagaccactgcagcacgaaaaccaattcttaaatttgaagaacttaaggacgaaaagtataaagaacacacaaatattgattctgaagataattaa

SEQ ID NO: 5998 - DNA, 1347 bp, Staphylococcus epidermidis
ttgagtcatcgttatataccattaacagaacaagataaaaatgaaatgctaaatagtattggggcaaaatctatttccgaattatttgatgatatacctacagatattttattaaaaagaaatttaaatattgccgaaagcgaagcggagacgatattacttagaaggttaaatcgtctcgcagctaaaaatacaactaaagaaacacatgcaacatttctaggtgcgggcgtttatgatcattatactccagctgttgtcgatgcaatgatttcaagatctgaattctacaccgcatatacaccttatcaacctgaaatttctcaaggtgagttacaagcaatttttgaatttcaaacactcatttgtgaattaacagatatggatgtagcaaattcttctatgtatgatggtatgactagttttgctgaagcatgtatattggcgctaagtcatacgaaaaaaaataaaattgtagtttcaagtggactacattatcaagctttacaaattctacacacatacgccaaaactcgtgatgaatttgagataattgaagttgaccttaaaggtactattactgatttagagaaattagaacaacttatcgatgacaacacagcagctgtcgctgtccaatatcccaatttttatggttctattgaagatttagaacaaattaataactatataaaggataaaaaagctttatttatcgtatatgccaatccactttctttaggattactaacacccccaggtacattcggggcagacatagtagtgggagatacacagccttttggtattcctacacaatttgggggtccgcattgtggatactttgctacaacaaagaaattaatgagaaaagtacctggtcgattagttgggcaaactcaagatgacgaaggtaatcgtggatttgttctcacgttacaagctagagaacaacatatccgccgtgataaagcaacttctaatatttgttcaaatcaagctttaaatgcacttgcatcttcaatagcaatgtcagctttaggtaaacaaggtatttatgaaattgcagttcaaaatcttaaaaatgccaattatgccaaaaataagtttgaagaacatggttttgaggtactaaaagcacaatcttttaatgaatttgtagtcaaatttaatcaaccaataaaaaatattaatcttaaattagcagaatatggatatattggtggttttgacttaggtgaagtatctgatgattttaaaaaccatatgttagtagcagttacagagttaagatctaaagatgaaatcgatgatttcgttacgaaagcaggtgagttaaatgattag

SEQ ID NO: 5999 - DNA, 1092 bp, Staphylococcus epidermidis
atgacaacagatttgaaaaaaacacctttatatcaaaattacgttgataatggtgctaaaattgttgagttcggaggatgggcaatgcctgttcaattctcaagtatcaaagaagaacataatgcagttagatataatgttggtctttttgatgtaagtcatatgggagagatagaaattagtggtaaagatgcagaacaattcatacaatacatcctttctaatgatacaaatcttctaacaaatgataaagcaatgtatagtgcgttatgtaatgatgaggggggcatcattgatgatttagttacatataaacttaatgaaaaccactacttgcttattgtaaatgcagccaataccaataaagattatcaatggattaagaaacatagctctaattttactgtagatgtgagcaatacttcagacaaatacggccaattagctattcaaggtcctcattcaagagcattaataaatgaattagtggatatagatgtaagccatatggcaatgtttgaattcaaacagaacgtacaaatctttggtaaatctattattctttcgcagtctggttatactggagaagatggctttgaaatttactgtaagcaagaagatactaaggatatatgggagcaattattagaatacgatgttacaccatgcggtttaggtgctcgtgatacgctaagacttgaagcaggattacctttacatggtcaagatttatctgaatcaattactccttatgaaggagggatagccttcgctgctaaaccgttaattgaaaatcattttattggcaaatccgtactcaaagctcaaaaagaaaatggttccgagcgtagaacagtaggtcttgaactattaggtaaaggcattgctagaacaggttatgacgtactagatgaaaatagtaatgaaattggtttcgttacatcaggaacacaatccccatcttctggtaaatctatagcacttgcaataatagatagagatgcatttgaaatgggcaaaaaagtaattgtgcaaatacgtaagcgtcaagttgaggcaaaaatagttaaaaaaaatcaaattgagaaataa

SEQ ID NO: 6000 - DNA, 513 bp, Staphylococcus epidermidis; identical to SEQ ID NO: 3334

SEQ ID NO: 6001 - DNA, 462 bp, Staphylococcus epidermidis; identical to SEQ ID NO: 3335

SEQ ID NO: 6002 - DNA, 294 bp, Staphylococcus epidermidis
ttgtcaaaatataaatttaaagggtctttaattattgatgcattgctagccttttttatagttagtacaataacaatgattttaatacctatgttttcaaacttaaacaatcagtatcttatcaatttaaataatataaaaatcaagcaaatcatgataactagccttcaacactataaaaagaaagaactttatcaaggggttgtaatagaaaattatgaaatacaattattcaataataaaatatgtggggaggataaagcatttaatacgcgaacatgtatttcaatttaa

SEQ ID NO: 6003 - DNA, 438 bp, Staphylococcus epidermidis
ttgccaattaaaaacattaaagcatttagtttagtcgagatgatttttactttatttattatcagttgcttgttgataacaactttatggtcacgaagcctgttcgacattcagctaattgatgaagaatatgaaattaaacaattaataacaaaatttaattactataaatccaaagctattagcaacaacgaatcaataactttattattttttaataattcaaatagagtacaagtaattgaagaaaatggagataaatatagttttaaacttaataaaggcaaagtgattaatatagctaaaattcaaacattaaattttgataaaaatggaaatataaatcattttggatcgctcattttacaatataattcacatgcttatagattaatcttccatattgaaaaggggcgtttgagatttgtcaaaatataa

SEQ ID NO: 6004 - DNA, 318 bp, Staphylococcus epidermidis
atgaaaacattgaaattattgaaaaaaacacgagcatttaccttgatagaaatgcttttagtattactaataataagtttattgttaatacttataattccaaatattgcaaaacaaacatctcatattcagtcaactggatgtgatgctcaagttaaaatggtaaacagtcaaatagaagcctacgctttaaaacataatcgcaacccttctaatattgatgatttggtttcagatggttttataaaagaaggacaaaaaacatgtaaatccggtcagacaattagtattgcaaatggagaagcagttgccaattaa

SEQ ID NO: 6005 - DNA, 1068 bp, Staphylococcus epidermidis
gtgaagaagttgtcgataaatacatttaaatataagaggaataaatatcttactgaaatacaatcaatagacttactacagagattacaacagcttttaagtcacggattcactttatatcaaagttttaaatttttaaactcctattttaaatataaagaacgaacaataaataaaaagattatccaacatctacaaaacggtgctacatgttatgatattttaaaaataatagggtatccagaattagttcttcttcaaataaaatttgctgaaaactacggtaacattgaggaggctctcgttgatactgttcaatatatgaaaagaaatctgaaagctaaaaaacgactcatcaaaaccttacaatatcctgttgcattaatttctatcttcttattcatattaaccattttaaatataactgtcatacctcaatttcaacaactttatgagactatgaatgttaaattatcaacatttcaaaatctactaactcttattattacccgtcttcccaaactaactttcatttttatctttattagtggtatagcattttttatcacttataaattctactattatctaccaattgagaaaaagttaaaatctattttaaaaatcccaatgattaatacgtattataaaatatatagaacttatcaactttccaatcaactttctttattttacagaaatggtacaagtcttcaacaaattgtccatatatatcgtaatgagcaagataacgattttcttaaatttctgggtgattatctttttaaagaagctaataaagggctcccgttacctgttatattaatgaatttaaaatgttttcaaaatgatttgattaaattcatagaacaaggagagaaaaatgggaaattagatatagaattaaagttatacagtcaaatgctattacagcaatttgaagaaaaagtgttaaaacaaacaaaatttatacaacctatcatcttctttatcttgggaatttttattgtatctttatacttagtcattatgcttcctatgtttgaacttatgcaaacaataaaataa

SEQ ID NO: 6006 - DNA, 975 bp, Staphylococcus epidermidis; identical to SEQ ID NO: 3340

SEQ ID NO: 6007 - DNA, 624 bp, Staphylococcus epidermidis; identical to SEQ ID NO: 3341

SEQ ID NO: 6008 - DNA, 327 bp, Staphylococcus epidermidis; identical to SEQ ID NO: 3342

SEQ ID NO: 6009 - DNA, 987 bp, Staphylococcus epidermidis
atgacagatattattttagctgctgatataggcggaacaacttgtaaattggggatatttgacaaggatttagaacaattgcataaatggtctattgatactgatacaagtgaccacactggtgagttacttttaaaaaacatttataattcttttactgaaaagattgcagaatataaatatgattttaacaatgtagttggagtcggtattggtgttcctggacctgttgattttgatactggagttgtatacggagctgttaatttacattggcccgatagtgtaaatgtaagagaaattttcaaacaatatgttaattgtccagtttatgttgataatgatgctaatgttgctgctttgggagaaaaacataaaggtgccggcgaaggtgctgatgatgtagtagccattactttaggtaccggactaggtggaggtataatttctaatggagaaattgtacatggacacaatgggtctggcgctgagattggacatttaagagctgattttgatcaacgttttcaatgcaattgtggtaaatcaggttgtatagaaacagttgcttctgctactggtgtagtaaatttagttaatttctattatcctaaattaacgtttaaatcatcaattttacaacttattaaagataaccaagtaactgcaaaagctgtatttgatgcggctaaagctggcgatcaattctgtatatttataactgaaaaagtggcaaattatatcggttatttatgcagtatcattagcgttactagtaatccaaaatatattgttctaggagggggcatgtctacagccggacttatccttatagaaaatattaaaactgaataccgtaatttaacttttactccagctcaaaataatactgagatagtacaagctaagttagggaatgacgctggtattactggtgcagctgggcttatcaaaacatatatcatagataaagagggtgctaaataa

SEQ ID NO: 6010 - DNA, 201 bp, Staphylococcus epidermidis; identical to SEQ ID NO: 3344

SEQ ID NO: 6011 - DNA, 1461 bp, Staphylococcus epidermidis; identical to SEQ ID NO: 3345

SEQ ID NO: 6012 - DNA, 552 bp, Staphylococcus epidermidis; identical to SEQ ID NO: 3346

SEQ ID NO: 6013 - DNA, 150 bp, Staphylococcus epidermidis; identical to SEQ ID NO: 3347

SEQ ID NO: 6014 - DNA, 2040 bp, Staphylococcus epidermidis
atgaataaaagaatcaatttcatatttggatttatagtatttatctttgctatagtcgtattgagattaggttatttacaaatagcacaaggatctcattacaaacaattaatcaaaaacgatgaaaacataactgttaatgaatcagtaccaagaggccgaatactagatagaaatggcaaagtactagttgataatgcttcaaagatgtctattacatacactagaaaccgtaaaacatcacaaaaggaaatgttaaatactgctaagaaactgacagatttaattaaaatggatacagataaaattactgagagagataaaaaggatttttggattcaaatgtatccgtcatctgctaaaaagttaatgagaaaagaacaattaatgttagaggatggcagtatttcacaagaccaatttgatacccaacttagagataaaataggaaaaaaacaattaaaacagttaactaaaaaagatttgcaagttttagcaatttatcgggaaatgaacgctgggtcaactctagatcctcaaacaattaaaaatgaagacgtaagcgagaaagaatatgcagccgtatcacaacagctttctaaattacctggtgtaaatactacaatggattgggatagaaaatacccatacggtgatactttaagaggtatatttggagatgtgtcgacttcgactgaaggtatacctaaagaattaactgaacaatatttatcaaaaggttattcacgaaatgatcgggtcggtaaatcttatcttgaatatcaatacgaagatgttcttaaaggcacgaagaaacaaatgaaatatacaactgataaatctggaagagtaataagttcagaagtacttaatcctggctcaagaggtcatgatttacaattaactatagatattgatttacagaaaaaagtagaatctttattagaaaaacaaatttctaaattacgtagtcaaggtgctaaagatatggacaatgcgttaatggttgtccaaaatcctaaaaatggagacattcttgctattgcaggaaagcaaattgataagcaaggtaaactcaaagattatgatatcggcaactttacagctcaatacacagtaggttcttcagtaaaaggaggaacattattagctggataccaaaataaagctattaatgttggagaaactatggtagatgagccattaaaattccaaggtggtttaactaagcgttcttattttaataaaaatggtcatgtatctatcgatgataaacaagcacttatgcattcatcaaacgtatacatgtttaaaaccgcacttaaattagcaggtgacccctatacttcaggtatgtcattacctaataatatagcagatgctggtcgtaaattgcgtaaagggttaaatcaagtaggtcttggcttaaaaacaggtattgacttaccgaacgaaacgccaggccaaatagaacccttaactaataatcctggtaactatttagacttagctattggacaatacgacacatatacaccacttcagttgtcccaatacgtatcaactattgctaatgatggctatagaattcaaccacatattggattgtctatttatgaatctactaataaagatgaaactggtccattaaaacgtaaaattaagggtaatgttttaaataaggtaaataactcaagtgacgaaattaaagaagttcaagaaggcttcaaaatggctttcaatgaaaagcaaggtacaggttatgctagttttagaaatactgtagtaccttcagctggtaaaacaggaactgctgaagtttttcaagatggagaacctagagttaactcaacatatatcggttatgcgcccgtcgatgatcctaaattatctttttcaattgtctatacaaatcaacctgttccaccaccttggttaaatggtggagatttaggtagagacgtaatcaactactattttaaagataaggataataaaaaagatgactctcaatctaataacgaagagaaagaagattaa

SEQ ID NO: 6015 - DNA, 600 bp, Staphylococcus epidermidis
atggcttttgaattaccaaatttaccttatgcatatgatgcattagaaccacacatcgacaaacaaactatggaaattcatcatgacaaacatcataacacatatgttacaaaattaaattcagcagttgaagggacagatttagaagctaaatcaatcgaagaaattgttgctaatttagatagtgtgccatctaatattcaaacagctgttcgtaataatggcggtggacaccttaaccattcattgttctgggaactattatcaccaaattctgaagaaaaaggtgaagtagtagataaaattaaagaacaatggggttctttagatgaatttaaaaaagaatttgcagataaagctgcagcacgctttggttcaggatgggcttggttagttgtaaacaatggacaattagaaattgttacaacaccaaatcaagataatccaattactgaaggaaaaacaccaattttaggtttagatgtttgggagcatgcttattatcttaaatatcaaaataaacgcccagattatatcaatgcattctggaatgttgttaactgggaaaaagttaatgaattatataatgcaactaaataa

SEQ ID NO: 6016 - DNA, 420 bp, Staphylococcus epidermidis; identical to SEQ ID NO: 3350

SEQ ID NO: 6017 - DNA, 849 bp, Staphylococcus epidermidis; identical to SEQ ID NO: 3351

SEQ ID NO: 6018 - DNA, 783 bp, Staphylococcus epidermidis
atgacaacgccagtttttgaattacgaaatttagattattatttcgataataaacatgtattagagaacataaatatcaaaattaatcagggagaatttttagcaattgttggtccgaacggggcaggtaaatctactttactaaaagttatactagggctattgcctatacaaaagggcgagataattgttgatggtaaaccatttaaaggtaataaatcttcattgaaaattagctatgtttctcaaaaagcttctgccttcaatgcaggtttcccagctagtgtaaaggaagttgttttaagtggtctgactaaaacaaaaaaattatttcaaagatttaataaaaatgactatcaaaaagtcacaaaggtattagagagattaaatatatctcatttaataaataaaaatatagctgaactatctggtggtcaacaacaacgtgtacttattgctagagcacttatttcagacccaagtgtgctagtgttagatgaacctacaaacggaattgatgcaaaacatgtaagcaaattttacgatacacttgataaattaaaaaaacaggggattacaataattttagtcactcacgatattggcgttgtagcagataccgctactgaagtagcatgtttaaataaacatcttcatttccacggttccacagaagcatttaagtctttagatgaagttgaaatttcaaaaatttatggtcatcctattcaatttgttgatcatcaacacaaccgaacatgttgtaatgagggaaatgaataa

SEQ ID NO: 6019 - DNA, 891 bp, Staphylococcus epidermidis
atgttaataggatcacatgtttcaatgagtggcaaaaaaatgctgcaagggtcagcagaagaagcacataaatatggtgaatctacatttatgatttatacaggtgcgcctcaaaatacaagacgtaaaaatattgaagatttaaatatcgaaaaaggccagcaggcaatgaaaacatatggcttatcaaatatcgttgtacatgcaccatatatcattaacattgcaaatacaaccaaacctgaagtatttaatttaggagtcgactttctacaaaaagaaatcgaaagaactcaagcgctcggagcgaaagacattgtactgcatcctggagcgcatgtcggagcaggtgtagataaaggaattcaaaaaattattgaaggacttaatgaagtactaacacatgataatgatgtaagaatagcacttgaaactatggcgggtaaaggaacagaagtagggagatcttttgaagaaattgctcaaataattgatggtgttacacataatgatcgcttatcagtatgttttgatacgtgccacactcatgatgccggttataacgtcaaagaagatttcgatggtgtactagaaaaattcgacagtataattggagtagatcgaattaaagtagtacatgttaatgacagtaaaaacctaagaggtgcacagaaggatcgtcacgaaaatatcggctttggtcatattggctttgatgcacttaattacgtagtacatcatgatacttttaaaaatattcccaaaatattagaaactccatatgttggtgaagataaaaaaaataaaaaaccaccgtataaattagaaatagacatgttaaaatcacaaaaatttgatccagacctcaaaaacaaaattttaactcaataa

SEQ ID NO: 6020 - DNA, 1347 bp, Staphylococcus epidermidis
atgtcaaaacatccatttgaacactttaatttagatgagaatttaattgaagctgttaaaaatctcaattttgaaaaaccgactgaaatccaaaatagaatcataccgagaattcttaaaggaacaaatttaataggacaatctcaaactggaactggaaagtcacacgcttttcttttaccattaattcaacttatagaaagtgacattcaagagccacaagccatcgtagtagctccaacacgtgaacttgctcagcaactatatcaagttgctatgcatttagtaaaattcaaaaaaggtataaatgtaaaacttttcattggtggtaccgatttagaaaaagataaacaacgatgtagccatcaaccacaactcattattggtacaccaacaagaattaatgatttagcacattcaggttatcttcatgcacatttagcgtcatatttaattatagatgaagctgatttaatgattgacctcggtctcattgaagatgttgaccatattgcagcgagattagatgatgaaaatgctcatctagcggtatttagtgcaacaatacctaaatcattacaaccatttttaaataaatatttaagtcaaccagaatttgtagaagttgatggcaaagctcataataaagaaaatatcgaattttatctaattcctacaaaaggttctgctaaggtagataaaacattggaattgatagatatattgaatccttatctatgtattattttctgtaacagtcgtgaaaatgccgatgaattggcagacactttaaataaagaaggtattaaaataggtatgattcatggtggtttaacaccaagagaacgtaaacaacaaatgaaaagaataagaaatttagattttcaatttgtcattgcaagcgatcttgcttctagaggaatagatattgaaggcgtaagtcatgttattaatttcgatgtacccaatgatatcgatttcttcacacatcgcgtaggtcgaacaggaagaggtaattataaaggtgtagccattacattatatagtcctgatgaagaaagtaatattactcttatcgaagacagaggatataaatttgaaaatgtagatattaagaatggtgaattaaaaccgataaaggcatacaatatgcgtaaatcaagacagcgcaaagatgaccatttaacaaatgaagttaaacacaaagtaagaagtaaatcaaaacgtaaagttaaaccaggctataaaaagaagtttaaacaagaagttgaaaaaatgaaacgtcaagaaagaaagcagtatagtaaaaagcaaaatagacaaaaacgaaaaaataataaaggatag

SEQ ID NO: 6021 - DNA, 1101 bp, Staphylococcus epidermidis
atgaaaattagtgaactgatggaagttttaaataatcacgttccatttcatcaagctgaatcatgggataatgtaggattattaattggtaatgataagttagatattacaggtattctgacaacactcgactgcaccgatgatgttgttaaccaagcaattgaacttaataccaataccatcattgctcatcatccacttattttcaaaggagtaaaacgcatcgttgaagatggatatggtagtataattcgtaaacttatcaaaaataatatcaatcttatagcattacacactaatcttgatgtacatcctaaaggtgtcaatcgaatgttagcggatcaaataggtttagagaacatatcaatgattaatacaaatagctcatattattacaaagttcaaacttttatacctaaaaatcatattgaagatttcaaagacagtttaaacgaacttggattagctaaagaaggtaattacgaatattgtttctttgaaagtgaaggtaaagggcaatttaaaccagtaggtgatgcaagtccttatatagggaagttagatagtatcgaatatgttgatgaaataaaacttgagtttatgataaaagacaatgaattagaaataactaagcgtgctattttagataatcacccatacgaaacaccagtttttgattttattaaaatgaacaaagaaagtgagtatggattagggattattggacaattaaaccaaactatgactttagatgaattttctgaatatgccaaaaaacagctcaatataccgagcgtacgatatacaggtcaacatgatagtccaattaagaaagtagctatcataggtggttcaggtataggatttgagtataaagctagccaacttggagcagatgtttttgttactggtgatattaaacaccatgatgctttagatgctaaaatccaaaatgtaaatttattagacatcaatcattatagtgagtatgttatgaaagaaggattaaaagaattattagaaaaatggttatttaaatatgaaaatcaatttccaatatatgcttctgaaatcaacacagatccatttaaatataaataa

SEQ ID NO: 6022 - DNA, 690 bp, Staphylococcus epidermidis
atgattaaccttaaccaaagattatcaattgtatgctcatttattaaaagaggaacattggctgatattggctcagaccacgcatatctacctatatatgcaattcaaaacgacttatgcacaaaagcaatagcgggagaagtgattcaaggaccttataaggctgctaaaaaaaatattgcaaattatgaattaaatcaactggttgatgtacgtctaggcgatggtctaagcgttctaaactcagaagaccaaattgataatataactgtttgtggtatgggaggaccattaattgcaaaaatattaaacgatggaaaagataaattagttaaccacccaagactcatactacaaagcaacatacaaactcaagcattaagacaaactcttaataaactttcatatgaaatcgttgatgaaagaatcattgaggaaaagggtcacatatatgaaatcgtggtagctgagtttaataataacttagttaaattaaatatattacaagaaaaattcggaccatttttacttagagaatgtaataacatttttcaaaaaaaatggcaaagagagttagaagcactacgtgatataaaatcccaattgaattcaacatcacatcatgagagactaaaagaaatagaagatgaaattaacttaatacaagaggtgttaattaatgaaaattag

SEQ ID NO: 6023 - DNA, 1107 bp, Staphylococcus epidermidis
atgtctgacaaccaagttaaaattaaaaagcaaacaattgatccgactttaacactagaagatgttaaaaaacaattaattgataaaggaaaaaaagaaggtcatttaagtcacgaagaaatcgctgaaaaactgcaaaattttgaaatggactcagatcaaatggatgatttcttcgaccaattgaatgacaatgacattacacttgtcaatgaaaaagatagttctgacacggatgataaaatcaatcctaatgatttgagtgcccctcctggtgtcaaaatcaatgacccagtgcgtatgtatttaaaggaaattggtagagttaatcttttaagtgctcaagaagaaattgagcttgcaaaaagaattgaacaaggtgatgaaattgctaaatcacgattagccgaagcaaacttgcgtttagttgttagtattgctaaacgatatgttggtcgtggaatgttattcttagatttgattcaagaaggtaatatgggcttaattaaagctgtggaaaagtttgattttagcaaaggatttaaattttcaacatatgccacttggtggattagacaggctattacacgagcaattgctgaccaagcacgtacaattcgaataccagtacacatggtagaaacgattaataaattgattcgtgttcaacgtcaattattgcaagatttaggaagagatccagctcctgaagaaattggagaagaaatggatttaccaccagaaaaagtcagagagattttaaaaattgcacaagaacccgtttcattagagacgccaattggtgaagaagatgatagtcatttaggagatttcattgaggaccaagaagctcaaagtccatctgaccatgcagcatacgaattgttaaaagaacaattagaagatgttttagatacacttactgacagagaagaaaatgttttacgtttacgttttggtttagatgatggacgaacaagaacactagaagaagttggaaaagtattcggtgtaacacgtgaaagaattcgtcagattgaagcaaaagctttaagaaaactaagacatcctagtcgaagtaaacgtcttaaagatttcatggattaa

SEQ ID NO: 6024 - DNA, 1797 bp, Staphylococcus epidermidis
ttgcgtatagatcaatccgtcattgatgaaataaaaaataaaactgatatattagatttagttagtgaatatgtaaaacttgaaaaaagaggacgcaattatatcggtttgtgtccttttcatgatgaaaaaacaccctcatttacagtttcagaagataaacaaatttgtcattgttttggatgtaaaaaaggtggtaatgtttttcaatttacgcaagaaattaaagacgtatcatttgttgaagctgtaaaggacttgggtgaacgagttaatattcaagttgatatcgggcagaaccaaacaaattcctcgacaaaaattgcgtctgatgagttgaaaatgattgagatgcatgaactcattaaagattattatcattatgctttaatgaaaacagttgaaggtgaggaggccctaaattatttacatgaacgcggctttacggatgaccttattaaagaaagagaaattggatatgcacctgataactcacatttttgtcatgattttcttgaaaaaaaaggatatgatatagaactagcatttgaagcgggtttgttatctcgtaatgaagagaatttcacatattttgatagatttagaaatagaattatgtttccattaaagaatggacaaggacgaattgttgggtattcaggacggacatatactgatcaagaaccaaaatatttaaatagtccagaaacacctattttccagaagcgtagaattttatataatttaaataaagcacgtaaatttattcgaaagcaagatgaaattattttattagaaggtttcatggatgtaattaaatcagattatgctggtttaaaacaagttgtcgctagtatgggtacacagttatcacaagaacatattacttttttacaaaaactaacgcaaaatgtaacattaatgtttgatggtgattatgctggtaaagaagccactctaaaaactggacaagcactgttgaatcaaggcttaaatgtgtatgtggttcaactaccttcaggtatggatcctgatgactatattagaaaatatgataacgaacaattcttaaaatttgttcaacaagacaaacaatcatttgtgctatttaaagttaaaatgtatcaaaatgagattaatcataatgatcttgcatacgaaaaacattttaaagaaactgtgcgagacctttctttagtcaattcaggtatcattcgtaataaacttattcaaaacatagctgatatatttaaagttaatccagaaaccattcaatatgagttagatgcaacttatcaacatcagatgtcgtcgaacacttatcccacttttcaagatgagccaagcaaacaacaattaatactcggtcgtctgactaaaaatgagaaagcagaaagagctttaattaagcatttaacgaaagataaagatacttttttgaattattatcaaaaaattgtgccagaagactttacaaatagctatttaaagcgtatatttagttatttgtacgactattattcaaaaaatgattattatacaattagcgatatgatgcaatatattgaatctaatgaattgagagaagttcttattgaattagatcaatatcatctaaatgatgaaccttatgaaaacgaaatagaggactatattcaaattattaaaaataataataacgaagattccttagaaagtttgaattataaattaagggaagcatcgcgtattggagattcagaattacaaaaatattatttgcaacttatcgttaacaaaaataaaaatcgaatgtaa

SEQ ID NO: 6025 - DNA, 819 bp, Staphylococcus epidermidis; identical to SEQ ID NO: 3359

SEQ ID NO: 6026 - DNA, 492 bp, Staphylococcus epidermidis; identical to SEQ ID NO: 3360

SEQ ID NO: 6027 - DNA, 1392 bp, Staphylococcus epidermidis
atggttaaaaatatggatacaattgtacaacttgcgaagcatagaggatttgtattccctggtagtgatatttatggtggattatcgaatacatgggattatggtccgttaggtgttgaattaaaaaataatattaaaaaagcttggtggcaaaaatttattacgcaatcaccttacaatgtgggtattgatgctgcgattcttatgaatccaaaaacatgggaagcatcaggacatttaggaaattttaatgatcctatgattgataataaggacagtaaaattcgttatcgtgcagataaattaatcgaagattatatgcaaaatgaaaaaggagacgaaaactttatagcagatggcttaagttttgatgagatgaaaaaaattatagatgatgaaggaattgtttgtccggtcagtaagactgcaaactggaccgatatccgtcaatttaatcttatgttcaaaactttccaaggtgttactgaagattctactaatgaattatttttacgacctgaaacagctcaaggtatttttgtgaactataaaaatgttcaacgttctatgcgtaaaaaattaccttttggtattggtcaaattggtaaatcattccgtaatgaaatcacaccaggaaactttattttcagaacaagagaattcgaacaaatggaacttgaattcttctgtaaacctggcgaagaaattgagtggcaaaattattggaaaacttttgcaagtgaatggttaacagatttaaacatctcagaagacaatatgcgccttagagatcatgatgaagatgaattatcacactattccaatgctactactgatattgaatataaattcccatttggttggggtgaattatggggtattgcgagtcgtacagactatgatttaagacaacatagtgaacattcaggtgaagattttaaatatcacgatcctgaaacaaacgaaaaatacattccttattgtattgaaccatctcttggtgcagatcgtgtgactttagcatttttatgtgacgcgtatgctgaagaaggtgttgaaggtagtaaagatgcacgtacagttatgcacttccaccctgctttagcaccatataaagcggcagtattaccattaagtaaaaaattatcaagtgaagctattaaaatttttgaacaactaagctctagctttgcaatagactttgatgaatcacaatctattggtaaacgttatcgtcgtcaagatgaaataggtacaccatattgtattacttttgattttgattcattagaggacaaccaagtaacagtgcgtgacagagatagtatggaacaagtacgtatgccaatatcagaacttgaaacatttttagctgagaaagttaaattttag

SEQ ID NO: 6028 - DNA, 756 bp, Staphylococcus epidermidis
atgaaacaaaagggcatcattatcaaatctgttgattatggtgaatcagacaaaattattacaattttaaatgaatacggagctaaaataccactaatggccagacgagcaaaaaaagttaagtctggacttcaagcaaatacacagcttttcgtatatggcttatttatatataataaatggcgaggcatgggaacactaaattctgttgatgtgattaatcaacattatgaactccaactcgacttatttgaaagtagctatgcatctttatgtgctgaaacaattgaccgatcaatggaagagaatgaggtttcaaaatataattatgacttacttcaatttgttctttccaaaattaacgaaggaacccctgcacaattaatgtctgtaatcgtcttattaaaaaatatgtctaaatttggattcacagcttcatttgatcactgtgcaattaccggcattcaagatcaatcaaaacttatagcgtatagttttaaatttgacggtgctatttcagaatctgcattatatcaggatcaacatgcttttcatctctctaatcgcaccttatatcttcttaatatcctgcagcaattacctataagtaagatgaatcatttaaatattcagcaagacatattaaatgaaatgtctgaactacttatcatgctttatcgtgagtatgctggtatgttttttaaaagtcaaaaattaataaaccaattaaatagattagaaaaagattcattgtaa

SEQ ID NO: 6029 - DNA, 900 bp, Staphylococcus epidermidis; identical to SEQ ID NO: 3363

SEQ ID NO: 6030 - DNA, 405 bp, Staphylococcus epidermidis
atgagttatcaatcacactactttaaagaagtccgagaggcacaaaaaaatgcttatgcaccatacagtaactttaaagttggtgcttatttaaagacgaaagatggtcgatgtttttatggagcaaatgttgagaacgctgcatatccgatgggaatatgtgcagaaagatcaagtttagtaagcgctatatcagaaggttatcaaccaggtgattttgaatccattacagttactgtcgatgctgataaaccatcatccccatgtggcgcatgtcgccaggtgatgatggaactttgtgataaagatatgcctgtatatatgaccaatcaaaacggagatatgatagaagctacagttgatgaattattaccattaggattttctggaaaggatttaaattaa

SEQ ID NO: 6031 - DNA, 357 bp, Staphylococcus epidermidis
atgaaacgttttaaatatgcatatgagggtttttgcgcaattttaaaaaaagaccaaaatttcttattacacattttagcggccataattattatcatattaggatttgtgttaaatattgatcgtatagattggatattaatcatcgtagctataggacttgttttaagttttgaagctattaatacctcaattgaatttgttgttgacctaattacaactgactatcatgaatatgcaaaatacgctaaagatatagctgcgtttagtgttgtcatcgtttcaatcgtttcaatatgtattgggttaatcgtttttttaccatatatattagaaatatttaagggaggaatgtaa

SEQ ID NO: 6032 - DNA, 468 bp, Staphylococcus epidermidis
atgtttactatagattttagtgaccatacaggtctagtagaaacgtcttggtttgaccaaatagatcaattattaacattcgctaagaagaaagaaaatattcataatgatgccgaattgtcagtaacttttgtagataaagatgaaattcaaaatataaataaagtatatcgcgacaaagataaagttactgatgtcatctcatttgctctagaagaagatgaaccagaaatagatttcaatgactttgatataccacgtgttctaggtgatattattatatgtacagatgttgccaaagaacaatcagaaagctacggacactcatttgagcgtgaattaggatttttagcattacatggctttttacatttgctaggatatgatcatatgaatgataatgatgaaaaagaaatgtttggtcgacaagatgctatactaaacgaatttggtctaactagaaattaa

SEQ ID NO: 6033 - DNA, 948 bp, Staphylococcus epidermidis
atgccaggaataattcaaattgacgatattaatcaatctcaagctttaataggaaataacgatgaaaacctaaaagcgattgaagcacattttaatgtcgtaatacatgctagaggtcaagaaattgctgttaaaggtgaaaaaatagagcatgttgaaaaagcagaattagttctaaagaatttacttaaagtaattgaattaggtaatacaattacgcttaaagatgtagaagctgctataaaaatggccgacaataatacaattcatcatttattagatttatacgatgaagaaattacaaaagatgcttatggtaaaacaattcgtgctaagactatgggacaacgtatatatattaatgctatgaaacgtaatgatttagtatttggcattggtccagctggaactggtaaaacctttttagcagtcgtatatgcggctaaacaactacgtaaaggatctgttaagcgtattgttctaacgagacctgctgttgaagcaggtgaatctctaggatttctaccaggcgatttaaaagaaaaagtagatccatatttaagacctctttacgatgggttaaatactgttttaggtagagagcaaactcaaagactcatcgaacgaggtgtaatagaaattgcgccattagcatatatgagaggtagaaccctagatgatgcatttgttatattagatgaagctcaaaatacgacacatgcacaaatgaaaatgtttcttacccgcttaggatttggatcaaaaatggttgtcactggtgatcaaactcaaatcgatttaccaaaaggtgtaaaaagtggtttgaaagaagcggtaaaaaaactaagtggtgtcagcggcataagtatcatgaaaatggatcaaagtgatgtagttagacatccacttgtaagtaaaattattaatcgttatgaaggagttgaataa

SEQ ID NO: 6034 - DNA, 684 bp, Staphylococcus epidermidis; identical to SEQ ID NO: 3368

SEQ ID NO: 6035 - DNA, 990 bp, Staphylococcus epidermidis; identical to SEQ ID NO: 3369

SEQ ID NO: 6036 - DNA, 711 bp, Staphylococcus epidermidis
atggataacttacatctaatacatatgctatttatggcaaaacctttaaatggaatgaattgggttgaaaaccttgcacagtttatcactcaaccttttgtttctcttattttcacttgtattatatttattggctttttataccaactatattcaaagcgcataaacttaatgggaataatagcattacttgctttactacttttatttttagcattcctaattaatggtgatgtcaatgtgatgtcagtattactgtttacaattggcctcatactactgattgttgaattatttgttataggcgctgtaataggtattattggtattattctaataacactaagtattattatacttggtgacaatattttattaatgcttggaaatgttatagttgcattaatattatcaattgtagaatgggtgattttagtgaaaatattcaatagaaaaattccatttttagataaagttattttaaaggattcaacaaattctgaagcaggttatcgttcacatgacgaccgctctcatcttgtaggaaaaactgcacatactgttaccgatttaagaccagcaggaattataacttgtgacaatgatcgaatagacgcagtatctgatggatcatttattttacgtaatcgacaagttaagattcttgaagttgaaggtacacgtgttgttgttagagaaatcgaaaaataa

SEQ ID NO: 6037 - DNA, 177 bp, Staphylococcus epidermidis; identical to SEQ ID NO: 3371

SEQ ID NO: 6038 - DNA, 1347 bp, Staphylococcus epidermidis
atgtcaacagttgcgtttcacacattaggttgtaaagtaaaccattacgaaactgaagcaatttggcaattatttaaagatgcaaattatgaaagagtagaatttgaaacaaatgctgatgtatttgttattaatacatgtacggtgacaaatacaggggataaaaaaagtcgtcagataataagaagagctattagacaaaatcctgatgcagtcgtttgtgtaactgggtgttacgcacaaacatcatctgccgaaattatggaaatccctggtgttgacatcgttgtaggtactcaagaccgacataaattattagattatatacaacaatttcaggacgagagacaacctattaatggtgtaggcaatatcatgaaaaatagaacttatgaagaattagaagttccttactttactgatagaacacgtgcttcattaaaaatacaggaaggctgcaataatttttgcacgttctgtattatcccgtgggcacgtggattgatgcgttctagagatccagaaaaagtagtagaacaagctactcaacttgttaactctggttataaggagattgtattaacaggtattcacactggtggttatgggcaagaccttaaaaattataatctagcacaattgctaagagatttagatactattgaagggcttgaacgtatacgtatttcttctattgaagcaagtcaacttactgatgaagttattgatgtcattggaaactcaaataaggtggtacgtcatttacatataccgctacaatctgggtctgatgatgtgttaaaacgtatgagacgtaaatataccatggcacacttttcagaaagattgacaaaattacatcaagcattacctgatttagcagttactagtgatgtaatcgttggtttccctggagaatctgaagatgaattccaagaaacttacgatttcatcgtaaatcatcatttttcagagttacacgtattcccttattctcctagaataggaacgcctgctgcaagaatggacaatcaaattgatgaagaaacaaaaaatgttcgtgtacacaaactaattagtctaagtaatcaattagccaaagaatatgcttctaaatttgaagatgaagttttagaagttatacctgaagaaatgggtgaagaaccacatacacttgttggctatgctgacaattatatgaaggtaagatttgaaggagatgactcattaataggtcaaatagtaaaggtcaagatagttaaagccaattatccaattaatgaaggcaaagcaatacgtgttgttaaacatgcaacgaatcaatctgaaaaagaagtacttgtttaa

SEQ ID NO: 6039 - DNA, 753 bp, Staphylococcus epidermidis
ttgcaaagatattttatgaatcaaagcgctgatgaaaatcagtgcttttttattgaaaacaaagaagactatcatcatatcgtgaatgttatgcgctataaagaaggacaaaatattattgtcactttttcagatgaaaatgtattcaaatgtaaaattatttcaataaacgatcaatcgattgaaattaaattagtagaaaagcaacaaattaacactgaactacctcagaacattacaatatgtagtggtttaatcaaagcagacaaatatgaatggatgatacaaaaagcaactgaaatgggggcaaatgagtttatagctgtagccatggaacgttctgtggtcaagctcaatgattctaaagtagaaaagaaattatcgagatggcaaaaaattataaaggaagctgcagaacaaagttatcgtttaacaataccaaatataaaatttaagtcgaatttaaaagaaatttatggtatgataagtcaatatgactatgttcttatagcatatgaagaacaagcaaagcacggtgaattaagtcaatttaagcaaacaattaaacaatttaagacacaggatcgtgttttaatcatatttggacctgaaggtgggctatcagatagtgaaatttcattattcggtgatgtaagtactatagttggattaggtccacgtatcttgcgtgctgaaactgcacctctttacgctttaagtgcagtaagttatgaaaaagaattattggggtga

SEQ ID NO: 6040 - DNA, 939 bp, Staphylococcus epidermidis
atgaattggatggaactctcaattgtagttaatcacgaagtagaatatgatgttacagaaattcttgaaagttatggctctaatggagttgtaattgaagattcaaatattttagaagaacaacctgttgataagtttggagaaatttatgacttaaaccctgaagactatcctgaaaaaggagttcgattaaaagcttactttaatgagttcacttataatgaaaacttaaaatccaacatcaattatgaaatattaagtcttcagcaaattgataaaacaatttatgattaccaggaaaaacttattgccgaagtagattgggaaaatgaatggaagaattattttcatccatttagagcttcaaaacaatttacgatagtaccaagttgggaatcatatgttaaagaaaatgataacgaattgtgcattgaattagatccaggtatggcttttggaacaggtgatcatccaacgacaagtatgtgtttaaaagcaattgaaacttttgtaaaaccaactgattcagttatcgacgttggaacagggtcaggcattttaagtattgctagtcatttacttggagttcaaagaataaaggcattagatatagatgaaatggctgtaaatgtggcaaaagaaaactttaagaaaaatcattgtgatgatgcaattgaagcagttccaggtaatttattaaaaaatgaaaatgagaaatttaatatcgttattgcaaatattcttgctcatattattgaagaaatgattgaagatacttataatactttaattgaagatggttattttatcacatcaggtattattgaagaaaagtatcaagatatagaatcacaaatgaagcgtattggtttcaaaattatttcagtagaacatgacaatggctgggtttgtatagttggtcagaaagtgagtggataa

SEQ ID NO: 6041 - DNA, 1122 bp, Staphylococcus epidermidis
atggccaaaagagactattatgaagtcttaggcgtaagcaaaagcgcttctaaagacgaaattaaaaaagcttatcgtaaattatcaaaaaaataccatccagatataaataaagaagaaggcgcagacgaaaaattcaaagaaatctccgaagcatatgaagttttaagtgatgaaaacaaacgtgcaaattatgatcaatttggtcatgacggaccacaaggcggatttggaagtcaaggctttggtggcagtgactttggtggatttgaagatattttcagctcattctttggtggcggttcacgtcaaagagatcctaatgcacctcgcaaaggtgatgaccttcaatacacaatgacaataacatttgaagaggctgtattcgggacaaaaaaagaaatatcaataaaaaaagatgtaacatgtcatacatgtaacggtgatggggctaaacctggtacaagtaaaaaaacttgtagctattgtaatggcgctggtcgtgtttctgttgaacaaaatactattttgggtagagtgagaactgaacaagtttgtcctaaatgtgaaggtagtggacaagaatttgaagaaccatgtccaacatgtaaaggaaaaggtactgaaaataaaacagttaaactagaagtaactgttcctgaaggcgtagataacgaacagcaagttcgtttagctggagaaggttcacctggtgttaacggaggaccacatggtgacctatatgtggtgttcagagttaaaccatctaatacatttgaacgtgatggagacgatatctactataatctagatattagcttttcacaggctgcactaggtgatgaaattaagatacctacattaaaaagtaatgttgttttaaccattccggcaggtacacaaacgggtaaacaattccgacttaaagataaaggtgtaaagaatgttcatggttatggccacggggacttatttgtcaacataaaagtggttacaccaacaaaattaaatgaccgtcaaaaagaattattaaaagaatttgctgaaattaatggtgaagatataaatgaacagtcatctaatttcaaagatagagcgaaaagattctttaaaggagaatag

SEQ ID NO: 6042 - DNA, 1830 bp, Staphylococcus epidermidis
atgggtaaagtaattggaattgatttaggtacaactaactcttgtgtttctatcttagaaggagatgaaccaaaagtaattcaaaacccagaaggtgcacgtactacaccatcagtggttgcatttaaaaatggtgaaactcaagtaggtgaagtagcaaaacgacaagctatcacaaatcctaacactgtacaatctattaaacgtcatatgggtacagattataaagtagatattgaaggtaaatcatatacaccacaagaactttcagcaatgattttacaaaatttaaaaagcactgcagaaaactatttaggggatacagtagacaaagctgttatcactgtccctgcttatttcaatgatggtgaacgtcaagcaactaaagatgctggtaaaattgcaggcttagaagttgaacgtattatcaacgaacctacagctgctgcacttgcttatggtttagataaaactgaaacagatcaaaaggttctcgtatttgacttaggtgggggaacatttgacgtatctattctagagttaggcgacggcgtatttgaagtattatcaactgccggagataataaacttggtggcgatgacttcgaccaagtgattattgattatcttgtttcagaattcaaaaaagagaatggtgtagatttatcacaagataaaatggcattacaaagattaaaagatgctgccgaaaaagctaaaaaagatttatcaggtgtttctcaaactcaaatttcattaccattcatttctgctggagaaaatggcccattacacttagaaattagtttaactcgttctaaatttgaggaattagctgattcattaatcaaaaaaactatggaaccgactcgtcaagcattaaaagatgctggtttatctacttcagaaatagatgaagttattttagttggtggttcaacacgtattccggccgttcaagaagctgttaaaaaagaaattgggaaagaaccacataaaggtgttaacccagatgaagttgtagcaatgggtgctgctattcaagctggtgtaatcacaggtgatgttaaagatgtggtattacttgatgttacgccattatctttaggtatcgaaattatgggtggacgtatgaacacattaattgaacgtaatactactattccaacttccaaatcacaagtttattctacagcagctgacaatcaaccagcagtagatattcatgtattacaaggtgaacgtccaatggcatctgacaacaaaactttaggaagattccaattaactgacattccacctgcaccacgtggtgtacctcaaatcgaagtaacatttgatatcgataaaaacggtattgttaacgttacagctaaagatttaggtactaataaagaacaaaacattacaatacaatcaagctcatctctatctgatgaagaaatcgatcgcatggtgaaagatgctgaagaaaatgctgaagcagataaaaaacgtcgtgaagaagtagacttgcgaaacgaagcagatagtctagtattccaagttgaaaaaacagttaaagacttaggcgaaaatattagcgatgaagataagaaaaatgctgaagagaaaaaagatgcacttaaaacagcattagaaggtgaagacatcgacgatattaaagctaaaaaagaagaacttgaaaaagtaattcaggaattatctgcaaaagtttatgaacaagctcaacaagcacaacaacaagctcaagaagaacaaggttctcaagatagtactgttgaagatgcagactttaaagaagttaaagatgacgaagataaaaaataa

SEQ ID NO: 6043 - DNA, 633 bp, Staphylococcus epidermidis
atgtcagaaaaagatcagtcagtgaataatactgaggaagatttcaatgtagaaactgaagacaatcagaatgatacaaatattgaaaactcagtatctaacacagataatagtgaagttaatgctagcgattcagaaaataattcagaagaaagtatcaaggatgaagagtcagagtctcaagatactaaaattaaagaattagaaaagcttgcaaatgacaatgaagaaaaatatttaagattatatgctgaattcgaaaattataaacgtcgaattcaaaaagaaaatcaaattaatgctacttataaagctcaaggtgttttaactgacattttaccgtctatagataatattgagcgtgcactacaaattgaaggtgatgatgaatcgttcaaatcacttcaaaaaggagtgcagatggttcatgaaagtttactaagagctttaaaagacaatggtcttgaagaaattttagctgaaggtaaggaatttgatcctaatttacatcaagctgtcgttcaagatgacaatcctgattttaaatcaggagaagttactcaagaattacaaaaaggatacaaacttaaggatcgtgttttaagaccatcaatggtaaaagtaaatcaataa

SEQ ID NO: 6044 - DNA, 978 bp, Staphylococcus epidermidis
atgattacaaaaagacaattaagcatccttaatgctattgttgaagattatgttgattttggacaaccgattggatctaaaactctaattcatcgtcatcacttggatgtgagtccagctaccattagaaatgaaatgaagcaacttgaagaaatgcatttcattgagaagacacacacatcttctggaagggtgccatctgaatcagggattagatattatgtcaatcgccttttagaacaaacatctcatcaaagtcaaaacaaaattcaacgtttaaatcaattattaattgagaatcattatgatagttcgactgcactcacaaactttgcacacgaattatctatgaaatctcaatatgcaacgttggtagtccgccctaatcataaacaagatgttataaatgatatacatcttattcgtgctaacaaccatttgattattttagtaatggtattttcctctggacatgttgaaaatatacattttgtatcacatgctcaactaaataatattaatttaaataaaatagcaaactttttgaccgaacatttcagttttaatcgtaaagtactaactcaaaacattgagtcttactttagtcaaaaagaagagctattacttgcaaatgaagtagttgagatgataaatttacaaattggtaatcaaagtaatagcatttatatgggtggaaaggttaaacttattgatgcgttaaatgagtccaacgtttcatctattcaaccgattcttcaatatatagaatcaaataaaatagctgaattattagaagatatatcaacatctcaaatcaatgtccgaattggtaaagagattgatgatagtttaagcgatatatcaattgtgactagtcagtatcattttgatgagtcactaaaaggtcaaattgcagtaatcggaccaactgcaatgcattatcaaaatgtaattcaattattaaaccgtatatggtag

SEQ ID NO: 6045 - DNA, 1125 bp, Staphylococcus epidermidis; identical to SEQ ID NO: 3379

SEQ ID NO: 6046 - DNA, 1824 bp, Staphylococcus epidermidis
atggataagcaagaacgatacaatagaagagaaaatattagaaatttctccattattgctcatatagaccatggtaaatcgacattagctgatcgaattttagagaatacaaaatcagttgaaactcgagaaatgcaagatcaattacttgactctatggatttggaaagagaacgaggcatcactattaaactaaatgctgttcgattaaaatacgaagctaaagatggagaaacttacacatttcatttgatagatacaccaggacatgtcgactttacatatgaggtttctcgctcattagctgcatgtgaaggtgcaattcttgtagttgatgctgcccaaggtatagaagcacaaaccttagcaaacgtttatttagcattagataacgatttggaacttttgccagttgttaataaaatagacttgcctgcagctgagcccgatagagttaagcaagaattagaagatgttataggtatagatcaagaagatgtagtacttgcaagtgctaagtcaaatataggtattgaagaaattttagagaaaatagttgatgttgtaccagcaccggacggtgatccagaagccccacttaaagcacttatctttgattcagaatatgatccatacagaggagtaatatcttcaattcgaattattgatggtgttgttaaagctggagataggattaaaatgatggctaccggtaaagaatttgaagttacagaagtcggaatcaatacacctaagcaactaccggtagaagaattaacagttggtgatgtgggttatattatcgcaagtatcaaaaatgttgatgattctagagtaggtgacacaattactttagctgaaagacctgctgacaaaccgttacaaggatataaaaagatgaatccaatggtattttgtggtctattccctattgacaataaagactataatgacctaagagaagctttagaaaaattacaacttaatgacgcatccttagagtttgaaccagagtcttcacaagcacttggttttggatacagaactggatttttaggaatgttacatatggagattattcaagaaagaattgaaagagaatttggtattgaactcattgcaacagcgccttctgttatttatcaatgtatcttaaaagatggttctgaagtttcagttgataatccagcacaaatgcccgaaagagataaaatagaacatatttatgaaccatttgtcaaagctacgatgatggtgccgaatgattatgtaggtgcagtgatggaattatgtcaacgtaaaagaggtcaatttataaacatggattatcttgatgatataagagttaatattgtttatgaaattccattatcagaagtagttttcgatttctttgatcaacttaaatctaacacaaaagggtatgcttcttttgattatgaatttattgagaataaagaaagtaatcttgttaaaatggacatattactgaatggagataaagttgatgctctaagttttattgtccatagagattttgcgtatgaaagagggaaagcgcttgtcgaaaaattaaaaacattaattccacgacaacaatttgaagtgccagttcaggcggctattggtcaaaaaattgttgcacgaacaaacattaaatctatgggtaaaaatgttttatctaaatgttatggtggagatatcagtcgtaaacgaaaacttttagaaaaacaaaaagcaggtaaagctaaaatgaaagcagtaggcaatgtagaaattccgcaagatgcatttttagcagtattaaaaatggacgatgaataa

SEQ ID NO: 6047 - DNA, 252 bp, Staphylococcus epidermidis; identical to SEQ ID NO: 3381

SEQ ID NO: 6048 - DNA, 975 bp, Staphylococcus epidermidis
atgagcaacaatatcttcactgtctacggtgaagtaccagaattagtcgaaaagaaaacaaaagaaattgtaaatgattatctaggacaagagatagatgactttaattatgtaaaatacaacttgtatgagagtgacctaactccgattattgaagagacacttactatgccttttttctcaaataaaaaagcaattgttgtaaagaactcgtatgtttttacaggagaaaaattttctaaagatttaaatcacaattctgacgagcttataaaatttttagaaaaatatgatggtgaaaatctcattatctttgaagtgtatcagcctaaactagatgagcgcaaaaaactcacgaaaacgttgaagaaaaatgcacaacttaagaaaattgaacaaatgtctgaaaaggaattaaagcattggattaaaaatacactaaacaataattataaagatattaagcaagatgctcttgaattatttattgaattaactggtgttaactataatattgtttctcaagaattagaaaaattaattttattcataggtgaaagacctataattaataaagatgatatcgatttaattattaatagaagtttagaacaaaatgtatttctactaactgaatacattcaaaaaggtaataagaataaagctatacaattagtcaatgatttaattattatgaaagaggaacctataaaattactggcattaattactagtaattatagattatattatcaatgtaaaattcttagtcaaaaaggctatagtgggcaacaaattgcaaagactgtaaatgcacacccttatagagtaaaactagcactcaatcaatcccgacattataaactagaaagtttatttaacattataaatgcttgtgcagagactgactacaaactaaaatcatcttatatggataaacaactcattttagaattattcatactatctctataa

SEQ ID NO: 6049 - DNA, 2217 bp, Staphylococcus epidermidis
atgttttacattgctcttgcttttttggtaggggtactttggataaaattcaaagtaatctctatctccttaatattaactcttttgttactaattatgataaaaaggcttaatattataatactattattaatgtttatttcagctataagttcattttttttaataagttcctataaccaaactgatattaaaaacttaaatagtttatatagtgaaccgtttattgatgattttgttcgtttcaaatcttttacgcttaaatcaacatactacactggcatattaaattataaaaataaagactatagatacttttacaaaatattaaagtcaaatttcaagcaagatttaactcataaaagttgtcgagttaaaggagaatttaaattcgaaaaagagttgcccttgttggatatttcaacagttcaatttaagtcttgccaagaaaacaatattttcactcctatatatcatcatcaaaattatatcaccaaaataattcataaatctggcgtcacgcatcctgaaagaatattagcgttaataacaggtgacacctctctaattgatgaatattacaaatctaacatcaaagatataggtatttaccatttactagctataagtggtacacatgttggtacaattattgtcctcgtttatcaactgttagtacgcttaaatatacctctagttctcattaaaggtgtaactattttactattattaatctacgctgtttatactggatttgtacctagtgccatgcgtgccatttcaattgcaatcattatacttatgttgccaatccattttaggaaaagttctatacatgtgctttcatttatatttgtgttaatgattctcttaaatcctcaatttataaatcacattggttttcagttctcttttttgataagtttatttattatattggcaaaaccatatataagtgctttaaaaccacttaaatgtttgtttattattagttttttggctcaattaggttcaattgtaattaatacctatcattttaatcaatttcaatggataggtttgctatctaattttatatttgttccattctattcttttatattatttccttcggtcattatctactttattttaattcacttttttcaacatagcttcctattaaatacttatataaatatgctttttaaaattcatgactggctagttcaattatttttaaatttaaatcattttaagtggtacattcctaaattaaaccaatatagtttacttattttgattatactaacgttaatttttctttacatacttgtctatagagggtttgttacatccgtactaagttttttaattgttttaatcatttttacacatttaattagaccacattatgccgagttaacactttttgatgtgggtcaaggagatagcattttattcaaaacaaagtcaaataaaagtgttttgattgatacaggtggtaaaagaaatgaaaatgtaagttttaaacataataatattgccaaatataaaattttaccaagtattaagaaaaagggtatcaccactataaattatttagtaattacacatcctcatgccgatcatatgggtgaattaatatattttttaaataatattaatgtgaataatctcgttttaaatattgaaagtttcccattagaattacttaaagaggttacgacaaaatgcaaggaaaaaaagataaatatcttggatgtaaatcaagttaaaaaaatagatattgataatagtaagataagctttttaaatagttttataccattaagtgatgataaaaatgaacattccattgttacattaattgaatataacggcattaatattctactgatgggagatgcaactgttaataatgaagacattctaatgaagagatataatttaccaaaaatagatattttaaaagttggtcatcatggaagtaggacaagtagttcggaattatttattaaagatatagaacctaaaatcagtcttatatctagtggtaaaaataataagtatcatttacctaatttggatgttattcaaagattaaaatattatggtagtaaagtttttgatactcaagacaacggggaattaactataaatttagatgaagaagtttacatagtctaccgtgataatttaaatcaaaagagtttagctagagaaagtgtatcgtaa

SEQ ID NO: 6050 - DNA, 462 bp, Staphylococcus epidermidis
atggaacgaattaaatgggaagaatacttcatggctcagagtcatttactggcattaagatcaacgtgtaaaagattatcagttggtgctacaatcgtaaaggataatagaataatagcgggtggatataacggctcagtagctggagaagtgcactgtattgatgaggggtgcttaattgaagatggacattgtatacgtactatacatgcagaaatgaacgcactactacaatgtgcaaaacagggtgtatcaacagaaggagcaacgatttacgttactcatttcccttgtttaaactgtacgaaatcaataatacaagcaggtatcaaaacgatttactatgcacaagattatcataatcatgactatgccattaaattattgaagcaatcaggaattgaatataaaaaaattccgtttttacctgaatatgttgctcaatatctgactcaagaataa

SEQ ID NO: 6051 - DNA, 675 bp, Staphylococcus epidermidis
gtgtttaatattaacagacgatatatcgatttttttatgaaatggaagttgtacatcttaattatattaataatgttaacaacattctttttttacttactcaatgataacaataatgatttgatacagaatagtcaggaaagacaatctaaaatatctgaccagcaaataaaaaatagcaaaaagttaaataaaaaagaagtgtctattcaaaaagataatacaaaagaaactaaaatatttatcgatattaaaggtgctgttaaacatccgaatgtatatgaaatggcttcttcgaatagagtcattgatgctttaaataaagcagaggtattaaaggatgcagacttatcacaattaaatctttctgaaaaattagttgatcaaaaacttatctatgttcctaaaaagggtgagaatagtatgaaaatcaactcacagcaatcaacattgaattcgagtgacgtaaaaatcaacacgaatcaacctttaaatttaaactctgctactgaagaacaattgaaaaacataccaggaataggtccaagtaaagctaaagaaattttaaattacagagaacaaaatcatggatttaatagtatcgatgacttaatgaaaataaaaggattcggaaagaaaacatttgaaaaaatgaaagaacattttactatttaa

SEQ ID NO: 6052 - DNA, 720 bp, Staphylococcus epidermidis
atgaatcaatatgaagatatgagtttagtatatgaccaacttactcaagatcaaccgtatcattcgtggtttaatattgttgagcatttcttaccttctgatagtcatgatttgttagatattggttgcggtactggcaacttaacacaattactaacgtcactaggtgaagtcactggtatggatattagtgtagatatgttatcaatagctagacaaaaaacaaatcaagtgaagtggatcgaaggtaatatgactcactttaatttgaacaaaaaatttaatatgattacaatattttgtgattcactgaattatttagaaacattaaatgacgtaaaaatgacattcgaaagagtgtatcaacatttaaataaaaatggtgtttttatttttgatgtacatactgttcataaaatgaaaacattatttaataataaaagttatattgatgaatctgataatgtttttgtaggttgggatgcaatatgtggggatgaaccattaagtgtttatcatgaaatgactttctttgtatcacagcaaaatggattgtatcaacgctttgacgaatcacattatcaaagaacatatgaggaacaaatttatcgaaatttactaaaagatgttgggtatcatagtgttaagacttttacagactttaacattcacagtcatgaagaagatgcccatcgcttgttttttgttgctaaaaaataa

SEQ ID NO: 6053 - DNA, 354 bp, Staphylococcus epidermidis; identical to SEQ ID NO: 3387

SEQ ID NO: 6054 - DNA, 585 bp, Staphylococcus epidermidis
atggagataagtagagctaaagaactggtaaaagaaaaactgcctgataaacgttatcaacattcattacgagtggcggatacagcagttaagttagcagaaatatacgatggtgatatcaaaaaagctgagttggcaggtatattacatgattactgtaaatacgaagacttaagtacaatgtatcaaattgttagacaatacgaacttgaaagtgatttacttagttatggtggagagattcttcatggaccagtatgtgcggcacttatgaagcatgaatttgatgtaaatgatgaagaagttttacttgctataaaatatcatacgactgggcgtcaacaaatgactaaaacagagaaacttgtttttattgcagactatatagagcctggtagaaaaacgcctggagttgaagaaattagagatatggcatacaatcaaggtagcttagataagacaatttatgagatttctaagcgtactgtattatttttaatagaaaaggatattactgtatatggcgccacaattgcgtgtttaaattattataattatagcgatgaaagaataaaggatgattaa

SEQ ID NO: 6055 - DNA, 576 bp, Staphylococcus epidermidis
atgaataaaaaaatcgttctctttggcggacaatttaacccgattcacactgctcacttagcagtagcaagtgaggtttatcatgctattaaaccagatatatttttctttttgcctagttatatggctcctttaaagcatcataatacacaattatattctgaacatcgagtgaaaatgatacagctcgctattaaggaaattggatttggtgaaatttgcactactgatttagatagaaaaggtccaagctatacgtatgaaaccattttgcatctcaaagaaatatatcataatgcacagttatactttattattggaacagatcagtataatcaattggataagtggtataaaattaatgaattaaaaaaacttgtaacctttattgtagtgaatagagaaactgataaccaaaatgtaagtaaagagatgatttctataaagatacctcgaatagatataagctcaacaatgattagaaatagagtgagaatgaaccaatctataaaagttttagtacctaaaagggtagagaattatattaaagaggaggggttttatggagataagtag

SEQ ID NO: 6056 - DNA, 294 bp, Staphylococcus epidermidis; identical to SEQ ID NO: 3390

SEQ ID NO: 6057 - DNA, 810 bp, Staphylococcus epidermidis
gtgaaatttgcagtaattggaaaccccatttctcattcattatcgccattgatgcatcatgctaattttcaatctttaaatttggaaaacacgtatgaagcgataaatgtaccagttaatcaatttcaagacattaaaaaaataatttcagaaaagagtattgatggattcaatgttactattccacataaagaacgtattattccgtacctagatgatattaatgaacaagcgaaatctgttggggcggtaaatacagttttagttaaagatggtaagtggattggttataatactgatggaattggttatgttaatggtttaaaacaaatatatgaaggtatagaagacgcttatatattaattttaggtgcaggtggagcaagtaaaggtatagcaaatgaattatataaaatcgttcgtccgactttaacagttgcaaatagaacgatgtctcgttttaataattggtcgttaaatattaacaaaataaatttaagccatgcagaaagccatttagatgaatttgatattataataaacactacacctgctggtatgaacggcaatacagattctgtaatttctttaaatcgtttagcttcacatactttagtaagtgatattgtttataatccatataaaacaccaatactaatagaagctgaacaaagaggtaatccaatctataatggtcttgatatgttcgttcatcaaggtgctgaaagttttaaaatttggactaatctagaaccagatataaaagcaatgaaaaacatagtaattcataaattgaaaggagaattatga

SEQ ID NO: 6058 - DNA, 1101 bp, Staphylococcus epidermidis
ttgaatgaaatactaaaatgtattggatgtggtgcacccctacagtcagaaaataaagacgcacccggctatgttccagaacataatatgtttcgagaagatgtcatctgtagaagatgttttagattgaaaaattataatgaagttcaagatgtgggtatggaaagtgaagattttttaaatctacttactggactatctgaaaaaaaaggaattattgtcaatgtagtagatgtgtttgattttgaagggtcattcatcaatgcaatacaacggattgttggtaataaaaaaattatattagtggcaaataaaatagatttattacctaaacaaattaatcatcgacgtgtaaaagaatggttgagaaaatctgctcgtaaatatggattagaagcagaagatgtcgttcttatttctgcaaataaaggttgggggattgatgaattattacaatctataaaccatgtaagaaataaagatgacgtatacattgtaggtacaacgaatgttggaaaatctacattaattaataaattaattgaacagagtgtgggagaaaaagatgtagtaactacatcacgctttccaggaacaactttagatatgatagatattccattagacgaaaaatcatttatgtttgatacaccaggtatcattcaatcacatcaaatgacaaattatgtatctgaaaatgagttgaaaatcattatacctaaaaatgaaataaagcaacgtgtgtatcaacttaatgaaaaacagacattatttttcggaggattggcacgcattgattatgtatttggtggtaaaagaccacttgtttgtttcttttcaaatgatttaaatattcatagaactaaaaccgagaaagctaatgatttatggaaatcccaattaggcgcattgctttcaccgcctcaagatgcacaacaatttaatcttaatgatgtaaaagcagtaagactggaaactggtaaaactaaacgtgacatcatgatatctggtttaggattcataactattgatgctggtgcaaaagtgatagttcgtgttccaaaacatgtagatgttattttaagaaattcaattctttaa

SEQ ID NO: 6059 - DNA, 528 bp, Staphylococcus epidermidis; identical to SEQ ID NO: 3393

SEQ ID NO: 6060 - DNA, 687 bp, Staphylococcus epidermidis; identical to SEQ ID NO: 3394

SEQ ID NO: 6061 - DNA, 1245 bp, Staphylococcus epidermidis
atgggggaaaatacaaaacaagatttcaatcaaaaaggacaaaattttaaattcacaaaaaaacatagacgattattatatggttcagtttttttaatggctacatcagctattggtccagcatttctgactcaaactgcagtgtttactgcacaattttatgctagttttgcatttgcaatattaatttctattattatagatataggcgctcaaataaatatttggagaatattagtggtaactggattacgtggacaagaaatatctaataaagtattacctggacttggtactattatctccatactaattgcatttggtggtctcgcatttaacataggtaatattgctggtgcaggtttaggtttaaatgcaatgtttggtcttgatgtaaaatggggtgctgcaataacagctatttttgcgatacttatctttgttagtagaagtggtcagaaaataatggatgttattagtatgattctaggtatcgtaatgattttagtagtcgcttatgtcatggttgtttcaaatcccccttatggagatgcattagtacatacatttgcacctgaacatcctttcaaacttatattacctataattacattagttggtggtacagtagggggttatattacttttgcaggtgcacatagaattctagattctggtataaaaggtaagtcataccttcctttcgtaaatcgatctgctgtagcaggtattttaacaactggtgtcatgcgcaccttattgtttttagctgtactaggtgttgttgtaactggcgttacgcttagttcagaaaacccaccagcatcagttttccaacatgcattaggtcctataggtaaaaatatttttggcgtagtaatatttgcagcagcaatgtcctcagtaattggttctgcatatacaagcgcaacatttttaaaaacactacacaaatcgttactcaataaaaataatcttatcgttattacatttattgtaatttcaacttttgtcttcttatttattggtaaaccggtgagtttacttataatagctggtgcgattaatggttggattctaccaatcacattaggtgcaattctcattgcaagtaggaaaaaatctatcgttggtaattaccaacacccaacatggatgcttgtttttggtattatagccgtaattgtcacaataatgactggtatcttttcattacaagatttagcaagtctttggaaagattaa

SEQ ID NO: 6062 - DNA, 753 bp, Staphylococcus epidermidis; identical to SEQ ID NO: 3396

SEQ ID NO: 6063 - DNA, 1362 bp, Staphylococcus epidermidis
atgatgtatcgatgtttgattgcaaatagaggcgaaatagcagtaagaattataagagcttgtagagagcttaacatagagacagttgccatttatgcaaaaggtgatgaaaatagcttacatgtaagtttagccgatcaagcaatatgcataggtgaagcaaatccattagacagttatttaaatattgatcgtattatatctgctgcaaaagttacagaatcaaacgcaattcaccctggctatggtttcttatcggaatctacgaattttgcgaaagccgttgaagacaatcatatacattttattggacctagtaagacaactatggaaatgatgggggataaaattactgccagacaaactgttaaacaagcaggagtacctgttataccaggttctaatgatgctgttcaaagtgtagatgaaattaaattattagccaaagaaataggatttccagttgtactaaaagcagctagtggtggtggcgggaaaggcatcagaattgttaaagaagcatctcaattggatcaggctttgaaagaagctaaaagtgaaggacaaaaatattttaatgatgatcgagtgtatgtagaggcgttcataccagtagcaaaacatgtagaagtgcagattatcggagacggtaaaaataactatgttcacttaggtgaacgcgattgttctgttcaacgaaagaatcaaaaattaatagaagaagcgccttgtgctgcattaactgcacaaagaagaacaagaatatgtggcgacgcagttaaagtagctcaagcttcaagatatcgtagtgctggaacaatagaatttttagttacagaagatgcacattattttattgaaatgaatgctcgtattcaagttgaacatacagttacagaaatgcgtgctgatagagacttattacaagctcagttatatttattaacacacggtgaattaccattcactcagaaagatattttatttaatggtcatgtaattgaggcgcgtataaatgctgaaaatcctgaaaaaaactttttacccactccaggaaaagttaataaattacacttaccacaaggattcaatatacgtgtagattctttactttacacaggttatcaagtttctccttattatgattcacttgtagctaaagtgattgtaaaggattctaatagacaaactgctattaataaattaaaagttgcgttagatgaaatggtcatcgaaggttttactactacagctgactttttatatgcggttttaaattatccaatatatgcaaaaggcgatgccagtaaagtagatataaaatttcttgaaaaacatcaaatcattaaagaggtgaaatga

SEQ ID NO: 6064 - DNA, 441 bp, Staphylococcus epidermidis; identical to SEQ ID NO: 3398

SEQ ID NO: 6065 - DNA, 1005 bp, Staphylococcus epidermidis
atgagtattaaaattttaaagcctggcctgttttcaacaattcaagatataggtagattagggtatcaggatttaggattttctgaagcaggtgcattagattactatagtttatctattgcccaaaaacttatcggaaatcatggaccagcaattgaatatactttagtaggtcctaatatagaatttttaacagacaatacttttgccattgtcggtggtgattcagaaccgaaacttaatggtaacaaaattgacttattaactgtttatcatgtaagaaatggagaccaattagacattggtcaaatcactgaaggagcaagaggatatattgtttttggacacccacttaaaattaataaagtggctcaaagctattctacacatgttagaagtggaatgggcggatttaaaggtcgtgcattaaagaaatacgatgttattgcaactcaagtaaatcataactataaaactaatttaggaaaaacaattgatttctcatctatacctgataataattacatacacgtcattgaaggacctcagatcaatgaatttgatgaagaaacgatagctaaattcgtaaatagcgatttcaaaatttctgatcaatcagatcgaatgggatacagattaaaaggtaatacaatagcacctaaaaatagtgctgatatcatttctgaacctgtcgctttgggaagtattcaagtacctaacgatggtaatcccattattcttttaaatgataagcaaacaattggtggttatacaaaaattgcaacggtaacacaattagatttaagaaaattagcacagatgaagcctggagacattatacagtttaaatggataactgttgaagaagcttcaaaaaagcttaaagaatttaatactaaatttggacaattattaaagcgttttgatgagcaaccattgtttaacctaaatcatattagacatacttctaataaaatcgcagaaataattaaggaggatagataa

SEQ ID NO: 6066 - DNA, 732 bp, Staphylococcus epidermidis
ttgaggacacaatttattaatgaacaaacaatgatgatttactttgaaaatgaaattagtgaatcaactttcaaaaaggtacaacaaacaattcaatatataaaatcgaaaaatttatctgaaataacaaacatgataccttcttatcgtgctattctaatttactttgataattcggggataaacggaactgaattattagaaaatttagaactcgatgaaaattcgaacagtagaaaacaatcacattttaaacagcgtatcattcatatacctgtattatatggtggagattttggtccagatttatcagaagtagctaacgttaataaattaagtcaggaagaagttattcaaatacatacacaaaaaccttatctaatctatatgcttgggtttatgccgggtttcccatacttaggtggattggatgctaagttgcacacacctagacggtctgaacctagaatcaaaattaacgctggttctgttggaatagcaaataatcaaacaggtttatatcctatggactcacctggtggttggcagataattggtcgcacaccaataaaagtctttgatttaaataggacaccaatgacgttatatgaagctggtgattacatacaattttatagtataaattatcaagagtttgaaaaaatatcaaacgatattaataaaggaaaatttgatatagataagtgggtgacatatcaagatgagtattaa

SEQ ID NO: 6067 - DNA, 690 bp, Staphylococcus epidermidis
atgaattattcaccaaaacaaggtgttaaaagtcatggattgccacatgatccgttcaaaagtagcacagtacctagacctataggttggatttctacagtatctaaagacggtaaagataacttggcgccgtacagtcaatatcaaaatcttacatgggatcccccaatggtaatgtttgcggctaatcagtcagtgcatggcgatcatgaaagaaaagatacagttaaaaatgcggaagaaactggttggtttgtatggaatatggcaacatatgatttgcgtgaagcagtgaatttatcatccaaagcattacctccagaagatgatgaatttgactttgctggtgtgacgaaagaatcgtgtatcgaagctcctggaagtagggtaaaggaatcacctgttcattttgaatgtgaatatgttcaaacagtaagaattcccactggagaccctgtttcaactgtggatatagtcatcggtcgtgtagcacaagtgcatattgacgataaagtaattatggacaacggaaaattagacattaagtcaatcagacctatagcacgtctcggttattatgattacacggttgtcgatgaaatatttgaaatgaaagcacctgcagcttcgaaagaagaattggctggacttgaaggtcgaaattttgacaacactaataatgaatcatga

SEQ ID NO: 6068 - DNA, 1173 bp, Staphylococcus epidermidis
atggaagaaagtaaaaactataatctcattacgacaatcatgtttatttcaggtatcattgtaatggcaagtttatatacggctctacctctgacagcaactttcgcagaagactttcatgttcctgaatctatagcaactttaaacggtgttttattctcattaacatattcaatcagttgtttattttatggaacgatttctgaaaagtatggcagaattaaaactattttagtaggtatgagtgcattagttatcatctgtcttatgataggtattgttcattcatttacagtgttattaatattaagagcactacaaggcgtatttgctgcatcattttctcctgtagtcatgacttatacaactgaaacttatccacgtgtgaaacgtgtaacagcaattagtttcatcagtacaagttttatgttatcaggtgtgttagggcaaaatatgagtgaattagtcgtaagttatttgaattggcagtgggtatattttattttaacaatcttatatttaattctcgtattagttatttataaaaatgtacctgagagtccacataaaaatcctgatatacaactcattaagtttttcaataactttaaagatttcaaagacaatcttaaagttttctattgtttatttatttcactaacattactgattatgtttataagtatgtatgatattttaaatgaatatgtcacatcacaccaagttgggggagacatgtctgtgtcctcaatgatgaaattgttcggtgtgataggcatgttattatctctattagcagggcgtgtaagcagtcgtataggtatgaagcgcttgctaactatcgcattaacaacatgtattgtgtcgatcatactcatgggtgtaactacgaatattatacttattacaacatttagtgtgttgtttgttgcaggtatcgcatttgcgattcctactgttatttcaaaaataggtgtagttgttaaaaacaatcaaggtttctttttatctgttaatacatttgtattattcttaggaacagcgattgcacctattttaatgttatttgtaggcgaactgtctaactttttcttacagtttttaatgattgctattgtcggactgattgctttagttgtatcaatatttatgccaggtgaccaacgttcttga

SEQ ID NO: 6069 - DNA, 357 bp, Staphylococcus epidermidis
atggttttacgttatgctacaaatttaaaactagctaaagaattatatgatgcaagtaaacctaaattaaaaggcgatcaaggtatgattgatactttcactaatacatttggtttaccggaaaactcagttaaattagcaggtggcgttgaagctgtagctgctggtttatttgctgctagttttttaaataaaaatatttcacgcttaggctcacttgcagcaatttcagtacttggtgttgcagcttacaaacattttgaagcagggcatggtaaaaaaggtgcacaacatgctttagacttattaggtttatcaacacttagcttattagatactttttcttgtaaaaaataa

SEQ ID NO: 6070 - DNA, 480 bp, Staphylococcus epidermidis
atggaaacggtatattttgctggtggatgtctatggggaactcaagctttttttaatacgattccaggagttattcaaacagaagctggaagggcaaatggaacgtcgaaatgtttagatgctccttatgatggctatgctgaatgtgtgaagatacactttgatcctgcaaaaacttcaatacttatgctgatggattatttgtttgaaatgataaatccttatagtttaaatcaacaaggtcaagacaagggtcaaaaatatcgaacaggtgtgtatagtgaaagttcgaagcatttaaatgaagtaaaaggctacattaagcgcagggaagacgcgaaacaagtaatggtcgaagtacaacctctaagtaattatgtgaagagtgcagaagaacatcagaatcatcttgagaaatttccggaggattattatttatgtcatgttcctccagcattgcttaataaatacaagaaataa

SEQ ID NO: 6071 - DNA, 348 bp, Staphylococcus epidermidis; identical to SEQ ID NO: 3736

SEQ ID NO: 6072 - DNA, 1341 bp, Staphylococcus epidermidis
atgattaatttattcgaaaattataatcaagaaacacaggaattacatcaatctcttaagcgtgctggttacaatcactttacgattgtaattaatgatgatggatttttacctgatgatgtgacatcgccgtatcgttttttcgcagcatatcaaatttatgaagatgatacccctgctttttttaatgatattgatacgccgcctttttgggaaattaaaggagatgcgacaatggctaccattacagatatgggtgagcttagaggtaaaatcttttataaggaacattataagacacgtgtagttagccatgtagagtggcttgattcaaaacagcgtttgcgttcggttgattattatacaaaagaaggatttaaatttgctgaaacagtttacgatttgttaggtaatgcaatattaaaaaagtatatgacacgtgaaggtaaagaagtgatttatgagaattatgtaactaacgatgtagttgtagaatataaagggaaatcttatttttttgattcatatacagagtggattaaattttacttgagtgaaatgggcattgagataaaagaagttatatttaatactttatcaacaccatttttagcaatttatcatttgccgacattgaaaaaaggtattttattttggcaagaacaatctcagggttatgtcccaggaaatatgaaagtcatgttatcaccaaaccttcaaagtcgctttgccgttattgtccctaatcagaatgaatacaaattgatcaaggaacaactatctagggaggaacaacaggcagtatatgcatctggttacttatatgacacgtataaacggaatcattattctaagaatgtattaacattaacaaattcagatcaaataccacatgttgaaacgttggtacgtttgcataaagattatcaatttcacataggcgctaaaactgagatgtcttcaaaattattaagtttatcgcaatatgaaaatgttaaattatatccaataattaaagaacaaacagttcaaaccttatatcaacaatgtgacatctatttagatattaatgaggggaacgaaatagggaatgctgtaagaagcgcatataatcatcaattgttaattatgggatataaagaggttgttcataatcaagatttcgttgcaatagaaaatcagtttcttgtaaatgatataagtcagttgagtaacgctttgaaagagataggaaatcatcgtggtcaatttgaaacacgtttagcactacaacaacgtcatgctaatgctgtgccggtatcaacatttaaatacgcattagtacaagcattaagtggttaa

SEQ ID NO: 6073 - DNA, 1509 bp, Staphylococcus epidermidis
atgacgatttataatatcaattttggaatcggttgggccagtagtggtgttgaatatgcacaagtgtatcgagcaaaactattaaggcaattaccttatccaacaaaatttatatttttagattttattcaatcagaaaatattcaaacactcacaagcaacatagggtttaaagatgatgaagttatttggctatatcaatacttcacagacgtaaaaatcgctcctacaacgtacacagttgatgatttaatttcagagttaggtaatgaggttactcgaaaagaacaaaacggtaaagtattacgactctatttaaataatcagcaaacattcgtaacctgctatttaaaaaatgctaacgaacattacgttgatcgtgcagagtttgtggtgaatggaatgttaattaggaaagatttttatagctatgtaagaacattctcggagtattatgctccttttgacaataaagctaaaatatatatgcgtcaattttataatgaaaatggatcaattgcatatcgcgaatatatagatgaagatgaacatgtttttgtgtttgatgatgcacgtttatacagtaaacaagcactcgtcgcatactttatacgtcaattgcgattgaattcagaggatatcattattattgatcgagcaactgatgtgggacaagccatattagaaaacaagggatccagtaaagttggagtagtcgttcacgctgaacatttcagtgaaggtgcgactgatgggactcacattttatggaataattattatgagtatcaattcgaaaatgcacagcatattgatttctttatcacagcgacagatttgcaaaggcagacactaagtgaacaatttaaacaatataagaatgattgtccacgtatacgtacaattccagtaggtagtatagaatcgttacaatatcctgaaaaagaaagaaaaccatattccatcatgaccgcatcacgtcttgctaacgaaaaacatgttgattggatagtggaagctgtgattaaagctaaacatcagttacctcaattgagttttgatatctacggacaaggagaagaacaagaaaaaattaaaaatattattaccaaacatcgtgctgaggattacatacaaattaaaggacatagaaatcttcgtacaatatatcagcaatatgaattattcatagcggcctcacaaagtgaagggttcggactgacattaatggaagcggttggctctggtttaggtatgattggatttgatgtgaattatggcagtccgacatttattcgacatcatcaaaatggctatttgataccgatagattttgaacaagcgtctactgatgatatcacaacgcaaatcgctcatatgattattcgatattttgaagatggtcccataagggcacatgaggtatcgtatgacattgcagaatcatttaaaacatcgcatattgttgatctatggagacaactcattgaagaggtgctatatgattaa

SEQ ID NO: 6074 - DNA, 2391 bp, Staphylococcus epidermidis
atggctaaaggtgttaaccaaattattaataatattaggttaagaaaattgcgcaaaatattaaatcaaattaatgcgcttagtgaggagttctcaaattttagtgatgaagcacttcaagcgaagacaaaagaatttaaagtttatttaaatgataataaagcttcactcaatcacattctgccacaagcttatgcaacagttagagaggcttctaagcgcgttttaggtatgtatccaaaagatgtgcagattttaggagcaatcgctatgcatcaggggaatattgcagaaatgcaaacaggagaaggtaagacgcttacagctaccatgcctctgtacttaaatgcacttacaggtaaaggtgcttatctaatcacaacaaatgattacttagcaaaacgcgattttttagaaatgaaaccactatatgaatggctaggcttgtctgtatcattaggatttgtggacattccagaatatgaatacgctgaaaatgaaaaatatgaactgtaccaccatgacattgtttacacgactaatgggcgactagggtttgattatttaattgataatttagctgatgatattcgtgccaaatttttaccgaaattaaactttgctattattgatgaagtcgattctattatattagacgctgcccaaacgcctttagttatttctggtgcaccacgtgtacaatctaatttatttcacatcgttaaaacgtttgttgaaacacttgagaaagataaagacttcatagttaattttaataaaaaggaagtgtggctcactgatgagggctcggaaaaagcaagccattatttcaaagtgaatagtatataccaacagcaatattttgatttagtgaggatgattcatttatcgcttagagctaagtatttattcaaatataatttagactattttatttttgatggtgagattgtgcttatagatagaataactggtcgtatgctacctggaacaaagcttcagtctggtttacatcaagctatagaggctctggaaaatgttgaaatttctcaagatatgagtgtgatggcaaccataacattccaaaacttatttaagcaatttgatgaattttcaggtatgactggaacaggtaaattaggggaaaaagaattctttgatttatattcaaaagttgttatagagattccgacgcacagtccgattgaacgagatgatagacctgatagagtatttgctaatggtgacaaaaagaacgatgcaattttaaagacagtgattgatatacatgaaactcaacaacctgtgttactaattacacgtactgcagaagcggcagaatatttttcagctgagttatttaaacgtgatatacccaacaatttattaatcgctcaaaatgtagctaaagaggcacaaatgattgctgaggcgggacaattatctgcagttactgttgctacaagtatggcagggcgtggaactgatataaagttatcaaaagaggttcatgatatcggtggcttagcagtgattattaatgaacatatggataatagtcgtgttgatcgtcaattaagaggacgctcaggtcgccaaggagatcctggatattcacagatttttgtatcacttgatgatgatttagtaaaacgttggagtaactctaacttggcagaaaataaaaacctccaaacgatggatgcatctaaactagaaaatagtgcactctttaaaaaacgtgtaaagtcaattgttaataaagcgcaacgtgtatctgaagagactgctatgaaaaatagagaaatggcaaatgaattcgaaaaaagtattagtgttcaacgagataaaatttatgctgaacgtaatcacatacttgaagcaagcgattttgatgaatttaattttgaacagcttgcacgagatgtgtttacaaaagacgttaaaaatcttgacttaagtagtgaacgtgcacttgtgaattatatatacgaaaacttaagttttgtctttgatgaagatgtatcaaatattaatatgcaaaatgatgaagaaatcatacaatttttaatacaacaatttactcaacaatttaacaatcgtttagaagttgctgctgattcatatttaaaacttcgtttcattcaaaaatcaattttgaaagcgatagatagcgaatggattgaacaagtagataacttacaacaacttaaagccagtgtaaacaatcgacaaaatggacagcgtaatgtcatttttgaatatcataaagtggctcttgaaacgtatgaatatatgtctgaagatataaaaaggaagatggttagaaatttatgtttaagtattctagcctttgataaggacggagatatggtcattcatttcccataa

SEQ ID NO: 6075 - DNA, 573 bp, Staphylococcus epidermidis; identical to SEQ ID NO: 3732

SEQ ID NO: 6076 - DNA, 1560 bp, Staphylococcus epidermidis
gtggcacgtaaatttagagtacttcaagtaggtggtcatgatttaggttctttatttaatcaaaaaagtaatgtcgaatgggattattttgatgttggtttgtttgattttgaaagtggctatcaagatgttgtagtacatattttagatgaaaaaggacaatttgattttgtttttgtacgtgaaaaatattctgattcattaatgaaacttttatcattagtcagtacaccgtataatactgtgattgacaatgagtattgggataatcaataccaacaagataagacaatacaacgtaattttataaaaccactcatttatgaaaatgaagaacaattacaacaaaaactagaggcagttacatttccggggcaatatggagataaagttaaacctattcattgtcgcgttagtattcattttgatggttcttatcaatttaatggaaatgagtctattgaagtatcaggacgatttggggaatcataccaacccctcattacatggagtcaaaatatcattgctgatgccaataaggtgaatcaaatatggccagaatttaaagttgaaggtgatgctaaaatccaatatacattgagattgacgcctgtttattcaactgatcaaccagtagaaaagctaatatatgaacaagacgatttagacactcccatagaactacctgctcgtccttatcaaacatatgtgagtgtatcaatcaaagctaaaggtaaaggaacattatttataggtgctattcataaacgttggtcacgcttggaattagggcagttcatattaggcggaaaacgatatagtgatgaaaataagcaagaatttatacattacttccatcctggagatttaaaaccaccactcaatgtatattttagtgggtatcgtactgctgaaggctttgaagggtactttatgatgaaacgtatgaatgctccatttattttaatagctgatcctagaatcgaaggtggtgccttttacctagggtcagagaattatgaacaggcaatccgtaaggtcatccaaaatgctttggattatttgggatttgcgaacaaccaattaattctttctggattatcaatgggatcatttggcgcactttattacgctacaaaattaaatccagcggctgttattgtaggaaaacctttgataaatctcggtactattgctaataatatgaaactcgttcgtccaaacgattttggaacgtcacttgatattttgcgattgaatcaaaatggcataactaacaaagatgttgttcagttagataatcatttttggaagcaaattcagcatagcgatttgtcaatgactacatttgcgattgcttacatggagcatgatgattatgacaaatatgcatttcaagatttattgcctgttcttacaaaacaacatgcacgtgtgataagtaaaagaattcctggtagacataatgatgattctgctactgttactcattggtttattaatttttatcatttaatcatggaagagcgatttgggagggtaacacatgcaagaagatag

SEQ ID NO: 6077 - DNA, 1557 bp, Staphylococcus epidermidis
atgaaacgatttataccagcttggtatagccgtaacagatggtgggaaagtacctcaagaccattctatctaaaaaaacagtatacagattttgacgatatgattagtttaatgacaatgcatagttcgaataatgtggattatcaattgatagttttaaattttagtccatatcttagaacattcctccatcgatatgatttgtatgaaagtcattattggtctgtatttgatgagatacagggcgttggacatcaaacgcctcaagctattgattatcgcgatctttcatggccagaaggcactgaatttatttttactccctttcaaattcaagcgattacaggtgataacacgttttctaaaattcacttcagccaagaggggtacctgatgtgggtagaggattacaagtatagtacaattcaaagacgatttgtattcgatgacagaggatttatatcggcagtgcgtacttatacatctgatggtgataacaataaaaaacactatttttcaaaagatggggaagaaatatttgttgaagacttaaatgttaatacagtaacgattaataaaaatttccaatcaaaatttaaaaaggttacgtattcatctatggctgagttgatagaagagaaattccaatcatatgtagaaagagaattgaatgaagatgattctgttatagtggcatctgatgaacgtcataattcaatgatggcacgcactattgatgcatcgtctttatgtttttctatttttactgagcgaaataaagtggtgacacaagatttatatgactctatttctagagcatattattgtctcgttgatacacaagctaatcaaaatatgattgaacactacgcaggattgaacatgaatgatattaatcttttaagggtaacgccttttgatgcgaagtcattacctaaccaaagtagtcaattgtatgacacttatattggattatggatagatggtttggacgagattgaaatacgagagattgtaaacagcttatttcaatatattcaacataaagatggctataagttgaaaattttaactaagagtagagataatcttacggaaaatcttatagatgaagttgctcatctcaatgatttatatcaccaagagaaaaaggaaataagtgatgtaattgaagacgtgatacagaataaaaaagaaacgatcattgatgttgaaacagtaccgtttgaagaagatcttgtaagcgttatttcaaaattaagagttgtagtagatttatctttagagccgaaactttttttacaaatctgttgtattggcgcgggtataccacaaattaataaaaagagaacagattatgttaaacatatgcataatggatatattattgatgacatatcgcaaactgtagaatctttagattattttttggcacatttaaaaaattggaattattcttatgcatattccatgagattaacggatgattttagttcaattaatattattcatcaaattaatcagttatttaaaggtgatgtttcaagtggcacgtaa

SEQ ID NO: 6078 - DNA, 1200 bp, Staphylococcus epidermidis
atgtttaagaaattcgaatataaaatcttatataaaagaatattttttacatgcttaattttagttatatatattataggaagtaatatttcaatcgtaagtaatgaaaatttaagaactcataaagactccttttttaagttagctattactaatgtaggtggggatttacatacattaaatatattttcactaggacttgggccgtggttaagttcgatgattattttgacactaataaaccacaaaagtaatgataaggttaaaacacaaactcgtagggaacgacatttcaaagagcgagcgttaacacttatcattagtgctgctcaaggattttacattattcattcatatattaataaacatgcgattaaagatagtaatatgctcattttattattagtcttaattacaggaacgttgttaatggtgtggttagcagatcaaaatacaacgtatggcatttcgggacctatgccaattgttttaatgagtcttgttaaatctatatttaatacacattttcccaaattaaattcaagcgcatctttaattactatgattattgtcttattagtgctggccttatttatactcttcttcattgagttaacagaatatcggatagaatataatgatattatgaatatttctgctaaagatataccatcatatttatcatggaaacttaatcctgctggtagtatctctatcatggtcagtttgtcattatttatgttaacgaataatatcgttaatttcataggacgctttatcgtgaatcataattttgaaacatatgtctttaattttacaaatccagttggaattactatatatcttctgttacaaatgattttgggttactttttatcaagattattaattaatacgaaacgtaaatcaaaggaatttcttaaaaatgggaattacttcgagggtatacaacctggacagcagacagaaaaatttctagggagtaaagcacgtcgtatttgttggttcggttcaatagtagtagcgattgtacttgctataccaatgtattcagcgctgcttgtcccccacttacttaaagaagtttactttacaactcaaatgattgtatttgtctatattggaattaatatcgctgaaacaattagagcgtacttatactttgacagctataagcaaattttaaataaatattggtag

SEQ ID NO: 6079 - DNA, 3711 bp, Staphylococcus epidermidis
atgacaaagaaagaaaaggattataaaaaaagtcttgagcaacaaaaaacacgggtaaaactgtacaagtcaggaaaaagctgggtaaaagcaagtattaatgaaatagaattgttaaaaacaatggggctaccatttttaagtaaaaacgaaatacaagaaaatgccactgaaaagacgaaaggtcataagataaaaaaaggcgcagcgaaaacaacagccctagttggtggagcatttacatttaatatgttgaataatcatcaagcattagctgcctcagaaacaccaatcacctctgaaatttcatccaatagtgagacagtagccaatcaaaattcaactacgattaagaactcactaaaagaaacagtcaattctgcaagtttggaatcaaaccaatctaatagtacaaataagcaaatgtcttcagaagttacaaatacagcgcaatcaagtgaaaaagatggaattagtcaacaaagtagtgaaacatcaagtcaatcatctaagtcaaatacatatgcctccacagaccatgtagagagtacaactactaacaatgataatattgtacaacaagatcaaaataagtcttcgaatgtaacctctaagtcatcacaatcaaacacgtcatcctcagaaaagagcattagctccaatttaaaccagtcaatcgaaacaaaagcaaccgattcattagcgaccagtgaagcacgtactagtacaaatcaaatatctaatctgacatcaacatctacttcaaatcaatcgagtcctacttcctttgcgaatttaagaacatttagtagatttaccgttttgaatacgatggcagcacctacaacaacgtccacgacaacaacttcaagtcttacatctaattctgttgtggtgaacaaagataactttaatgaacatatgaatctatctggatcagcgacgtatgatccaaaaacaggtattgctaccttaacgccagatgcatatagtcaaaagggtgccatatctttaaacactcgattagattcaaaccgtagcttccgttttacaggtaaagttaaccttggtaatagatatgaaggttattctcctgatggtgtaacaggtggggatggcattggctttgcattttcaccaggccctttaggacagataggtaaagaaggggctgccgttggaataggtggtttgaataatgcctttggttttaaattggatacgtatcataatacatcaaatcctaaatctgaggctaaagcaaaagcagatccacctactgttaagggtggtggtgccttcggtgcattcgtaagtacagatggaagtggtatggctaccactgaggcatcatctgcggctaaattaaatgtacaacctaataataattcattccaagattttgtcattgactataacggtgatacaaaagtgatgacagtgacgtatgctggtcagacttggtcgaaaaaccttacagattggataaaaaacagtggtggtacgacgttttctctatctatgactgcttcaactggtggcgcaaaaaacttacaacaagttcaatttggaacattcgagtatacagaatcagctgttgctaaagtacgctatgtagatgcaaatactggtaaggatattatcccgcctaaaactattgcaggtgaagttgacgggactgtaaatatagataaacaattgaacaatttaaaaaatttaggttacagttatgtggagacagatgccttaaaagcaccaaattatacagaaacgtcaggtacgcctacacttaaattaactaactcaggccaaacagtgatttataaatttaaagatgttcaaggtcctcaaattagtgttgatagtcaaactagagaagttggaaagaccattaatccaattacaattactacaactgacaatagtaaagacgtattaactacaactgtgacaggtctaccttcagggttatcttttgatcaaacgactaatacaattactggcacgccaagtgaagtaggaactacaactgtgacagttaatacgactgatgctactgggaacgtaacatctaagcaatttacaataacgattcaagatacaatcagccctgttgtaaatgtgactccaagtcaagcatcagaagttttcacgccgattaatccaattacgataactgctacagataatagtggcaaagtggtaacgcatacagtaacaggattgccacaaggacttaaatttgatgcatcaacgaattcaattgttggaactccaactcaaataggaacaaatacaatcacgattgagtcaacggatgcgagcggaaataaaactacgactaaaattaattatgaagtaacgagaaatagcgcaagtgactctacttccactagcatagtaaacagtgtttcaacaagtataagtaatagtacatcgctaagtgatagtgtaaaagcgagtcaatcattatcaacaaaagagtcaacaagtaagagtctctcagagtcgttaagtacgtcaacgtcgaatagtacgtcaatccaagcgagcgaatccgtaagtacaagtaagaagttatcagaatcagcgagtacgtcgacatcagaaagtgcatccacctcaacgagtgagagtgactcaacaagtgaaagtacatcgttaagtgactcgacaagtgtgagtctttcagattcaacaagcacatcgacatccgacagtgcgtcaacgtcaacaagcgagagtgactccaatagcgcaagtacgtcattaagtgagtcgacaagtacaagcatttcagattcaacaagtacatcgacatccgacagtgcgtcagagtcagcaagcgagagcgactccaatagcgcaagtacgtcattaagtgagtcgacaagcacaagcatttcagattcaacaagcacatcgacatccgacagtgcgtcaacgtcaacaagcgagagtgactcgaacagtgcaagcacatcgctaagtggatcattaagtacaagcatttcagactcaacgagtacgtcgacatcagacagtgcgtccacatccacatcagacagtgcatccacatcaacgagtgtgagtgagtcagacagtgatagtacatccatgagtgtgagtgactcgaatagtacaagtacatcattgagtgactcgacaagtacgagcgtttcagactcaacaagaacatcaacatccgatagtgcatctacatcaaagagtgtaagtgagtcaaacagcgccagcacatcggtaagtggctcaacaagtacaagcatttcagattcatcaagcacgtccacatcaatgagtacatctgaaactttcacttctcaatctcctataaatagtgaaagtcaatttattggtgatagcttgtctgaagatacaatcgtgactcaatcaaaaaatacgaatatgcttaataaaactggaaaagattatgatttacaagaacaaagaggttatactgattcagaacaacacaatgaaacacaaagtaatcaagctgataatcactcaaacaacctcgatttacttcatcaaaatcgtttacaagataaagtcgttaaacaaccgactaaaggagaagatggagttgtaagcaacggttttatagtagcagtagcaatagtattggctatcttcggtttggcaaaaaaatctagaaaagacgatgatgatcaagatggtagtaaataa

SEQ ID NO: 6080 - DNA, 1302 bp, Staphylococcus epidermidis
atgaaacaatttttaaacatcactcaacgtaaatttatcgaatggttgattatcttatccatttttatagttagcattcctaataaatggacattaatgatatctatcgctttatctttattacttcttaaaagaggggcactaggtgtcgttcaattaatcatactttatatgctcagatcgcaaatatacactccctatgatacacaagagatggcgcattacatagtaagtatgaaatatatcttgatttatgtaattggagtattttttctatttaaatatgtaaaacattggataagaaatgaaatgatattaagatttatcaagtctactatgattcttatgctactttatatcataatgagtttagtcgtatctaatgatccgatagaatctattcttaaattgcttaacttctttataccgctaattttgattgttatgtatgttagtttaataaaaaagataaagaatctcattaactggattaatcaatttatcacgctagtgattgcctttacttttttatttatagttatagcgccaaaatcatatttaattgatgaggaatcacttagaagtgttttcaaggatgcacattcattcgcagttattcttgctatgggtctagttctatatatggtaacaataatcaaacaacaagattatgatgtattcaatttattattattaaatattggaatgatagagctctatttatcaaactctcgtcatattttcatatctgttattttatgtctaatgcttttattaccgttatctcacataaaaaagagaattaaacatcccataattggtgctatgatactaatgacaattgctataataaatcaaccatatatttatcatctttttattaaactaatcttaaaagggaagaatagccaagaagtctttatgccgagtgatatgaatattaaagctattgattatgcgctaactgagcatccttttttaggaagcggttttggtataccaatgataaaagcgagttcagaaatacaatactttaatgtagcaacgagtaatatcatcttcggtatgattatctttactggaataataggacttactttatgtacgatatacatgcttcatatggtacttttagttacttttccaatgagtattactattttattatttttaatcactgtctttgttaatatggattatattattttatttgattccgtggggctaggtatattgtgttatatattttggggaatatatttaaaagaaggtatgtatcaatacaacaacggacaatggtaa

SEQ ID NO: 6081 - DNA, 816 bp, Staphylococcus epidermidis
atgaatacgttggatagtaaatatgaattaaaatcaaaaaaacatcgtcagcgaataattaaaaattgggttatagtcactgtagttgcagctataattatatgggcgtttgcagggattccaggtcttgaacttaaaagtaagtctattgaaatattaaagtctatcttttacggactatttcatccagatttaagttacatatatatacctgatggtgaagacttacttagaggtttgctggaaacttttgctattgcagtaattggcacgttcattgcttcaattatatgtattccttttgcatttttaggagctaaaaatatgatgaaattacgaccggttacgggcataagtaaattcatattaagcattatacgtgtgtttcctgaaattgtaatggcgttaatatttattaaagctgttggaccaggttcgttttcaggtgtacttgcactggggattcattcagtcggcatgttaggaaagctttttgttgaagatattgaaagtttagattttagcgctgtagaatctttaaaagcaagtggagcaaataaaatgaagacgttaatgtttgctgtaataccacaaatcttaccatcgtttatttcccttattttgtatcgatttgaattgaatttacgttccgcttccattttaggattaatcggcgcaggtggcataggtacaccattaatttttgctttacaaacacgatcttgggaccgagttggcattattctaattggtttgattgcgatggtcgctttagttgacttaatatctggcgcggttcgtaaacgtatcgtttag

SEQ ID NO: 6082 - DNA, 801 bp, Staphylococcus epidermidis
gtgacgacaccaacaacgcataaatataatcgctatttaaataaaaggatgtctcttaaaactagcttttcaattattttaatcacgggtttgattatctggagttttatttatactggatttagcattggagatttaatgataggtctgccacaaattggcgtattcttcaaacaaatgatacctccagattggggttatctagatcatattacacaaccaatgctagacacgattcgtatggcaattgtcggtacttttctaggaagtattgtctccattcctatagcgttactgtgtgcgagtaatattgttcaaacaaagtggattgctattccatcacgttttgtccttaatattgtacgcacaatacctgatttattattagctgccgtatttgtagccatatttggtattggacaaattccgggtgtattagcactgtttgttctaacaatatgtatcattggtaaattattatatgaatcattagaaacaattgattcaggacctatggaagctatgacagctgtaggggctaataaagtgaaatggattgcatttggcgttgttcctcaagcgctttcatcatttatgtcatatgtgttatttgcctttgaaattaacattcgggcatcagcagttttaggtcttgttggcgcaggtggtattgggttgttctacgatcaaacgttaggattgtttcaatataaaaagacagcaatgattatcctgttcactctaatcattgtagttattattgactatgtgagttcgaaagtgagggaaaaattagcatga

SEQ ID NO: 6083 - DNA, 774 bp, Staphylococcus epidermidis
atgagtcaaatcgaatttaaggatgttagtaaagtgtatccaaatggccatgtgggattaaaagatattaacttaaatatagaaaaaggtgattttgcagttattgttggattgtctggagcaggtaaatcaacattactacgatcggttaatcggctacatgatatttccaaaggtgatattactatcgaaggtcagtcaataactaaagcacgtggtaaaaaattattagaaatgcgtcgaagtataggtatgatttttcaacattttaacttagttaagcgttcaacagtgcttagaaacgttttgagtggcagggtaggataccatcctacttggaaaatgatacttggtctttttcctaaagaagataaagtcaaggcattggatgctttagaacgtgtaaacattttagataaatatgaccaacgctctgaccagttgtcaggtggtcaacaacaacgtatatcaatagctagagcgttatgtcaggaaccaaccattatattagcagacgaaccagttgcctcattagatccattaactacaaaacaagtgatggatgacttaaagaaaatcaatgaagaacttggtattactattttaattaatttacactttgtagatttggcaaaggaatacggctcgagaataattggtttaagagcgggagagctcgtttatgatggtcccgcgtctgaggcaaatgacgaagtatttaatcatatatacggtcgctctattaaggacgatgaaaaattaggggtggaataa

SEQ ID NO: 6084 - DNA, 957 bp, Staphylococcus epidermidis
atgaaaaatcttaagtttttagtggtgcttgttttatcggtggttatttttgcagcagcctgtgggaattcaagttctttggataataataaaagttcggatagtggatcagattcaaaatcaggtagttatacacctaaagaattaacagtacaatttgtaccatctcaaaacgctgatacactcgaagctaaggcaaaaccgttagaaaaattgttgtcggataaattagggattccggttaaagtatcagtttcaacaaactacaacacgatagttgaagcgatgaaatctaagaaagtggatgttggtttcttgccaccaactgcatatacattagcacacgatcaaaaggcagcggatttattattaaaggcagaacgttacgacgttaatgaagatggatctccaagtaaaaagttagttgatgattataaatcagaaatccttgttaaaaaggactctggtattaatagtctcaaagatttaaaaggtaaaaaaatagcattacaagatgtaacttctacagcaggatatacattccctctagtaacattaaaaaaagaagctggtattgatgcaacaaaagatatgaaaatagtcaatgttaaaggacacgaccaagcagttatttcattgttaaatggagatgtggatgcagcagctgtatttaatgatgcacgtacagttgtgaaaaaagatcaaccaaatgtatttaaagatactaaaatattaaaactcactaaaccaattcctaatgatacgatttcagtacgtcctgatatggataaaaaattccaagataaattgaaaaaagcttttaaagaaatttctaaaactaaaaaaggtcataaaatcattagcgaggtatattctcatgaaggttatgttgatactaaagattcagactttgatatcgttagacaatatgaaaaagctgttcatgatatgaaataa

SEQ ID NO: 6085 - DNA, 1551 bp, Staphylococcus epidermidis
atgaaaatatttaaaactttaagttctatactagttacatctgttctttctgtgactgtgattccctcaacatttgcatcaacagaatctactgctacaaatcagacacaacaaacagtactttttgataattctcatgctcaaactgcgggcgctgccgattgggtgattgatggcgctttctcagattatgcagattcaatgagaaagcaaggttaccaagttaaagaactagaaggagaatcaaacatttctgatcaatctttacagcaggcgcgtgtattagttattcctgaagctaacaatccatttaaagaaaatgagcagaaagcaatcattaattttgttaaaaatggtggtagtgtcattttcatctcagaccactataatgccgatcgtaatttaaatcgtattgattcttcagaatcaatgaatggttatcgacgtggcgcatacgaaaatatgactaaagatatgaataatgaagaaaagaattctaacgttatgcataacgttaagagttctgattggctctcacaaaacttcggtgttcgctttagatataatgcacttggagatatcaatactcaaaatatcgtttcaagcaaagatagttttggtattactaaaggggtacaatcagtttcgatgcacgcaggttcaacattagcaataactgatcctaataaagctaaaggcattatttatatgccggaacatttaacgcatagtcaaaaatggtctcacgcagttgatcaaggtatttacaatgggggtggcatcaacgaaggaccttatgtagccatttcaaaaatcggcaaaggtaaagctgcatttattggcgatagctccctcgtagaagatcgttcacctaaatatcttcgtgaagataatgggaaacctaaaaaaacgtacgatggttttaaagaacaagataatggaaagttattaaataatttaacaacatggctaggcgaaaaagaatctcaatcttctatgaaagacatggggattaaacttgataataaaacaccgctacttaactttgagcaacctgagaattcaattgaacctcaaaaagaaccgtggactaatccaatagaaggttacaaatggtatgatcattcaacatttaaaaaaggtagttatggaagtaatcaacggggtgctgacgatggagtagatgacaaaagctcttctcatcaaaatcaaaatgccaaagttgaattaactttacctcaaaatatccaaccgcatcatccatttcaatttacaatcaaactcacgggatatgagcctaatagcacaattaacgatgtaagagttggactttataaagatggaggtaagcaaatcggtagcttttcttctaaccgtaaccaattcaatactcccggctatagtcctggccaatcaattaaaacaaatggtgcgggtgaagcttcattcacactcacagctaaagtgacagatgaaattaaagatgctaatattcgtgttaaacaagggaaaaaaattctattaactcaaaaaatgaatgaaaatttttaa

SEQ ID NO: 6086 - DNA, 1536 bp, Staphylococcus epidermidis
atgtctcaaattgcgttctatatccttagtgatgttcacggttttatattcccaacagatttttcatcaagagaaaaagatttacctatgggtttgttaaaagctaatcatcttatcgaacaagactgcgtgcactatgacggcagtgtaaagattgataatggggacttcttacaaggttctccattatgtaactacttagtatctaaattaaagagtagtctcccattaacatcaatatataatcgtttagggtttgattttggaattgttggcaatcatgaatttaattatgatttaccttatctaaaacaggccatcaatcaacttcattacccagttttgtgtgcaaatataattgaaaatacacagccattcactggccaaggtattcattattttaaagtaaatgatttaactataggaactattggattaaccactcagtatattcctcactgggaacaacctgattacattaagacactcacttttaacagtgctatccacacattaaaatctgagttacctacacttagggaaaagagtgatattgtagtagtaagttatcatggtggttttgaacgtgatttagatagtggcctcccgactgaggcgcttactggggaaaacgaagggtatgatatactaagtcagtttagcgatagtatcgatgtgttgataaccggccatcagcatcgtgatattgcgacaatcaagaaccaaacagccatcattcaaccaggttcaaaaggtacaaaagttggaaaaatagttattgaatatacacatgataaaaaagtattaattaaagaatgtaacttaatgaatgttcataacaatacctcctttaagccgaatgacgaagatgtctctttacgtaatcaattggaagattggcttgatactcaaatcgcagaactcccttacgctatgagaataaacaattcatttgaggcaagaaaatcaccgcatgcatttgttaaccttcttaattatattttattagaaaaaagtggtgcagatattgcatgtacagcattatttgattccgcaaatggctttgatgagaaagtaaccatgcgtgatatcatcaataattatccttttcctaatacttttaaagtgattgaacttagtggaaaagatattaaacttgcaattgaacgaagcgcaagttattttgacattgttaatcataaaatcacagttaataaagagtttctagaacctaaacctcagcatttcaactatgacatatttgcaggcatccaatatacaattcatgttagtcatccttacggtgaacgtgttagtgatttactaattaatgatgtaccaatacaaagtgatcaaatatatacaatatgcgtaaataattatagagctgttggtggcgggaattatgatatgtacgttaacaaacctgtgataaaagatattcaaatcgaaggtgctcaattgttaatagattacttatctcacaatgatttatcccaaatcccacaagtgattgatttcaatgttgttaagtaa

SEQ ID NO: 6087 - DNA, 1176 bp, Staphylococcus epidermidis
atgaaagataataaaatgttgttcattatttttatgataggaacatttacagtaggaatggctgaatatgtagtgacaggattacttacacaaatcgctgacgatatgaaggtttctatttcgagtgcaggcttattaattagtgtttatgctattagtgttgcattgatagggcctttaatgcgaatcataacattgaaagttcacgcccaccgtctgttaccgattttagttgcgatttttataataagtaatttagtgggaatgttagcaccgaattttaatgtattgttattatcaagactcatgtctgcggcaatgcatgcgccattcttcggtgtgtgtatgagtgttgctgcgacagtcgcacctcctgctaaaaaaacacaggccattgcacttgttcaggcaggtttaactattgctgtaatgttaggtgtaccattcggatcatttttaggtggctttgcaaattggagagttgtttttggattcatgattgtgttggcaatcattactatgttaggaatgattaaatttgttccaaatgtttctttaagtgcagaagcaaatattagcaaagaattaacagtgtttaagaatccacacattttaattgtgattgcaattattgtgtttggttactctggtgtgtttactacttatacatttatggagccaatgatacgagatttttctccatttaaaattgtaggtttaactgtttgtttatttatgtttggtctaggcggtgtgatagggaatttaattactggtaatgtaccggaagataaattaacaaaaaatttataccttacatttcttttactatttgtaacaatcatactatttgttattgttattcaaaattcaatattagcattaatcatttgcttcttattcggttttggtacatttggtacaaccccgttacttaatagcaaaattatcttaagtgcaaaagaagcaccacttcttgcaagtacgttagcagcttctattttcaatgttgctaattttcttggtgcaatcattggatctatattattatcaatagggttaccttacattcaaattactttgatatctggtggaattatagtgttgggtatgcttcttaatcttgttaatcaactttatgaaaagaaacatatcacatttaatgaatattcatga

SEQ ID NO: 6088 - DNA, 1401 bp, Staphylococcus epidermidis
atgaatacatcacaaaagtttaggggagataatcgcttattattagggattattttaggggttattacattttggttatttgcacaatcacttgtaaatctagtcgtgccattacaatcatcatacaatagtgatattggtactattaatatagcagttagcttatcggcactattttctggtctgtttattgtaggtgcaggagatattgcagataaaattggtagagtaaaagtgacatacataggcttagcacttaatattgttgggtcggttttaatcattattacgccattaccaagtctattgattattggacgtgctattcaaggattgtcagcggcatgtataatgccagcgacactcgcaatcattaatgaatattatatcgggacaacacgacaacgtgcattaagctactggtccatcggttcatggggaggtagtggtgtttgtactttgtttggtggtttaatggcaactaaccttggatggcgctcaatctttattgtttcaattattctgacaatattatccatgtttctcattaaacatacacccgaaacaaaagcagagcctataagagatcaaccgacagagacaaagaaatttgatgttgttggtttaatcatcttagtggttagtatgttaagtattaatgtgataataactcaaacctctcaatttggtttgttctcaccatttattttgggacttattgcaatttttgttatatcgttaattatattcgtgatttacgaaaataaaatcaaacaaccacttgtcgattttgatatctttaaaaacaaaggttatacaggtgcaacgatttcaaactttatgttgaatggtgtagctggtggtacattgattgtagtaaatactttttatcagcaaaaattagattttaactctcaggaaacaggatatatttcacttacatacctaattgcagtattaattatgatacgtgtgggtgaaatgatattacaatcgttaggacctaaaagacctttgttactcggaagtgccttgaccgtcataggattaatattattatctttgacgtttttacctaatgcttggtatatagcgtcaagtgtcattggttatttattatttggtaccggtttaggtgtttatgcaacaccatccacggatacagctgttgcacaagcaccagatgataaagtaggcgtcgcatccggtgtatataagatggcatcatccttaggaaatgcatttggtgtggccatctcaagtacagtttatagcgtacttgcagcccaactgaatctgactttaggtggttttactggagtaatgtttaatgcgcttatagcattattagcattcctttctattttgttcttaataccgaaaaaacagtctaatgtataa

SEQ ID NO: 6089 - DNA, 933 bp, Staphylococcus epidermidis
atgaaaatagcaattgcaggttctggcgcattaggtagtggatttggtgctaagttgtttcaacatggttatgacgtcactttaattgataattgggaacctcaagttactacaatacaacaggacggtctacatatcgatattaatggtgaagcgcatcatttcaggctacctatgtatagactaacggaaattcctaaatcaacgtcctatgatattgtttttctatttcctaaatctatgcaattagaagaggtgcttagtcatattcaaccccatcttcatgataatacaattgttgtgtgcactatgaatggtttgaaacatgaacgtcttatacaacaatatgtttctatagatagaattgtacgtggagtaacaacgtggactgccggtattgatcaacctggtcacacgcacttaatggggcaaggtcctgttgaaattgggtgtctagtgcccgagggaaaagaaagcgtagatatcattgttaatctgctacaaaatgcagaattaaaaggtgtaaaaagtgaacatttacatcaatcaatttggaagaaaatatgtgttaatggaacagctaattcattatgtactatacttgaatgtaatttggcagcactgaataatagtgatgacgctaaaaatttgatatataaaattacacaagaaattgttcatgttgcaacagttgatgatgttcatcttaatgttgatgagatttttgattacttaattactttaaatgataaagtaggcccacactatccttctatgtaccaagacttaattaaagataatcgaacaactgaaatagattatattaatggagcagttagtaaattagggaaagagaatcatattgctacacctgtaaatgattttgtaacaaatcttgtacatgctaaagaaaatcaacgtggtgcacaatga

SEQ ID NO: 6090 - DNA, 837 bp, Staphylococcus epidermidis; identical to SEQ ID NO: 2648

SEQ ID NO: 6091 - DNA, 1518 bp, Staphylococcus epidermidis
atgaagataaaactgtttgtcattgttgtcatttttttgatgactattttatcgataatttcaataacaacacgagaaatcgcacatagtaagaatgagacgatattgacacatgcttctcaaaaatatattgataaaatggttgagacagcaatgaagaaaggagatatccccggactagcaatattgatcatcaaagacaataaaatctttttaaataaagggtatggttatgccaatattgaaaaaaaagcaaaggtaaatccacatactcaatttgaaattgcatccaatactaaagcttttacaggttatgcaattctacaactagctcaagaaggaaaaataaatttaaatgacaaagtaagtacatttatacccggatttaaaatgaagtatgaagacaaagaaagagatattactattgaacagctattagctcaaactagtggtatccctggagatatcactgaagaaaatcgttactctaaacagtacgatagtattgaaaatatcgttaattttgcaaaaggaaaacgtctgaaccatgtacctggagaaacttttgaatattcgaatatgaattatgatattttaggtcttattattcaaaatgttacccatcaatcctatacatcatacatccaaaagcatgttttagcccctttaaagatgaaacataccacttttaaagtaaataataccaaatctaataacgaagcattaggttatatatgggaagataatgaaaataaagttgcacaaccagagtttaacattggggatactcctgcggcatatatgatgtcaagtacaagtgatttagcaaaatgggtccaactacagatccaccctacttcaaaatcacaagccaagttaattcgtcaatcgcatcaggtattatctaactcattaaatagtgagcctaacgcagatagctacggttcgggatggtttataaatactgatgaccatctcgtatttcataccggcgttttagataatttctcttcacaaattttattaaatattcgtaaatcttatggcattgtcgtattagccaatacaaattcaaatcaagtgactcgtttagcggaacatttaaatactcaaattatgaataatcgtcattacacaactatagaagaaaaagtgaaccaaacgaaagatatgcaacttatcatttccacattggccgatatattcatggtcatatttagtatcttagtttttagtaaaatcttaaaattacgtgaaggccacatcttcatccgtaaatgtttacgaacttcaatcatgttcagcatcattttgttgggatttgtagcaatgaatattcttttttatctacttcccttgataatattaggagatgcaacttgggggtttgttttatcatggttacctttacattcgaaatatttagttgtaagtgtctatctagccataaccatgttactggtttggttatctttaataagtataacttaccgttctgataaaaagaaaaaacattaa

SEQ ID NO: 6092 - DNA, 1830 bp, Staphylococcus epidermidis
atgttcattcaatttaaaagacttttgattggtagacctaaaagaaacagagacttaaaaaacgagaaaatttcaaaatttaaaggattagctatcctatcatccgatgcattgtcatcagttgcatatggtcctgagcagatattaattacattatcggtgataggagctgtggcatcttggtatatgctgcctattgccggagcagttttaatattattaacagctctaattttatcttatagacaaattatttatgcttatccaaaaggtgggggagcgtatattgtttctaaaacaaatcttggtgagaaatggggattgctagctggagggtctttattagtcgactatatattaacggtggcagtgagtatttcttcaggagcagatgcttttgttgctgcatttccccacttatatcattttaaagtgcttattgcatgtttattagtactctttattttaatgatgaatttaagaggtttgactgaatcagcaactgtattatcatatccagtctatttatttattataggtttaattgttttgatagtcgttgggacatttcgcgtagctactggacaaatcgcaccacatattcattccactgtagggagtactgtgcccggtgttacgttatttttacttttaaaagcattttcatctggagcatcatcacttacaggtgtagaggcaatatccaatgcagtaacaaattttaaaaatccagcacctaagaatgcagtcaaaactttagtcactatgggtacaattttagcagtgttattagtaggtattgttgtactctcatatatatatggaattatgcctcaaactgaaacgaccgtgctttcacaacttgcgtcccaaatatttggtgaaaatgtagcgttttattttatacaagctactacagttatgattttggtattggctgctaatactggttttacagcatttcctatgctagctgcatcaatgtctaaagacaaatatatgccacgtatgtttactgttcgtggtgatcgtctcggttattcaaactcgattattatattaggtgtattagccatcattttaattatcctatttgatggaatgacagagaacctcattccattatatgcagtaggtgtttttattccatttacacttgctcagtttggtatggttttaaaatggcttcgagaacgacctgaacgatggggaataaagcttactatcaatttaattggtggtacgattacgtttatcgtattcatgattttactcattaccaaacttaatcaagtatggccaattcttttatttttaccttttgttgtatttatttttattagaattcatgtacattatgagaatatagcatgtgaattacgatctgaaattgatatacacgatattcctgttgtagatcgtaatttagctattgtacctattcaaagtattacaactgtagttgataaatctatttattatgccaaattattagctaatgatgatgttattgcagtgcatgtgacatttggtgatgaagatgagcaggcttttatgactaaatggaaaaaacattttcctgatgtaagacttgtgattttacattcagagtatagaagtattattcgtccgatttcacgatttatagataaaattcgtaaaaaagcgaatgataaaaattatttaattacagtagtcgttccagaatttatccctaaaaaggcttggcagcacttgttgcacaatcaaacgagtttacgtttaaaattgcatttaatttatcaaaaaaacgttactctgtgtactattccattcaaattaatgaaataa

SEQ ID NO: 6093 - DNA, 1377 bp, Staphylococcus epidermidis
atggcaaaacaactacaaagagagttgaataataggcatattcaattaattgctataggtggcgctataggaactggtttatttttaggttcaggacaaacaatttctctaaccggaccttcattactctttacttacatgttgataggtatagtgttatttgcttttatgagagctcttggtgaattattattaagtaactctaaatttaattcattcgtagatattgcaaatgaataccttggtccatttggtggatttgtaattgggtggacctattgggtttgttggattgtctctagcatgtcggacctcactgcgatgggacaatattttgcttattggtatccacaagtcccacactggttgacagtactatttattgtactcctacttatatcatttaatttgcttggcgccagattatttggagaacttgaattttggttttctataattaaagtcgttacaattattacgatggttattgtaggtttagttctgatttttttatcatttaaaacagaatatggacatgcttcttttggtaatttgatacatcatggcgggatgtttccacatggtgcagctggatttttaatgtccttccaaattgctgtatattcatttatcggtatagaacttataggagtcacagctggcgaaacaaaaaatccagaaaaaacaattcctaaagcaataaataacgttcctatacgaattttattattttatataggtggtttacttgtaatcatgtctgtcattccatggtttaaagttgatcctgatagtagtccgtttgttaaattattcacactaattggtgttccctttgctgctggcatagttaattttgttgttttaacagcagcagcatctgcaacaaatagcggaatatattctaatagtagaattttatttggtttagcgaaacaaggtttaggtcctaaagtattgacaaaaactaattctaatggtgtaccttatctctcaatgttagtatcttcaataacattgttaatcgcagctttattaaattttgttttcccagatgctattaaattatttatttatgtaacgacactatctaccgtcctattccttgtagtatggggaatgattatcgtttcttacatcgcatacgtaaagaagaatcctgaacaacatcaatcaagtgcatttaaattatggggcggaaaaattattgcctatattgtgttatcttttttcatatttatctttattttgctattctttagcaaagatactagagtagctatttttatttcaccgttatggtttatcttcttattcttttattataagaaatacaagaataatgctgaatctttagccgatagacagcgacattaa

SEQ ID NO: 6094 - DNA, 810 bp, Staphylococcus epidermidis
atgaaaataggtactatttctgacctacacattgaccgtcatccacacttaaatcctgaaatatatttagaaaagctttgtcaggtgattaaacaaaggtctattgagttacttatcatagcaggggatatatctaatgactataggataagttacgattttattcaaagcattcaagaattaagcgggatacctacttattttgttccgggaaaccatgatttatggtctgaccaagcagataaaacttcaacagaaatactatcattctttcgctcaaaagaggaatgcttgatcggcaatccaatcattattaatgatcaatatgcaattgtaggccatgtcggttggtatgattatagctatgcagatcatcgtttttctcagcaaaaaataacaagtggtaaacattatggtgcaacttggcaagataaagtaagaacagattggtcattatcagacccgcaactatcccttttagctgctcaagaggtggaaaaagacattaacaatgtaagcccacgtcaaattattttagttacgcacgttgtaacacatcctcaattcgtagtaccaacgcctcatcgtatttttgacttttttaatgcatttattggtactcatgattttgatactatttatagaaattaccctattcgatttagtataatggggcatgttcattttagaaaaaaacttgttgaaaataacatattatatatatgtccgtgcttaggatatcaaagacaatggatgacagatgatatagcatatgaaataaatcatgctttagtcgattttgatatttag

SEQ ID NO: 6095 - DNA, 525 bp, Staphylococcus epidermidis
atgctattacaatttaataattacgatattaaagcaacacaaattatgagtcattggcctaaacatccaaccaatccctacaaaggctatgttggtcatcctttgttagttaaatttggccatcatcaaacaatatttcctgatgcttttgcgccatttcttaaacaatatgattctcgaattgtagatggtacaggtacatcattaaatcaacttgaaaaatttatcgacaaaggtcagccggtgatcatttatcatactagtttgggttctaaaccgcttcgacgtgtatttcatttcgacaatcaaccaacaaaactagtctcaaatattcacgttactttattgatagggtatgatgatgactattattattatattgatccgttatggagtcgtttatcaaaatttgttattttcccatctattattcctaactctaaacaaatcattaaaattaaaaagcacactttggaaaatagttataatgccccaggaaaaaaatgcatatatatcgataattaa

SEQ ID NO: 6096 - DNA, 1200 bp, Staphylococcus epidermidis
atgatgactacaagttccaaacacttatctaaaatattaatcgttatacttggcgttatgactgcatttggtcctttgactattgatatgtacggaccatctttacctaaagttcagcatgcgtttggttcatcaatttcagaaatacaacttacattatcctttgctatgataggtttagctattggtcaatttgtattcgggccactatcagatgtattaggtcgtaaaaaaatggcactcattttattgattggatatttaatagcctcattattatcagtttttacagttcatttaacaatatttttaattatccgtttaattcaaggtttagcaggaggtggtgcaatcgtcatagccaaagcttctattggagataactatgacggagacgaattagcaaaatttttaacttctcttatggtcataaacggtataatcaccatcattgctccactgttaggtggcctcgctttatctattgcaagttggagaatgatttttatatttttaacaatcattaccttaatagtcatcttaggcattttattaaagatgccagttgggccccatcaagaacaatctcagttaaattttaaagcaatatttaaagattttggtctgttattaacaaaacccaccttcgttattccaatgttattgcaaggattaacttatgtcatgttattcagttattcgtcagccgcaccttttatttcacaaaagatgtatcatatgacaccacttcaatacagtgcaatgtttgctattaatggagtgggtttgatagtcgtcagtcagataaccgctattatagtagaaaaggtaagccgatatgcgatgctcatatatttaacaatcattcaaatgttaggtgttgtaattttaatatttactttaacattacatcttccattgtatgttttacttattggcttttttattaatatatgtccagtcacttctatagcaccactttgtttttctatggcaatggctgaacgcacaggtggaagtggcaatgcttcaagtttacttggcctattccaatttattttaggaggcctcatttctcccctagttggtttgaacggtcagcatgatatgtccccgtatctaattattattagtgcgacagctgttttacttattgcactacaaattatttatttcaaattatttatgaaaaacacatag

SEQ ID NO: 6097 - DNA, 702 bp, Staphylococcus epidermidis
atgaaaagaacagataaatatagagattcatacaaatatgatgaccaatatcaaaatcatcgtaaacgttcagaagaagatatgtatcgacaacatcaagagtcccaacagagagcaaattcaaatcgtgcaacacaaagtgaaaatgatagagagtatgaaaatcatcctgaacgttattacaatggaagagactatcgacgtgagcagcaattggaagaagaaaatgaaaaatcaagcaaaactaaaaaatggctgattgcaatcatagttattttactcattattgtagctatctttatcacacgtgcaattatcaatcataataatgataaagtaagtaatgaccctaacgtttcacaaaactataaaaaagaagttgaaaatcaaaacgacgacattaatcgacaagttgattcagccaaaagcgatataaaaaataaaaaggacacccaatcccaaattgataaactacaaaatcaaattgatcaattaaaacaaaatgaagaaactaatgcggattctaaattcacaaaattttatcaaaaccaaatcgacaaactgaaaaatgcaaataacgctcaacttaataacgaaaatcaaagtaaagttaacaacatgcttgaagacatcaatacaaaatttgatagtattaaagctaaactagaaaatatcttgaatggatcaaattcaggaaactaa

SEQ ID NO: 6098 - DNA, 1152 bp, Staphylococcus epidermidis
atgtcaccatataaagttatcattgcacctgattcttttaaagaaagtatgtcggcgaaggaagctgctttagctattaaagatggattccaagaggtgttcgattccagtacaatatatgacattattcctatggctgatggtggcgagggaacaaccgaagtattgaaagaagccttaaatgctacctcttattgcgtagaagtaaaagatccacttaatagaaatatcatggctagttatgcgagaagcaacgaacaccaaacagctatcattgaaatggcagctgcttcaggactagcattattgagtaaagatgaaagagatccatctattacaacttcgtacggtaccggccaactcattaatgatgcacttaatcacgatgttaataaaattattttaggaataggtggaagtgccacgaatgatggtggtgtaggaatgttaaaggctttaggtgtctcttttaaagataaaaacaatcaagagattcgcgatggaggtttagccctatctcaaatagaatacattgatattactcgtataaacccacgattgaaagatgtgaatattaaagtagcctgtgatgtaactaatccattattaggagacaatggagcaactatagtttatggtccacaaaaaggcgctcagcaaaagatgataccaaagttggattccgcattacgtcactatcatgataaaattgaaagagaattaaatatgaatgtaaaagatatcccgggcgctggtgctgcaggaggcatgggaacagcgttaattgcgtttctaaacgctgaattacgtcctggaattgatgtagttcttgaagagactcaatttaaacaaagaataaaagatgcgaatttagttgttactggcgaaggtaaaatggataaacaaacaatctatggcaaaacacccattggcatagctaaagttgcaaaatcatatgatatacccgtcattgctatttgtggtagtttaggaaaagattacgaagcaatttatcaccacggtatcgatagcgtgtttagtatcatggaacgtccatgccaccttgacgaagctttgaaagaaggcgcacttcatgttaaacatacaacaataaatatcgcacgacttttacaagtaaaaattgaaaaatga

SEQ ID NO: 6099 - DNA, 1473 bp, Staphylococcus epidermidis
atgaataacttaaaacaatatgaatcatttttttggttaataggaatttttatcttttatcttataatggcaattctaacaccattatcaactacggattggcatgcatataaagttaatctaagtcaatatttgactcaagaaaatggtcgttatttaggacatttatttgaatggattgccgtacataatatcataataagagctttaatatatgcgataacttcgtttttagttatctatttagttgcttatatggttcaattacatacgaatcgtatttattttattttgagttttgtgttaatggttactgtacctaatacaatttatagcgaaacttacgggtggtttactggattttttagttatatacctgctacagtcctatcactttttattctttttacggtagttaaaatgattgagtcgcacgatacagtttctgaaatgcaattatgggtatttttattagtaagtttgtttggacaattcttcttggagaatctttccatcgctaatagcttaattattttaataggaatggtagtctatttctttgttaaaaaaagactcagttatttcttaattgtaggatttatgcttagttgtataggtaacattataatgtttttaaacttcaattattttttaattaaggatggattaaatacgcattattcaatttccgatagtcatggaatgatacataaagcaggtgtgacgttatttaagcttgtaccagaatatatgtttattaatcaaatgattattcttaccgtgatatcaatagtaagtatagttttacttaagcaaaataaaagcctgaagcatatgagagtttatattaaaataccactactcttaggtttaattactttacctgtttataagatcttcgtttacaatcaatttcattttgaattatataaagcttcattttctatagccgttttgaatacaacgatttgcttcatttacatgataagtgtgatatacgttgtgtttaaaatgatacagcaaagatacataagaatgattgtgatggggagttttatagctatggcttcatctgttttgccacttttatttgtgacgcctataagttatagaaatttttattttatttatactttatggatcgtgatattactttgtttaattcagcaatgtgatgtgctatttaaacaacttgaacatataattaaaatatttgcgattatcatcagcatcattatgatgattggatttacttttatacatattagtagtgtgcacagaatagacttcattaaagaacaaataacacaacatcatcgccatcagaaaataacattggaaagattaccatttgagcgatatactcatatgactacaccaaagtcgaaggaacaatttcaagatttcaaacactattatgatttgcccaaagacatcacatttaaagtagtcccatatggtacaaaacaataa

SEQ ID NO: 6100 - DNA, 279 bp, Staphylococcus epidermidis
gtgaattatatggttagtcacattgttggatttattgtaagttttattatttcatattatttaaattgttattttgtatataaagtaaaacctacaatagaaaagtttttaagatttcctatcactcagatagttaatatgggaatgcaaacgttattattatatatattcgtaaagtggttgaatatcgcttcggaaattgcaccttttgcgggtctaatcattacaatcccagtgacattcatactttctaagtggttacttagagataaagtttaa

SEQ ID NO: 6101 - DNA, 882 bp, Staphylococcus epidermidis
gtgactcaaaatgaaaatttgaagttagcgcaacgaggtgcatttcttagtttagtcatctatattatactttctattgcgaaatatatgactggatatgtttatgattcggcggcagttagagcggatgctttaaataacatgacagacattttagtttcagtagcagttattgtcggacttaaaatctctattaaacctgctgatcaaaaccacccatatgggcacttaaaatctgaaaatatttccacattgctagtatcattcattatcatgtttgtgggaatacaagttattatagaaaactttccgagattgtttacacatgattcacatattcctaactttattactattattataagtatgatcagtggacttgtgatgttatgtgtctttgctattaattatcgattatctaaaagaacgaaaagtagctcattaaaatcagcagctaaagataatttatctgatagtttagtcagtattggcactgccattggtctaatgttcacacaaattggatttccaattatcgatattatattggcaaatattttaggtttattaatcgtgtatacaggttttggaatttttaaagagtcgatttttactctaagtgatggtttcaatgaacaagatttagaagaatacagactagacatattagaagttgaagatgtaattgatgttaataatattaaaggtagatatcatggaagtagtatctttattgatgtgaccattgtagtagatccttatctttcactttatgaagcacatcagatttgtgataaagttgaaattcatttgcataataaaggaatttcgtctgtatatgtacatccagaaccctatactacaaaagacgaagtaaaataa

SEQ ID NO: 6102 - DNA, 687 bp, Staphylococcus epidermidis
atgccaaaattaatactatgtcggcacggacaaagtgaatggaatgcgaaaaatttatttacaggttgggccgatgtcaaactatcaaaacaaggaattgaagaggcgcaatcagcaggtaaaaaaatttacgacaatcaaattgaaattgatattgcgtttacctctttactcactagagctttagaaacaacacaatatattttagcaggttctgaccaacagtggattcctgtttataaaagttggcgtttaaatgaacgacattatggtggtttacaaggtttaaataaagatgatgcgagaaaaaaatggggggaagatcaggtgcatcaatggagacgctcatatgatgtgcgtccgcctagagaaagtgaagaacaacgagaagcatatttaaaaaatcgtcgttatcaacatattgatcaccgtatgatgccttattgtgaaagtttgaaagatacattagaacgagttgttccgttctggactgatcatatttcacaacacctattagatgataaaactgtacttgtttcggcccacggaaattccattcgcgcattaattaagtatttggaaggtttatcagaagaagatatcgtcggatatgaaattaaaacgggtgcaccgctagtatatgaactcacagatgatttagttgttaaggataaatattatttataa

SEQ ID NO: 6103 - DNA, 789 bp, Staphylococcus epidermidis
atgaaaagacttttactttgcattgttgcacttgtttttgttttagcagcctgtggcaacaattcatctaacaataaagataatcaatcaagcagtaaagacaaggatacgttaagagttggtacggaaggtacatatgcgccctttacttaccataataaaaaagatcaattaacaggttatgatattgatgtgattaaagcagttgcaaaagaagaaaatcttaaacttaagtttaatgaaacgtcatgggattcaatgtttgcaggattagatgctggtcgttttgatgttattgcaaatcaagtgggtgtgaataaagatagagagaaaaaatataaattctctgaaccttacacatattcaagtgctgtacttgttgttcgtgaaaatgaaaaagatattacatcattcaatgatgtaaaaggtaaaaagttagcacaaacgtttacgtctaattatggtcaattggctaaagataagggtgcggacgttactaaggtagatggatttaatcaatcaatggacttactattatctaaacgtgtagatggtacatttaacgacagtttatcttacttagattacagaaaacaaaagcctaatgctaaaattaaagcaatcaaaggacatgcagagcaaaataaatcagcatttgcattctctaagaaggttgatgaaaaaacgattgagaaatttaataaaggcctagaaaaaattagagataatggtgaattagctaaaattggtaagaaatggtttggtcaagatgtttctaaacctgaataa

SEQ ID NO: 6104 - DNA, 720 bp, Staphylococcus epidermidis; identical to SEQ ID NO: 2662

SEQ ID NO: 6105 - DNA, 732 bp, Staphylococcus epidermidis
atgattgaattgtctcatatccataagtcttttaatgaaactgaagtgattaaaggtattgatttgaaagttaatcaaggtgaagttgtgacactaattggacgttcaggttcaggtaaaacgactttacttagaatgattaatgctttagagatacctactgaaggtacagtgtatgtcaatggcatgacatataatgctaaagataagaaatctcaaattaaagtaagacaacaatcaggaatggtttttcaaaattataatttatttccacataaatctgcattagaaaacgttatggaaggtcttataacagttaaaaagatgaataaagcaacggctaatgaagaagcaatgaatttattggccaaggttggattggtacatgttaaagatcaacggccacatgctttatcaggtgggcaacaacaacgtgtcgcaattgcacgtgcattagccatgaatcctaaagtgatgttatttgatgagccaacatctgcacttgatcctgaattggtcaatgatgtattaaaagtcattaaagaattggctgacgaaggtatgacaatggtcattgtgactcacgagatgcgttttgccaaagaagtttccaatcaaattgcttttattcatgagggcgtcattgcagaacaaggtacgcctgaagatatatttaatcaccccaaaacagaagagcttcagcgatttttaaatgtgattaatgaaaaatag

SEQ ID NO: 6106 - DNA, 147 bp, Staphylococcus epidermidis
atgtataaagattataacatgattcaacatactctaccttcaattcatatccccacaaataatatttcacgacatgtaaatgatattgtaaaaacaattcccgatactgaattcgatgaattcagacaccctcgtggcttaatataa

SEQ ID NO: 6107 - DNA, 1248 bp, Staphylococcus epidermidis
atgaaatttgtaaatttaacttctgaagaattcgagcaatttacttcagaaaatttctcgcattatacacaatccagtatacattataataatagatcgaaaacaaaaggtgacgtacatttagtgggagttaaagatgatcaagaagatgtcattgctgcgtgcttattaacagaggcacgttctttaaaattctttaagtatttttacacacatagaggaccagtcatggactttaacaatttagttttagttcgcttcttttttaaatcacttactgcttatttaaaaaaacacaattgtttatatgtactcgttgacccttatgtattagaaaatttacgtcaacctaatggagaaatcattgaatcctttgataatcgcgcattgattaaaacaatggaagaattaggttacaaacaccaaggatacactgtaggttatgatacaatgagtcaaatccgctggttatcagtacttaaccttaaagataaatctgaagatcaattattaaaagaaatggattaccaaacacgtcgaaatattaaaaagacttatgaaatgggtgttaaagttaaaacattacccattgaagaaacaaatacattttttgaattattcaaaatggctgaagaaaaacatggctttaaattccgtgaagagccttactttgttgagatgcaaaaaacttatgaagatcatgctatgttaaaacttgcttacatcgatttacaagattatttagatacgttgcaaactaaacatcaaaaccttaatcaacaactaaaagatgttgaaaaaacattagaagaaaatccaaattctaagaaaaataaaacgaaacatacacaactcaaacaacaattcgatagtaatgcgcgtaaaatcagacaaactaaagagaaaatagcagaagaaggtcaagttcttcatcttgctgcagcattatatatatataatgatcacgaagtgtattacttatcaagtggctctaaccctaaatataatgcttatatgggagcatatcgattacaatgggatatgattcaatttgcaaaagaacataatatcgatagatataatttctacggtgttaccggagactttagtgaaaatgctgaagatgctggcgttcaaaaatttaaagaaggatttaacgctaaaatttatgaatatattggtgattttatcaaaccaattaaaccactattttataaagtaaaacaagaattagaaagtcgtagataa

SEQ ID NO: 6108 - DNA, 363 bp, Staphylococcus epidermidis
atgttgaagaagttattagtcggggttagtgtactaactttattattagcaggttgcatgagtcacgagtacgcagacaaaatagataaagcggttaaactacaagagaaaaagcaacaaaaaattgctaaaaacgattcaggtgatgaagttaaacattttgataaaaaagatgccaatatttatgtgtttgacaaaggaaaatatgttgtattggagtataaaccacttagtgatgatgctgaagcgcgttactatacttatgaatttaaagataaaaaagcatattataataaagactttaatgcaaaagcatactaccaatctcatgagcctgactataaagaagagaatatgtattaa

SEQ ID NO: 6109 - DNA, 597 bp, Staphylococcus epidermidis
atgaaaaaattaatcggattattgatgattttatgtatggttttgctatacagttgctcaggtccaatggactctccaaagcattctaataatagcaaacctgtagtggtaatatacggtgattataagtgcccttattgtaaaaaaacagaagatcgcgtgatgccaaagcttaagaagaagtatattgatacaaacaaaattaaatatcaatatgtgaatttggcattcttaggaaaagattcaattgtaggttcaagagcgcagcatgcggtaaatcattatgctcccaagaagtcacttgaatttcagaaattaatgtttaatcaacaaaaagatgaacataagcaatggattacaacacgtcttgttgataagcaaattgataaattaagtatcagtgatgacaaaaagaaaaaaataaagactgattataaaactaaaggttccatctcgtggaaaaaagccaaggaagatcaacaaattgcgaagaaaaatcacatcaagcaaacacctacagcgtttgttaatgataacaaggttgaagatccatatgacttttctagctacgagatgttgctagaaaacgaaaagtga

SEQ ID NO: 6110 - DNA, 471 bp, Staphylococcus epidermidis
atgacgatagaaaaaaagaaaaataagattatttttactagaacttttagtgcaccaattaataaggtatttgatgcttatacaaagcgggaactatttgaacaatggtttcatcctcaaaacgcatctgtcacagtttatgattttaatgctacgaaaggaggaagcgctttttatgctattcaagctcctcagatgataagctatactattgctgaatatctgcaagtggatgcaccatattatatagagtatttagactattttgctacgtcaaaaggggaaaaagacacaagtatgcctggtatgcatatcactttgaattttgaagaagtaaaaggaaagactactgtaacatcgacatcgacttttccaactgaaagtgccgctcagcaagcgatagacatgggtgtagaaacaggtatgaattcaacacttaatcagttagagaaattactaaatcaaaagtga

SEQ ID NO: 6111 - DNA, 822 bp, Staphylococcus epidermidis
atgttcaagaacaacaaaagtattgaagatacttatgcaacaaaacctattattcagaatatcgttggtcaggcacaaatcaaacaagtgatggcgaaacaaacacccatgagatatacgttgaaagctatcatggctggttttctattatcaatagttacagtttttatgttagcaattaaaacacaattcgcttcaacgcataatgacgggttaatcaatttgatgggagctattgcgtttagtttaggtctcgtattagttgtgttaaccaattctgaattattaactagtaattttatgtatctgactgttggttggtattataaagcaattagtataagtaaaatgatatggatttttattttctgttttataggtaatatcttaggtggatttattttatttttcctaatgaaatatgcacatgttatgacgccagaaatgacagatagtttaacagcattagtacataaaaaaacagtagaatcgacttggttaaatattttgattaaaggtatattttgtaatttctttattaatatcggtatttttatttcaatgcagtttaaagagggactagccaaagcattctttatagcttgtggagtgattgtctttgtatttatgggttacgaacacgttgtttttaacgctggattatatgcaggtatgatgttctttaatatggatggattatcttggttgggtgtgctaaaaaatattgtttttgcattccttggaaactatatcggtggaggtatctttattggattagtgtatgcatatttgaacggtaaacgtgacagcctccaaccatag

SEQ ID NO: 6112 - DNA, 537 bp, Staphylococcus epidermidis
atgtcgaatattaatattagagtggcacatgaacaagatgctgaagaattacatagcatcatgcaaattgcttttacacctttaagagaactaggtattgattggccatcagttcacgctgatcttgaaatggtaaaggataatttaagacaaaatactacatttgtacttgaaaatgaaaaagaaattatttcaacgattacggtttgctattcatggagtagtgtaaaacccatttcaggttatccgttcgtttggtggtttgcaacacgaccaacttatgatggacaagggtatgggagtcaacttttaaaatatgtagaggagacatttttacgcgatactttaaaagctgctgcggtaaccttaggaacatcagcacgtttgcacccttggttattaaacatttacgaaaagcggggttatgaaatatacgctaaacatgaaaatgatgatggtgatttaggagtcataatgcgtaaaattttaataccagaacaatttaatgatgacattttgggccgaccgccattttag

SEQ ID NO: 6113 - DNA, 1974 bp, Staphylococcus epidermidis
atgagagaaaattattcgatacgtgtttttaataatttagccattaatacagaaaaggcactgagtgtaaaggtattttattgtttgaaaggaaaatgtgaagtcactatcaatgttcagaaacatatattagagaaagatgatatagcatttgttgtaatgaatgatacgtattcactgttaagtaatacagagaccatgtgttgtattatcgatatacctatacatagatatcttagtcagaaggatactcaatttttaataagtggtacaaagattgatgagagtagtagagatagaataaaatattggatattaaaaatattagagctccattgtttatcttataatgatgtgtccgagatacaaaggttgatacaatttttacttattgaattgagttatctaaagaaaccaaaacttgatgtaaataaagatttttatttatctgaagatatacatcaatatttagtggatcatcatgacagtaaaatcaacaaacatgaactagctgaagctgttaacctatcaaatcaagcacttacatcaatgtttaaacaaacgccatttcaaacatttaatcaatatttaaatcaacttagattaaaattttgtcttatagatattttgacaacccataaacctatcgaagaaatagctatagatcatggttttcatcattattctcgatttatacaattattcaaaaatacatatggttacacacctaaattgattagaagagattatatagcgacgtctatcttcaaaaatactgctgaagaaattgatttagatagacattttcttatgaacattcacgaattacgagatttagattcaaaaataataagtaaaaaatatattgagatgtcagataaaggaaaaaaatatcgttcttatgatatttatattgaagataaccgaagtactattcttgatcaggaacagatagttcatataaagcgtaatttaagtttaagtcaaaaatcaatgcgttatgtaatagaacttaactacacttctatgattgaaaacaaagagttatgtcgttatgagatgttgaaaattttacgtttttgttccggtttgaatttaattccaacatttaaaatcattaccgatagacatgatacttttacatcaaaggaaaaaatggctctgaagttaacatttcaaatgttattcattatgcttagggaatttaatcaacttgagattgaatttatagtagaggacatgatgttaaaacaagtggtgcagttaaaaaagatgattagctcttattttgaatattataaattaaattatcgtattaaaaatgagaaaattggaaatgttaattatcaaaatttagaaaaacaagtgactcaaattttcattcctattgagcaattacatttatatattaaagagatatcatttgaaaaagtcattttggaaaccagctatttgaccgatttaaaaagtgaggttgtagaatattcatggcttcaacatattcatacattaattaaaatgtgtggtttagtgaggggagttttaatacaaccgtcctttgattacgctaccacatacacatatcattcaaatttaaaaccgcatcatatcttgtcttatgtaataagaatgtttaaccaattaagaggtacaatcgtctataaagatgatgcaatcattatgactaaatataagtatgaatatcaggccattgctatctttttaaaaaatacgattaaggaaaatgtaaaccatcaacaattaattttttcagatattcaatcactcaaccatgcagaatatgaatatatagaaatgatgccacttttaatgaatgagaataatgagctagatagtcatatatcatacccacatcaatattggttagcaaagttgaagagtaaagaaagccaacaagcaatagttaatcttcctaaaatgagtattgctcatttaacatttctttgttcgtag

SEQ ID NO: 6114 - DNA, 729 bp, Staphylococcus epidermidis
atgcaacaacagaagattaaacgattcttagcccattttgtattagatcacgtcacaatagaatatttgaaatatggccaccagttgacaattgaacagcttaaattattaatatttatattacatttcactgaaaatcataaagaagatttaagtttaaatatgatcatcttttacaaaaattatcaaaaaaaccaattgttaaaaagtattacacatctatatgaatttaattggatttcaaaaaaacgacatccatacgaccaacgtagactagttattacattaactcaaaatcaatgtagtaaaataactcaattaattgaagaattagaacacttcttagaggtgaaatctacattaataaacgaaattaatcattcaactttattatcgtattatttaaagtgccatagtcaatttagagtgattgaacaatcttgcacctctcaacatttaacattagaagaattataccttcttgggttacttatcattagtgataacaagactacatttaaaagcataaaagtacatgctttaaagggaatcattgcaatgggacctattattaagaccttacagtcaaaaggttatctcattaaaagtcggagtagagatgatgaacgctatattgtattaacacttagaaaagaaaaaattaatgtgattcagtcagaaatcgaggaatgttacaataaattagaacagggaatacagcatgtgtaa

SEQ ID NO: 6115 - DNA, 324 bp, Staphylococcus epidermidis
atgattttagacaatgtgaatcctgatgatttatttcctaccgagaaaaaagggccttctgtattaggtatgattgagtataacgtgcagggtcagactaaatttgaaggtgccttcatagctacaaatgaacggttaattatgaatgttgatatgaatggacaattttattatcgtaatatacgttatgatgaaattaatcaaattcattgtgatggttcagatattatatttgagttcaatattggaacagttccaatgcgtgaaattaagacagaagatgtacaagcttttgttgattatataaaacaacaaattcaataa

SEQ ID NO: 6116 - DNA, 345 bp, Staphylococcus epidermidis
atgggaaaaattaaagacatcaatgatttggttaatgcgacatttcaagtaaaaaaattttttagagatactaaaaagcaatataatttaaattatgaagaaatttatattcttaatcacattttgaaaagtgaatctaacgaaatatcttcaaaagaaattgctacatgttcagagtttaaaccgtattatttaactaaagcattacaaaaattaaaagatttaaatttactatctaaaaagagaagcgtgcatgatgaaagaacagtaattgtatttgtatcagatgaacaacgagaaaaaatagaaaaattgattttagaattagaaaactatatcaaataa

SEQ ID NO: 6117 - DNA, 837 bp, Staphylococcus epidermidis
atggctgagcaacattggaccggtcaattagatttaacaattttcaataatggtgaaagttcgaaagcacgaaatatattttttgaaaaggcgctcaaagtattacgacctatatatttagaacaatctcctgtgccaactttctatattgtcaatgtgggtggaggttatctagatggagatagataccgtctcaacgtcaacttagaagataatgcacaagtgacgcttacttctcaaggtgcaactaaaatatataaaacgcctaatgaccatgtagaacagtatcaaacgtttaatttatcaaatcaatcgtatatggaatttgtagcagatcctattattgcctatgaaaacgctaaatttttccaacataatacgtttaatcttaaagaagatagtgctatattttacactgatatattgactccaggctattcatctaatggccaagatttcacgtataattatatgcatcttattaatgaaatttacattgacaatcaattagttgttttcgataacatgatgttaagtcctgataaaagccgacttgacggtattgggtatatggaaaattatacacacttaggatcagcttattttattcatccagatgtaaaccaaagtttcatagacgatatttacgtggcggttgctgattttcaaaaacaatacgactgtagaataggtatctcacaattacctactcatggattggccgttcgtattttgactaaaagaactcaaataatagaagaaattttgactcgtgttcaatcatatatcaatcaaacgatttatcatcgacaaattaacttcttaagaaaatattaa

SEQ ID NO: 6118 - DNA, 615 bp, Staphylococcus epidermidis
atgtcaaacccaattaaaattggtatcggggggcctgttggtgcaggtaaaacccaattaatagaaaaagtggttaaacgccttgcgaaaaaaatgagtattggcgttattactaatgatatctatactaaagaagatgaaaaaatactagttaatacaggtgttttaccagaagatagaattatcggtgtggaaactggaggttgtcctcatacagctattcgtgaagacgcctcaatgaacttcgcagccatagatgaattattagaacgtaatgatgatattgaacttatttttattgaatcaggtggcgataacttagcggctacttttagtccagaactcgttgacttttcaatttatatcattgatgttgctcagggcgaaaagattccacgtaaaggtggacaaggtatgattaaatctgatttcttcattattaataaaactgaccttgcaccatatgtgggtgcttcattagatcaaatggctaaagatactgaagtatttcgtggaaatcgtccattcgcttttacaaatttaaaaactgatgaaggtttagaaaaagttattgagtggattgagcacgacgtcttactgaaagggttaacttaa

SEQ ID NO: 6119 - DNA, 690 bp, Staphylococcus epidermidis
atgattgatcaccaacatttaagactttttcagttctgtgattctcagtttcctacaggtgcatttagtcattcttttggacttgaaacatatattcaacgagaaactgtacatgatactgagacatttattaaatggttacatttgtttataaacgaacaattaacttattcagatgggatagctatgagaattgtctaccacgcattaattaacaatgacaaagataaaattttagatattaaccaaaaactcttcgtacaaaatctacctaaagaaacgcgtattggcgctaagcaaatgggtacacgcatggtaaaattagctttagatctttatgatagtgaatggattcaatggtattataatcaaatgaaaaacaataaaattaagcttcatcctgctgtgtgctttactatgctaggacattttttaggtgtagatgtggaatccatcattgattattatttatatcaaaatatctctagccttacccaaaatgcagtaagagcgattcctttaggacaaacagctggacagcaagtcgtaactgaaatgatagctcatattgagaagacacgaaatcacatactagaattggacgaaatcgattttggtatgactgctcccggcttggaacttaatcaaatggaacatgaaaatgttcatgttcgaatctttatttcatag

SEQ ID NO: 6120 - DNA, 453 bp, Staphylococcus epidermidis
atgattatagaagaaattcaaggaaatattgctaatttatctcaagatgaaaagcaaaaacatgtcgaaaaagtttatcttgaaaactcagatttggttaaacgtatacaacgtgttaaaacagatcacggtaatgaaatagggatacgtcttaaacaacctattgacctacaatatggtgatattttatatcaagacgatacaaacatgattattgtcgatgttaatagcgaagacttattagttattaaacctagaaatttaaaggaaatgggagacattgctcatcaactaggtaatcgccatctgcctgcccaatttacagaaactgaaatgcttattcaatatgactatcttgttgaagatttattaaaagagttgggtatcccctactcacatgaagacagaaaggtcaatcaagcatttcgacatataggacattcacatgattga

SEQ ID NO: 6121 - DNA, 1716 bp, Staphylococcus epidermidis
atgagttttaaaatgacacaatctcaatacacaagtctttatggaccaactgtaggagactctgtgagattaggagatacgaacttgtttgcacaagttgaaaaagactatgcaaattatggagatgaagctactttcggtggcggaaaatcaattcgtgatggtatggctcaaaatcctaatgtgacaagagatgataaaaatgtagccgatttagttttaactaacgcattaattattgattatgacaagattgttaaagcagatatcggaattaaaaatggttatatttttaagatcggtaaagctggaaacccagatataatggataacgttgacatcatcattggtgcaacaactgatattattgctgctgaaggtaaaattgttactgccggcggtatcgatacacacgtgcacttcatcaatcctgaacaagctgaagttgcacttgagagtggtattacaacgcatatcggtggaggaactggtgcttctgaaggtgctaaagcgactactgtaacaccaggaccttggcatattcatcgcatgttagaagcagcagaagagatgcctattaatgtaggatttactggtaaaggtcaagctgtcaatcatactgcacttattgaacaaattcatgcaggcgctataggtcttaaagtacatgaagattggggagctacaccttcagcattaagtcatgcattagacgttgcagatgagtttgatgttcaagtcgctttacatgcagatacattaaatgaagctggatttatggaagatacaatggttgctgtgaaagatcgtgtattgcatatgtatcatactgaaggagctggtggtggtcatgcacctgacttaatcaaatcagctgcatattcaaacatcttaccgtcttctacaaacccaacattaccttacactcacaacactgtagatgaacatttagacatggttatgattactcaccatcttaatgcttcaataccagaagacattgcatttgcagattctcgtatacgtaaggaaactatagcagcagaagacgtattacaagatatgggcgtatttagtatggtaagttcagattcacaagcaatgggacgtgtcggtgaagttgtaacacgtacttggcaagttgcacaccgtatgaaagaacaacgcggaccattagatggtgactttgaatatcacgataataatcgtattaaacgttacattgcaaaatatacaatcaatcctgccattacacatggtatttctgactatgttggatctgtagaagcgggtaaacttgccgatttagtaatgtgggaaccagaattcttcggtgccaaacccgatcttgttgttaaaggtggcatgattaactcagcagtaaatggtgatgctaatggctccataccaacatcagagcctttgaaatatcgcaaaatgtatggtcaatttggtggtaacattacacatactgctatgacttttgtttctaacactgcatatgaaaacggtatttatcgtcaactcaatctaaaacgaatggttcgaccagttagaaatattagaaatttaactaaggcagatatgaaaaataataatgctacacctaaaatagatgtagatccacaaacatatgaggtattcgttgatggtaataaaatcacaagtgaagcagcaacagaattaccattaacacaaagatacttcttattctag

SEQ ID NO: 6122 - DNA, 402 bp, Staphylococcus epidermidis
atgattcctggtgaaattattgttaaaaatactgaaatagaagtcaataaacatcatcccgaaacggtgattgaagtaaaaaatacaggcgatagacctatacaagtaggttcacatttccactttttcgaagcaaataaagcattagaatttgatcgtgagaaagcatatggtaaacatttggatattcctgcaggagctgcagtgagatttgaacctggagatgaaaaaaaagtacaacttgtcgaatattctggacgacgtaaaatttatggattccgtggtttagtcgatggcgatattgacgaagaacgtgtattccgtccaaatgattcaaatcaaaacgccgccgttaaaaacgatgcaggcgaagacaatgcgaataaaaaaggtggtaaataa

SEQ ID NO: 6123 - DNA, 303 bp, Staphylococcus epidermidis
ttgcactttacacaacgtgaacaagacaaattgatgatagttgtagctgctgaggttgcacgtcgtagaaaagcaagaggacttaaacttaatcatcctgaagcacttgctttaatcagtgatgaattattagaaggcgcgcgtgatggtaaaacggtagctgaactcatgagctatggaaaaacaattttaaacgaggaagatgtcatggatggcgtagctaacatgattacagaacttgaaattgaagcaacttttccagatggtactaagttaataacagtccatcacccaatcgtttaa

SEQ ID NO: 6124 - DNA, 903 bp, Staphylococcus epidermidis
ttgaaattgataaaagtaattttaagtagtatctctcaagtggttttaattaataatccatatactgggttattcattttaattggactgttcgcagtgaattggaaagtaggaatcagtgcaatgattgcaagtgtaatgacttggatattggcaccatatatgaattacacaaaagaagaaatcgaaagtggattagccggatttaaccctgtattaaccgcaattgcacttactttatttttggatagcaattggagcggtatattaatcacattcgtagccactattttaacgctaccgattggagcagcggttagagaagtattgaaaccacataaaatagcgtttctaactagtccgtatgttattatgacgtggattactttattaatacctaatcaacttaaaacgttacatactcagattgatattattccggagcatatagaaaaggtatctttaaataatgaccacacccgtgttcatttttttcaatcagttttagatggatttggacaaatatttttaatgcccagcataataggtggtttgttaattctaatagggatttttataggttctaaaaaagctggaattgtttctataattgcaaacattattgggttcctaataattatattactgggtggagactatagtagtataaatgaaggcatatttggctataatgtagttttatctgcgattgcgctaggtgtcacttttgagacagcaatccatagttatctcgcaatgattttaggaatagtactcactgcattcatacatttaggtttgagcacattgctcgcaccattaggtttaccaactttaacatggccatttatttttgctacatggattatgttgtttgcaggaattaaaaatcaatctgtataa

SEQ ID NO: 6125 - DNA, 1143 bp, Staphylococcus epidermidis
atggagtcttttttaattcacactgacattcaaaaaaagtggattcgtaaatttaaaaagattgaaagtgaattcaaagcacgcgcagctgaaaatgatattcaatctagatttccatatgaaaatattgagtggctgataaaggaaggatatactaaactaactttgcctgtagagtatgggggtgaaggtgctactattgaagatatggtgattttacaaagttatttgggtactattgatggagcaactgctttatctatagggtggcatttaagtgtaattggtcaattgtacgagcaacatatgtggtcactatcaatgttagattcctttgctaaagaagttgttcatggtgcactgatcaatagagcagtcagtgaagcggaaactggtagtcctactagaggtggtcgcccatctacacatgctgttaaagctgaaaatggttatgttataaacggtgttaaaacctttacatctatgagtaaggcgttgacacattatattgttggtgcgtatgttgaagaaactaaatcaatgggattctttttaattcctcagtcaactaaaggtgtaagtattgctgacaactgggatatggttggtatgagagcgactgagagccatgatttaattcttgatgatgtttatgttcctaatgaaaattttgtagaatcaaaacgtgaatcaagacctaatggttggcttcttcatataccgagctgttatctaggtattgcacaagcagctcgtgactatgcagtagattttgcaaaaaattatcgtcctaatagtattacaggtacgattgatagtttacctacagtgcaacaaaatttaggggaaatggaaagtttattactttctgcaagacattttctatggagtacagctagagggtatcaatcatatacagaggatgcacaaatatggaatgaaacctcagcaagtaaagtggtggtaatgaaccaaggtatagaaatcgttgatttagctatgagaatagttggagctaagagtctagaaatgagcagacctcttcaacggtactatagagatatacgtgctggattacataatccaccaatggaagatatggcttacactaatattgctaaaagtattacaaacaaactttaa

SEQ ID NO: 6126 - DNA, 942 bp, Staphylococcus epidermidis
atgaccaaagtatattttaatcatgatggtggcgttgatgatctagtgtcactatttttattattacaaatggaaaatatagaacttgttggcgtaagtacgattggtgcagactgctatttagagccttcattaagtgcttcattaaagattataaatcgtttttcagacgttgaaattaatgtagcaccatcatatgaaagagggaaaaatccttttccaaaagaatggagaatgcatgctttctttatggatgccttaccagtgctaaatgagtcttgtatacccaaaagatgcaaggctagtgaggacgaggcgtatatagatattattcgtaaagtgaagagttgtgatgagaaagttacattgttatttactggaccgcttacagatttagctaaagctataaaatatgacaactcaattttaaaaaatatagagaaattagtttggatgggtggaacgtttttagacaaaggaaatgttgaagaaccagaacatgatggtacagctgaatggaatgcattttgggatcctgaggctgtaaaagttgtattagatagtgatatgaatgtcgatattgttgctttagaaagtacaaatcaagtccctctaacaatggaagttcgtcaaatgtgggcagataaaagacaatatttaggcgttgattttctgggcacaagttacgcagcagtaccaccactcacacattttgtgaccaattcaacatactttttatgggatgtattaactactgcttatgtgggttctccaaatttagttgaatcaacgaaattgaaaattgatgtagtcagtcaaggacctagtcaagggagaacattccaatctgaatatggacgtgaagttcaagtcattacggatgtaaataaacaagcattttttaactacataacggatttagcaaagaaaatcgagtcctaa

SEQ ID NO: 6127 - DNA, 549 bp, Staphylococcus epidermidis
gtgactacaaaacatttagtatatacagctttaatgactgctatcatttgtattttaggtatagtaccaagtgtacctctgccatttatgccagtccctattgtattacagaatataggaatctttttggcaggaattattttagggcgaaagcttggtactactagtgttattgtctttttactattggtagctacaggtttgccagtgctttctggaggccgtgggggaattggcgtatttgcaggaccttcggcaggattcttattcttatatcctgttgtagcttactttataggcattattcgtgatgcatatttgcataaaattaatttcttagtgatttttatagctacactagttatcggtgtattaggattagatatattaggtactatcattatgggctttattatacatatacctatctctaaggcatttatattatcatttacatttatgccaggtgatatcattaaggctattattgcaagtttaataggtgcagcaattttaaatcattcacgtttcaagactcttattcaataa

SEQ ID NO: 6128 - DNA, 756 bp, Staphylococcus epidermidis
atgtcgaaaataacttttaaagatatttatattgatggaaataaaataactgaagattctagaaaggcgatttatctcttacctcctcaaccattaaaatatgctagtaacacgtggatttataaaacgatgccaacaatgaaccagtggcttaaagacattgaagttcaaaagaaaatgcatctaaatcaatcatcctatcatctttcattttcatttccagctaatgaaaagatagatgaagtattgttggaaaaaatacgtgaactaggttttcagataggagtacttgagctctatgtcattgaagctaaagcgttaaaagagctctcccgcaaaagagacgtagatattcaacttgtatcaagcaataatatcaatgattaccttcatgtttatgatgcgtttgcacggccttttggtgatagctatgccaacatggttaaacaacatatttatagctcatataacttggacgatattgaacgtttagttgcatatgttaaccatcaaccagttggaatagtcgatattataatgacggataaaacaatagaaatagatggttttggggttttagaagaattccaacatcaaggtatcggttctgaaatacaagcttacgttggacgtatggctaatgagcgacctgttattcttgttgcagatggaaaagatactgctaaagatatgtatctaagacaaggatatgtatatcaaggttttaagtatcatattttaaaagaaaatatttaa

SEQ ID NO: 6129 - DNA, 210 bp, Staphylococcus epidermidis
gtgagagataaggttttaatttttagcgatcgtatttcatctgaaattttaatcaaagcagctaaaatcgatgtagaaattatattatctaaatctgcccctaattcacttgcaatacaacttgcaaaagatttatacattatcccaattgggtttattcgagaaaatcattttaatatctatagtcacccagaaagaatcataaattaa

SEQ ID NO: 6130 - DNA, 390 bp, Staphylococcus epidermidis
atgaaaaaagatgtgacgcaaaaacaaactataatcaaatttgaaaatggacacttatatacagcattggattcatgtataacagagatgccattaacaattaaagtcaacgaatttaagtttgcaactattatttgtagtccaaaccatttagaagaattgactttaggttttcttgcatctgaaggtattttcttaaagagaaatgacttacaatccattcatatcgatgaaagtaaaggattcgctcatgtgaaactaactcaatcagtaagccatcacttcgaacatcctacaaaacgtgtgcttgcttcctgttgtggtaaaagcagagctttttattttcaaaatgatgcagctattgccaaaacatcaatgacaaccatttaa

SEQ ID NO: 6131 - DNA, 786 bp, Staphylococcus epidermidis
atgaaaattaaacatatttttgttatcattttaacattgtgtgtagtgttagcaggttgtaccaacgagaaaggtcagaataaagaacagaatgaaaaacaaccgacaaaaggtgataaacaagaacttcaagtttctgctgcagcaagtttgactgaagtcagtaaagcattaggaaatgaatttaaaaaggaccatccaaatgtagaaattaaatttaactatggcggatcaggtgcgttaagacaacagatagaagcgggtgctccggcagatgtcatgatgtcagctaacactaaagatatagacctgttgaagaaaaaaaacaaagcacatgacacttataattatgcaaagaatcaacttgtattaattggcgataaaaataaaagttatacctctgtaaaagatttaaatcaaaacgacaaactcgcactaggacaaataaaaacagtgcctgctggtaaatatgcaaaacaatatttagatgatcaacatttatatggtgatgttaaagataaaattatttttgctaaagacgtaaaacaagtattaaattatgtggaaaaaggaaatgcacaggaaggattcgtttacaaaacagacttatatcaacaaaagaaaaaagcaaataaagttaaagtcatcgaagaaattaaattaagcaaaccaattacttataaagcaggtgcaacttcagataaaaaattagctaaagaatggattaacttcttaaaatctaataaagctaaacaaattcttaaagaatatcaattttctgtataa

SEQ ID NO: 6132 - DNA, 672 bp, Staphylococcus epidermidis
atgcctgatttaacgtccttttggatttcttttcgtgttgctttaatcagtacaatgatagttactatttttggcattttgatttctaaatggctatacaataaaaaaagatattgggtaaatctattagaaagttttatcattttaccaattgtgttaccacctactgtccttggttttatactattaattatattttcaacaagaagtcctgtaggagaattctttactaatatcttacacttaccagttgtatttacattgacaggtgcagtgattgcatctgtcattgttagttttccccttatgtatcaacatacagtgaatggttttcgaagtatagattcaaagatgttaaatactgcaagaacgatgggagcaagtgaaacaaaaatatttcttaaattggtgttaccattatctaaacgttctattcttgcaggtattatgatgagctttgcaagagcaataggtgaatttggtgctactttgatggttgctggctatatcccagacaaaacaaatacattgcctttagaaatttattttttagtggagcaagggaaagaaaatgaagcatggttatgggtgcttgtattagttgcgtttgcggtaactgtcatagcgaccataaatctggttaatcgtgatacgtttagggaggttgattaa

SEQ ID NO: 6133 - DNA, 621 bp, Staphylococcus epidermidis
atgctcacaattaaagtgaatggtgttcttaatcagacgaaaattaatataaatataaaggatcgacaccctaagatatatgcgatacagggaccatctggaattggaaagacaacaattttaaatataattgccggtttgaaagctataaattattcatatataaaggttggtaaacgtgtattaactgattcacgacaccatttgaatgttaaggttcaacaacgtcgtataggatatctatttcaagattatcaacttttccccaatatgaatgtttataacaacataacgtttatgactaaaccttctgaacatatcaatgaacttattcatactctaaaaatagagcatttacttgaaaagtatcctgtgaccttatcaggaggtgaagctcagcgcgtcgctttagcaagggcgctaagtacgaaacccgatttgattttgcttgatgagcctttttcaagtttagatgataaaacaaaaaacgaaggtatcaaattaattttaaaaatattcgaagcatggcaaattcctattatatttgtaacgcattcaaattatgaagcgcaacaaatggcgcatgagattataacaattgaagattgtatacaaatatag

SEQ ID NO: 6134 - DNA, 1002 bp, Staphylococcus epidermidis
atgcaagaaagatactcgagacaagtgttgtttaaggaaattggtttaaaaggtcaaagtctacttgagaaaaaacatgtgcttatagtaggtatgggtgcgttaggaacacacttagctgagggattagtgagagcgggaataaataagttaaccattgttgatagagattacattgaatttagcaatttacaacgacaaacgctctttatagagcgtgatgcagaagatgtactaccaaaagtaatcgctgcacagaaagttttaaaagagatacgtaaagatgtagagatagatgcttatattgagcatgttaattacaatttcttagagcaacatggcatgcatgtcgatatcatattagatgcaactgataattttgatacacgtcagttaattaatgactttgcttataaacatcagattccttggatttatggtggtgttgtacaaagtacatatgttcaggcaacgtttattcctggtgaaacaccgtgttttaattgcttaatgcctcaattaccatctattaatttaacatgtgatacggttggagttattcaaccagctgtaacaatgacaaccagtttacaactcgttgatgcattgaagttgctgactggtaataaggttaatacacacttcacttacggggatatttggacaggagatcattatacatttggttttagtcgtatgcaaaatgaagattgtaaaacttgtggtaatgctccaacatatccacaccttaatcaacatcaacaagattatgcgaccttatgtggaagagacactgttcaatataaaaatgctgatatttctcaggaaatattactatcatttctcgagcgaaatcatattcaatatcgcacgaatttatatatgacaatgtttaggtttagagaacatcgaattgttgcattttctggaggtagatttttgatacatggaacgacagaacctaaaaaagcaattcaattaatgcatcaactatttggttaa

SEQ ID NO: 6135 - DNA, 531 bp, Staphylococcus epidermidis
atgcacaaacatcaacatcagaatattcatttaaacagaccgattcatgtagcaattttgactgtatcggatacgagagattatgattctgataaaggtggtcaactgattcaatctttgataaatcaacatgagaatcatgttgatattaaccactatcgaattgttaaagatgatatagaagctattacacaccaacttaagctttggttaacttcgtcaaatcaactagatgtcattattacaacgggaggaacaggtatctcacaaagagatgtgacaatagaagctgttcacccattgttaactaaagaattagaaggttttggtgaattatttagatacttaagttataccgaagatgttggtacaagagcattattaactcgagctattgcaggtacctgtgatagcaccttaatttttgcacttcctggctcaactggtgcaattaaacttgcaatagaaaaattaattaaacctgaattgagtcacttagtgtttgaattaaataaagacattaggaattaa

SEQ ID NO: 6136 - DNA, 489 bp, Staphylococcus epidermidis
atgactaatttcacacatattaataaacaaggtaatgctaaaatggttgatgtttctaataaagaaattacaaaacgtgtagcagaagcacactcaagtataatagttaatgaaaaaatttatagtcaaattactcaaaatactaatagtaaaggaaatgtacttaatactgcgcaaattgctggtattatggcagctaaaaacacttctacaatcattcctatgtgtcatccattaccacttacaggcatagatatatccttcaaatgggattcaaataatgatgattcatatcgtttaaatattacagcggtcgtgtctacaacaggtaaaactggtgttgaaatggaagcattgactgctgcttcagttacagcacttacaatctatgatatgacaaaagctatagacaaaggcatgataattggagaaacgtacttagaatctaaatctggtggtaaatctggcgacttccacagaaaaaattga

SEQ ID NO: 6137 - DNA, 1260 bp, Staphylococcus epidermidis
atgtctgtagagaaaagaacgccaatatcagttaaagaagcaattaaacgtattatgaaacaacatgttgaagtgaagaatatcaatattaatttagatgaaagtttaggacatattcttgctgaagatattgttgcgacctatgatataccaagatttaataaatcaccctacgatgggtttgcaattagaagtgaagattcacaaggtgcaagtggcgaaaaccgtattgaatttgaagtaatagatcatatcggtgcaggttcagtttcagaaaaaacaattgataaaaaccaagcaattcgaataatgactggtgctcaaattccttctggagctgatgccgtagtaatgtttgaacaaactattgaatctgaaacaacttttacaattagaaaatcctttaaacatttagaaaatatttcgctacaaggtgaagaaataaaagctggtgatattgtactacataaaggtatgcgtattaactcaggtgtgatagcagtcttagctacatacggttatactaaagtgcgagtggctcgaaaaccaactgttgcagtaattgctacaggtagtgaattgcttgaagtagaagatgagcttgaaccaggaaagatacgaaattcaaacggaccaatgattaaagcattagctaaacaatttggaatacaagttggaatgtataaagttcagcatgataatctcgaaaagagtattgaggttgtaaacaaagctttatcagagcatgatttagtaattactaccggaggtgtgtcggtaggagattttgattacttaccagaaatatacaagtccatccaagcacagatactatttaacaaagtggctcaaagaccaggtagtgttactacggttgcatttgcagatggtaaatatttatttggcttatctggaaacccttcagcctgctatacaggatttgaattatatgtcaaacctgctgtaaataagctcatgggagctaaagcttgttatccgcaaataatcaaagctacacttatggaagattttaataaagctaacccatttacacgattgattcgtgctaaggcaacattaacaaaagctggaatgacagtaataccatctggatttaataaatcaggtgcagttgtagccattgcgcacgctaatgctatgattatgcttcctggtggcacacgtggatttaaagcgggcaacattgttgatgtgattttgaccgaatctaatagttttgaagaggaattgatactatga

SEQ ID NO: 6138 - DNA, 477 bp, Staphylococcus epidermidis
atgattttacaaattgtaggtatgaaaaattcagggaaaaccacattgatgaaccatgctatatcatttttaaaagaacgaggctattcagtagtaacaattaaacatcacgggcatattggtgaagaaattgaattacagtcatctgatgttgaccacatgaaacatttcgctgcgggcgcagaccaaagtattgttcaggggcatcatttacagcaaacagtgacacgtaaaaagaaacaatcgcttagagaaataatagaaaattctgttacaattgattgtagtatcattttagttgagggctttaaagaagcaaattatgataaaattatcgtttataaaaataatgatgaattaagaagtctacaaggactttctcacgtcatagggaaaatagaaaccaatcatccacgtgcaagtaatcaacttgagcacttactcaataaattaattaaggataagggaatgaattaa

SEQ ID NO: 6139 - DNA, 453 bp, Staphylococcus epidermidis
atgaagcaatttgaaatcgtgactcaacctattgaaacagaacaatatagggattttacgattaacgaacgtcaaggtgccgtagtcgtatttactggtcacgtaagagagtggactaaaggtattcgtacacaacatttagagtatgaagcttatataccaatggctgagaaaaaattagctcaaattggtaaagaaattgaagaaaagtggcctggaacaataacaacaattgtacatcgaattggtccattacaaatatcagatattgcagttttaattgcagtatcttcaccgcatagaaaagcggcatatgcagcgaatgaatacgctatcgagcgcataaaggaaattgttccaatttggaaaaaggaaatttgggaagatggtgctgaatggcaaggtcatcaaaagggaacatataatgaagcaaaaaaggggaaagcaagatga

SEQ ID NO: 6140 - DNA, 234 bp, Staphylococcus epidermidis
atgaaaattttatattttgcagagttaaaagagttgctcaatcgatctactgaaacaatacatttagatatgacattaactgttcaagaattcgtgtcatatttattaaaacaccatagtgaacttaaatctaaaaaatttcaaatagctgttaatgaagaattcgtcagacaggatgatatagttcaaccaggagatacaattgcgctcattccaccggtcagtgggggttga

SEQ ID NO: 6141 - DNA, 606 bp, Staphylococcus epidermidis
atgaaagcaattattttagcaggtggagaatctagccgatttggtaaagctaaagcttttgctaaaattgataatcaatatttttatcaaaaaattatagaaacgttaaaatctacaaatatgtttaatcgcattatcattagcactaattcccaattagcttctcagtttgaatatgaatatgtgattattgatgacgaacatcatcaaaataaagggccgctaacaggaatttactcagtgatgaaacaatacatggatgaagaattgtttttcattgtatctgttgatacaccaatgattacaagtaaagcagtgaatgggttatatcatttcatggtatcaaacttaattgaatcacgtttagatattgtcgcatttaaagaaggagaaatatgtataccgacgattggtttttatacactttcgacgtttccttttattgaaaaagctttaaattcaaatcatttaagtctgaagcatgtctttaaacaattatcgacagattggttagatgttactgaaattgactcgccttattattggtataagaatattaattttcagcatgatttggactctttaaaaatgcagataaatgaataa

SEQ ID NO: 6142 - DNA, 1023 bp, Staphylococcus epidermidis
atgaaagaggtaatacaagataaattaggccgtccaatacgggatttaagaatatcggtcactgatcgatgtaatttcagatgtgattattgtatgccaaaagaaatctttggagatgattacactttcttacctaagaatgaattgcttacttttgaagaattaacacgaatttcaaagatttatgctcaattaggagttaaaaagataagaattacaggaggagagcctctcttacgacgcaatctttataaacttgtagagcaattaaatctcatagatggtatagaggatattggattgactactaatggcttgttattaaaaaaacatggaaaaaatttatatcaagctggtttacgacgtattaatgtaagtttagatgcgattgaggataacgtttttcaagaaattaacaatagaaatattaaagcgtctacaatcttagaacaaattgattatgcagtatcaataggttttgaagttaaagtaaacgtggttattcaaaaaggggttaatgataatcaaattatcccgatgattgattattttaaaaataaaaatatcgaagtacgttttattgaatttatggatgtaggtaacgataatggatggaatttcaataaagttgtaactaaagaagaaatgcttaatatgatagaacaacattttgagataagtcctgtagcgcctaaatattatggggaagttgctaaatattttcgacataaagatagtgatgcacaatttggtctaattacgagtgtatctgaatcattttgttccacatgtacgcgtgctcgattgtcttcagatggtaaattttatggttgtttatttgcctcctcagaagggtttgatgtaaaagccttaatacgtaatggagctacagatgatgatttaaaagcacaatttaaacgattgtggagtattagaaacgatcagtactctgataagcgtacgatgcaaactattgagaataatagaaagaaaaaaattaatatgaattatataggtggatag

SEQ ID NO: 6143 - DNA, 351 bp, Staphylococcus epidermidis
atgagtaacaaagtacaacgttttattgaatcagagagagaattaagtcaattaaagcattggcttaaaacaacatatcgtatttctattgaagaatttgtagttctttacaaggtctatgcagacactaaaattagtggtaaagagttacgagacacattacatttcgagatgttatgggatactagtaaaattgatgtgattattcgtaaaatctataagaaagaactcatttctaaattacgctcagaaaccgatgaaagacaagtttactatttcttcgatgcaaagcaaaagaaattattggacaaaatgactggagaaattgaaacaattagtattgcaaattaa

SEQ ID NO: 6144 - DNA, 2067 bp, Staphylococcus epidermidis
gtgaagacaagacaaaacaaatacagtattcgtaaatttagcgtaggtgcatcatccattctgattgcagcattattatttatgggtggaggatcagctcaggcagctgagcaacaacaggataagggaactgttgaaaatagcacaacacaatctattggggatggaaatgaaaagttaagtgaacaacaatcaacgcaaaataagaatgttaatgagaaaagtaatgttaattctattactgaaaatgaaagcttacataacgaaacaccaaaaaacgaggatttgattcagcaacaaaaagattctcaaaatgacaataaatctgaatctgtagttgaacaaaataaagagaatggagcatttgttcaaaatcattccgaagagaaaccacaacaagaacaagttgaactggaaaagcatgctagtgaaaacaatcaaactttacactcaaaagcagcacagtccaatgaagatgtgaaaactaaaccttcacaactcgataatacagctgccaaacaagaagactctcaaaaagagaatttgagtaaacaagatacacaatcatctaaaactactgatttactacgagcaacagctcaaaatcaatcaaaagatagccaatcaacagaagagataaataaagaagtaaataacgacactcaacaagtgactgctaagaacgatgacgccaaagttgaatcatttaatttaaatagtaaagaggaaccccttaaagttgacaagcaagcgaatccaactacagataaagataaatcttctaaaaatgataaagggtctcaagatggtctcgctaatttagaaagtaatgctgttgctacaactaataaacagtctaagcaacaagtgagtgaaaaaaatgaggatcaaacaaataaatcagcaaaacaaaaacaatataaaaataatgatccaattattttagtacatggtttcaatggatttacagacgatatcaacccatcagtgctaacgcattattggggtggcgataaaatgaatattcgccaagatttggaagaaaatggatatgaggcttatgaagcaagtataagtgcatttggtagtaactatgaccgtgctgttgagttatactactacatcaaaggtggacgtgttgactatggtgcagcacacgcagctaaatatggtcatgagcgttacggtaaaacctatgaaggtgtttataaagattggaaaccaggtcaaaaaatacatttagttggtcatagtatgggtggtcaaacaattcgtcaattagaagagctattgagacatggtaatccagaagaagttgaatatcaaaaacaacatggtggggaaatttctccattataccaaggtggccacgacaatatggtgtcatctattacaacactcggtacaccacataatggtacacatgcgtcagacttattaggtaacgaagcgattgtacgccaacttgcatatgacgtaggtaaaatgtatggtaataaagattcacgtgtagactttgggttagaacactggggattaaaacaaaaaccaaacgaatcatatattcaatatgttaaacgtgttcaaaattcaaaactgtggaaatcaaaagatagtggtttacacgatttaacacgcgatggcgcaacagatttaaaccgaaaaacatcattaaatcctaatattgtatataaaacttatactggcgagtcaacacataaaacattggcaggaaaacaaaaagctgatcttaacatgttcttaccatttacaattactggtaatttaattggaaaagctaaagagaaagaatggagagaaaatgatggacttgtttcagtcatttcttcacaacatccatttaatcaaaaatatgttgaagctacagataaaaatcaaaaaggtgtatggcaagtaactccaacaaaacatgactgggatcatgtagactttgtaggccaagacagtacagatacaaaacgtactagagatgaattgcaacagttctggcatggtcttgctgaagatttagtacaaagtgaacaattaacatcaacaaataaataa

SEQ ID NO: 6145 - DNA, 786 bp, Staphylococcus epidermidis
atggatatacaaaaatttgaatcttatctaaaaattaaacattcatactattcgactccttctcttgaagcattaaattactatgtaagacgctttatgataactgtgccatttgaaaatattaatgttcaaaacaagattcctatctcaatcgatatcaaagatttatacaataaaattgttattcaacgtcgtggcggtttttgctatgaattaaatcatttgtttgctacgtatttagaacataaaggcttccatgtcactcgtgctgcggcaacagttcacacaccaaatggtggacgtagtcctgaaggctcgcatatgtcactttacgttaatatcgaaggaacactttatattactgatgttggatttggtgatttacctacaagtattatcgagataggttctaaaacacaattcattccaacatatgataaaaatggagtttaccgtgctgtttggattaatgacaatcaatatgccttacagaagcttagacaaaataaatggatgacactctatgaagcgcatttaaaatctcaaagcattaaagactttgaagataaaataagctacaatgagcatcatcctcattctatttttgtacgacatttgcttattacacaaccacaatcatttggacgtgcaacaatgacttatcattctttaactttaagcaatgatagtactaaacataaatatgacgttactaccaataactacaaatattttttaaaaaaatattttaatttaaacgtatcaattatcccatttgaaccataa

SEQ ID NO: 6146 - DNA, 636 bp, Staphylococcus epidermidis
atgaataaacttatagacttttctaagggattagtaccggtaattttgcaacatgcacaaacggatagcgtattaatgttgggatatatgaatgaagaagcttatcaaaaaactctgaaagaaaagaaagtaaccttcttctctagatctaaacaacgtttatggactaaaggtgaaacttctggtcatttccaacacgttgagagtattcatctagattgtgatcaagatgcaatcttaatcaaagtgatgccacaaggtcctacatgtcacactggaagtctgagttgttttaatagtgaaattgaatcgcgctttaaaattcaagcattagcacaaacgattcatcaaagtgctaaaagcaatcaatctaactcttacactcaatatttattaaaggaaggtatcgagaaaatatccaagaaatttggtgaagaggcatttgaagttgtgataggtgcgataaaacataatcgtgaagaagttattaatgaaacagcagatgtcatgtatcacctttttgtgttactacatagtttggatattccattttcagaagtagaacaggtactagcgcatcgccatcaaaaaagaaataattttaaaggcgagcgcaaaaaggttcaagaatggtaa

SEQ ID NO: 6147 - DNA, 759 bp, Staphylococcus epidermidis
ttgattaaaaaaagagtgattccatgtttagatgttaaagatggacgcgtcgtaaagggtatccagttccagtcattaagagatatcggtaatccagttgatttggctctttattataatgaagccggtgcagatgaactagtctttcttgatatttcgaagacggaagcaggacatgatcttatgatagaagtgatagaagcaacggcaaaacaattatttatccctttaacagtaggaggagggattcaaaatttagatgatattacgcaactattaaatcacggagcagataaaatatcactcaattcaagcgctttaaaacatccagaattaattcgacaagcaagcgagaaatttggtcgtcaatgtatttgtattgctattgatagcttttatgataaagacagaaaggattatttctgtactacgcacggtggtaaaaaattaactgatgtcagggtatatgattgggtacaagaagtagagcttttaggtgctggggaattgcttataactagcatgcatcatgatggaatgaaacaaggttttgatattgaacatttagcaaaaattaaacaattagttaatattccgattattgcctctgggggtggaggaaatgcacaacattttgttgaactatttcaacaaacagatgtttcggcaggtttagcggcaagtattttacatgatcaagaaactacagtggcagaaattaaagataaaatgcgtgaaggaggtatccttgtgagatga

SEQ ID NO: 6148 - DNA, 705 bp, Staphylococcus epidermidis
atgattgatttatggccagctattgatttgattaattcaacaagtgttcgattaacagaaggcaaatatgatacaaaagaaaaaatggaaaaatctgtagaagacagtatccgattttatagtcaatttaaatgtgtgaaacgtatacatattgtagatttaattggggctaaagcaaaagaggtaaaagaattcgactacatccgttccttaagaaaggtgaccactaagcctatagaagtgggtggcggcattcgttcaaaacaaacaattgaaaattatattcattcaggaatagactattgtattgtaggtacaaaaggtatccaagatatagagtggttaacacatatgacacatcaatttccaaataaactctacttatccgtagatgcttttggagagaaaataaagattaatggatggaaagaggatgctaaactcaatttatttgattatgttgccaaaattgagcatttacctttgggtggtgtgatttataccgatatttcgaaagatgggaaactttctggacctaattttgatttgacaggttgtctcgcactttatacatcgttgcctgtaattgcttcaggaggtattagacatcaagaggacttgtttcgattagaatcgttaaatgttcatgctgctattgtaggaaaagcagcacatctggatgaattctgggagggattatcttga

SEQ ID NO: 6149 - DNA, 579 bp, Staphylococcus epidermidis
atgattgcgattattgattatggattgggaaacataagtaacgttactcgagcgattcaacatttaggatatgatgtgattttgacatgtaatgataaagacgtgcaaaaagctgaagctatcgtacttccaggtgttggacattttcaggatgcgatgcattctatagaagaaaaaagcatcaaagatatgcttaaaaatatacatgataaaccggtaattggaatatgtttaggtatgcaattactctttcaacatagcgcagaaggtgacgttagtggattggaacttgtcccgggaaatatagtgccaatccaatcatctcatcctattcctcatttgggttggaatgaattaaagagtacacatcccttactgcaaagtgatgtgtattttgttcattcatatcaagcagaaatgtcagaatatgtcgtagcttatgctgactatggtacaaagattccgggagtcattcaataccgaaattatataggtatccagtttcatcctgaaaaaagtggaaggtatggattagagattctaaatcaagcgcttaaaggagggtttattaatgattga

SEQ ID NO: 6150 - DNA, 579 bp, Staphylococcus epidermidis
atgaactatcaaatcaaaagaaacactgaagaaactcagcttaatatttcactggctaataacggaacacaatctcatattaatactggtgtaggatttttagatcatatgttaacgctatttacttttcatagtggattaactttatctattgaggccactggagatacgtatgttgatgatcatcatataactgaagatataggtatagttattggacaattacttcttgaattagttaagactcaacaaagttttacaagatatggttgctcatatgtacccatggatgaaacgcttgctcgaacagtagtggacattagtggccgtccatatttctcatttaatagcaagttgagcgcccaaaaggtaggaacttttgacactgaactagttgaagaattttttagagcattggtaattaatgcgcgattaaccgttcacattgacttattaagaggtggaaatacacatcatgagattgaggcaatatttaaatcttttgcaagagcattaaagatttctcttgcacaaaatgaagatggacgtattccatcgtctaaaggagtaattgaatga

SEQ ID NO: 6151 - DNA, 1245 bp, Staphylococcus epidermidis
atgcttagcgcacaacaatttttaaaagaatttaataatgttgaatctctaaatgaatctttgtacgagatagtgagtcacatttgtgaagaagttaaattacagggagataaagctttaaaaaattataatttacaatttgatcaagtggaaactgagaagcttgaattagagcaaagccaactaaaaaatgcatacgacatgctagataatgaaacacgagatgcattagagcaaagctatcagagaattaaagtgtaccaagaaaatattaaggtaaaacaggaatcatctcaacaaactgaatgttatgaacgataccatcctatcgaacgtgtaggtatttacgtgccgggatgtaaggctagctatccgtctacagtattaatgactgcaacacttgctcaagtagcaggtgttaatgagattactgttgttaccccacctcaaaataacggtatatgtcaagaggtgttagccgcttgttacattacaggcgttcatcatgtttatcaagtcggcggagcacaaagtattgcagcgctaacttatggcacggaaactataaaaaaagtcgacaaaatcgtaggtccagggaatcaatatgttgcttatgctaaaaagtttgtattcggtcaagtaggcatagaccaaatcgcaggaccgacagaaatagccttgattatagacgaaagtgctgacttagacgcaatcgcttatgacgtatttgcacaagcagaacatgatgaaatggcttgtacttatgtgattagtgaaaatgaaaaggtacttaatcaattgaacactataatacaagagaaacttcagtatgttgaacggcaagatatcatatcacaaagtattgctaaccatcattatctaatattagctcaagatactgaagaagcatgtttaattatgaacacgattgcacctgaacatgcatctattcaaactcgagcacctgaaatgtatatagataaagttaaatatgtaggcgcactttttttaggtcatttttctcctgaagttattggggactatatggcaggtccaagtcatgtacttcctactaatcaaacagctagatttacaaatgggctttctgtgaatgactttatgacacgacattcagtcattcatttatcacaaaaaacatttaacgaagtggcagaatcagctgagcatattgcacatatagaatctttatttaatcatgaaaaatcgattcatgtacgccgataa

SEQ ID NO: 6152 - DNA, 615 bp, Staphylococcus epidermidis
atgttacgagttgcattagcaaagggtcgtttattaaagagttttatcgaatatttacaacaagttaatcagatagatattgcaactgtacttttaaatagacagcgacagttattgcttacagtcgacaacattgaaatgattttagttaaaggaagcgatgttcctacttatgtagaacaaggtattgctgatgtaggaattgtggggagtgatattctgaatggtcaaaaatataatattaataaattactcgatttgccatttggtaaatgtcattttgcgttggcggcaaagccagaaacatcttgctataaaaaagtagcaacgagctatgtacatacagctactcaattcttcaataaagaaggtatggatgtagaagtgattcaccttaacggttcagttgaattgtcatgtgtagtggatatggttgatgctattgtagatattgtacaaactggttctacgcttacagctaacgggctcgttgagaaaaagtatatcagtgaaattaacgctaagttaattacaaataaagaatcatattttaagcaatcatctgaaatagagagactaatcaagcagttgggagtgtctattagctatgcttag

SEQ ID NO: 6153 - DNA, 813 bp, Staphylococcus epidermidis
atgaacaataccatcatttcaatgaaagaaaaggaattacgttttttaaagttttttcatcaacaaaaatataatgttgtagattttaacttaattgaagaattggattggcgacgattgactcatgaggatttgcaacaaatggatgaaagaagcttttggcaacaaaataaatctatttatgcattaagaaatgattttaccgatcaattattcagatattattcgaactatccaacacattttaaaaaagtagcttatgcaggagatattatcagagataacaaagttataaagcaagtcggcattgagaactacgagccacaatttgataatatcactcaaaatttcttagatttccaatattttattcaaaacgtacttcatgatgacattcaatttatcattttaggtcactatcaattgattgatgcacttttagagaaaaatcatcaaactagagaagttatggagatgatagaagaacgtaatttatcagggcttattcaaaaactaactttcaatcatcccatcattcaaattcttaaagagaacacattaaatcaacttaaaatactctctcattatttacctgagcgacaccctgcaatggtggcaattcaatcttgggcacaatggtttactgatcatgggattactgaaatccaccttgatgtaactgcacaagcgcctagattttattacaaaggtatttttataaaatgtcatcttaaaaatactactcatagcgttttgacaggtggatattatcacggttcactagaaggttttggtttaggattaacactttaa

SEQ ID NO: 6154 - DNA, 417 bp, Staphylococcus epidermidis
atggctataattaacttatctcatcgtggtgatacttcttttgacaaacttctcggacatctccctagtgttcaagaaaaatggaatgcattggaagatatattaaaaaatgaggggcaattatctgttgatttaaaagaagaaattagaaaaatactagctcaaaacagtggttgtctatactgcaaatctaaaggaaaacccaataagaaatttaccgatgaaaaatctatagtttgcataggttttgttgatgtttatgtgtcacaaaatggacgggttccacaatctacaatacaggttttaacaaagacattgactgatatagaaattgtagaattgttagcattcgtatcatttacccactgtcaacaagaatttggtgctatgatgaatttacaatctagtaataactga

SEQ ID NO: 6155 - DNA, 411 bp, Staphylococcus epidermidis
ttggacctaacaaatcaaaagatcctacacttacttgagcaaaatagtaagctatcgctttctgaaattggaaaggaagtaaatttatctacaccctctgttcgagaacgaatctataaacttattgattcgaaaatcattgaacgatatacaatcgacattaattacgatgcattaggtttcgatattaatgttttgatagaagtaactataaaaaataacctatataaagatttcaaagcatttatttcagttcaaaacaatgttgatttttgctatagaatttctggagatagttgctttatatttaaagcgcattttaaaaagatgagcgaagtcgaaacactcatcaacgaaatccaatattatggtcatacaaaaacacattttatattttcagaaacaaaatag

SEQ ID NO: 6156 - DNA, 408 bp, Staphylococcus epidermidis
gtgaaattatctatttttcatgatggtcaattttttgtaggtgtcgttgaataccaagaaggcttcattcataaatatctaaaagttacatttggcaatgaacctagcgatgaaacagtgttacgattcataacttttaaacttattcctttattaaatcaaacacatggcaagaagaaacctattcaaaagcataaaaagattaatccaaaacgtttacaacgtaaaatcgctaaagaacaaaaagagaccaatttaactacatttgctcaacaagcgattaaagaagaacaagaattgaataagctaaagagtaaaaaacttcagcgtttagaaaaagaacgacacagacaatacaaaagaatgttaaaaagaaaaaaagcacatgaaaagcacaaaggtcactaa

SEQ ID NO: 6157 - DNA, 519 bp, Staphylococcus epidermidis
atgttagaaacacatagattaaagctagtgaagcctaatttgagttatacagatgaactttatcaattgcatacaaataaggtagctacaaagtatacacctaaaggtattcatcagaataaagtagcaacccaagattttattaaaggatggatgaggcattgggatgaatatcaatttggttacttcattttaattatgagagataatcacgaagtagtgggaatagcgggatttgagtatcgtacaattcatcaacaacagtttcttaatgcgtattatagaatctttccatcgtatactggtgttggtttagcttttgagtcaatggaggagattgcccgtcatttaaaaaagcatgataccataacaccaaaattaattcgaacaaatcaatataatacaaattctattaaattagcacaaaaacttggatataattatgatgctaactgggacgatgtaattaataaaggagatcgttgtttttttaatctacaaacgttggataataactaa

SEQ ID NO: 6158 - DNA, 1497 bp, Staphylococcus epidermidis
atggctaataaagagtcaaaaaatgttgttattattggcgctggtgtcttaagtacgacatttggttctatgattaaagaattagaacctgattggaacatcaaactctatgaacgcttagatcgtccaggtattgaaagttctaacgaaagaaacaatgccggtacaggacatgcggcgttatgtgaattgaactatacagtacaacaacctgatggttcaattgatatagaaaaagccaaagaaatcaacgaacaattcgagatttcaaaacaattctggggtcacttagtaaaaagtggtaacatcagtaatcctagagatttcattaatccacttcctcacattagtttcgtaagaggtaaaaataacgttaaattcttaaaaaaccgttacgaagcaatgcgtaacttccctatgttcgataacatcgaatatacagaagatatcgaagaaatgagaaaatggatgccattaatgatgacaggtcgtactggtaacgaaatcatggcggctagtaaaattgacgaaggtacagatgttaactacggtgaattaactcgtaaaatggcaaaaagtattgaaaaacatccaaatgctgatgttcaatacaaccacgaagtaattaatttcaatcgtcgtaaagacggtacttgggaagttaaagttaaaaaccgtaattctggagacgttgaaactgttctagctgattatgtatttatcggtgcaggcggtggcgctattccactattacaaaaaactggtatcccagaaagtaaacatcttggtggattccctatcagtggtcagttcttaatttgtacaaaccctgatgtaattaatgaacatgacgtcaaagtatatggtaaagaaccaccaggcacacctccaatgactgtaccacacttagatacacgttatatcgaaggtgaaagaacattattatttggaccatttgcaaatattggccctaaattcttaagaaacggttctaacttagacttattcaaatcagttaaaccttataacatcacaacattactagcatctgcagttaaaaacttacctttaatcaaatactctatcgaccaagtattaatgactaaagaaggttgtatgaaccatctacgcacgttctaccctgaagctcgtgacgaagattggcaattatacactgcaggtaaacgtgttcaagttatcaaagatactaaagaacacggtaaaggattcattcaatttggtacagaagttgttaactctaaagaccactctgttatcgcactattgggtgaatcacctggagcatcaacttcagtatcagtagccctagaagttttagagaaaaactttgctgagtatgaaaaagattggactccaaaattacaaaaaatgatcccatcatatggtaaatctcttatcgatgatgttaagttaatgagagcaactcgtaaacaaacatctaaagatttagaattaaattattacgaatctaaataa

SEQ ID NO: 6159 - DNA, 516 bp, Staphylococcus epidermidis
atgacaaaatttaactttgatcaagttcacagtgatgttcagtttaaaattaaacatcttatggtgtcccaagtaaaaggaacatttaagcaattcgatgttcaattagatggagatattaatgatttaacttcactaaaagcaacagctactattattccaagttcaattgacactcaaaatgaggacagagacaaccatttaagatcaaacgatttctttggtacagaagacaacgataaaatgacatttgtaactaaagaaattaacgaaaatcaagtagttggagatttgacaattaaaggtgaaactcatgaagagacatttgatgttgaatttaatggtgtaagtaaaaatccaatgaatggacaacaagtcactggttttatcgttagtggaacaattaaccgcgaaaaatatggtattaattttaaccaagctttagaaactggtggcgtgatgttaggtaaaaacgtaaaatttgaagcatcagcagaatttagcatcgacaattaa

SEQ ID NO: 6160 - DNA, 978 bp, Staphylococcus epidermidis
atggcaaatcaaaaattaccaacattaaaatatactggtaaatcagaaagtgcagtgccaattgtgtcagaaagtgaattgcaaacggtaacagcagagccgtgggtgaaaatttcagataaagggttacaactagaaggacttaattttaatcgcgaaggtcagttattcttattagacgtgtttgaagggaatatttttaaagttaatcccgcaacaaaagaggttacaacaaaatttcagtctgttaaagataatccggcagcgattaaagtacataaagatggtcgtttatttatctgttatctaggtgattttaagacaactggaggcatatttgcgacaacagaaaaaggtgaacaaatagaagaaattatttctgatttaaatacagaatattgtattgatgacatggtttttgacagtaaaggcggattttatttcactgattttagagggtattctacacaacctttgggcggtgtttactatgtagatccagactttaagacggttacgccaattattcaaaatatttctgtggcgaatggtattgctttaagtacggatgaaaaagtgctatgggtaactgaaactacaactaatcgacttcaccgaatcgcattagaggatgatggcgtgactattgcaccatttggagcgacaataccatattattttacaggtcatgaaggaccggattcttgttgtattgatagtaatgataatttatatgtggctatgtatggccaaggacgtgtattagttttcaataagagaggttatcctataggtcaaattttaatgccaggacgtgatgatggaaagatgttacgtacaacacatccacaatttatacctggtacaaatcaacttataatttgtactaatgatattgaaaaccattctgaaggtggatctatgctttatacagttaatggttttgctaaaggatatgagagttatcaatttcaataa

SEQ ID NO: 6161 - DNA, 963 bp, Staphylococcus epidermidis
atggattatagagtactactttattataaatatgtaactatagatgaccctgaaacttttgcagccgaacatttgaaattttgtaaggaacatcatttaaaaggaagaatactagtttcaacggaaggcattaatggaacattatctggaacaaaagaagatactgataaatatatagagcatatgcatgcagatagtcgttttgctgatttaacttttaaaattgatgaagctgaaagtcatgcgtttaaaaagatgcacgtgcgtccaagacgtgaaattgttgcacttgacttagaagaagatattaatccacgtgaaattaccggtaaatactattctcctaaagaatttaaagccgcactagaagatgaaaatactgttatattagatgctcgaaatgattatgaatacgatttaggacatttccgtggagctattcgtcctgatataacacgattccgtgacttacctgaatgggtgcgtaataataaagaacaactcgacggaaaaaatattgtcacatattgtacaggtggcattcgttgtgaaaaattttctggttggttagtaaaagaaggatttgaaaacgtaggtcagttgcatggtggtattgctacatacggtaaagaccctgaaactaaagggctatattgggatggtaagatgtatgtatttgatgaacgtattagtgtcgatgtgaatcaaattgataaaacagtcatcggcaaagagcattttgatggtacaccttgtgaacgttatattaattgtgcaaaccctgaatgtaataaacaaattcttgtttctgaagaaaatgaagaaaaatatttaggtgcatgttcgtatgattgtgcaaaacatgagcgcaatcgctacgttgcccgtcatcatattagcaatgaagaatggcaacgtcgtttaaataatttcaaagatgtgcctgaacacacacatgcataa

SEQ ID NO: 6162 - DNA, 639 bp, Staphylococcus epidermidis
atggaaatattagtcacagcatttgaaccatttggagatgaaaaaattaattctgcactagaggctgttagccatttggaaactaaaattggctgtcataaaattgatcgattgatacttcctacagtatttcatgactctgcggatatgattgctaaagtgttaaaatctaaaaattatgatgttgctctagctatcggacaagcaggtggtcgtagtgaaatcactcctgagcgtgtaggtataaatatagatgacgcacgcattaaagataatcaaggacaccaacctattgatcaagttatacgtcacgatggcgcacctgcttatttttctaatttacctatcaaaagaatgacaatggcaattcaaaaggctggtcttcctagcagactatctaattccgctggaacatttgtatgtaatcatatcttatatcaactcggatatatggcagaccatttttaccctgacttattatttggatttatacacgtgcctttgattcctgaacaaacaatcaatcattctcaacaatcttcaatgtccgttgaagatatcgtaaaaggattaactgaagcaatcaaagctatcgacttcgttgaagataacaagatcgcattaggagaaatccaatag

SEQ ID NO: 6163 - DNA, 570 bp, Staphylococcus epidermidis
atgggtgacaaaatgtataaatatttaaaaagaaatcgattctcaacgcagacttcaattataaaaaatgacgctcagcaacctgttggtatgatatcgaaagtgtataaaaattttattcaaaaatgtattggttatttgaccttaggtttaaaattaaatcaatatgagatatgtgatgtgaataataatagtgtagcttatattaaggtatcgcgatatatggagaaaaaacattttaaagttgaatatcatgattcaaaaggtaggcagtgtgaagcgttatttgataagcaaagtaatggttatgaggagacgtatggaatattaaaaattgacggtataatattaaatattcatgctaatgagaaacatcatactactatcaaagatataaagcgagatacacaaattgcgagttggaaaattggtgattatgcttatgcagaagggaatgatgggctatttaaagaacatcaattactctatattcttatcatgcacgcttttgctaatacatatgtgagcaaacgtcaaacgagcttgatgttcccagggccacctgtttaa

SEQ ID NO: 6164 - DNA, 1611 bp, Staphylococcus epidermidis
atgaataaaaatattaaaatgaaaaacaaacgaaaaataaacaatacgcttgtttatactatctctgttttaattattgttgttattactcttattgcgggtatctttcctaaagcatttgggatgtatgcgcagagcgtttatgattggattacaaattggtttggttggctattccttatcattgtctttattttagatgtatttttaatattcttagctttttctagatatggtcgatttaaacttggttcggatgaagaagaaccagaattttccatgctatcttggattggcatgttattttcagcaggtcttggcgtcggtatagtcttttggggtgttgcagaacctttaacgcattatctccattcacccttccctggaaaaattgcagatcactctgaagaatcagcacgtgttgcgatgggatatacattcttccattggggtatttcacaatggtcaatatttgcaatttcaggattaatcgttgcatactttcaatttagaaaacaacgtaacgggcttatttcaacagctatggaacccgtttttggtgaagcttataaacgtcctttcaggaatattattgatatattagctattatcgcaaccgtcatgggaattgctacgtcgattggtttgggaattatgcaaatcggtggtggattaaaccatctctttgatgttcctaataataatttcactaaaatcttaattactattttgatggtagccatatttttaggatcttcattaactggcttaaatcacggtgtaaaatggttaagtaatttaaatattttattaggtgctattttacttatatttattttgatttttggagatttaaaatttattttagaatcatacacactagcaatttctgattatttgcagcattttatagaatatagtttacgcgtaaatccatactcaggagatgatagttggattcaacagtggactgttttctattgggcttgggttatttcttggtccccttttattgggggctttgtagcaagagtatctcgaggacgtacaattagagaatttgtcgtaggtgtactcattattcctcctctaatttcgtttacatggattgcaggttttggaggtacagctattaaacttgctttaaatcataacgacaagcttgttcatattgtagataaagattatactgttgccttgtttgaattattatcacattttccattgtcggaagtcactagttccttagctattgtacttattttcatctttattgtaacaagtgctgattcaactacgcatattgttgcaggtatggctacaggtggttctatcaatccaactttaaaacataaagtcctatggggtctacttattggggcgatttcagttgctatgacaattgcaggtggtcttaaaagtttacaaactgcatcagttattacaggtctaccattctctatcattttattattaatgatattctcactcatgagggctttaaaaagagaacccatccatcattttaaaatgacatcaattgatgatgaaaaagattactctatttcattagaagagcgtgaaaaacaggacgaacaagataacaagtaa

SEQ ID NO: 6165 - DNA, 513 bp, Staphylococcus epidermidis
atgaaaaggtttgcaaaagcatttgtcgtaagtggtattactttaggtgcagttttaggtttaaacgtaacagagcataatggtgtatctaatgaagcaaaggcacaaacagcacacagttactggtataaatataatggttatactgcatcgggtggcgactttgtacttagcaattcattttatcaaggtttaaaagctggaaacgttacatttaatggtattaaggtaaatcaaaaatatgaatctaagactgctactaaaaaaatatacgatcagacatttcaacaaattaatggaaataaagcaaacaacgtacaatttaaaattgcttccagaactgttactttagatcaagttaaacaaaagtatggaaaaaattataattatcagccgtcattatctaaaaacaaaacaagtaagacagatggcttgtacggttatcaagtcggaaaaggaaacatcgttttccacgttaaagatgggtatgtcacaagtgctacattgtcataa

SEQ ID NO: 6166 - DNA, 159 bp, Staphylococcus epidermidis
atggtggttgatatctacaataatcaattcacaaaagacgacttattagacagattacatgcaccagacgcagtagaagaattacaacaacaaattcaattcattgcacaaggacaaatggatgaagaaagaaaaaaggaactagcgagaatcatttaa

SEQ ID NO: 6167 - DNA, 717 bp, Staphylococcus epidermidis
gtgattgaagcgaatcaaattttagctaaaatgaaaaatcaaaaaatcaactatgataaagtattaagaaagataatttctcaatgggaacgtgatggagaacgccctaaaatcttacttcatagttgttgtgcaccttgtagtacatatacgttagagtttttaacacaatatgcggatatagcgatttattttgcgaatcctaatatacatcccaaaagtgaatatttaagacgtgctaaagttcaagaacaatttgtaaatgattttaataataaaacaggtgcaaatgtaaagtatattgaagccgaatatgaaccgcataaatttatgaaaatggcaaaagataaaggtttaactgaagagccggaaggtggactaagatgtacggcttgtttcgagatgcgattagaaattgttgcaaaagctgctttagaacatggttacgattattttggtagtgcaatcacactctctccaaagaaaaatgcgcaattaatcaatgaactaggtatggatgtacaaaatatatataatgtaaaatatttaccaagtgattttaaaaagaataaagggtatgaacgttctatcgaaatgtgtaatgattataatatttttagacaatgttattgtggttgtgtatttgcagcgatgaagcaaggtatagattttaaacaaataaataaagatgctcaagcatttttacaacaattttaa

SEQ ID NO: 6168 - DNA, 1332 bp, Staphylococcus epidermidis
atgaaatattgcagtaattgtggtcaacctcttcgagaaggtgtaaaggtgtgtacaaattgtggtacgcctgtgagaaatgatggacctaattataaacattcagaacaacgttattctcatcaacaaccacgttccaataagagtaataaaaaaacttggttgattgttactatagtgttagccattatcattgctttggtagtaatctttactatagctaaaaatcaaatgtctccagaaaaacaagcgactcacattgcacatgctatcaaaaaagacgatgctaaatcattatctaagcaattaacatcaaacgatcatcgtttaaatgaagaagaagcacgtgcgtacttaaagtatattaaagcagaaagtgatttaaagcatgttgctgacaaagttgaagaaaacaccaaagatattaaaaataatcactataacaatttatctgtagatgcaaatgataataatattttaaatatatctaaagacgggaaaaaatatgttttttttgataactatcaatttaatgttcctcaaaaaacaattacgctcgtttcaagtgatagtggtgaaattacttatgaatttaacggggataaacatcatatttctgtagaagaagatgacgataaagaattaggaacatttcctatcggtgattataatttaaaagcatcaaaagacatggaaggtaaaaattttaaaggcgctattacaattgatatgagtgaaagtgatagtattgcatatgaatcgtttaaacaaaaacgttttaatgttgatactgaaggcggatatatattagataatgtaaaaatatatgctaatggtaaagaaataggcgatggtttttcatcagaaacatatggtccttatgatccagatgaagaagttatcgttcacgctgaaggttcatacgaaggaaaaacttttaaatcaaattcggtcaatgtagcaagtgcaagcgaaaaagatggtggtgtgacagatgtcacagtcaaattcgatgaagaagctattgatcagtatgtcgataaaaaattagatgaaaaatacgatgattcagatgacgagtcagataacgattcaagtagtggcgaagtaacgcgtgaaaatgtaattgataaagtagagtcatatgaaggacatacactagatactgatacgtatacgtataaagaacctgaaaaaaccggtgatggtaaatggggtttttcattcttagataaagatggagatttagctggatcgtacacggtagacattgacgacggttatgttacagaatatgacgaagatggtgaagaagttggatctggttattaa

SEQ ID NO: 6169 - DNA, 1011 bp, Staphylococcus epidermidis
atgcattgtccgaattgcggtaatccaatagaagatgatgatttattctgtggtgaatgtggacataaaataagtcgacatccacagtcagtcagaaatgcagaaagtgaaataacaaaagctgaaaagaatgatgaagaacaaaacataacatcaaataataaagaaaacaacgcagcgactcatcaaaatgttgattcaacatctcatgatgagactagatcaaatgaaaatgacgtagcagattcaacattacaatctaagcagtcacataatgatacccaacaatcaaatctctctacataccatcaaagacctcaacatcgagaaattcctcaaaatcaacacaatcacgatcaacagcaaagtcaaataggtcaacaagctaaacaagtaacaaatgaaagtaaaggtttctttaaaagtgcatttactgcacctgataaaatcattcaaactaatcatgttttcagttttaaattattattatcattattaataatcggttttattgtattagcaattttactcgcttccgtaataccagttgagattggtattttcggtactacaagaggaagtttggtaacgagtatcatttttggtattattctatttttggttgtcatagtaggtgcaatatttgggcttacacgtttagtagttagacaacctattgcatttaaaaaagtattatcagactatgtgttaattaatagtgtttcgttagcaattttaattatttctgtaattttaatattagcagaatcatacagctttggcggaagtatagcattattgtctttattattatttattgcttctggtatttatctaattgcgaagtatagcactggtaatcaaacaagaatatccagcttttatggtgtgattatttatatcattattttgttcttatttattcgtatttttggggaggcatttttccatcaaatatttggtgattttatagaagaactaggggatttatttgaaggaggaacttattaa

SEQ ID NO: 6170 - DNA, 387 bp, Staphylococcus epidermidis
ttgattagaacatttatgaactcaaaaatccatagagctagagttacagaatctaatttaaattacgttggaagcataacaatagatgccaatatattagatgcggttgatattttacccaatgaaaaggttgctattgttaataataataatggtgctcgatttgaaacatatgtcattgctggagaacgtggtagtggaaagatgtgtttaaatggcgcggcttcaagactagttgaagttggagacgtcattattattatgacatatgcacaattaaatgaagatgaaatggtagatcactcaccaaaagtagctgtgttaaatgaaaataatgaaattatagaaatgataaatgagaaagaaaatacgatatcaaatgtataa

SEQ ID NO: 6171 - DNA, 861 bp, Staphylococcus epidermidis
atgactaaagttattacaacaattaatgaaatgcaatctattgttaagcaacatcaacgtgaaggtaaaacaataggattcgttccgactatgggagctttacatgatggtcatttaaccatgatgaagcaatctgtaagcgaaaatgatctcacggttattagtatatttgtgaatcccttgcagtttggacctaatgaggattttgatgcttatccacgtcaactcgatgatgatgtggctgcagtaaaaaagttacaagtggattatgttttccatccgagtgtagatgaaatgtatccagaagaattagatattcatctgaaagttggacacttggcacaagtattagagggagcacaaagacctggacacttcgaaggtgttgtgaccgtggtcaacaaactatttaatattgtgcaaccagattatgcctattttgggaaaaaggatgcacaacaattagctattgttgaaaagatggttaaagactttaatcttcctgtacatgttatcggcattgatatcgtaagagaaaaagatggtttagccaaaagctctagaaatatttacttgacctctgaagaacgaagagaggcaaaacatttatatcaaagtctacgcttagcaaagaatttgtatgaagcgggtgaacgagatagcaatgagattataagtcaaatcgctgcgtatttaaacaaaaatattagtggatatattgatgatttggggatttatagttatccaaatcttatacaacaatcaaagattcatggacgaatattcatatcattggcagttaaattttctaaagcaagattgatagataatataattattggagatgactatattgattag

SEQ ID NO: 6172 - DNA, 819 bp, Staphylococcus epidermidis
ttgaaaactttaaatcatttaaacaaaatgaaggcatcacagcaaaagatttctatggttacagcttatgattatcctagtgctaagcaagcacaacaagctgaaattgacatgattttggtaggagattctttaggaatgacagtgttaggatatgatagtactgttcaagttacattgaacgatatgattcatcatggtaaggctgttaaaagaggtgcttcagatacatttatagttgttgatatgcctatagggactgttggtttaagtgatgaagaagatttaaaaaatgcacttaagctttatcaaaacacgaatgctaacgctgtcaaagtagaaggggctcatcttacatcatttattcaaaaagcaactaaaatgggtatacctgttgtttctcacttaggtcttacacctcaaagtgtaggtgtaatggggtataaacttcaaggggatacaaagacagccgctatgcaacttatcaaagatgctaaagctatggaaactgctggtgcagtagtactggttttagaagccatacctagtgatttagctcgagaaattagtcagcaactcactattccagttataggtataggggcaggaaaagatactgatgggcaagtgttagtgtatcatgatatgttaaattatggtgttgatcgacacgctaagtttgttaagcaatttgcagacttttcaagtggtattgatggattaaggcaatataatgaagaagttaaagcagggacgtttccttctgaaaatcatacttacaaaaaacgtattatggatgaggtagagcaacatgactaa

SEQ ID NO: 6173 - DNA, 870 bp, Staphylococcus epidermidis
atgacaattgccattataggcccaggtgcagtgggtacaacgttagcttttgaattaaaaaaagttctaccagatacggaactcatcggccggcaagataaattaatgacctatttcccagaaaatacttcaaatggaagtgatgttaaagtaacttcatttaatcatattaatcaaacttttgatgtcattatcatagcagttaaaacacatcaattggatgacgtcattaaacaattacctaaaatcactcatgacgattcgctcattatcttagcacaaaatggctatggacagcttaataaacttccatatcaacatgtctttcaagcagtcgtctatattagcggacaaaaagttaacaacaatgttcaacatttcagagattaccaactatatattcaagatagcacactaactcgtcaattcaagcaaatggttcgtccttccaaaatagaggtggttttacaagaaaatattgaaaaaagcatttggtataaattattagtgaatttaggtataaataccatcactgctattggacaacaaccagctaaaattttaaaatctcctcatattgagtcgttgtgtcgtcgtatattagttgatggtcttaaagttgctagagctgaacaaattgactttgaagatcatatcgttgatgatattttaaatatttataaaggttatccagacgaaatgggaacaagtatgtattacgatgtcattaacaagcatcctcttgaaatcgaggccatacagggttatatatataaatgtgcaaaaaaaaatcatttagagaccccctatctagatatggcttatacatttttatacgcttatcaccttgaatacacacaaccagattga

SEQ ID NO: 6174 - DNA, 705 bp, Staphylococcus epidermidis
atgactaatgtattatatcaacacggaacattaggaactttaatggcaggtttattagaaggaactgcttcaattaatgacttattagaacatggtgatttaggtattgctacgcttacaggttctgatggagaagtaatttttgttgatggtaaagcttatcatgcaaatgaacataaagaatttatagaattgacaggcgacgaaatgacaccatatgcaactgttacaaaattcaaagcagactcaagttttaaaacatctaataaaaatcaagaagaagtattcgatgaagttaaaaaacaaatgacaagtgaaaatatgttctcggcagttaaaatttcaggaacgtttaaaaaaatgcatgtacgtatgatgcctggtcaagaacctccatacacacgtttaattgattcagctcgtagacaacctgaagaaacacgtgaaaatatcaaaggttcaatcgtaggtttcttcactccagaattattccatggtattggttctgcaggtttccatattcactttgcaaatgatgatcgtgatttcggtggtcatattttagactttgaagtggatgatgtgactgttgaaatacaaaactttgaaacatttgaacaacacttcccagtagatgctaaatcatttactgatgctgacattgactacaaagatatagctgatgaaatcagagaagctgaataa

SEQ ID NO: 6175 - DNA, 1665 bp, Staphylococcus epidermidis
atggcggaaaaacaatattctgcagcacaaatggtaattgatactttaaaaaataatggagttgagtatgtatttggtattccaggtgcgaaaatcgactacttatttaatgcactagaggatgacgatattgaattagtcgttacgcgtcatgaacaaaacgcagcgatgattgcacaaggtattggtcgtttaacaggaaaaccaggtgtggctattactacaagtggcccaggggtaagtaacttaactactggtttattaactgcaacttctgaaggtgaccctgtattagctatcggtggtcaagttaaaagaaatgacttattacgtttaacacatcaaagtattgataacgcatcattacttagatcctcaactaaatatagtgcagaagtacaagatccagaatcactatcagaggttattacgaatgcaatgcgtacagccacttcaggtaaaaatggagcgagctttatcagtattccacaagatgttatttcatcacctgtcaaagctgatgcaatttcattatgtcaaaaaccacatcttggtgtaccttcagaacaagaaattaatgaagtgattgaggctattaaaaattctaaattcccagtattattagctggaatgagaagttcaagccaagctgaaacagaagctattcgccgtttagttcaaaaaacaaatttacctgttgttgaaacattccaaggtgccggcgtaattagtcgcgaattagaaaatcacttcttcggtcgtgttggtttatttagaaaccaagtgggtgacgaattacttagaaaaagtgatttagttatcacaatcggttatgaccctattgaatatgaagcaagtaactggaataaagaattagatactaaaatcatcaatgtcgatgaagaacatgctgaaatcactaattacatgcaaccagttaaagagttaatcggaaacattgcaggtacaatagatatgatttctgaacatgtaaatgaaccatttattaatcaagatcatttagatgaacttgaaaaattaagaggcgaaatcacagaagcaactggaattaaagcaactcacaaagaaggtgtgatgcacccagttgaaatcattgaaacaatgcaaaaagttttaactgatgatactactgtaactgtagatgtgggaagccattacatttggatggctcgtaaatacagaagttacaatcctagacatttactatttagtaacggtatgcaaactctaggtgttgcacttccatgggctatttcagctgcacttgtacgtccaaatacacaagttgtttctgtagctggagacggtggtttcctattctcaggacaagaattagaaactgcagtacgtaaaaacttaaatatcattcaattaatttggaatgatggtcgttataacatggttgaattccaagaagaaatgaaatataaacgctcttcaggtgtagaatttggaccagttgattatgtaaaatatgcagaatcatttggcgctaaaggattacgtgtgactaatcaagaagaattagaggcagcacttaaagagggttacgaaactgatggaccagtattaattgatatcccagttaactatgcagataatgttaaattatctacaaatatgttaccaaatgctttaaattaa

SEQ ID NO: 6176 - DNA, 951 bp, Staphylococcus epidermidis
atgaaaaaatttgggaaaaaagttgttttagtaggagacggttccgtaggttcaagttatgcatttgctatggtgactcaaggaattgcagatgaatttgtaattattgatattgcaaaagataaagtggaagcagacgttaaagatttaaaccatggtgcactttacagttcttcaccagtgactgtaaaagctggagaatatgaagattgtaaagatgcagatttagttgttattacagcaggtgcacctcaaaaaccgggtgaaactcgtttacaacttgttgagaaaaatactaaaatcatgaaaagtatcgtaactagtgtcatggatagtggctttgatggtttcttcctaattgctgcaaacccagttgatatcttaacacgttatgttaaagaagttacaggtttaccagctgaacgtgttattggttctggtacagtgcttgatagtgcaagattcagatatttaataagtaaagaattaggtgttacatcaagtagtgttcacgctagcattataggtgaacatggtgactctgaacttgcagtttggtctcaagcaaacgttggaggtatttcagtgtatgatacattgaaagaagaaactggtagcgatgctaaagcgaatgaaatttatattaatacaagagatgctgcttacgatatcattcaagctaaaggatctacgtattatggtatagctctagcactattacgtatttctaaagctttactaaataatgaaaatagtattttgacagtttctagtcaacttaatggtcaatatggatttaacgatgtttatcttggcttaccaacacttatcaatcaaaatggtgcagttaaaatttatgaaacaccattaaatgataacgaactacaattactagaaaaatcagtgaaaactttagaagacacttatgattctataaaacatttagtttaa

SEQ ID NO: 6177 - DNA, 882 bp, Staphylococcus epidermidis
atggaaattaaacaaattaaatatttcgtagaagttgtacgacaaggtggtatgacgcaagcatctgaacacttatacattgcacagtcaacgattagcaaagcgattaaaaatattgaaaatgaatacgatattacattgtttgaccggtcacaaaaacaaataaaactaacagatataggtcaaacattttatgataatagtttagaatttttagctttattcgagaaattatctttagaaatgaatgacattgtgaacgttcaaaaaggtcatattaaaataggcttatcaccaatgatgaatgttcaaatgtttacaaatgcattgaatcagtttcacagactctatcctaatgtgacatatgaagtgattgagggtggtggtaaaattgttgagaacttaacatctaatgatgatgtggatattggtattactacattacctgtagatcacactgaatttcattcaacttctttatataatgaagaattattattagtagtaagtaatgaccatcatttagcacatttaaataaagtagacatggcagatttgaaagatgaagagtttgttttatttcatgatgattattatttaaaagatcaaattatagagaactgtaaaaggctaggctattaccctaaaactgttgctaatatttctcaaattagttttatcgctaatatgattcaacaaggaataggaattagtatcgttccagaaagtttagttaatttaatggggaataacgtaacgtccattcaattagagaatgttgaattatcatggcatcttggcgtgatatggagaaaagatgcttatctcaatcatgtaactcgcaaatggattgaatttatttctgagatgaaaccaacatag

SEQ ID NO: 6178 - DNA, 1452 bp, Staphylococcus epidermidis
atgggaagtttttttaatcggatgactcgaaaagagaatcctactatttatcaaagtaaagatgggcatcttaaacgcacattacgtgtacgcgactttcttgcactaggtgttggtacaattgtttctacatctatcttcactttaccaggtgttgtcgcggctgagcatgccggacctgctgtttcattgtcattcttattagctgctattgtggcaggtcttgtagcctttacttatgcagaaatggcatctacaatgccttttgctggttcagcttattcatggattaatgttctttttggtgaattattcggatgggttgccggttgggcgcttttagcagaatactttattgctgttgctttcgttgcttcaggcttttctgctaacttaagaggtcttattgcaccattgggcatttctttacctaaatcattatctaatccatttggaagtaacggtggtgtcattgatatcattgctgctgtagtgattattttaactgcattactattatcacgcggaatgaacgaagccgctcgtatggaaaatgtattggttatattaaaggtgttggccatcattttatttgtgattgttgggctaactgcgattaatttcagtaactatataccttttattccagaacataaagttactgaaactggcgactttggaggttggcaaggtatttatgctggagtttcaatgatttttttagcttatattggttttgactctattgctgctaattcagctgaagcgattaatccacagaagacaatgcctagaggaatcttagggtcactcatagtagcaattgtattgtttgtggccgtagcacttgttcttgttggcatgttccattactctcaatacgctgataatgcagagccagtaggttgggcattacgagaaagtggtcatggtattattgctgcaattgttcaagcaatttctgtcatcggtatgttcactgcattaatcggtatgatgcttgcaggttcacgtctattatattcatttggacgagatggtttactcccttcttggttaagtcaattgaatcacaaacatttacctaatcgagcacttgtcatacttacaatcattggcgtagttatcggatcaatgttcccgtttgctttcttagcacaattgatttccgcaggtacccttgttgcattcatgtttgtgtcactagcaatgtatcgattaagaaaacgtgaagggaaagatttacctaagccagagtttaaattacctttatatcctatattgcctgcaattacatttatattagtattgctagtattttggggattaagttttgaagctaagttgtatacactgatatggtttattgtaggtataattatttatttaatttatggaattagacattccaaaaagaatgatgaagaagcgtatcaagtacctagaaaataa

SEQ ID NO: 6179 - DNA, 1338 bp, Staphylococcus epidermidis
atgagtaaggttaatcatttgatagatgaagatgaacgttattttgcacattctggacggattaaatattatcctctagttattgatcatggttatggagccacgttaatcgatatagacggtaagtcttatattgatttattagcaagtgcaagttcgcaaaatgtgggtcacgctccgaagccagtagtcgaagcaattaagaaccaaactgagaaatttattcattatacaccagcatatatgtatcatgaaccgttagtgcgattatcaaaaaaattatgtgacattgctcctggaaattatgagaaaagagttactttcggattaagtggctctgatgctaatgatgggattataaagtttgcacgagcgtatacaggacgtccatacatcataagttttactaatgcataccatggttcaacatttggttcattatcgatgtcttcaattagtttgaatatgcgtaagcgttacgggccattacttaatggattttaccatataccttttcccgataagtatagggggatgtttgagcaagctaaacctaacacagttgaggaatatttagctcctttaaaagaaatgtttacaaaatatgtccctgcggaggaagttgcatgtattgtggttgaaacaattcaaggtgacggtggcttacttgaacccgtaccaggttattttgaagcattacaagagctttgccacgctcacaatattcttattgcagtcgatgatatccaacaaggattaggtcgtacaggaaagtggagttccgtagatcattatcattttactccagatttaatgacatttggaaagtcattagctggaggtttaccaatgtctgcgattgtaggtcgtaaagaaatcatggaaagtcttgaagcacctgctcatttatttacaactggtgcaaatcctgtaagttgtgaagcagccttagctacgataaagatgattgaagatgaagatttactaaacgcttcatggaaaaaggggagttacgttagaaaaagaatagacccatggatagaacgttaccaatatgtaggtgatgttcgaggtattggattatcaattggaatagacatagtatcaaataaaattgagaaaactagagattctgaagcagcattaaagatatgtaattactgctttgaaaatggtgtgattatcatagcagttgcgggtaatgttttaagatttcaaccaccacttgtgattacctataagcaacttgataaagcattagatacaatagaagaggcgcttgaaaagttggaaagaggagaattaaatcaatatgacattagtggtcaaggttggtaa

SEQ ID NO: 6180 - DNA, 432 bp, Staphylococcus epidermidis
atgaattggttaaaaatattttatcatttattatgcgcaaccacgattagcgtgatattacttattataactatattaatggatgtgttactacaaaacacacatttaactcagttattactcaatattgattttttaatcaaccctgatgaagtgccaacaattattgaagtactgattcatttaagtattggaatattgatttatctcgcctttttaattatctatcattattcaaaatccttgtatcatctagcatacttacctttagtattgatatttactttgatgtatccacttctcgtttttcttgcgcaacgtccatttttttcctttagttggaacgaatttgcatggtggttagttgcacatctttttttcatcattttaatggcgacttgtctacctatcatttcgaaaaaaattttatga

SEQ ID NO: 6181 - DNA, 879 bp, Staphylococcus epidermidis
ttgaagaaattagcagtgatatgtgcgtttacaatattaatattagctggttgtggtcttggtgatagtgataataatggaagctcaacgataaatgatgatcaacaatcaggatataaaagtaacagagattcaaaatcaagtataagtagaaatcaaacagaagataatcagcaggacacacaacaagatacccattcgaatagatactatgctcaagtttggttaactgctttagatagttatagaggtgaaagtgaccttccttttgacgatttagaaattgtacatcaaaatatttctaataaagttttagatccctatcacccagacgaatcagccaaactacctgaaggaacagaattgttaacagcaagtgttactgcagcaggttcagtttattataaaagtaatggagatggcacaattacaatatatagtgtaccatcacatttccaagggagttggcgtgacgctgattactctaaaagagaatctcaacgcattatagatgatgctcgtacagttaagttatacaacgctagtgaaagtgaaatcaataagataagtcagatgatgaggactgaattttcagttggtgataatttaacagatgaagatgatacttctgaatctgaagatcaatcaagtagttctgatgaagtaacggtgacacgaagtaatgttatcgatatagttgaagactacgaagggcatcaattagatacagacacatatatttacaaagaaccagaaaaagatagcgatggtagttgggggttctcatttacagataaagaaggccatttagaaggatcttatattatcgataaagatggagaagtaacgaagtatgatgaagatggagagccagaataa

SEQ ID NO: 6182 - DNA, 591 bp, Staphylococcus epidermidis
gtgaaaaagatttctctaattgcaacgactgtattaacaggattattattatttccaagtgtcaatgacacaacgacacatgcagccgaagtaacatctcatgatgcacaagctgtagcaattcaagctatgaaaaatagtggtggcaatccggacttacaaaatttcaaaaaagttaaggataaaggggattatttcacaattgatataaataataaatctggtgcaggtgtcggtacttataaagtatacaaaaatggagtggtgctatataaaagtggaaattatggagaatatagtcaactcaatacacgacaatgttatgttgcacaagatattgctacaacatcttcacaagtaaaacgacactctactcaacagacacaagcagtggatagtacacgtgagctcaattcatactacgtaggtcaagttcaatcttctgacttaccacaacaaagttcatctgatatgctaccgaatactggtatgaaagataaaaatttcaatacaaatggtataataagtctatttttactcactgctggtttcattacactttaccatcaacctttacgtaaaatgtcatag

SEQ ID NO: 6183 - DNA, 189 bp, Staphylococcus epidermidis
atgtataaagattataatgtgactcaacttacgctaccaatgaaaacttcattttttatccccgcaaatgatatttcacgacatgcaaatgatattgtagaaacaattcccgagactgaattcgatgaattaagacatcatcggggtgcaacatcataccattcaaaaatgattttaaaagaactatga

SEQ ID NO: 6184 - DNA, 1362 bp, Staphylococcus epidermidis
atgaaatatattgtggtaggtacatctcattcaggatatgaagtgatccaaacattgcttaaagaagatgaaaatgctgatattcaagtttttgaaagtgcagatcaaccgtcctttttatcttgtggtattcaaagttatcttgaagacatctcatcatcattagatgatttacattacgcatcagttgactcttataaggcacaaggtgtaaatattcatacgaatagcacagtcacagatttagatactgacaataagactgttgtagttgaacaccaaggtcaaacagcaacttattcttatgataaattgttcctaagtcctggtggcaaacctgttacccctccagtcgatggaattgaaaaatataaacatgtattatttatgcgtggacgtgattgggcaaatcaaattaaagaacgcatgaaagatgccaaaaaggctgttgtagtcggaggtggctatatcggtattgaagctgctgaagcttttgctaaagcaggcatagatactacaatcgtagatgtcgctgatcgtatattaaacacttacttagataaagaatttacagacatattagaaacaaatgcacagcaacatggtcttcattttaaaggtggcgaaacagtaaaatcaatttcaggaaatcaaaatggcgaagtaactactgtagttaccgacaaaaatgaatatgacgcagatactgtcttatttgctgtaggtgtcgaaccagctaccgagtggctaaaagataaaattgatttaggtaagaaaggaattataaacattaaccaccaacaacaaacatctgctaaagatgtctatgcgggtggcgatgcgacattagttccttttgcaccagtatctgaggatcgttatattgcattagcaacaaattcaagacgtcaaggcgttgtcgcagcaaaaaacatgttgggtaaagaaatgacaatgccacgcgtttctggtacttcaggtttacaattatttgattataaatttggacaaactggcattcacggtacagaaatcgataattatgatggcaatttaggtcaaacatacgtagaagaattgattcgtcctcagtttatgcaagatgatacgaaaattcatatgaaaattatttatgataaagacactcaccgtatacttggtggtcaagtcatgtcaaaagaagatattactgcttctattaacacaatttcagtagtaatatctgctggtttcacacttgaacagctcgctgtccaagatttcttcttccaacctgattatgatagaccttggcattatcttaatgtgttagcccaacaagcattgggagatacatttggtagcgataagatgttattctaa

SEQ ID NO: 6185 - DNA, 891 bp, Staphylococcus epidermidis
atgaataaagaacaattagaaaaaatgactcatggtaaaggattcattgctgcattagaccaaagtggtggtagtacacctaaagcacttaaagaatatggtgtgaatgaagaccaatacagtaatgaagacgaaatgttccaacttgttcacgatatgcgtacacgtgttgtaacttcaccttcattttcacctgataaaattttaggtgcgattttattcgaacaaactatggatcgcgaagttgaaggtaaatacactggagactatttagcggacaaaggcgttgttcctttcttaaaagtcgacaaaggtcttgctgaagagaaaaatggcgtacaattaatgaaacctattgatgatttagatgaaactttagatcgtgcaaatgaacgtcatatcttcggtactaaaatgcgttctaacatccttgaacttaatgaacaaggaatcaaagatgttgttgaacaacaatttgaattcgctaaaaaaatcatcgctaaaggtttagtacctattatcgaaccagaagttaatattaatgctaaagataaatctgaaattgagaaagttttaaaagctgaaatcaaaaaaggtttagattcattaaacgatgatcaattagttatgttaaaattaactattcctactgaagctaacttatataaagatttagctgaccaccctaatgttgtacgtgtagtagtattatcaggtggttacagccgagatgaagctaacaaattgttaaaagataacgatgaattaattgcaagcttctcacgtgcattagcaagtgacttacgtgctagccaatcacaagaagaattcgataaagcattagacgatgctgtagattcaatctatgatgcgtcagtaaataaaaactaa

SEQ ID NO: 6186 - DNA, 1191 bp, Staphylococcus epidermidis; identical to SEQ ID NO: 2744

SEQ ID NO: 6187 - DNA, 1245 bp, Staphylococcus epidermidis; identical to SEQ ID NO: 2745

SEQ ID NO: 6188 - DNA, 1050 bp, Staphylococcus epidermidis; identical to SEQ ID NO: 2746

SEQ ID NO: 6189 - DNA, 1392 bp, Staphylococcus epidermidis
atgagcaataaagcttggggtggcagatttgaaactcaacccgaagaatgggttgatgatttcaatgcgtcaattgattttgataaaaatttaattaaacaagatgttcaaggtagtattgcacatgcaactatgctcgctaaacaacatattattacagatgatgaagctcaatccatcattaatgagcttaaaaatattcaaagtgactttgaagaaggtaaacttaaatttaaagcttctctcgaagatattcatcttaatattgagcacgagcttattcaacgtattggcgaagctggtggaaaactgcatactggtcgtagccgtaatgatcaagttgccacagatatgcatttgtatactaaagaacaagttcaatacattattgaacttatagcgtcgtttcaagaaacaattgttcaattagcagaccagcacgttgacacaattatgcctggatacacgcatttacaacgtgcacaacccatctcgttcgcacatcatattatgacttacttttggatgttagaaagagacaaaggtagattcatggatagtcttaaacgtatagatatctcaccattaggtgctgcagctttaagtggaactacacaccctatagatagacatctgactcaagaacttctaggatttgcaaatctgtatgaaaatagtttagatgctgtcagtgatcgtgactatatcgttgaaacattgcatcatatttcactcactatggtacatctatcacgttttgcagaagaaatcattttttggtcgactgatgaggcaaaatttatcactttatcagatgcgttttctactggctcatctattatgccacaaaagaaaaaccctgatatggctgaactaataagaggaaaagtcggacgtactacaggacacttgatgagtatgttagtaacacttaaaggcttacccttagcttataataaagacatgcaagaagataaagaaggtttatttgatgctgtacacacacttaaaggctctcttcgaatcttcgaaggtatggttgcatctatgaaagttaattcaaaccgtttaagtcaaacagtaaaaaatgatttttcaaatgcaacagaattagcagactatttagtcagtaaaagtgtaccttttagaaccgctcatgaaatcgttggtaaaatcgtattaaattgtattcataaaggtatatacctattagacgtacctttaagcgaatatcaagaacatcatgagaatattgaggaagatatatatgattatttaacacctgaaaattgtctcaagcgtcgccaaagctatggttcaactggtcaagaatcagtaaaacatcaactaaaagtcgcaaaagcattattaaaagacaacgaatcaaaatag

SEQ ID NO: 6190 - DNA, 1206 bp, Staphylococcus epidermidis
atgaaagataaaatcgttttagcatattcaggtggtttagatacaagcgttgcagttcaatggcttattgataaaggatatgatgtagttgcttgttgtcttgacgtaggcgaaggcaaagatttagacgttgtatatcaaaaagctttagatatgggtgcagtcgaatgtcatattattgatgcaactaaagaatttagtgatgattatgtaagttatgctattaaaggaaatttaatgtatgaaaatgcatatcctctagtttcagcattatcacgtccactcatcgcgaaaaaactggttgaaattgctgaaaaaacaaattctattggtattgcgcatggatgtactggtaaaggtaatgatcaagtacgtttcgaagtggcaatcaaagctttaaatcctaagttaaaagcatttgcacctgttcgtgaatgggcttggagcagagaagaagaaattgattacgcaatcaaacataatattcctgtttcaatcaattatgactcgccatactcaattgaccaaaacttatgggggagagctaatgaatgtggtattttagaggatccgtatgccgcacctccggaagatgcatttgatttaactacacctttagaagaaactccagacaatgcagacgaaattatccttacatttaaacaaggtattccagtacaagttgatggcaaagattatcaattagatgaccttattctttacttgaatcaacttgctggcaaacacggtattggtagaatcgatcatgttgaaaacagaatggtcgggataaaatcgagagagatttatgaaacacctggtgcggaagttattttaaaagcacacaaagcactagaaacaattacattaactaaagacgtagcgcactttaagcctgtcattgaaaaacaattttcagaacaaatatacaatggtttgtggttctcgccattaacagatagtttaaaactctttatcgatagtactcaacaatatgttgagggagatgtgagaattaaattatttaaagggaacgctattgtcaatggcagacaatctccttacactttatacgatgaaaaattagctacttatacaaaagaagatgccttcaatcaagaatcagcagtaggtttcattgatatttatggtttacctacacaagttaatgcattacttcacggggggtatagtaatgagcaataa

SEQ ID NO: 6191 - DNA, 1332 bp, Staphylococcus epidermidis; identical to SEQ ID NO: 2749

SEQ ID NO: 6192 - DNA, 576 bp, Staphylococcus epidermidis; identical to SEQ ID NO: 2750

SEQ ID NO: 6193 - DNA, 522 bp, Staphylococcus epidermidis; identical to SEQ ID NO: 2751

SEQ ID NO: 6194 - DNA, 576 bp, Staphylococcus epidermidis; identical to SEQ ID NO: 2752

SEQ ID NO: 6195 - DNA, 3480 bp, Staphylococcus epidermidis; identical to SEQ ID NO: 2753

SEQ ID NO: 6196 - DNA, 3657 bp, Staphylococcus epidermidis
atgattccaactaaacctcatgatgtgatttggacagatgcacaatggcaaagtatttatgcgaaaggacaggacatacttgttgctgctgcagcaggttccggtaaaacagccgttctagttgagcgtattatacaacgtatactaagagatgatgtagatgtagatcggttactagttgtaacatttacgaatttaagcgcacgtgagatgaagcatcgagttgataaacgtatacaagaagcatcttttaaggatcctaacaatgaacatttaaagaatcagcgaatcaaaattcatcaagcacagatttctactttacacagtttctgtttgaaattgattcagcagcattatgatgtattagatatcgatcctcattttagaacaagtagtgaagcggaaaatatattattattagaacaaactattgatgatgttttagaacaacactatgataaattagatcctcactttatagaattaaccgaacaactatcatcagataggaatgatgatcaatttagaagtattattaagcagttatattttttcagtattgctaatcctcaaccatttgaatggctcaatcaattagcgcaaccatacaaagaagaaaataaacagcaacaattaatgcagcttatcaatgatttagcaatgatttttatgaaagcaggatatgaggaattacaaaaaagttatgacttattctcaatgatggaaagtgttgataagcagcttgaagttattgaaaccgaacgcatgtttattactaaagctattgaaggtaaagtattaaatacagatgttatcacgcaacatgaatttatgagtcgttttccggcaataaatagcaagataaaagaagcaaatgaaggcatggaagatgctttaaatgaagcaaaacaacattatgataaatataaatctttagttatgaaagtaaagaatgattatttttctagaaatgcagaagatttgcaaagagatatgcaacaactcgcacctcgagtggcttatttagctcaaatagttcaagatgtgattcaatcatttggtgttcaaaaacgaagtcgtaatattttggatttttcagattatgaacattttgcattacgcattcttactaacgaagatggctcaccttcgcgtatcgctgaaacgtatcgtgaacattttaaagaaatcctagttgatgagtatcaagatactaatagagtgcaagaaaaaatattatcttgtattaaaactggtgaagaacacgatggtaacttgttcatggttggggatgtgaagcagtctatttataaatttagacaagctgatcctagtttatttattgaaaaatataatcgcttttctagtagtggaaatgaaagtggcttgcgcattgacttatcgcaaaactttcgttcgagacaggaagtgttatctacaaccaattacttgttcaaacatatgatggatgaacaagtaggagaaatttcatatgatgatgcagcgcaattgtattttggtgcaccatatgacgaagtttcacatcctgttcaattacgagcacttgttgaggcaagttcagaaaatagtgacttaactggaagtgaacaagaagcgaattacattgttgaacaagttaaagatattattaatcatcaaaacgtatacgatatgaaaacaggtcaatacagaaaagcaacatataaagatatcgtaattttagagcgaagttttggtcaagcgcgtaatcttcaacaagcttttaaaaataatgatatcccttttcacgtaaatagtaaggaagggtattttgagcaaactgaagtacgtcttgtgctttcatttttaagaacaatagataatccacttcaagacatttatttagtgggattgatgcgttctgtaatatatcaatttactgaagaagaattagctgaaataagagttgtaagccctcatgatgattacttttatcaatctataaaaaattatatgattgatgaaaaagctgattctagattggttgacaagttaaatcgttttattcaggatatacaaaaatatcaaaattatagtcaaagtcaaccggtttaccaattaattgataaattttataatgatcattttgtaattcagtactttagcggtcttattggaggtaaaggtagaagagcaaatctgtatgggctatttaataaagctgttgaatttgaaaattcaagtttcagaggtttattccaatttattcgttttattgatgagcttattgatcgtaaaaaagattttggtgaagaaaatgtcgtaggtcctaacgataatgtggttagaatgatgacgattcacagtagtaaaggattagaatttccatttgtaatttactcaggattatctaaaaaattcaacaaaggtgacctgaatgcaccagttattctaaatcaacaatatggtttaggtatggattattttgatgtaaataaagatatggcttttccttcacttgcctctgtggcatatagagcaataaatgaaaaagaacttatatcagaagagatgcgtttaatctatgttgcgttgacacgagcaaaagagcaacttattttagttggaagagtcaaagatgaaaagtcgttaattaaatatgaacaattagctgtttcagacacacatatagcagttaatgaacgccttactgctaccaatccatttgttctaatttatggtgttttggctaagcatcaatcgccttcattgccaaatgatcaaagatttgaaagagatattgatcaattaaattctgaagtgaagccacgtgtatcaatagtgattgatcattatgaggatgtttcaactgaagaagtagtcaatgataatgaaataagaacaatcgaagaattaaaggccataaatactggtaatgaagatgtgaaaattaaaattcatcaacagctttcttatgactatccttttaaagttaacacgatgaaaccatctaaacagtcggtatcagagttaaaacgtcaattagaaactgaagaaagtaatacaaattatgatagagtacgtcaatatcgtattggtgttgcatcatatgaaagacccaagtttcttacccaaacaaaaaaaagaaaagcaaatgaaatagggactttaatgcatacagtcatgcaacacttaccttttagagaacaacgtttaacaaaagacgaattatttcaatatatcgatcgattgattgacaaacaacttattgatgaagatgcaaaagaggatattagaatagatgagattatgcatttcattgatggccctctctatatggaaatagctcaagctgacaatgtttatactgaattaccttttgtggtaaatcaaattaaagttgatggacttacaagtgaagatgaagatgtatccattattcaaggtatgattgatttaatatatgaaagtgacggacaattttactttgttgattacaaaacagatgcttttaatagaagaaaaggtatgagtgatgaagaaatagggaatcagctcaaagaaaaatatcagatacaaatgacgtattatcgaaatactttagaaaccatacttaaacgacccgtaaagggttacttatattttttcaaatttggtacattagaaatagatgattaa

SEQ ID NO: 6197 - DNA, 906 bp, Staphylococcus epidermidis
atgaaatttctatcattcaaacataatgacagaacttcatatggtgttaaagtaaaacgtgaagatgctgtttgggatttaccaatggtttttgctgagtttggggacaaagactttaatcctaaaactttaattgcaggtttacagcaaaatcaaactttagactttcaagagcaagttcgaaaagcagttgtcgcagcagaagaaagtggaagagatgaggaatttaaacttttattcactgatattgattttctaccaccagtgacacctccaaataatgtgattgcatttggtagaaattatgaagatcatgctagtgaattaaatcatgaagttgatagtttatacgtatttactaaagcggcttcatctttaactggtgatgaagcaacaattcctaatcataaagatattacagaacaattggactatgaaggcgaacttggaattgtaattggaaaattaggcgaaaagattcctagaggattagctttagattatatttatggatacacaattatcaatgatattacagatcgtactgcgcaaagttcacatgatcaagcattcttatcaaaaagtttaactggggcatgtccaatgggcccttatatagtaaccaaagacgaattacctgcgccagagaatgtaaatatcgtaacaaaagtgaataacgaaattcgacaagatggcaacactggtgagatgattttaaaaatagatgaactcatcgaaaagatttcaaaatatgtggctttacatccaggcgatatcattgcaactggtacacccgctggtgtgggtgctggtttacaaccaccacaatttttacaaccaggtgatgaagtcaaagtaactatagataatattggcactttaacaacatatatatctaaaaattaa

SEQ ID NO: 6198 - DNA, 402 bp, Staphylococcus epidermidis; identical to SEQ ID NO: 2756

SEQ ID NO: 6199 - DNA, 876 bp, Staphylococcus epidermidis
atgatattgaattcaaaagttaaaggtattattgctatattgatttcagctgtgggttttagttttatgtcagtcttttttagattggccggtgatttaccagtctttcaaaaatctctagctagaaattttgtagccatgtttataccattattttttatttataaatataggcaacctatgtttggaaaattaagtagtcaacccctactcatctcacgttcaacacttgggttaattggtgtcttacttaatatctacgcaattgatcacatggtattaagtgatgccgatacattaatgaaattaaatcctttttggacaattgttcttagtttaatttttttacatgaaaaggtacgcaaatatcaaatcacggcgatgattattgctataatagggatgctattaattgttaaaccagaattttcatcatcagttattccttcaatagcaggattactatccggtatttttgcagcttctgcctacacatgtgttagagcactcagcactcgtgaaaaaccttatacgatagtgttttatttttcattattctcagttgtagttcttatacctttttcaatatttacttatacacctatgacaacaattcaaattcttttcttactcggcgctggattatcagcagctgtaggacaaattggtataacattggcttatagttttgctccagcaaaagatatctccatcttcacatatgcgtctataatatttactgcattatttggatttattctgtttggagaatcacctgatatgtttgcaacagtaggatatattgtcattatcggagcaagttactatatgtttgataaagcaagacgagaaacaactataaatcaaaataattaa

SEQ ID NO: 6200 - DNA, 501 bp, Staphylococcus epidermidis
ttgacacaaggacgtcaaaaagatgaattaaaagatattactttattaggcaatcaaaataacacttatgaatttgattatagaccggaagttttagaaacttttgataataagcatcaaggtcgtgattattttgttaagtttaattgtccagaattcacatcactatgccctattacgggtcaaccagattttgcgacaatttatatctcgtatatccctaatatcaagatggtggaatctaaatcattaaagttatatttatttagttttagaaaccacggagattttcacgaagattgtatgaatattattatgaatgatttaattaatttaatagacccacattatattgaagtttggggtaaatttactccaagaggtggcatttccatagatccttacacgaattatggtcgtcctaatacaaaatatgaaaaaatggctgaacatcgattaatgaatcatgatatgtatccagaaaaaatagataatcgttaa

SEQ ID NO: 6201 - DNA, 1506 bp, Staphylococcus epidermidis
atgacttcaaataagtcccatgaaaaagcagttcaagaaataccacaacatggattcttcggacatccaaaaggattaggcgttctctttttcgtagaattttgggagagattcagctattacggaatgagagcaatgcttattttttatatgtattttgcactccaggaaaacggacttggaatggacaaaacaacagccatgtctatcatgtctgtatatggatcattaatttatatgtcttcaattccaggtggctggatagctgatagaattacaggtacccgaggtgccacattaatcggagctatattaattattataggtcacatatgtttaagccttccttttgcaatggtaggtttattcacttctatgttctttattattgtaggatcaggtttaatgaaaccaaacatttcaaatattgttggtagactctatccagaaaacgacgtacgcatggatgctggatttgttatcttctatatgtcagtgaacatgggtgcactcgtttcaccaattattttacaacactatattgatattagaaatttccatggtggcttcttgattgcagcaatagggatggctcttggattagtttggtacttactatttaaccgaaaaactttaggtagtatcggtatgaaaccgacgaacccattatcttcttctgaaaagaaaaagtacggaacaatcatcggaatcgttgttatagcaatagtattaatccttatgattgcttactttacgcatacgctatcatttaatttaatcagtaatactgttttaattttaggtattgctttaccaatcatttactttacaacaatgattagaagtaaagaagttactgatactgaaagatcaagagtaaaagcatttattccgttattcattttaggcatgttattttggtcaattcaagaacaagggtctaatgtattaaatatctatggtattgaaaactctgatatgaaattaaatttatttggttggaaaacacattttggtgaagctattttccaaaccattaacccattatttattttattatttgcacccgtggttactcttttatggcaaaagctaggaaaaaaacaacctagcctacctattaagtttgcaattggtactattttagcaggcgcatcctacatacttatgggagcaatcggtcatatttatggggatacacaattctcagttaactgggttattctttcatacgttatctgtgttattggtgagctttgtctctctccaactggtagtagtgcagcagttaaattagcacctaaggcatttaacgcacaaatgatgagcctttggttattaactaacgcttcagctcaggccattaacggtacattagttaaattaattaaaccacttggtcaaaccaattactttatcttcttaggtgttgttgcaaccgtgattacgttaattatattagcgtttattcctaagatttctaaagcaatgaaaggtattcgttaa

SEQ ID NO: 6202 - DNA, 162 bp, Staphylococcus epidermidis
atgtataaaaattatcatatgactaaacatactctaccaatggaaacttcagtaattatctccacacatgatatgtcacaatatgtgaatgatattgtaaaaaaattccaggtactgaattcagacagcatcgttgcgcaacattatagcatcccaaaatga

SEQ ID NO: 6203 - DNA, 924 bp, Staphylococcus epidermidis
atgaaacaaccgtataaccatggtgttcttttctatcatgaacatagcggtttgaaagatatacataatggcataggagaagttgcaaaatctcttagttcaatgtgtaaacacctctctcttcaactcagtgaaaataaaggcgatattattaaatattgtaaatctattaaaaatgaaaattatagctctgatgtagacgttttatttattttaggtggagatggtacacttaatgaactagtaaatggcgttatgcagtatcagttaaatttaccaatcggtgtaataccaggtggtacctttaacgattttacaaaaacacttcaactgcaccctaattttaaaacagctagtgagcaattattaacatcacatgctgaatcatatgatgtgttaaaagtgaacgacttatatgtacttaatttcgttggacttggcttaatagtacaaaatgcagagaatgttcaagatggttctaaagatatattcggtaaattcagctatattggatcaaccgttaaaacgttattaaatcctgttaaatttgatttctccttgactgttgatggtgaaacaaaagaaggcaatacttcgatgatgttaatagcaaacggtcccaatataggtggtggacaaattccgctaaccgacttatcgccacaagatggaagagcaaacacatttgtatttaatgatcaaacactaaatatattgaatgatatattaaaaaaacgtgatagtatgaattggaacgaaatcacacaaggtattgatcacatatcaggtaagcacatcacactctcaacaaaccctagtatgaaagtggatattgacggcgaaataaatttagaaacaccaattgagattcaagtattacccaaagcgatacaacttcttactgcaactgaacaaaataattaa

SEQ ID NO: 6204 - DNA, 2610 bp, Staphylococcus epidermidis
atgttatctataactaaaaaaaatacatatgaatcaaacaaagatgaagtcacacaaatgattgattcattagcagaaaaaggacaagaagctctaaaagaactatctaaaaaatcacaacatgagattaatgacattgtacatcagatgagcatggctgctgttgatcagcatatgcatttagctaaactagcttacgacgaaacaggtagaggtatttatgaagacaaagctatcaaaaatttatatgcctcagagtacatatggaattcaatcaaagacaataaaacagtaggtatcataggtgaagataaacaaaaaggattaacgtatgtagctgaacctataggcgtgatttgtggagtgacaccaacgaccaaccctacatctacaactattttcaaagcaatgattgctattaaaacaggtaatccaattattttcgcatttcatccaagtgcacaacaatcatcaaaatatgctgctaaagtcattttagaagctgcaacaaaagcaggtgctcctaaatattgtattcaatggatagaagtgccatcaattgaggcaactaaacaattaatgaatcataaagatattgctttagttctagcgactggaggctctggaatggtaaagtctgcatattcgacaggtaaacctgcattaggagtcggtccaggtaatgttcctacttatattgaaaaaactgctcatatcaaacgtgctgttaatgatatcattggttctaaaacttttgataatggtatgatttgtgcttctgaacaagtcatggttgttgataaagaagtatacactgacgtcgttaaagaattcaaattacaccaaacacattttgttaataaaaatgaactacaacaattagaagatgccatcatgaatgaagataaaactgcagttaaacctgatatagttggtaaatctgctgtagatatagcgaaattgtcaggaattagtgttccagaaaaaacaaaattattagtcgcagaaattgatggaattggaaaagattatcctttatcacgtgaaaaattatcacctgtactcgcaatggtaactgcaaaatcaacaggacatgcactacaaatttgtgaagacacattaaaatttggtggtttaggtcacactgctgtaattcacaccgaggatagtcaattacaacaaaaattcggtctaaaaatgaaagcttgccgtgtattggtaaatacaccttctgctgtcggaggaattggaaatatgtataatgaactcattccttcactcacgttaggttgtggttcatatggtagaaattctatttctcataatgtaagcgcagtagacttattaaatattaaaacaatagcaaaacgtcgtaataatatgcaatggtttaaactcccacctaaagtttattttgaagaaaattcagttatgtatttgacagagatggataatgttgaacgtgtaatgatagtttgtgatccaggaatggttaatattggttatactgatatagttgaacaagtgctgagacgccgagaaaaccaaccacaaatcaaagtgtttaacgaagttgaacctaatccatcaactcatacagtctataaggggttagaaatgtttgtaaatttccaacctgatactattattgcactcggtggcggttcggcaatggatgcagccaaagcaatatggatgttctttgagcatccagaaacttcattttttggggcaaaacaaaagttcttagatattcgtaaacgtacttataaaattaccaaacctaaaaacgcaaaatttatatgtataccaacgacatcaggaactggttctgaagtgacaccttttgcagtaattactgatagcgagacacacgttaagtatccactagcagattatgcgttaactcccgatattgctatcgtcgatccacaattcgtattaagtgtacctaaagatgttgccgcagatacaggaatggatgttttgacacatgccattgaatcttacgtctctgtcatggcttcagattatacaagaggcttaagcttacaagcaataaagttaacttttgattatctaaaatcatcagttcaagaaaatgacaaacactcacgagaaaaaatgcataatgcttcaacaatggccggtatggcatttgccaatgcttttttaggaatttctcattctatcgcacataaaattggtggtgaatatggtattccccacggcagaacaaatgctattttattaccacatgtcattcgctataatgccaaagatccacaaaaacatgcactgtttcctaaatatgatttctttagagcagatactgactatgctgacattgcaaaatttttaggactcaaaggtaatacaactgaagaattagtggatgctctagctaatgcggtgtatgatttaggatgttcagttggtattgatatgaatttaaaatcacaaggcgtaactgaagagcttcttcactctactatagacagaatggctgaattagcatttgaagatcaatgtacaactgctaatccaaaagaaccgctaattagtgaacttaaaggcattatcgaaacagcatatgattatgaaagataa

SEQ ID NO: 6205 - DNA, 540 bp, Staphylococcus epidermidis
atgacgcgacagagaatcgccattgatatggatgaagtgcttgctgatacattgggtgctgttgttaaagcggtcaatgaacgagcggatttaaatatcaaaatggaatcattaaacggtaaaaaattaaaacatatgatacccgagcatgaggggttagtcatggatattttaaaagaacctggattctttagaaatttagatgtaatgccgcatgctcaagaagttgtaaaacaactcaatgagcattacgacatatacatagccacagcagcgatggatgttccaacctcttttcatgacaaatatgaatggttattagaatactttccttttttagatccacaacattttgtattttgtggtagaaagaatattattcttgcagattatcttattgatgataatccaaagcaattggaaatttttgaagggaaatcaattatgtttactgcttctcataatgttaatgaacatagatttgaacgcgtaagtggttggagagatgtaaagaattattttaattcaattgaaaaatag

SEQ ID NO: 6206 - DNA, 1056 bp, Staphylococcus epidermidis; identical to SEQ ID NO: 3487

SEQ ID NO: 6207 - DNA, 1515 bp, Staphylococcus epidermidis; identical to SEQ ID NO: 3488

SEQ ID NO: 6208 - DNA, 975 bp, Staphylococcus epidermidis
gtgattaaatttaaaaatgtcacaaagcgatatgctaataatattgctgtagataatgtaagttttaatattaaagaaggagaattttttgtgttaattggtccttcaggttgtggtaagacaacaacacttaaaatgatcaatcgtttaattcctttaagcgaaggttacatatattttaaagataaaccaattagtgattatccagtttacgaaatgcgttgggatattggatatgtactacaacaaattgcattatttcctcatatgactatcaaagaaaacattgcacaagtaccccaaatgaaaaagtggaaagataacgatattgatttacgtgtggatgaattattgacaatggtaggtttaaatcctgagcaatttaaaaatagaaaacctgatgaactatcgggtggacaacgacaaagggttggtgtagtgcgagcattagctgcagatcctcccgttattatcatggatgagccttttagtgctcttgacccaattagcagagagaagttgcaggacgatttgattcatttgcaaactcaaattaagaaaacaatagtttttgtaacgcatgatattcaagaagcgatgaaactaggtgacagaatttgtttactcaatgaaggacgtgttgaacaaattgatacacctgatggttttagaacgcgacctaaaagtgactttgtaaagcaattcatgggtagtcatttggatacaacacataatattgtgaatcaagtgaagattaaagatttaggaattaatcggtctgtagatgacaatgcaagcgttattcattatcctgaagtagatgctgagttgtacttaaataatatttatgaagatttgtctcattatgatgcagttgtggtcaacgataaagaacaacatcgtcgatatttgttaaatagagaagatgtgtttacttatttatctcgtaataaggaggaagcgacacatgaatga

SEQ ID NO: 6209 - DNA, 1779 bp, Staphylococcus epidermidis
atgcaagagactttatcgcattattttggttataagtcatttcgaccaggacaagaagaaattataactaaaatattaaatcatcagcatacactgggagtactacctaccggtggcggtaaatcgatatgctatcaagtaccaggtttaatgcagggtggcacaactattgttataagtccacttatttctttgatgaaagaccaagttgatcaactacaagcaatgggaattcaagctgcatatttgaatagtagtttgactcataaacaacaaaaagagattgaagagcaaataaagcgtggcgccattcagtttttatatgtagctccagagcgctttgaaaatactttttttctaaatttattacgtaaaatagaaataccccttatcgcttttgatgaagcacactgtatatcgcagtggggacatgattttagacctagttaccaaagtgtcatacaaaaagtttttacattacctcaaaacttcacaatagttgcacttacagctactgcaaccgctgaagttcaacaagatatcatgtctaagttatcaattggacaaaatgatgttgtcaaaacaagtactaaaagacgcaatttaatcttcaaagtcaatccgacttatcagcgacaaaaatttgttgtggattatgttgcaaatcatgaaggacaggcaggaatcatttattgttccactcgtaagcaggtagaagaattacacgaagctctaaatagtgaaaaaattaagagcacaatttatcatgctggtttaacgaataaagagagaattgaggcgcaaaatgatttcttatatgatcgtgtagaggttgtcattgcgacaaatgcatttggtatgggtattgataaatcaaatgtacgttatgtcattcactataacatgcctggagatttggaatcttactatcaggaagctggacgcgcaggacgtgatggtttaaaaagtgagtgtatccttttgtttagtgaacgagataagggattacatgagtattttattactgtatcccaagctgatgatgactataaagataaaatgggcgaaaaattaacgaaaatgattcaatataccaaaacgaaaaagtgtttagaagcgacaattgttcattattttgaacccaatgaaaatttagaggaatgcaatcaatgtagtaattgtatacaggaaaataaaacgtatgatatgactcgtgaagcgaaaatgattattagctgtattgctcgaatgaagcaacaggaaagttatagtgttattatacaagttttacgtggagaagtgacagattatataaaacaccatcattataatgaattaacgacacatgggttgatgaaaaattatacaacatctgagttatcacacttaattgatgagctacgtttcaaaggatatttaaatgaaaatgatgaaattcttatgtgtgatacatcagtgaaacaattactaaataatcataccaaggtttataccactccgttcaaacaaaaaactaaagagaaggtatttatcaacactgttgaaggtgtggatagagcgttatatcgtgagcttgttgatgtacgtaaacagctaagtgataaacttggaatagcacctgtaagtatattttctgattacacgctcgaagaatttgctaagcgtaaacctgaatcgaaacaagaaatgattgctattgatggtgtaggtagttataaattaaagcattattgtcctaagtttatcgaaaccatacaaagctataaaactagaatataa

SEQ ID NO: 6210 - DNA, 1884 bp, Staphylococcus epidermidis
atggaagcatacaaaattgaacatttaaataaatcctatgcagataaagaaatttttaataatcttaacctatctatatctgagcatgaaagaattggattagtaggtatcaatggaacaggtaaaagtacattattaaaagtcattggtggtctagatgaagattttactgcagatattacccaccctaatcaatatcgcattcgttattcctctcaaaaacaagacctcaatggccatatgactgtgttcgaagctgttttaagttcggatactcctacattaagaattataaaaaaatatgaagaagcagttaatcgctatgcgttagatcaaagtgactctaattttaataaaatgatggaagcacaagaagaaatggatcaaaaggatgcatgggactataatgcagaaattaaaacgattttatctaaactagggattcacgatacaactaagaaaatagttgaactttcgggtggtcaacaaaaaagagttgtattggctaaaactctaatagaacaaccggatttacttttgctagatgaaccgacgaaccatcttgactttgaatccatccgttggctcattaattatgtcaagcaatatccacatacagttttatttgtaacacatgatcgctactttttaaatgaagtatcgacgcgaattattgaactggatagagggaagttaaaaacatatccaggtaattatgaagattacatagtaatgcgtgcagaaaatgaattagtagaacaaaaacaacaagaaaaacaaaaagcattgtataaacaagagttagcatggatgcgagcaggagcaaaggcaagaactactaaacaacaggcacgtatcaatagatttaatcaactagaatcagacgttaagacgcaacatacacaagataagggtgaacttaatcttgcatattcaaggttaggtaaacaagtatatgaattaaagaatttatcaaaatcaattaataataaagttttatttgaagatgtcactgaaattattcaaagtggtagacgtataggtattgtaggacctaatggagcgggaaaaacaacattacttaatattttaagtaatgaagatcaggactatgagggtgagcttaaaatcggtcagactgttaaggtagcttattttaagcaaacagaagagacacttgaccgtgatattagagtgattgactacctaagagaagaaagtgaaatggctaaagaaaaagatggtacctcaatttcagttacacaattgttagaaagatttttatttccgagcgctacacacggtaaaaaagtttataaactctcaggtggagaacaaaaacgtctgtatttattgcgtttacttgttcataaacctaatgtactccttttagatgaaccgactaatgatttagatactgaaacacttacgattttagaagattacattgatgatttcggtggttctgtcattacggtcagtcatgatcgttatttcttaaataaagtggtacaagaatattggtttattcatgatagtaaaatcgaaaaaattattggatcatttgaagattatgaatcttttaaaaaggaacatgaacgccaagccatgctatctaaacaaactgaacaacaaaataaacataagcatcaaccaaaaaagaaaacaggactatcttataaagagaagttagaatacgaaacaattatgacgcgtatagaaatgactgaaacgcgtttagaagaccttgaacaagaaatgattaatgcaagtgataattatgcaagaatcaaagaacttaatgaggaaaaagagcaacttgaagcaacctatgaagcagacatcacgagatggagtgagcttgaggaaattaaagaacaataa

SEQ ID NO: 6211 - DNA, 303 bp, Staphylococcus epidermidis
atgtcagatttattccaaaacgcaccaccctatattcaggcgcttatagccggaataatcacgtggttacttactgctttgggtgcggcagcagtttttatatttaagaaagtgaatgataaagtcttaaattcgatgcaaggttttgcagctggaatcatgatagcagcaagtttttggtcattgttacaacccgcaattgaatcgagtgaaaatagtgctatgccatggcttcctgcagcaataggttttattggcactgaacccttaaaacgggaacttaataaaaacaccatgttctag

SEQ ID NO: 6212 - DNA, 762 bp, Staphylococcus epidermidis
atgattttagatgaacgtgtaaactctaatttcgatcaattaaatgataacgatatacaaattgcacattatgttaatacacatatagatgtttgcaaaaatatgaaaatacaagatttagcctcacagacacatgcttcaaatgctacgattcatcgcttcactcgtaaactaggttttgatggttatagtgactttaaatcttttttaaaatttgaagatagtaagaatcatcaacttccttctgattctatggagcaatttaaacaagaaattgaaaatacattcaactatttagaacgtattgattatcgtttattaactcacaaaatgtatcatgctacaacaatatacttatatggtactggacgtgcacagatgaatgtcgctgaagaagcacaacgtatactgttgactatgcataaaaatattatattgttacatgatgttcatgaactaaagatggtgttaaacaagacaattccagaagatttgtttttcatcatttcactttctggcgaaacacatcaacttaaagaagtcacacaattgcttcaactgagacaaaaatattttatttccgtaacaacaatgaaagacaatacattggcacaacaagctgattacaatgtctatgtttcaagcaataccttctatttaaacgatggtactgattattccagttttattagctatcacattttctttgaaacactactaagaaaatataacgaatataaagagaatcatgaattaacatag

SEQ ID NO: 6213 - DNA, 1590 bp, Staphylococcus epidermidis
atgaatgcaattaaacgatttggtagtgcaatgatagtacctgttttaatgtttgcttttttcggtattgttttgggattcgctacattatttaaaaatccaaccattatgggaggattagctgatcagcaaacattttggtttaaattttggtctgttattgaatcaggtggttgggtaatatttacacatatggaaattgtctttgtagttggcttaccattatctcttgctaaaaaagcaccaggacatgcagctttagcagctctaatgggatatttaatgtttaatacttttatcaatgcaattttaactcaatggccacatacttttggcgctaatttaaaaaaaggtgtagaaaacacaacaggattaaaatcgattgcaggtattgaaacgttagataccaatattttaggtgcaatcattatctcaggaataataacgtggatacataatagatattacagtaagcgtttacctggaatgttaggtgtatttcaaggattaacattcgttgtaacaatctctttctttgtcatgctaccagtggcagcaatcacttgtgttgtttggccaacgattcaacacggtattgcttcaattcaatattttattgttgcatcaggttatataggtgtttggttatatcatttcttagagcgtgtactaatacctacaggattgcatcattttatctatgcaccaatcgaagtaggtccagtagttgttaatcatggtttgaaagcagaatggcttcaacacttaaaccagtttgccgaaagtaataaaccacttaaagaacaattcccatatggatttatgttgcaaggaaatggaaaggtttttggttgtctaggtatagcattggcaatgtatgcaactacaccaaaagaaaatcgtaaaaaagttgctgcattattaataccagcaacacttacggcagtagtagctggtattacagaaccacttgaatttacattcttatttattgcgccatttttattcgtattacatgcactactagcagcaactatggatacactgatgtatggatttggtgttgtaggtaatatgggtggcggtgtactagattttattgcaactaactggataccattaggaaaagcacattggatgacatatgtctttcaagtagtaattggtttaatctttgttgcaatttactacttcttatttaaatatttaattttaaaatttgatattccattaccaggacgtaagaaaggtgaagaagaagttaaattattttccaaacaagattataaagataaaaaaggagattcaactcgcaatcattcacctaatagtgaatatgaagaaaaggcgatgtactacctagaaggtcttggaggaaaagaaaatattaaagacgttacaaattgtacgacacgtctacgtttaactgttaaagacgaaagtaaagttcaagaaagtgcctattttacacataatcaaatgtctcatggtttagtaaaaagtggcaaaagtgttcaagtcgtcgttggaatgtctgtacctcaggtaagagaagcatttgaaaatattgtaaatgatgatctatcttag

SEQ ID NO: 6214 - DNA, 531 bp, Staphylococcus epidermidis
atgttgattgataaatttgaaacctacatcattaatgttgcaggtttgaaatctcgctcaacgcgaaaaaaattaatacatttatgtaaagaaattactttttgtgaatcttttcagtattctatcattaagcaaaacaatgtgttcgcattggaagttagcctccccaagctacaactaccttatctgataagtttcttaagtttccacaattatgctatttatcaaatacttttacccaaccgtgtaaatgaacttcttgattcagaacaactttaccaatctattaaacgctttgatttagcgatcgatggtttacaagatgccttcattaaagataaagtcatcgatattatgaatatgtttgcgaatcatcataatgtgaattatacattaaataataattgcgcgagcgtcacatgtcctcctgagattttcacaaagctgcttcaaactattgcaacgcgtaatattgatatcctatcagcaagttatagagcaaaaatgctacataaagcacgcatttcatga

SEQ ID NO: 6215 - DNA, 636 bp, Staphylococcus epidermidis
atgtataaagcagtagtgtttgattttgatggtactgtcattgataccgaaaagtatttgttcgatttaataaatacacatttaaaaatccatcaaatagcgccgatttctttagaattctataaacaatttattggctgtgaagctaatgaattacatacatatttagaagatgctattggtttcaaaaataaagaaaaaatttatgatcaatattatcaaacaagtgttgaattgccggtaaattctacaatcattcaattgatgcaatatttaaaaaaacgtcatatcccaatggcgattactacaagtagttataaaaagaatatatatcctatatttaaacaattaggactagatacatatattgatgttgttgttggtcgtgaaaatgtcgatagtgttcaacctaatccggaaatttatttaaaagccgtacaagagcttaattataatcctacaacctgcttagcaattgaagattctatcaatggtgctactgcagcgatgctagcaggattagatgttgtcgttaatacgaatataataacgaaggatcaagatttttcgacagttcaatgtgttggacaggatatggaatttgaagatataaagaattctttatttaaagaataa

SEQ ID NO: 6216 - DNA, 186 bp, Staphylococcus epidermidis
ttgactattattatcggactcattgtaattattttgttaatcattagtttacttccaaattataaagcaatggtattagctaagcagcaaggccaaaaacctacacgatatactattatggtaggcattgatttattattaattatacttattatagtaacattagtattaaaattgattatgtaa

SEQ ID NO: 6217 - DNA, 357 bp, Staphylococcus epidermidis
atgaataaagcgcttgttatacgtgcaatcaaattttctttaatatttatgactgcatttttaattcttaatttattgactatgaaagaggcttcaatatcgtctattattgtacgaactgtcattgcagctattgttttctttgtcatttatatcattgtatttacaattttaagttcgtcagaacgtaaaattatttatggtacaactttgcctattgcgctttttatatgccttatattcggagcaatttttttcactccgcgtataggtatcattgccggactaattataggtgtgtttgctggtgtcatatgggagttcttaaatagaaaaaatggaggtcgctcatcttga

SEQ ID NO: 6218 - DNA, 1377 bp, Staphylococcus epidermidis
atggaaaataatgagttgcaaaggggattgaatgcacgtcagatgcagatgattgctcttggtggaacaattggtgttggtctttttatgggagcaacaagcacaattaagtggacaggtccatcagttattcttgcatatttaattgctggtatttttttatttttaatcatgagagccatgggtgaaatgatatatattaatccaaccactggttcttttgcgacgtttgctagtgactatattcatccagcagctggctacatgactgcttggagcaatgtatttcaatgggttgtcgtcggcatgagtgaagtgattgcagtaggagaatatatgaactactggttcccaagccttcctaattggttaccaggagtaatagcagttctctttttgatggctgctaacctagtttcagtaaaagcgtttggagagtttgaattttggtttgccttaattaaagttgtaactattgtattaatgattattgcaggattaggattaattttatttggtataggcaatggagggaatccaatagggatttctaacttatggtcacatggtggatttatgccaaatggattcattggatttttctttgctttatctattgtgattggatcataccaaggtgttgaattgattggcatctcagcaggtgaaaccaaaaatcctcaaacaaatattgtaaaggcagtcaacggagtgatatggagaattttaattttctatattggtgcaatttttgtcattgtatcagtatatccttggaaccaattaggtagtattggtagtccttttgttgcaacgtttgctaaagtgggcattacgtttgctgctggtttaataaactttgtagtcttaacggcagcattgtctggttgtaattcaggtatttttagtgcaagtcgaatgatttatactttggcaaaaaaaggacaaatgcctaaagtatttactaaagtaatgaaaaatggcgtacctttctacactgtatttgcagtatctatgggaatattaattggtgctttattaaatgttatacttccattaattattgatggagctgatagtatctttgtatatgtatatagtgcctctattttaccgggaatgataccttggtttatgattttatttagtcatctaagatttagaaggttacatcctgaaaaggttcacaatcatccttttaaaatgccgggaggggcaattgccaattatttaactatcatgtttttactcctagtattagtcggtatgttacttaacaaagaaactgtagtatcggttgttattggtatcgtgtttttaacagctgtgacactttattatcttattagatatcacaaaaaggaacgacaaatataa

SEQ ID NO: 6219 - DNA, 873 bp, Staphylococcus epidermidis
ttgccaaacattttgtataagattgacaaccagtatccctatttcactaaaaacgagaaaaaaattgcgcaatttattctcaactatcctcataaagttgttaatatgacttctcaagaaattgcaaatcaattagaaactagttctacttctatcatacgtctaagtaaaaaggtaacacccggtggctttaatgaacttaaaacacgtttgtctaaatttttacctaaagaagtcacacaatataatgttgagttagttgataacgaaagtacaatttcacttaaaaacaaattgcattctcgctctaaggcagcgttaagtaatgctaatgaaaccattaacgctgctatcatcgatgaaatttgtgatctaattaaaaattctgaaaccatatttatttacggctatggtgcctcatttgttgtagcaacagatttatatcaaaaattatctcgcatcggtctaaatattcaactagtgcatgaaactcatattttcaccactatgttagcaacacgtaactctaatgattgtgttatatttatatctaacaatggtactcaaagtgaaatgcaatctattgctaaagtcattgcagactatcacattcccattgcgactatttcaagcacttctgataatccagttgcaaagcaatctaatattgttttaacctatggacaaaccgatgaaaatgagatgcgtatgggagccacaacttcgttatttgcacaaatgtttactattgatatattgtactatcgatatattgcgctaaattatcaatcatctttagattttattactcaatcaaaaatcgcattagataattaccgtaaacatctctcgaatatagattttaaacattaa

SEQ ID NO: 6220 - DNA, 1425 bp, Staphylococcus epidermidis
atgagtaaagaagaacgtcttgccaaagacattacccacgcattaggcggttctcaaaacataagcaatatcatccattgtatgactcgagtgcgtattaaagtacacaatgatgcaaaagttaattatgatgaattaaaatcaatcaatggcgtattaggcgttgttgaagatgaaagaattcaagttgttgttggaccggggattgttaataaagttgctaaacttatggctgaccagtcaggagcaactctagctgaagagacgactgaaaatcaaagttataaatcacaggcagaaaaacgtgcgtatgaacataaaaaacaattccaaagtcaacgaaaacaaagtaaatggaataaagtgttaaaatctattgctaatatttttatacctttaataccagcatttataggtgcaggattaatcggtgggattgcagcaatacttagtaacttgcttacagcaggttccatttcaggtcaatggattcaacaaattgttactgtcttaaatgttattaaagatggtatgttattttacttagctattttcactggtattaactcagcgaaagtattcggtgctacaccaggtttaggtggagtaatcggtggtactacattactaaccggtatcacggatgaaaatccaattaaaaatattttcactggagaacatctagctgctggacaaggtggtattattggtgttatcttcgcagtttggttattaagcatggttgagaaacgactacataaaaaaatacctaactctattgatatcatcgtaacgcccacaataaccatactacttattggtttgttaactatatttataatcatgccactagctggctttgtctccgatggtcttgtttatgtaattaactggattattggagtaggaggcattttcagtggattcattataggagcattctttttacctttagtcatgctaggattacatcatatcttcaccccaatccatatcgaattaatcaatcaaactggctccacttacttgttacctattgccgctatggctggtgctggacaagtcggtgcggcgattgcattgtgggtgagatgcggtaaaaataaagaattacgtaatacgctcaaaggtgcccttcctgtagggttcttaggtataggggaacctttaatttatggtgtaacacttccattaggtcgccctttcttcactgcgtgtataggtggcggtgttggtggtgctgtcattggtggtatcggtcatattggtgcgacagctgtaggaccaagtggtatttcattattaccattgattgctaataatatgtatctcggttacatcgtaggtttactagctgcttatgcgggtggctttatctttacttatttcttcggcacaactaaagaaatgagaaatcctgaataa

SEQ ID NO: 6221 - DNA, 888 bp, Staphylococcus epidermidis
atgaatcatttaactactgaaacgagaaatatacaaacgatgcatctggatgaaatgaatctaagtgatgcattaaaaactatgaatcaagaagatcaattagtacctaaagcgatagaacctgttattcctaatttaacaaaagtgatagagagtgcaattcaacgctttaataatggaggacgaattatttatattggtgcaggtacaagtggaagacttggcgtactagatgcagcagaatgtgttccaacttttaacgtttcaccaaatgatattattggaatcatcgctggtggacaaaaagctatgacggtagctattgaaggtgcagaagatgatgctgaacaaggtgcacaggatttaaagaacatccatcttcaatccaaagatattgttgtgggtatttctgctagcggacgtacaccatatgtaaaaggtgcactagtttatgcaaataaaatgaatgcagaaacagtcgcactctcttgtaacgttcacagtgatataagtaaaaattcaaatcacgtattagaaatcaatgtgggacctgaagtattaacaggctctacgagattaaaatcaggtactgctcaaaaattagttttaaatatgatttctacaatgacaatgattggcgtgggtaaagtttatgataatttaatggttgatttacgacctacaaatcaaaagttaatccatcgttctattcgcataattcaagatgtgtgtgatttaaatcatcaagaagctatagaattatatgaaaaatcagaccacaatatcaaaatagctatcgtaatgcacttatgttccacaactcaacaagatgcaagacttcgtttaaaacaaaataatggagtgattaagcaagctatcaacacttaa

SEQ ID NO: 6222 - DNA, 1053 bp, Staphylococcus epidermidis
atgcttggtttttcagtctatctaggacagaatttagatcgagattatattttaaatatggctgacttaggctatgatgtagtttttacttcactacagatacctgaggaagacaagaaaaatcaaatggcttatttgggagacttatgccaactattatcagcctatcaaatcacttatattatcgatgtaaccccttcattacttaatcaaactatttacagttatttgaaccaattacctcatggggatttttatattcgtatagataatcaattaaatattgaccttatcaaagacattatcagtcacggcttcaaatgctgtcttaatgctagtacattaactgatagcatgttagcgcacatatattgtactgattttaataatcaacttttatactgtcataattattatcctagacctgatactggtttatctatctcatttattgaagaaaaaaatcaactcataagaaaatacgatgcgcatgcaaaaatttgtgcttttatacctggcacgcagaagagaggccccttattcaaaggtcttcctacagttgaaaaacatcgttttgaacaccctcttattgctgcacaagaccttcaattaacgggtatatctgacattataattagtgatacgctattatcacacatttatgcggaacaattatctaatatgtggctatatcgacactttattttacacttagatcaactagactcctcatttacatcacaagttttaaagatacacacatcaagattagattcacctgaacatgtaattcgatctcaatattctcgtacagataatcaacagactgtcccaatgataggatcggcacatagagatcaaggagatatcacaattgataatcacttgaatggtcgttatgaaggagaaattcaagttataaaagctcctatgccaggtcattcccacatcaattgtattggtcatgtttgtgataaagatgttccattgttatcactgattcaacctggagatacttttaaatttgtatatacgaaggagaataacaaatga

SEQ ID NO: 6223 - DNA, 747 bp, Staphylococcus epidermidis
atgaaaaaagataaaaaaaggcaaagttataggtttaaagatatagtatggcgtgatttcagtttaattgcgataggctttctatgtatatttatatttagctttataggtttaacaattgctgctatagcttttcaaagtattaatgaattacaacttactatgattggaactctaggacaatttatgtcatatattttagtgatattagctttttattttttacatatcaattcatttgtagatagagttaagagtggttttgattatttgaaaaagcattggttgtttataattatcgtcatgtgtgcatcttttattatttctaatgtttatgacaaattaattgaactattacctaaatatttgcaatatagtgaaacgcaaaatgaacttgaactcaatgaattatttaaaagtggtatatttattccttttgcatttgtacttattgtaattgtaggacctattgttgaagaattggtatttagacatttgttaataggtgaactaggtaaaaagtttaactttattgtgatgggggttatatcagcattgtcttttacatatatacatgtgagtgatgctaagtccccatttgaatttggagcatatttaatactggcaatagcattagtatatgtttacttaaaatcgaatagaaacttagcttcatcaattagcttacatatgttaaataatttcatatcattcatttggacaattatagttgtattcagtaaatga

SEQ ID NO: 6224 - DNA, 690 bp, Staphylococcus epidermidis
ttgaataaattagaacgtcaaaatcgaattattcaaactattcaaagttctgacaaaattactgcatcccagcttgcaaaacaatttaacgtatctaagagaactattttacgtgatattgatgaattagaagatcaaggggtaaaagtatatgctcgtcatggcaaattaggcggttatcaaatcaaagatgcacatgctaaaatcaccttatcgttaactgaacagcaactttcggcattatttttaacactaaatgaaagtcagtccaattccactttaccttatcaaaatgaaattcgagcaataatcaagcaatgtttaaatttacctcaaacacgattacgtaaattgctaaaaaaaatggattattatattaaatttgaagattctaatcatgtcacactacctcaattattttctgatattttaatttattgcacggagcgtaatgtgatgttagtagatttaaatgaaaataatcaaattcaagctgaaaatgtgatttttataggcttaatatgcaaaaatgctgtttggcatgctgttgtatttgaaatcggtagaggttacactcgtgaattatctatcctggatattcaagatatctcatattcttttgaaaaaacgatacaaacccaagatatctcaattgaaaattatcgacagtttttagcgccttctgaatga

SEQ ID NO: 6225 - DNA, 816 bp, Staphylococcus epidermidis
atgacagaactttatttaaaaaaattagatgaatacatatgtcaatggatacgtggtttagacgatatcattccacgtttggttgagaaaatggaaacatcaacaaaaaaagataggtttgatttagttactaatgttgataaacaaattcagaatcattttcaaaactttcttcaggaacattatcctacacatcaattactagctgaagagaaagataactcagatataacaccttacgagggtcacctctggattatggatcctatagatggaacaagtaatttagtgaaacaacaagaagattactgtatcataataggatattttattgatggggaacctaaactttcatatatttatgattatccacatcaaagattatatagagcaattgctggtataggagcctacgaaaacaatcaattaatgacaatgccaaaaagaattggtttaagagaggcaattatttcatttaaaccacaagtgttaaaagaagagacggttcaatctttatttcaatcagcctttgattttagaagtattgggtcttgtggtcttgattctattcgagtgataaaaggtcagtttggggcacacattaatacgaatcctaagccatgggatatttcagcacaatttctttttgcaagagaactaggtttgattatgacacaaataaatggtgaacctcttgattttagtaaggcgggcccatttattattagtaatcctggttgttacgatgatatgatacgtatcttaaatgaaggcggaggctattcaaagagtagtcatcatatcgagcgtggttaa

SEQ ID NO: 6226 - DNA, 951 bp, Staphylococcus epidermidis
atgcaaagatcagataaaagaaaaatgagcctgccgatgaaaatactactatgggtagtgggaattttatttctattagcaatcattgcagttatttatgttagtgcaaaaatatttattacaggagacaaaatacataatccgttaaatagaaatcattctgaattacgttctggaaaagtaaatttaaaaaatggtgatccatttactattgcactttttggcgtagattctgatgaaaagcgaaagcaacaaggcggtggggaacgaagtgatacaatcatggtactttccattaatccgaaagaaaagaaaactgagctagtaagtattccacgtgataccaaagcagaaatagcaggtcgaggtactgaagaaaagattaaccatgcatacgcttatggcggtcctaacatggctgttaaaacaattgaaaaattaatgaatgttccaattgaccattacgctacgattgacatggatggactacatgacatgattgatacattaggtggcgttgatgtcgtaagtaatagtacatttacaatgggggctaatcactttgttaaaggtgaaaaaacacacgtagatggtgatgctgccatggactttattagaagtcgtaaagaagatggggcaggaggcgattttggtagacaagagcgtcagcaacttatcttagaagcgatggcagataagttgacaagcgcttcttcaatcactcattttaatacattaatgaatcaaattcagaaaaatgttaaaacagatttaaaattaggtgatcttaatacaattagaactaagtataaagatgctaatgaccaagttaatcgacatcagttagagggtgaaggtggtatacaaaatgacggtttgtactatttcataccaagtgatgcatctaaaaatgaaaatacacaattactaagagacaatttaaatttataa

SEQ ID NO: 6227 - DNA, 156 bp, Staphylococcus epidermidis
atgtgtaaagaatataacatgactcaacatactctaccaatggaaacttcagttcttatccctacaaataatatttcacgacatgtaaatgatattgtagaaacaattcccgatactgaattcgatgaattcagtcatcatcgtggcttaatataa

SEQ ID NO: 6228 - DNA, 438 bp, Staphylococcus epidermidis
atgaatacaaaatatttattagcagtcggagcaattgttacatcacttacattaggcgcatgtggaaattctaactcggaaagcgatcacgctaatcacaaagataaacaacaagaagacagtaatgtaaaaacagacacaacgaaaaaattatctggtaattttgaatctaaaaacggagaaaaagtagaaggtaaagctaaaattgaaaatggcaaacttatgttagagaattacaaatcttctaaaggtccagacctatatgtttacctaactaaaaacggagatattaaatccggtaaaaagatttcaacagtagactacaataaatccaaacaaacttttgatttaaaaaatgtagatttagaaaaatacaatgaagtaacaatttattgcgaaaaagcacatgtaatttttggtggcgctaaattaaaataa

SEQ ID NO: 6229 - DNA, 474 bp, Staphylococcus epidermidis
atgaagaaaataagtttatttataatatttttaattcgtgtaatttcaggtattgttattttcagacaaggatgggagaaatttacaggtgattttacattaaacgggctagttccggtaattagagataacacagactctcctcaatggtataaatggttttttgaacatattgttgcacacacaacaggattatttaatataatcgtacctttaggggaaatggcaattggtttaggtttaattttaggtatatttgcatacgctgcaagtttctttggagccttcgttatgataaattatattttagcagatatgatttttacgtaccctctacaattagctttctttattattttactcatgagccactctttattggctaaggtatcacttaaagaaatcatcgcttattttagagatcgtaataaccgaggtgaagataagcatgacccacttactaatcgtggatga

SEQ ID NO: 6230 - DNA, 690 bp, Staphylococcus epidermidis
atgacccacttactaatcgtggatgatgaaaaagatattgtagacatttgtcaaacgtatttcgaatatgaaggatatcaggttacgacaacaacatgtggtaaagaagcactaaaattattatcttcagatatagatattatgattttagacattatgatgccggaagttagcggatacgatattgtcaaaaaaatgaaagatatgcaacttgatatacctttcatatatctaacagcaaaaactcaagaacatgacacgatatacgcactgacgttaggtgctgatgactatattaaaaaaccctttagcccaagagaactagtattacgtactaataaccttctcgctagaatgagtaaatcaaatcattctaataaaattgagcaattagaatttgatggtttagttttaaaaaatttaagcaagacacttaccattaacaatatagagatacctatgcgcattaaagaatttgaattgctatggtatcttgcttctagagaaggtgaagttatttctaaatccgaacttctagaaaaagtatggggatatgactattacgaagatgctaacactgtcaatgtccacatacatagaattcgcgagaaattagaaaaacatgattttttaccctacactattacaactgtgtggggccttggttataagtttgaaaggagccgataa

SEQ ID NO: 6231 - DNA, 948 bp, Staphylococcus epidermidis
atgacactcactttagccatcactactatgataacaagctgtttaacactttcgatttgtagtatttttattaatcctttaattcagaagattaagcaattcaatattaagactaagcaatttataaatcacgaaaaattcattgatgatgaaacatttcagtctcctagagaaattaaagagttgaatgattcttttaataaaatggcatatgaaatcaataatcaaatgaatatgataaaaaacgagcaacaagaaaaaactgaaatcatacaaaaccttgcacatgatttaaaaacacctttagctggtattcgatcatattctgaaggtttacgggatggcgtcattagtgatcctcaagaagttcatgaagcatatgaaatattaattaaacaagcaaatcgtttatcaattttatttgatgacattacacatgtgattaatttaaatactggacgttcttatcctttggaattaatacagctcgatcaattacttgttaatatattacaaccatacgaacaacacataaaacaagaaaatcgtacacttgaagttaatttctgcacagatattgatgcattctaccagtatcgacctccaatcgaacgtattttgaccaatttactagataatgcattaaaattttctaattctggtagccgtattgatattattatttctgagtgtaaagaaaacgacgtcattagtatttcaataaaagatgagggcataggtatcgttccagaacttcaatcacgtatctttgaaagaacgtttagagttgaagattctcgaaatactaagactggtggttcggggttaggattatacattgcaaatgagttagcacaacaaattgacgcctctattacagtccaaagtgatttagacattggaaccacgatgacacttaccttaaaaaaatttcaatttaaaaagtaa

SEQ ID NO: 6232 - DNA, 1107 bp, Staphylococcus epidermidis; identical to SEQ ID NO: 3827

SEQ ID NO: 6233 - DNA, 840 bp, Staphylococcus epidermidis
atgacaaatgatgtccaaattttaaataacggttatccaatgcctgcagttggattaggagtttataagatagcggatgagcagatggaagaggttgtccgtacagctttagatgcaggatatcgtgcatttgatacggcatacttttatggaaatgaaaaagccttaggtagtgcattaaaacattcaaatgttgagagggacgagttattcataacatctaaactttggaatgattatcaaggttatgaccaaacaatagagtactttaataaatcattggacaatttagggttagactatttagatttatttttaattcattggccttgtgaaaatgatcaattgtatattgaatcatataaagccttagaacatttatatgaagaaggtaaaataaaagccattggtgtatgtaactttaagatacatcatttagaaaagttaatgaaagaaactaaaattacaccacaggtgaatcaaattgagttacatccgtactttaaccaacaagatgtacaagacttttgtgatgaacatgatattaaagtaacagcttggatgcctttaatgcgcaataaagggttgcttgatgaccctgtaattacagatattgctcatcgttatgataaaacacctgcacaaattgtcttacgttggcatcttgcacataatcgtattatcattcctaaatcacaaacacctaaacgtattaaagaaaattttgatatttttgattttaatcttgagttaacagatgttgcagaaatagatagtttaaataaaaatgctagacaaggaaaagatcctgatgatgtcagtattggagatttgaaataa

SEQ ID NO: 6234 - DNA, 1308 bp, Staphylococcus epidermidis
ttgattgcattaacaacagtattcgttgggtcagaatttgcactagtaaaagtgagatcaacgcgtattgaacaattagtagatgagggtaataagagcgcaaaaattgtcaaaaaaatgatagacaatcttgattattacttatctgcctgtcaattaggtattacagtaacatctttaggcttaggttggttaggtgaaccgacatttgaaaagatgatgcacccactattcgagttattacatttaccgagtcctttaacaacgacgatttcatttgttgtttcattcattgttgtgacatatttacatgttgtattaggcgaattggcacctaaatcatttgctattcaacatacagaacaacttgcacttttatattcaagaccattattttattttggtaattttatgaaaccacttatatggttaatgaatggttcttctcgtgtgattgtcagaatgtttggatttgatccagatgctcaaactgatgcaatgtcagaagaagaaataaaaattattataaacaatagttataacggtggagagattaaccaaaccgagcttgcgtatatgcaaaatattttttcatttgatgaacgtcatgcaaaagatattatggtgccacgtacacaaatggttacgctcaacgaaccatttaatgtagatgaattattagatactatcaaagaacatcagtttacaagatatccaatcactgaagatggtgataaagaccatgtaaaaggttttataaatgtcaaagagtttttaacagaatatgcgtcaggtaaaccgattaaaatcgccaattatattcatgaattacccatgatttcagagacaactagaataagtgatgctcttgtaagaatgcaaagagagcatgtacatattagtttgattatagatgagtatggtgggacagctggtattttaacaatggaagatattttagaagaaattgttggtgaaatcagagacgaatttgatgatgacgaagttaacgatatagttaaacttgatgatcatacttatcaaattaatggtcgtgttttacttgatgatttaaatgaaaaatttggcatagagtttgaagattctgaagatattgatactattggtggttggttacaatcacaaaatactaatttgcaaaaagatgacttcgttgatactgaatatgatcgttggacgattacagaaatcgacaatcatcaaattatttgggtcaacttaaattatgaatttaatagtggacgtccttctgttaatgaagaacaagaagatgacgaacgtgattaa

SEQ ID NO: 6235 - DNA, 1173 bp, Staphylococcus epidermidis
atgtcagaatatgttttaacgaatggcatcgtatatacagaaaatgaaatgattaacaatggatatgttcatattaaagatgggaaaattttagacgttggtaagtgtccttttcatccgtcatcgtcgcataatacaattgacattattgatgtaaaaaaacgacatatactgccaggatttatagatattcacatccatggggggtatggtgaagatgccatggatgcatctgaacaaggcttacaacatttagcagaatcactcctttctgaggggacaacatcttttttagcaacaacaatgacacagtcaacagtcaatattgagcgagcacttcaaactattgctaaatatactcaacaacaagatgttacaaatgctgccgaaattgtgggagtacatcttgaaggtccatttatttcagaacataaagtaggcgcacaacatcctcaattcgtacaacgtcctacggttgataaaataaagtcgtttcaggaagtagcgaatggactaattaagattattacgtacgctcctgaagttgatggagcaacagaaacgttaaagacaatgaaaaatgatatcattttttcaatcggacatacggtggcaacgtttgatcaagcgaatacagctgtgagtcatggtgccaaacacatcactcatttgtataatgcagcgaccggctttcaacatagagaaccgggtgtatttggtgcagcctggttaaatcaagggttgcatactgaaatgattgtggatggtgttcattcacatcctgcatccatcgcacttgcatatagacttaaggggaatcaaagctgttatttaattacagatgcgatgagagctaaaggaatgccagaaggacattatgatttaggtggtcaggatgtgattgtaaagggaagtgaagcacgcctgtcttctggggctttagctggaagtatactcaaaatgaacgaaggacttaaaaatttaatacaatttacaggtgacacgattgagcatttatggagagtaacaagtttaaatcaagcgataacattaggcatagacgacataaaaggtagtattaaaatcgggaaagatgcagatattgttatcatagatgatgcatgtaatgttgaaacgacgattaaaaatggaaaatatcatgctttcaaatga

SEQ ID NO: 6236 - DNA, 1953 bp, Staphylococcus epidermidis
atgagaattactgaactgttaactaaagaaacaatagcgatggatttagatgcttctgataaaagtggggtgattactgagcttgttaatcaattggataaagcaggtaagttaagtgaccctgtatcgtttaaagaggcaattcataatcgtgaatctcagagcacaacaggaattggtgaaggtattgctataccacatgctaaagttgcagcagttaaaacacctgcaattgcattcggtaaatctaaagaaggtgtggattatcaaagtttagacatgcaacctgcacacttattctttatgattgcagcgcctgaaggtggagcacaaacgcatttagatgcgcttgcgaaactttctggaatattaatggatgagaaaatacgtgaaaaattaattcatgctgaatctcctgaagaagtgttaaacattatcgatgaagcggatgatgaggcaacaaaagaagaagaagcagaagcgaacgaaaatgcaactgtttcaactgacaactcaaatcaagataataatgagccatatgttttagctgttacagcatgcccaactgggattgcccacacatatatggcacgtgatgctttgaaaaagcaagctgagaagatgaacatcaaaattaaagttgaaacaaatggttctagtggtattaaaaaccatttaactgaacaagatatagaacgtgcaactggaataattgttgcagcagatgtccatgtagaaactgatcgttttgatgggaaaaatgtggttgaggttcctgttgctgatggtattaagcgtcccgaggaactaattaatacagctttagatacaaatcgtaaaccatttgtagcgcaaggtggatctaaaaaacatgacgataatgaagaaaagttaagcccaggaaaagcattctataaacacttaatgaatggtgtttctaatatgttaccacttgttatttcgggtggtatcttaatggcaattgtattcttattcggcgcaaactcatttaagcctgatagttcagaatataatgcatttgctgaacaattatggaatattggtaaaaatagtgcctttgctttaattattccaattttagctggtttcattgcacgtagtattgcagataaaccaggttttgcagctggtttagttggtggtatgttagctatttctggaggttctggctttattggtggaattattgctggtttcttagcaggttatttaactcaaggaattaaatatattacacgtaaattgccacaagcaattgaaggcttgaaacctactttaatctatccattactttcagtttcaattactggattgttaatggtgtatgtctttaatccgccagcagcttggttaaatcatttgctactaaatggtttaaatagtctgtcaggctctaatattatgttacttggtcttgtgattggagctatgatggcaattgacatgggcggtccatttaataaagcagcttatgtatttgctactgctgcattaacggaaggaaatgcagctcctattactgcagcgatgattggtggtatgattcctccattagctatcgctacagcaatgttaatctttagaagaaaattcactaaagagcaaagaggctcaattgtaccaaactatgtcatgggattatcatttattactgaaggtgccatcccattcgcagctgccgatccattacgtgtgattccttcaatgatggttggctcaggtgtggctggagcaattgctttaggtttaggatcaagtatcaaagcacctcatggtggaattttcgtcattattggtactgattttaaccatatacttcaaactcttattgctttagttgtgggtacgttagtttcagctttaatttatggtttcttgaaaccaaaagtaacagaaaatgaaattcaagcatctcaagctatggatgaatag

SEQ ID NO: 6237 - DNA, 921 bp, Staphylococcus epidermidis
atgatatatacagttaccttcaatccttcaatcgattacatcatttttactgatggatttgaaatatcaggattaaaccgggcaaaagcaacgtataaatttgcaggaggtaagggaatcaatgtatcaagagtacttaaaactttagatgttgattctacagccttaggattttcaggaggtttccctggagattttattgctcaaacacttgaggacagtaatatccaatcagattttgttcaagtagatgaggatacgcgtattaatgtaaaactaaaatcaggtcaagaaacagaaatcaatgcacctggacctaaagtgacacacgcgcaatttgaacaacttttatctcaaatacgtcgtactacaaacaacgatattgttattgtagctggaagtgtaccgaacagtattccaagtgatgcttatgcacaaatagcacaaatcactgaaaaaactggtgcgcaactagttgttgatgcagaaaaagatcttgttgaaacagtattaccatatcgaccattatttattaaaccaaacaaagatgaattagaagtaatgtttaacactacagtcaagagtgatgaagatgttataaaatatggtaaagaaattttgaaaaaaggggcacaatcagtcatcatttcacttggtggcgatggtgcaatatatgttgatcaacaacaaagcattaaagctgtgaatccacaaggacatgtagttaatacagtaggatctggtgatagtacagttgcaggtatggtagcagggttgtccatgggtcttaatgtagatgaagcttttcaacaggccgtagcttcaggaacagcgactgctttttcagaagatttagcgacaagagatgctatagaaaatattaaatctcaagtgacaatttctgtacttgatggggagtga

SEQ ID NO: 6238 - DNA, 759 bp, Staphylococcus epidermidis; identical to SEQ ID NO: 3833

SEQ ID NO: 6239 - DNA, 507 bp, Staphylococcus epidermidis
atgattgttataaagggtgagaatatgtctaaaactaaaaaaacaaatgcaatgcggattttagatagagctaaaattaattatcaaatgaatacttacgaagttactgacaagcatcaacatggagaagagattgcacaactcgtaggtgctaaaatagaagaagtctttaaaacacttgtactagaaaattctaatcatgaacactatgtttttgtcattccagttaatgaaaccttagatatgaagaaggcggctcatgttgttaatgaaaagaaattgaatttaatgcctctcgatcaattaaaacaagtaacagggtatgttagaggaggatgttcacctatcggtatgaaacattcctttaaaacgacgattgatgcttccgctaaaaatttagaaaaagtttatattagcggaggtcaaagaggaatgcaaattatcattcatgtgaatgatttaattgacatgacaaaggctcaggtagaatctattacacagaattaa

SEQ ID NO: 6240 - DNA, 1203 bp, Staphylococcus epidermidis
ttgaatagaagtgttttaaaatttggcggttcttccgtcagtgattttaaaaaaataaaaaatatcgctgaaatgcttaaaacacgcattgaagatggtgaagaattaatcgttgttgtcagtgctatgggtaagacaactgatcaattgatgaataatgtatcaagtcttacttctacccctaaagatcaagaacttgcattgctattaacaacgggtgaacaacaaacggtttcttacctttctatggtactcaatgatataggtgtaaatgctaaagcgatgacaggttatcaagctggcattaagactgtaggacatcacttaaaaagtaaaatagcagaaattaatcctaatatttttaatgaggcttttaaaaatcatgacattttagttgtagctgggtttcaaggtataaatgaagatttcgaacttactacacttggacgaggtggttctgatacaacagctgtagctttagcagcaagtaatcagacaccttgtgaaatttacactgacgttgatggtgtgtatgcaacagatcctagaatacttaatgaagcgaagcgtttagaatatgtctcttatgaggaaatgatggaaatgagcgcgcttggtgcaggtgtacttgaaacgagaagtgttgaattagctaagaattatgatattccactttacttaggaagaacgttatcaaatgtgaaaggaacatggattatgtctaaaagtgatttattagagaaaaaagcagtaactggtgtcgcattggatacacacatgatgcacgtcacgataagttatcccctaccggataatcagttactgacacaattgtttactgcattggaagaagaatctgtaaatgttgatatgatttctcaaattgtaaatttagaaggtttacaattatctttttcaattaaagatagtgatgcacatcaaatttcttcaattctggaaaatttatcaacacacttttcagcacttgattataaaattaatgaagcatatgtcaaaatatctttaattggatcaggtatgagagatatgtcaggagtagcatcaaaagcttttacgacacttatcaattcagatattccattttatcaaacgacgacatcggaaattagcatttcttatgtaatagacgaagaaaatggtgaaaaagcagtagaagaattgtatcatgccttcgaaatttag

SEQ ID NO: 6241 - DNA, 990 bp, Staphylococcus epidermidis
atgacaagattagcagtagccggagtaaccggattagttggaacaaaaatgttagagacactagatcgaaaacaaataccttttgatgaattagtattattttcttctgctcgctcagcaggaaaaaaagttgaatttcaaggacaattgtatactgttcaagaattaactgatgaagcagcaagtgaacattttgattatattttaatgagtgcaggaggtagcacaagtgagcactttgctccactatttgaagcggctggagccattgttattgataattctagccaatggagaatggctgaagatgtcgatttaattgttccagaagtgaatgagcctcaatttacacgtggtattattgctaatccaaattgctctacaattcaatcagttgtacctcttaaaattttacaagatgcatatggtttaaaacgtgtcgcttatacgacttatcaagccgtatcaggttctggtgttaaaggtaaaagagatttagctgaaggtgctaatggaaaagaacctgaagcatatccgtatccaatttacaataatgtattaccacatatagatgtttttcttgaaaatgggtatacaaaagaagaacaaaaaatgattgatgaaacgaaaaaaattctcaacgaccaagacttaaaagtgactgccacatgtgtacgtgtaccagtacaagatagtcacagtattgaaatcgatgtgactttaaatcaagacactacagttaaagagatacaagaattatttgcacaagatcaacgtgttgttcttgtagataatccaagtaaaaatgaatatccattagccattcattctactggcaaagatgaagtgtttgtaggacgtatccgccgagatgactctcttgaaaatacgttccatgtatggtgtacctctgataatttgctcaagggcgcagcattaaatgcagttcaagtgttagaacaaattttaactttgaaaggagcaagataa

SEQ ID NO: 6242 - DNA, 885 bp, Staphylococcus epidermidis
atgacacacatgtttgaaggcgttggtgtagcattagcgactccctttaccaataatgaggttgatttcgacgcattagaaagacatgttaaatttcttttaaataacaatattcaagcaattatagtgaatggcactacagcagaaagtcctacattaagtgacgaagaaaaagagaaagtattggcaacagtagttaaactcgtgaatcatagcgttcctgttattgcgggtactggcactaataatacgtataaatcaattcaagcttcaatacgtgctaaagaaattggtgcagatgcagtcatgttgattacgccctactacaacaaaacgaatcaacgtggtttaattcaacattttgagacaatcgcaaatgaagtgaaattaccagtaattctttacaatgtgccatcacgaacaaacatgacgatagaaccagaaacagttgaaattctcagtcataatccatatatcgttgctttaaaagatgcgacaaatgattttgattattttgatcaagtaaaacaacgtattaatacaaatgaatttgcattatatagtgggaatgacgacaatgttgtgaagttctatcaacgtggaggtaatggtgtcatctctgtaattgcgaatgtaattccacaagaatttcaatatttatatgaccaaagacaaaatgaaaccgatattactaattactttaaacctatcgagaaattgttagaagcgttgtcacttgacgttaacccaatacctattaaagttcttaccacatatttgggttatggtcactacgaagtgagattaccattagtgcctttagaagaagcacaatgtaaacaagttgaacgagcatttgaacaatttaaagcaggtgaacaataa

SEQ ID NO: 6243 - DNA, 723 bp, Staphylococcus epidermidis
atgaacatactattaattggatatggtgcaatgaatcaaagagttgcacgattagctgaagataaaggtcatgaaattgttggagttatagatagaacttcaaaagcgtcgacaccttattcacaatatcaacacattagtgaatgtaaagaagctgatgttgctattgacttttcaaatcctgaattgctctttcctctattagaagaacaattcaatttgcctcttgtcatagcaactacaggtgaaaaagaaacgttaatacaaaaattggaaacgctaagtcaaagaacacctgtattttttagtgcaaatatgagttacggtgtccatgcattaactaaaatattagaaactgcagttcccctacttcaagatttcgatatcgaacttacagaagcgcatcataataaaaaagtcgatgctcctagtggcacattagttaaattgtatgatgtcattaaagaatttcgtgacaatgtctcgcctgtttatgatagacacgaaaaaactgagaagagaactcatgatgagataggtatacatgctgttcgtggtggtacgattgtcggggaacatgacatattatttgcaggtactgatgaaacaattactatctcacataaagcacaatcaaaagatatctttgcaaatggtgccattggcgctgcagaaaaattaattcacaaaaacccaggtttttatacttttaataatctataa

SEQ ID NO: 6244 - DNA, 723 bp, Staphylococcus epidermidis
atggtacaacatttatcagctcaagaaatcattcaatatattagtgatgctaagaaatcaacaccactcaaagtttatgtaaatggtcattttgaaaatgtcacattcccagaatcttttaaagtttttggctctgaacattcaaaagtaattttctgtgaagcagatgaatggaaacaattttatcaacaaaatcattcattaatcactgaattagaaattgagatggatcgtcgtaattcagctataccgcttaaagatttaacaaacacaaatgctcgtattgagccaggtgcgtttattcgtgagcaagcaatcattgaagatggtgctgtggttatgatgggtgctacgattaatattggagcaattgtaggagaaggaacaatgatagacatgaacgcaacacttggtggacgagctacaacaggaaaaaatgttcatgttggtgcaggtgctgttttagctggtgtcattgaacctccaagtgcttccccagttgtcattgaagacaatgttttaattggagcaaatgctgttattcttgaaggtgtacgcgttggtgcaggtgctattgtagcagctggagctattgtaactcaagatgtgccagctggagctgtagttgctggtacgcctgctaaagtaattaaacaaacttcagaagttcaagactcaaaacgtgagattgtgtctgcactgcgtaaattaaataatgaataa

SEQ ID NO: 6245 - DNA, 1152 bp, Staphylococcus epidermidis
atgaacgagttagaattcgttacattgcacagaagacatttacatcagtatccagaattaagtttacatgaatttgaaacgacatcgtatataacatcatttttagaggatttaggcgtaccttacgaccgaccacttaaaactggtgttattgcttatttggaaggtaatagtcaccacactattgcattcagagcagatatagacgcgttaccaatttatgaagaaaatgatattgattttaaaagtaagaatgataatgtcatgcacgcgtgtggtcatgatggtcatacgacagcacttatgctttttgttaaaaggtgtaaagcattgtatgacaaatctgaattacctcataatgtagtgtttatatttcaacctgccgaagaaaccagtggaggagctaatcgtttaatcaaagctggcgcttttgacaagtaccctattgaagcggtgtttggttttcacgttaatccgtttgaaaaagaaggtaaaattgtaattcgagatgaagaaatcactgcaagtgccactgaatatcgcttctttttaaaaggattatctagtcatgttgctgataaggagcaaggtcattcatgtggtgaggggttacagcatgtcttaagtcaaatcggccaaatccaacaatttcatttgaatggattgaaacgtaacattattcatatgggtcattttgaagctggtgaagctattaatacagtaccgagtcatggttatcttgaaggtacaattcgtacatatgacacagaagatttagctattgtaaaacaccaaatgcataaaattgcgaaaagtgttcaattattatttaatgttgaatgtgaggttaaatttgaagaaggatatccaccaacaatgaatcatccacaattacgtcaagccgttgagaacgctataaaaggtgcaaatttagaaatagttgaaaaaaaactacccttcctgttcggtgaagattttagtttttatggtcaacaacttgccccttcatattttgtatttgttggtacacaaaacaatgaaaaaggttttgtgactggtcttcatactgcccatcttaattttgatgagaaaatattaattgacgttgtaaattattacgagtatttgttaagaaattataaagaggtgtaa

SEQ ID NO: 6246 - DNA, 1074 bp, Staphylococcus epidermidis
ttgacagcaatttggtcattagacacagaagcattttatcagaatgcagtaaaagtaaaaaataacgaaccaataatggcagttgtaaaaaacaatgcatatcattatggacttgagtttgcagtgaaaacatttttaaaagcggaaattaatacatttagcacaacttcattaaatgaagctatacgagttagaaaaatagcacctgaagcaactatatttttaatgaatcctgtttatgattttgatttagtaaaacgttatgatattcatatgacactcccctctttaaactattattataaatataaacaagatttaaaaggcattcatgtacatttagaatatgaaaatttattacatcgttccggttttagaaatatcgaagaaatacgtgaagttttaaaagatcatgatcaaaataatcaagataaaatgattatttcaggaatatggacgcattttgggtatgcagacgaatttgacgtagatgaatataaaatggaacgtgatgcttggttaaacttgataaatacacttttaaatgaaaattatcattttgatatgatacattcacaaaatagtgcaagttattttcgtgagaatcaaatgttacttcctcatcacactcatgctagagttggaattgccctttatggttcaagaccatatagtcttataaatgaagaacgcattactcaatctttgactgttaaaggtaatgttatacaagttcgtgatgtaaataaaggtgattattgtggatatagtttcgcctttgaagtaaagaatgaccacactcaattagctgttgttgatataggttatggcgatggtattctaaaatcaagagcaaaacacgaagctataattaatggcaagcgatatccaattagagcactaatgatgagtcatatgtttattgaagttgatgacgaagttcatgcacaagacgaagtcatattatataataaggatatgcgtatagatgaatttacatttaaaggtgttggcgcaaattcagaacaattaagcgcaatgaatcacgattctcttatgaaggagtatttataa

SEQ ID NO: 6247 - DNA, 1266 bp, Staphylococcus epidermidis
atggtagttaattataatgataatggcgaactgacaatgggaggtacaagcttaaaaactattgcacaaagttttggtacaccttcgattgtttacgatgaagaccaaattcgtaatcagataagaagatatcataaagcatttgaagcaagtggtttaagctacaatatatcttatgcctcaaaagctttcacttgtattcagatggttaaattaattgatgaagaaaatttacaattagatgttgtttctgaaggtgaactttatactgctcttgaagcaggatttgattcgaaacgtattcacttccatgggaacaacaagacgaaacgcgagattcaatatgcattagataatcagattggttattttgtagtggatacgctcgaggaaatagagcttattgataaatatgctgatagtaatgtagatgttgtattacgtgtaaatcctggggttgaagcccatacacatgaatttattcaaactggacaggaagatagtaaatttggattatcaatcaaacacggtctagcattaaatgcagttaataaagtaaaagcaacgaaacatttgcaacttaaaggtatacatttccatattggctctcaaatcgaaggcactgaggcgatgattaagacagctaaaattgtgcttaattggttagcaagtgaacgaattgaagtgagtttactaaacataggcggtggtttcggaattaaatatgtcgaaggagatgaaagtttccctattgagcaaggaatatctgaaattactgaagctattaaagaaactgtgcaagcattgcagtacaatattcctgaaattgggatagaacctggccgttcaattgttggagaagcaggtatcactttatatgaggttggtacaattaaagatatccctggagttaataaatatgtatcagttgatggcggaatgagtgatcacatacgaactgcactttatggtgcacagtatgaggcgttgttagttaacagaaatgaaaaagctaatgaatctgtaacaattgcaggtaaactctgtgaatctggtgatattatcgtacgagatgccccattaccctcttctgttcatagaggtgattacctagcaatactttctactggtgcgtatcattattcaatggcttcaaattataatcaaatgcaaaaacctccagtatttttcttgaaagatggaaaagcacgtgaagtgattaaacgtcaatcattgagacagttaattattaatgatacgaaataa

SEQ ID NO: 6248 - DNA, 750 bp, Staphylococcus epidermidis
atgtttaaatttaacttcttttatatttcaaagattcgtgcaacatggatgctttacctcattgggatttatcctctcttgatattcctagctgaattacttaatagtaattttctttcattatcagcaactcataagaatagtgtaagctttttagaattatttatcgcaatttatgatactcaacaaaaagcaatgctatcacttataattattggatatttatcttctttattattttatagcgaaattagcacaggaagactattgttttataaggatcaaagtcgctacaaaatttttaattctaaattaacatctattatttctagttactttatattcttattcattttattattatcaacgttagtagtttatttgttttatgttaacaaccatgaatattcatctcattcttttatgttaaataactcagaattaaatcatactctaatcttaaatcttcttggaatctttttaactgatttattcttaattttctatgttgttattttttctgtgaaatttaattctgggataactattattagtatgattttatgttacgtggtcataaagattacagacaatattaataaaatcaagtttttcccttcaaatttcacaaatttagataccgataaaagttttattttcaacttatcaataatgagctctattactattgtttatatattcattatttacctcttagcaattacgattttcagaaaaattcaattttaa

SEQ ID NO: 6249 - DNA, 864 bp, Staphylococcus epidermidis
atgctagaatttagaaatgtgtataaatcttttaagaagaaagaagtattatgtgatgttaattacaaattatctgctggagaaaaggttggtcttataggttctaatgggtctggaaaatcaacattaatgaaacttatagctaaaactcaattaccatctaaaggaaatgtttattttaacaatatagatatacataaatctcacaatatgataaaagatttttctttcatgataggacaaatatattatcctgagttaaatgcaagacaaaatattgaaaattacctaaaaattaataataagattagctatataagtgaaattcaaacgatgctaaacattgtaggtttagaagataatgaaaagaaggttaaaaattattcgtatgaaatgaaacaaagactttgtttagctatttgtttaattaccaaaccaaaagtagctgtattagacgagccattcttaggtctggatccgttaggggtaaggaaattaaataatatcattgataaatattcaaaagaaaaaaacactttatttttaatacctagccaccagttaaaagaattagaagatctttgtgatagatttctattactcgaaaaccatcaaattagagaaattgacttacataatagaatattcactcaaaagttaatattcaaaaatactttaaacaatgctccagaactaaaagctaatttcaatttcattaaaaaaattgatggaaattcaataacaattataaataaggatgaagaagtagatcttacaaattcacttaatttagtaggtaaaaatcccttaataaaaatagaaagtaatgataatctattatcttcatatttctataaagagtag

SEQ ID NO: 6250 - DNA, 411 bp, Staphylococcus epidermidis
atgaaatcaatattattatccctatttttaaactgtttatttttctcaattttaactcttttagaattacgcattgatgtttacttggcaaatttattaattattttagtcccatctattacatcagctatcttaattatttttacttcaaaaatgaaattatatttatggttaaatgtaatttcaaacctaatttttacaattatttatagtaaatatatcatgcatctagatggttatctatcctatatcgagagggcgcaaatcaataatagtgatatagaaattaaaatatctccaaatatgcttgaattatctcagattatctttttattttttgtttatttaatacctcaaatgattgtagtttttattaaacataaaagaggtgaaatcaatgctagaatttag

SEQ ID NO: 6251 - DNA, 126 bp, Staphylococcus epidermidis
atgaatttgggagtgagagtaatgaaattagtcgagctacaaggttcaacaagagacgaaaatgaaacaagagggcgagcgcttatctcaagtgaagaaaacttcttagccgagggaacaaactga

SEQ ID NO: 6252 - DNA, 1269 bp, Staphylococcus epidermidis
gtgacagtaagaactaaagtttcgacaaaagatatagatgaagcatatttacgtctaaaaaatatagtaaaagaaactcccttacaattcgaccattacttatctcaaaaatataattgtaatgtttatttaaaaagagaagatttacagtgggtacgatcctttaaattaagaggagcttataatgctatttcagtattatccaatgaagaaaaaaataaaggtattacttgcgcaagtgctggaaatcatgctcaaggtgttgcttatactgcaaaaaaactcaatttaaaagctgttattttcatgccagtaactacaccacgacaaaaaatcaatcaagtcaaattcttcggggatagtaacgtagaaatagtattaattggcgatacatttgatcactgcttagcacaagctttaaactatacgaagcaacataaaatgaattttattgacccatttaataatgtatatactattgcaggacaaggcactttagctaaggaaatattaaatcaagctgaaaaagaggataaaacatttgattatgtatttgctgctataggtggtggcggtcttatttcaggagtgagcacatattttaaagcacattccccccacactaaaattattggtgttgaaccaaccggtgccagtagtatgtatcaatcagtcgttatcaaccatagtatagttactttagaaaatattgataagtttgttgatggagcttcagtagcaagagttggtgatattacctttgatattgcgaaagataaagtggatgattatgttcaagttgacgaaggagctgtttgctccacaattctggatatgtactctaaacaagcgattgttgctgaaccagctggtgctttaagtgtaagtgcgttagaacaatataaaaagcagattgaaaataaaactattgtatgcatagtaagtggaggcaacaatgatattaatcgaatgaaagaaattgaggagcgttcccttctatttgaagaaatgaaacattactttattttaaatttcccacaaagacctggtgctttaagagaatttgttaatgatgtcctcggacctcaagacgatattacaaaatttgaatatttaaagaaaacatcacaaaacactggaactgttattataggtatacagctgaaacatcatgatgatctcattcagttaaaagatcgcgtatgtcaatttgatccttctaatatttatatcaatgaaaataaaatgttatattcattacttatttaa

SEQ ID NO: 6253 - DNA, 570 bp, Staphylococcus epidermidis
ttggaaatcaaaccaatcactatatataccggaaaaactgtcccccttttttatgacaatatagatactgaccaaatcattcccaaagtgcatcttaagcggatctctaaatcaggctttggaccttttgcttttgatgaatggcgttacttacctgatggtagtgataatcctgattttaatcctaataaaccagaatatcatggtgcgtcaattctaattactggagataactttggttgtggttctagccgtgagcatgcagcgtgggccttaaaagattatggttttaacattattattgcaggaagttttagtgacatcttttacatgaattgtactaaaaacgcaatgttacctatatgtttaaatcagaaagaaagagaacatttagctcaatttgatgaaataactgttgatttacctaatcaaacagtgtctacggtgtctcagtcttttcattttgatatagatgaaacctggaaaaataaattaatccatggcttagacgatattgctattactttacaatttgaaaatttaatagaaaaatacgaaaaaactttttaa

SEQ ID NO: 6254 - DNA, 1371 bp, Staphylococcus epidermidis
atgggtcaaacactgtttgataaagtatggaaaaaacatgtgcttcatggaaaagaaggtgaaccacaattattatacattgatttacatctcattcatgaagtcacttctcctcaagcgtttgaaggacttagaatacaaaatcgtaaacttagaagacctgatctaacctttgcaactttagatcataacgttcccacaattgatatttttaatataaaagatgaaattgctaataaacaaattacaactttacaacaaaatgctaaggactttggtgtacatatttttgatatgggttctgacgaacaaggtattgtgcatatggttggaccagaaactggattaactcaaccaggaaaaactattgtatgtggagattcacatactgctacacatggcgcatttggtgctatcgcatttgggataggaacaagcgaggttgaacatgtatttgccacacaaacattatggcaaacaaaacctaaaaatttgaaaattaatataaatggttctttaccagctggagtttatgctaaagacattattttatatttaatcaatcaatatggtgtagatttcggtactggttatgctcttgaatttacaggagaaactataaaaaatttatccatggaagcacgtatgacgatttgtaatatggctattgaagcaggagcaaagtatggtttaatgcaacctgatgaaacaacctttaattacgtaaaaggtcgtccttatgctactgattttgatagttctatggcgtggtggaaagaactttattctgatgatgatgcctattttgataaagttattgaacttgatgtaacaaatttagaacctcaagtaacttggggaactaacccagaaatgggagttagttttagtaatccattcccagaaattaaaaatgcaaatgaccaacgtgcttatgactatatgggacttcacccaggtcaaaaagccgaagatataaaattaggttatgtttttttaggttcatgcacgaatgcaagattatctgatcttattgaagcaagtcatattattaaaggacaacaagttcatccaaatattactgctattgtggttccgggttcaagaactgttaagaaggaagctgaagctctgggactagataaattatttaaagatgctggatttgagtggcgtgaaccaggatgttctatgtgcttaggtatgaatccagatcaagttcctgaaggagtacattgtgcatccacgagtaatcgcaattttgaaggaagacaaggcaaaggcgctcgtacacatttggtatcccctgctatggctgctgctgctgcgattaatggtaaattcattgatgttagaaaggtggtagtataa

SEQ ID NO: 6255 - DNA, 1044 bp, Staphylococcus epidermidis
atgagttataaaatagttgccttacctggagatggtataggaccagagattctatctggtacattagaacttttaaaattaataagtgaaaaatatcattttgaataccatttggaaagtcatcattttggaggtgtttcaatagattattatggtacacctttaactaacgaaacattacaatcatgtaaaaatgcagatgctattttattaggcgcgattggagggcctaaatggacagacccaaataatcgtccagaacacggtttgttaaaactgagaaaatccttaaatttatttgctaatattcgacctacatttgtaactaaaggggctagtcatctttcaccactaaaacaagatattgtagaaggcacagatttagttatagtaagagaattaacgagcgggatttattttggtgaaccaagctatgttaaaaaaaccgaagctttagactcattaaaatattcaagtcaagaaattgaacgtattgtgagaatcgcttttaatcttgcaaatcatagacgtaaaaaattaacttctgttgataaggaaaacgttctatcctctagtaagttatggcgacaaatagtaaacgatgtaaaaaaggattatccagaagtagaagttaatcatatgctagttgatgcttgtagcatgcatctgatcacccaacctacgcaatttgatgtgattgtaacagagaatcttttcggagatattttaagtgatgaagcatctgttataccaggctctctaggtctttctccatcagctagttttggtcaaacaggtacacgtctttatgaaccaattcatggttcagcaccagatatagctaatgaagataaagcgaatccatttggtatggttctatctttagcactttgcttaagagaaagtttaaatcaaaatgatgctgctaacgaacttgagtcaattgtttactcatttattcaatctaataagacaactgcagatttaggtggacaatatcgaacttcagaaatttttaaattgcttaaagaaaaatatctataa

SEQ ID NO: 6256 - DNA, 1536 bp, Staphylococcus epidermidis
atggaagaacatattcaaatttttgatacaacacttagagatggtgaacaaacgccaggagtcaattttacttttgatgaaagattaaaaattgccaagcaactagaaaaatggggagtagatgtactagaagcaggttttcctgcttctagtactggtagctttaaatcagtagaagctatagctaaaactttgactacaacagcagtgtgtggtttagctagatgtaaaaaatctgatattgatgctgtatatgaagccactaaagaagctgtaaaacctcaagtacatgtattcattgcaacctcccctattcatttagaacataaattaaaaatgactcaagatgaagttttaacatcaataaaagaacacgtttcttatgcaaaacaattttttgaagtcgtacaattctctccagaggatgcaacaagaactgaaattccatttttaattgaatgtgttcaaactgcgattaacgcaggagccacaattatcaacatccctgatacagttggatttagttatcctacagagtatggcgaaatttttaaacaattaacacaggccgttaagtcaaattctaaaattatctttagtgcacattgtcatgatgatctcggaatggcagttgctaatagtttagcagctattgaaggtggagctagacgtattgaaggtaccgtgaacggtattggtgaaagagcaggaaatgcctcacttgaagaagtcgctttggctttatatgtaaggaaggaccactatggtcttgaatctcaaattaaccttgaagaaactaagaaaacatctgacttaatttcaagatatgctggtatccgtgtacctagaaataaagctatagtcggtcaaaatgcatttagtcatgaatccggaattcaccaagacggtgtccttaaacatcgtgaaacctatgaaatcatgacacctcaacttgtaggtgtgaatacaacagaattgccactaggtaaattgtctggtaaacatgcatttgccgaaaagcttaaagctctgggatatgaaattaaattggaagatcaagttacattatttaaacaatttaaagaaattgccgataagaaaaaaaatgtatccgatagagatattcatgcgattatacatggctccgaacatgaacacaatgctatttttcaacttgataacttacaacttcaatacgtatctaaaggtctacaaagtgcagtagtagttataaaggaaagaaacggacaagttaaacaagattcaagtattggaacgggttcaattgttgcaatttataatgctgttgaccgaattttcaagaaagacgcagaattaattgattatcgtattgattctgtaacagaaggtactgatgctcaagcagaagtacatgtacgaatcattattaatcatattgaagtgacaggcataggtatagaccacgatatattaaaagcttcatgtaaagcatatatcgatgctcatgctaaatatatttcagaatatgagttgaaagaaggtatacgtacatga

SEQ ID NO: 6257 - DNA, 1005 bp, Staphylococcus epidermidis
atgacaaaagtatattacgacgaaacagtaactcaggatgcattacaaggtaaaaaaattgctgtcattggttatggctcacaaggacatgcacatgcacaaaatttaaaggacaatggttatgatgtagtcattggcctgcgtccaggacgatcatttaataaagctaaagaagatggatttgatgtttatacggtaagtgaagcaacacaacaagcagatgtagtgatggtactattgcctgatgaaattcaaggtgaagtatataacaaggaaattaaaccatatttagaaaaaggaaatgctttagcattcgcacacggttttaatatccatttcagtgttatcgaaccacctagtgatgtcgatgtctttttagtagcacctaaaggacctggtcatttagttagacgtacatttgttgaaggaagtgccgtaccagcattatttggtgttcaacaagatgctacaggccaagctagaaacattgctttaagctacgcaaaaggcattggtgctactcgtgccggggtcattgaaacgacatttaaagaagaaactgaaacagatttattcggtgaacaagctgtactttgtggaggagtttccaaattaattcagagtggattcgaaacacttgtggaagcaggttaccaacctgaattagcttattttgaagtcttacacgaaatgaaattaattgttgatttaatgtatgaaggcggaatggaaaatgtccgttattctatctctaacactgctgaatttggcgactatgtttctggaccaagagtaattacacctaatgttaaagaaaatatgaaaaaagtacttgaagatattcaaaatggtaactttagccgtagatttgttgaagataacaaaaatggctttaaagaattctatcaattacgtgaagatcaacatggtcatcaaattgaacaagttggacgtgaattaagagaaatgatgccattcattaaatctaaaagtattgaaaaataa

SEQ ID NO: 6258 - DNA, 234 bp, Staphylococcus epidermidis; identical to SEQ ID NO: 4344

SEQ ID NO: 6259 - DNA, 1743 bp, Staphylococcus epidermidis
atgtcaaatcaaaaatcaatggtttcgcctcacccttctgtgcatcaaacaaaggaatcacaacccttaataacacgcagtggttctcaattattagttgaagcacttcagcaggaagatgtagattttatcttcggttatcccggtggagctgtcttacctttatacgatacattttatgacgggaaaatcaaacatattcttgctcgtcatgaacaaggtgctacacatgctgctgaaggatatgcgcgtgtctctggtaaaacaggagtcgttgttgtgacaagtggacccggtgcaacaaatgccattacaggtattactgatgcatatagcgactctttaccactagtcgtttttactggtcaagttgctacacctggtattggtaaagatgctttccaagaagctgatttactctcgatgaccacacctattacaaaacacaattatcaagttaaaaagattgaagacattccaagaattgttcatgaagcctttcatttagcgaacactggaagaaaaggtcctgtagtgattgatttccctaaagatatgggcgtgcttaaaactgatgttgaacttacaaaagatattaatattcctggttatgaagttaatagtaacccaaataaagaggatattaataagttaatatatatgattaaagaagctaagaaacctcttattcttgcaggtgctggtattaatcactctaaatctaatcatttattaacagaatttgtgacaagacatcaaatccctacagttacaactctcctaggacttggagcagtaccttatcatcaccctttattcttaggtatgggaggtatgcatggatcttatgcaagtaatatggctttaacaaattgtgatttacttatcaatttaggtagtcgattcgatgatcgtcttgcaagtaagcctgatgcattcgcaccaaatgcaaaggttgtacatgtagatatcgacccttctgaaataaataaagttattaatacagatttaggtatagtcgctgattgcaagcttgtgcttgagaacttatgccatgagcaagttttaacatcctcccacgaagaatggaacgattattgtattaataacaaaagtaactatccatttaaatatgatgaaaatgataaaaacttttgcaaaccacaaaaagcgattgaatatattggcaaagttaccaatggaaatgcaattgttacaactgacgtaggccaacaccaaatgtggacagcacaattctatccatttaaaaattatggacaatgggtaacaagtggtggtttaggtactatgggatttggaattccatcagcaataggagcacaattagctgaacctgagaaaacagttgtatgttttgtaggagatggcggttttcaaatgacgaaccaagaaatggctttacttccagaatatggacttaatgtcaaaatagtacttattaataacggaactttaggtatggtaaaacaatggcaagataaattctttaataaacgattttctcattctgtatttaacgatcaacctgattttatgaaaatggcggaagcatatggtattaagggattcttgatagattctccagataaattagaatcttcaattgatgaagcatttgcatatcatggaccggcactcattgaagttagaatctcacctatagaaccagttaatccaatggtacctagtggcaaatcaaatcatgaaatggagggttactaa

SEQ ID NO: 6260 - DNA, 1689 bp, Staphylococcus epidermidis
atgcgaagtgatatgatcaaaaaaggagatcaccaagctcctgcaagaagtcttttacatgcgactggcgctcttaaacaacctacagatatgaataaacctttcgtagcaatttgtaactcttatattgatattgttcctgggcacgttcatttaagagaattagcagacatcgcaaaggaagctattagagaagcaggtgctatcccattcgaatttaatactattggtgttgacgatggaatagctatgggacatattggcatgagatattccttaccttcaagagaaattatcgcagatgcagctgaaacagttattaacgctcattggtttgatggtgtattttacattcctaattgcgataaaattacgccaggaatgttactcgcagctgttagaacaaatgtaccagctatcttttgctcaggaggcccaatgaaagctggtctttccgctcaaggtaaggcattgacattatcttcaatgtttgaagcggttggagcttttaaagaaggaacaatctcaaaagaagcatttttagacatggagcaaaatgcttgtcctacatgtggttcgtgcgccggtatgtttaccgcaaactcaatgaactgtttaatggaagttttaggtttagccctaccatataatggtacagctctagctgtgagtgatcaacgtcgtgaaatgattagacaagctgcattcaggttggttgaaaatattaaaaatgatattaaacctcgcgatattatcacacaagatgcaattgatgatgcttttgctcttgatatggccatgggaggttctactaataccgttcttcatactcttgcaattgcaaatgaagcaggtattgactacgatttagaacgtattaatgaaattgctaaaaaaacaccttacctttctaaaattgcacctagttcttcttattctatgcacgatgttcatgaagcaggtggcgtcccagctattataaatgaattgatgaaaaagggtgatactttacatccggatagattaacagttacgggtaaaaccttgagagaaaataatgaaggtaaaaacatcaaaaattttgaagttattcatcctcttgaaaacccttatgataaacaaggtggattatctgttttattcggaaacctcgcacctaaaggagcggtaatcaaggtcggtggagttgatccttcaattaaagtatttacaggaaaggcaatttgttttaactctcatgatgaagctgttgaagccattgataatcatacagtaagagaaggacatgttgttgttattagatatgagggacctaagggaggtcctggaatgccagaaatgctagcccctacgtcttccatagtgggcagaggattaggtaaagatgttgcattaattacggacggtagattttcgggagcaactagaggtattgcagttggacatatttcacctgaagccgcttcaggtggacccattggcttaataagagatggtgataaaattacgattgatttaatcaatagaactctaaacgtcaatcaatctgaagaagaactgtatcgccgtaaaaaccagcttgaaccattcagagcaaaggttaaaacaggctacttagctagatatactagtttagtcacaagcgctaatactggaggtattatgcaagttccggaaaaccttatttaa

SEQ ID NO: 6261 - DNA, 462 bp, Staphylococcus epidermidis
ttgataactattcacaatttaaatgaaatggataaatttgctcaaatacttgtaaaacatttaagtgctaaggacttgattttattaaatggtgacctaggagcagggaaaactacattaacgcaatttataggaaaagcgttaggtgttaaaagaacgataaactcaccaacatttaatataatcaaatcttatacaggttcaagcatacgattacatcatatggactgttatcgacttgaaggtgaggaagatgatttaggtttcgatgaatattttgaagacaatgctatcatagttatagagtggagtaaatttatcaaagatttccttcctcctaatcacttaacaattaatataagtgtcaaagatgcgaatgagaggcaagtatccattgaaacacatgggcaacattatgcattagtaaaggaggcaattttgaatgaactatcttctaattga

SEQ ID NO: 6262 - DNA, 663 bp, Staphylococcus epidermidis; identical to SEQ ID NO: 4348

SEQ ID NO: 6263 - DNA, 438 bp, Staphylococcus epidermidis
ttgaatattaggaaaatgagtgtggaagatgttcctaaagtttttgatatagaaagaaatagtttctcacacagttcgtggtcaattgatgcattttatcatgaaatagaaaacaacgaatttgctacatattttgttatagaatttagtgacaaaataattggatatgttggtttatggttagtcgttgatcaagcacaaattacaacgatagctatatcaaaggcatttagaggctatggtcttgggcaacttttacttaaatatgcaatgaactatgcacgcttttcttgtgatatgatgagtttagaagtaagaatagataatgatgttgcacaacatgtttataggaatttgggattccaaaatggtggcaaaagaaagaattattatggagaaggcgaggacgcattagtcatgtgggtgaatttgaaatga

SEQ ID NO: 6264 - DNA, 1038 bp, Staphylococcus epidermidis
gtgggtgaatttgaaatgacaaataataaattaatcttagcaattgaaacaagttgtgatgaaacgagtgtaagtgtaataaagaatggcactgaacttttatctaatactgttttaagtcaaatagatagtcacaaacgttttggtggtgttgtacctgaagttgctagtagacatcatgttgaaggaataacagcaactatagatgaatcgttagtgagtgcaaaagtgaaaatggaagacattgacgctattgcagtaacacaaggcccaggattaataggagctttattaattggtattaatgcggctaaagctttggcatttgcttatgataagcctattattccagtacatcatattgctggtcatatttatgccaatcacttagaacaaccattaacatttccactaatgtcattgattgtatctggtggtcatactgaactagtatatatgaaaaatcatttagatttcgaagtgattggtgaaacgagagatgatgcagtaggagaagcttatgataaagttgctcgaacaatcaatcttccttatcctggtggaccgcatattgatcgattagcagctaaaggtaaagatgtatatgattttccaagagtttggctcgaaaaagatagttatgattttagttttagtggtcttaaaagtgctgtaataaataaactgcataatttaagacagaaaaatattgaaattgtagctgaagatgttgcaacgagtttccaaaatagtgttgtagaagttttaacctataaagctattcatgcttgtaaaacttataatgttaatcgcttaattgttgcaggtggtgttgctagtaataaaggattaagaaatgcactaagtgaagcatgtaaaaaagagggtatacaccttactattccaagtcctgttctttgcactgataatgcagcgatgattggtgctgctggatattatttatatcaagctggtttgtgtggcgatttagctttaaatggacaaaataatattgatattgaaactttttctgtttaa

SEQ ID NO: 6265 - DNA, 1617 bp, Staphylococcus epidermidis
atgacgaacaatcaaactttagtactgattatattaactttcatcatcctaattacacttgtaaatgtaattatctctattatagagaggcgtaaacagattgctaaaataaatactttatgggataacaaattaaaattagaaagttttatacgtcctaattcacgattcgatgcccaatatcacgcttaccgtgatcattacaatgagcagtcatttatcgacgataagacttggtcagacctaaatatggatacgttatttcataaaattaattttaatttcactgcaattggtgaaatgcgactatatgcaactttaagaggtatgtttaaggtaaatcaaacctcattgataaacatgtttaaagaaaataaagtatttcgtttaaatgtatcttacattctttctaaaattggtaaaaatgtataccctttgtttccagatcaaatgttacccactaagcgaaatattttattaatgttttgtccgttgttaccatttatcgggttcgcattcattttttttattccttcaaaaggtatattaatatgtcttacttttatgattttaaatgcaatattatctttcaaactaaaaaaatcttatgaccaagatttaaaatcaattttttatactgctaatgttataaagcaaagtcaagctttaagtaagattgagagcacgcccgcgataagtgttgattttactcattttaaagcttcacgccgttttagtggtttattagctagagtagaatcacaagatatggcgagtagcataatcatgtttattaaattagtattcatgatagattatgttttatttcatttaatacaacgcagctactttaagtatcaagaagaagttatggcatgttatgactatataagcatattagataatcattactctatagctatgtatcaacatactttgacacattattgttatcctaaaatcaatcacaatattaatggtcttcaaatgaaatcaatcattcatcctctactagatgaagaaaatgcgattgctaacacaattgacatttcaaatcatatattactcacaggctctaatgcatcaggaaaatctacatttatgaaagcagttgcactaaatttgattttagctcaatcgatacaaactgcaacagctcactcatttatttatcaacctggctatgtaatgacatcaatggcaaatgcggatgacgttttaagtggtgacagttatttcatgtcagaacttaagtctattcgtagattatttaacactcatcagtgcaataagatatattgttttatagatgaaatttttaaaggaacgaatacaactgaacgtattgcggcttctgaatcagtattatcgtatttagataatcaaaaagcatatcaggttatcgctgcgacacatgatgttgaactatcaacattattagaaaatacatataataattatcattttaatgaatctattcaagaaaatagcatatttttcgattacaaaattaaacctggtaaagccaatacacgtaatacaattgaattactacgcattacgcagtttcctatcgatatttatcagcgtgctcaacaaaatattcgaaacctctag

SEQ ID NO: 6266 - DNA, 1935 bp, Staphylococcus epidermidis
atgatacttttacaacttaatgacatctccaaatcgttcgatggtgaagatatcttcacagatgttaattttgaggtgaaaactggcgaaagaatcggcgtagtaggccgtaatggagctggtaaatcgacattaatgaaaatcatagcaggtgtggaaaattacgatagtggtcaaatatcaaaaatcaaaaatttaacaatgagttatttaactcagcaaatgactctcaattcagaagctactgtctttgaagaaatgtctaagccttttgaacatataaagaaaattgaaaatttaattaaggatgaaaccgattggcttgcacgaaatggacaagattatgagtccgatgaatatcaatcacatattgaaaaatatgaaactttaacgaatcgttatgagcaattagatggttatcaatatgaaagtaaaattaaaacagtcctgcacgggcttaactttacagaaagcgatttcaacaagcctattaatgattttagtggtggtcaaaaaacacgtctttctcttgctcaaatgttacttaaagaacccgatttactccttcttgatgaaccaactaaccatctagacatggaaacaaccaagtggttagaggattacttaaagtactttaaaggagcaattgtgattatcagtcatgatagatattttttagataaaattgtaactcaagtttatgatgttgctctaggaaatgtaaaacactatgtaggaaactatgagcaatttataaagcaacgtaatcagtattacgaaaaacgcatgcaagaatttgaaaagcaacaagaagaaatcaagcgtttagaaacctttgtagaaaaaaatattactcgtgcatctacaagcggcatggctaagagtagacgtaaaacattggaaaaaatggaacgtattgataaacctatgatagatgctagaagtgcaaatatacaatttggcttcgaccgtaatactggtaatgatgtgatgcacattcatgatttaaaaattggttacgactcacctattacactacctataaacctcgaagtctttaaagaggatcatatagctatcattggtccaaatggtgttggtaaaacaacattgataaaaacaattgctgaaaaacaacataaactaggtggtcaaattatctttggtgctaatttacaaattggttactatgatcaaaaacaagctgaatttaaatcaaataaaaccattctcgattatgtttgggatcaatatccacacatgaatgaaaaagatgtacgtgcagtattagggcgtttcttgttcgttcaagaagacgtaaaaaaaattatcaatgacttatccggcggtgaaaaggcacgattacaattagcacttttaatgttacaacgtgataatgttcttatcttagatgaaccgactaaccatttagatattgattctaaagaaatgcttgaacaagcattgaaagattttgaaggcacaattatttttgtatcacatgatcgttattttattaaccaacttgcaaataaagtttttgatttaaacattaatggtggccaaatgtatttgggagattatcagtattatattgagaaaactgaagaagctgcagctatcaaagcacatgaaacaataactcaaaataattttgaaaataaagagataaatcaagacgcaaatacttcaacctatatcagtcaaaagcaacaaaaaagacaacaacgtaaattagaaagacaaattgaacattgtgaaagacaaatcgaagaattagaagcacaaatatcacatatcgacgaacagttaacacaacctgaagtatttaacgatcctctaaaagctagtaaatttgccaatcaaaaatccgataccgaacaaaaattagaacaaataatgttggaatgggaaaaattacaagaaaagctctaa

SEQ ID NO: 6267 - DNA, 636 bp, Staphylococcus epidermidis
atgccagatgattttaaaattcctcgcgctacgttaaaacgtctacctttatattaccgatttgtcagtattttgaaaggtaaaggtatagatcgtgttaattctaaaacaataagtgaagcactacaaattgattcagctacaataagaagagacttttcatactttggtgaattaggaaaaaaaggatatggatataatatagatagtatgcttgaattctttaaatcagaattaagtgagagcgatcaaattaaaattgccattataggtatcggtaatttagggcgtgcattacttacatataacttttcaatacatgatgagatgacaattactgaagcttttgatattagaccagatattataggtgagaatatcggtgacgttgtggtaaaacatagcgatgatatcaaagcgacattagaatcagaagttattgatgtagtcattttaacaacaccagataatgtggcacaacaagtagctgatgaacttgttaaagccggtgttaaaggtatactaaactttacgccacgtcgaattaaaacacctcaagatgttcaagtacatcatattgattttggtatagagttacaatcattattgttcttcatgaaaaattatagtaaataa

SEQ ID NO: 6268 - DNA, 1053 bp, Staphylococcus epidermidis
atggtgtggacaattataagcggattagtcgttggcatattgctaggatttgtaatgcagagaacaagattttgtttagctggtggatttagagatatgtacgttcaaaagagtaacaaaatgttttatgcattgcttattgctattactgtccaaagtattggtttacttattctaaagaacttaaatattatagaggttccaacagaaacatttccagttataggaactattttgggatccttcgtttttggaatagggatagtattagctggaggatgcgcgacaggaacttggtatagggctggtgaagggttaattggaagttgggtggcattaatattttatgcattgacttcagccgtaactaaaactggggtacttcttccaataatgaatcaaataaataaaccgacgcaagtcagcacaagtatgacgagtacaacaggtataccacaatggattctcgtcatgttattaactgtaattacaatatttttagttgtgaaaacaattcgaaaacctaaaataatggtgccccaacttaaacaaaaatatagtggtattagacattacctatttgaaaaaagatatcatccatttgttgctggcattgcaataggttttattgctctacttgcttggcctatgagtgaatctactgggagaatgggtggcttaggtataacaacaccttctgcaaatcttgtaaattatcttatttcaggagatttaaaatttattgattggggtgtgcttttggtactaggtatattcataggttcttatatagctgcaaaagggtctaaagagtttagatggagattgccagatattaagacaattcgcaatagtgcgcttggtggcatatttatgggatttggtgcttcagttgcaggtggttgctctatcggtaatggtttagtagaaacagctacaatgagttggcaaggatggattgctttagcctctatgattattggtgtttggtttatgagttattttatttttgtaaaacctatgaaaaagttacaacaagtatctcaaagctaa

SEQ ID NO: 6269 - DNA, 225 bp, Staphylococcus epidermidis; identical to SEQ ID NO: 4355

SEQ ID NO: 6270 - DNA, 1251 bp, Staphylococcus epidermidis
atgaatatgaatgatacaatatttctatttttatgtactctattagtatggttaatgacaccaggtttaagccttttttatgggggactcgtacaatcaaaaaatgctttaaatactgtaatgcaaagtatggttgccattgtcattgtcacatttgtatggataataattggtttctctttaagttttgatggaggaaatcaatggataggtggtttgaagtttttgggtcttcatcatgttggttttgaaacttcaaaaactttgagtcctcatatacctctctcattatttatgttgtttcaaatgatgttttgtacaattgcggtatctattttatcaggttcgatagccgagaaaatgagattcattccttatctgatttttgttagtttatgggttctattaatttatagccctgttgcccattgggtttggggtggtggttggattagtaaaattggagcaatagattatgcaggtggaacagtagttcatataacatcaggcgtatctggtttagttcttgggataatgataggtataggtaagaagaaagaaaaacatactccccataatctattaattacgcttataggtggtatattagtatggttaggatggtatggatttaatgtaggcagtgcatttacattcgatcacatagccatgatatcgtttgttaacacagttattggtgcaagtgcaggtgcttttggttggttaatctttgaatatatcttgaaaaagactacaagtttactaggtcttttatctggagcactctctggtcttgtcgctattacaccagcagcaggatacgtcagttatatgagtgctatgattattgcaataattggtggcatatgttgctatatcgttataaatttaattaaagtaaaactccaatataatgatgcacttgatgcatttggtattcatggtgtaggtggtatcttaggagctgtgtttacaggagtttttcaatcacatcaaattaataatgcggtgcagtatggttttatctatacagctgattttaaaatagtagtgattcaacttggcgcggcaattgcaactgtcgtttttagcgcaatagttacatttttgattgctagatttattaaaatttttactcctttagctacaactcaagaagaagataaaacaggtcttgatgctatagtacacggtgagaaagcatatttctatggagagctaaataagtttaatcgtcatatcaagttttaa

SEQ ID NO: 6271 - DNA, 600 bp, Staphylococcus epidermidis
atgaaaaatatatcagatatagcaaaattagctggagtatcgaaaagtactgtttcacgctttttaaataatggatctgtgagtccagcaacgaaagaaaaaataactaaaataatagaagaaaataattatcagccaaatcaatttgcacaaagcttaagagctcgacgtaccaatttgattggagcaattattccgcgtatgaattcatacgctgttgacgaaacgattaagggtttggtacaccaatgtaatcaacatcgatatcagttattattaaattacacaggattagaaatagatggtgaaatttcggcactaaaaacattatcacgtagtaaagttgatggaatcgtgctaatggcaacacgtattactgaagcgcatattgaagtcattgagaaaattgatgttcctgtcattatagtaggacaagaacacgaccgattatatagtatatatcacgatgattatgaagctggatataaaattggagtactcattggtgaaaaagttgtcgaaatgtacatttctttggcgttagtgaagaagatattgcagttggtattcaacgtaagctgggagttattcaagcgctga

SEQ ID NO: 6272 - DNA, 1473 bp, Staphylococcus epidermidis
gtggagtggactcgtgaagagagataccaacgtattgaggatgttgatgaaacatatcttgagcaactgaaacaccaagtggatacatctttatatagacaaacatttcatatccaacctgaaatgggtttattgaatgatccaaacggactcatttattatgaaggatactactatatttcacatcaatggtttccgttaggtgctgtgcacggtttaaaatattggtttaattataaaagcaaagatttattacattttgaacctcaaggaacacttcttaaacctgatactaagtatgatagtcatggcgtatacagtggaagtgcttttgaatatcaaaatcatctttattatatgtatacaggcaatcatcgtgaccaacattggaatagaatttccagtcaaatgattgccagaatgaacaaagacggaaaaatagagaagtttcctaaacctgtgattcatggacaacctgaagggtatacaagtcatttcagggatccaaaggtatttgaaaaaaatagtcaactgtacgctattctaggtgctcaaaatgaaaatgagatggggcgtttacttttatatcgtagtcaagatgttgttgattggcattttgaaggtgagattaaaactaatctgacacaatttggttatatgtgggagtgtcctgattattttagactaggcaataaagatgtcatactcatgtgtccacaaggcgttgaagctgaaggagataaatatagaaatatttatcaatcagggtatatgataggagatttaaactttaataatctatttttcgaccatgaaagttttcaagaattggataatggttttgatttctacgcgccacaaacgtttgttgatgcagacgggcaacgcattttaattggatggatgggactaccagatacagactatcctacagataaagaggggtgggcacattgccttactattcctcgagtgcttaccattgaaaatggaaaacttaagcagcgaccttttaagcagttagaagatttaagaactaataaagaaacagctttgggatatgctaataaatttaaacgtaaattacatccatatgaaggtaaacagtatgagatgattatagatatattagaaaatgatgcttcagaaatatattttgaattgcgtagctctcgatctgaatctacactgattacttataataaacacgaaaataaactcactttagatcgtaccgatagtgggacactaccatcaaatttcgatggaacaacgcgttctaccattttagattcaccattaaaacagttacaaatttttgtggatacatctagtatcgaaatattctgtaatgatggtgagcgtgttttaacctcacgtattttcccaaatgaggatgctacaggtataaaagcttcgactgaatctggtcaagtatatttaaaattcactaaatatgaattaaaagggtga

SEQ ID NO: 6273 - DNA, 960 bp, Staphylococcus epidermidis
atgagacgtctatttgctattggagaggcattaattgatttcataccaaacgtaacgcattcaaaattaaaagatgttgaacaatttagtcgacaagttggtggcgcaccgtgtaacgtagcggctacagtaagtaaattaggtggaaaatcagaaatgataacacaactagggaatgacgcgtttggtgatatcattgtagaaacaattgaacaacttggcgtaggtacgcaatatattaagcgaactaataaagcaaatactgcattggcatttgtcagccttcaagatgatggtcaaagagatttctcattttatcgtaaaccttctgcagatatgttatatcaacctgaaaatattgatgatattcaagtattccaagacgatattttacatttttgttctgtagatttaatagagagtgacatgaaatatgcccatgagaaaatgattgaaaaattcgagtcagtagatggtactattgtttttgaccctaatgtacgcttacctttatgggaagataaactcgaatgtcaacgtacaataaatgcgttcatacctaaagcacatattgttaaaatatctgatgaagaattattatttattactggtaagaggaatgaagatgaagcgattcaatctttatttagaggtcaagttaatgtagtgatttatacacaaggagcgcaaggtgcaactatttataccaaagatgattatcgtattcatcatgaggggtatcaagtacaagcaattgatacaactggtgctggtgacgcatttataggtgctattatttattgcatactcgagtctcggtattctgaatgtaaagatttatttaaggaaaagggcaaggatatactagcgtttagtaatcgtgtcgcagcacttacaacaacgaaacatggtgctattgaaagtttgccaacaaaagaagatataaaagactataattga

SEQ ID NO: 6274 - DNA, 717 bp, Staphylococcus epidermidis
atgaaaatttttgtttgtgaagatgaccaaagacaaagagaacatatggtatcaatcattaaaaactacataatgattgaagaaaagccaatggagttagctttagcaacaaatgatccttatgaggtcttagagcaatcaaaagaacttaatgacattggttgttacttccttgatattcaattagaagctgatatgaacggtattaaattagccagtgaaattcgtaaacatgatcctgttggtaatattatatttgtaaccagtcacagtgagctgacttatttgacgtttgtttataaagtggctgctatggattttatttttaaagatgatccatctgaattaaaaatgagaatcatagattgtcttgaaacagcacatacacgactcaaattattatcaaaagaaagtaatgtagatacgattgagttaaagcggggaagtaattcagtatacgttcaatatgatgatattatgttttttgaatcatctacgaaatctcatagactcattgcacatcttgataatcgacaaattgaattttatggaaatttaaaggaattagcacagcttgatgaacgtttctttagatgtcataacagttttgtaataaacaggcataatattgaatctattgactcaaaagaacgtattgtttactttaagaatggcgaaaattgtttcgcttcagtacgtaatgttaaaaaaatataa

SEQ ID NO: 6275 - DNA, 1290 bp, Staphylococcus epidermidis
atgggtaaacttgactttttaccatttgcagctatacaagtgtttcttttggtttgggttacaaaaactattgctaatattaaatttgtaagaaaggattatattttcattactggaattataatcctttctgcaatattatataatgtttatgcaagccaagcacttgtacttgtagtaataatgattataattttcttctattcaaaagtaagatggtattctattgttatagtgttaatgagcactttgttgtcatatttaacaaattttattacagtagctatcagtttatatactgaaaatataatacataatatttatttttataatatctttcatttttcaatttttatcattttatctttaattttggcacatttatttaaacacttattaattaggtttaggtattcttatttatatttaagcaaaaggtattacattattatttcttttgtattagctattgcttttatatacttctatataatttcacaaactaatttacaagaaagtaatagcttgaacttttatgctattatttttgtttctattaccgtacttttgagtttggttatattattgttatcggctttcgcactacgtgaaatgaaatataaacgtaagctacaagaaatcgaagcatattatgagtacacgttacgtatagaaagcattaacaatgaaatgcgtaagttccgacatgattatgtgaatatcctcaccactctttcagattacattagagaagatgatatgcctggattacgtaaatattttaatgaaaatatcgttccaatgaaagataaattaaaaactcgctctattaaaatgaatggtattgaaaagttgaaagtgagagaaattaaagggctgattactactaaaattattcaagctcaagaaaaacgtattccaattagtattgaggttcctgatgaaattgatcgtatcgatatgaatactgttgagcttagtcgtattatcggtattatagttgataatgctattgaagcttcagaaaatcttgaggaaccactcatcaatatcgcattcattgataatgaggaatctgtcacttttatcgttatgaataaatgtagtgatgatatccctaaaattcatgagttgtttgaacaaggtttttctactaaaggtgataatcgcggtttaggtttatcaactttaaaagaactgacagactcaaacgagaatgttttattagatactgtcatcgaaaatggttactttgtacaaaaagtagaaataaataataaggaatcataa

SEQ ID NO: 6276 - DNA, 141 bp, Staphylococcus epidermidis
atgaatttattaggtggtttacttttaaaaattttttcaaactttatggcagtaattggtaacgcatcaaaatacaacccttgtagtaattatctcgatgagccacaagtgccagaagaattaactaaactagatgagtag

SEQ ID NO: 6277 - DNA, 564 bp, Staphylococcus epidermidis
gtgaaaatcatcgataaaaaaattgagcaatttgctcaatatttacaacgtaaaaataacttagatcacattgagtttctaaaagttcgtttagggatgcaagtagttgctggtaatattgaaaaaacagtggttctatatggactatcttatttttttgatttgctcatttttacatttttaactcatattagttactttctattaagaatatttgctcatggtgcacatgctaaaacaactcttcaatgtcatatacaaaatattctttattttttatttttaccttggctagtactacaccttcctcttagtacaaatatattttattttttagccatgattagttttttattagtaatatcttttgcaccggctgcaacaaagaaacaacctatacctaaacgtttacttaagaagaaaaaagtactctccatattaagttttatcgtaatcataacaatcgctttaacactagaagaaggattcaaaaaaaatgttatctcgggtgttgtaatagagtctattacacttttaccaatattttttcctaaggaggattaa

SEQ ID NO: 6278 - DNA, 786 bp, Staphylococcus epidermidis
ttgaaaatccaaatacttcaattcaatgtagaacgtggaaatgttgataaaaatatgcaaaatatcaaaactaagtttaatcaatatttagataaagataccagtgtcgtcgtgcttccagaaatgtggaataacggttatgcattagaagaattagaacaaaaagctgataaaaatcttaaaaacagctctctctttataaaagatttggcacatacatttaatgtagacatcattgcaggttcagtgtcaaatataagagaaaaccatatatataatactgcttttgcaattaataaaaacggagaattgattaatgaatatgacaaaatacatctcgtgccaatgttacgtgagccagactttttatgtggtggaaatgtagtccctgaacctttttatttatctaatcaaacacttgtgacgcaaatcatttgttatgacttgcgatttccagagatattgcgctatccagctagaaaaggtgctaaaattgctttttatgtagcgcagtggcctagctcaagactagatcattggttatcattactaaaagcgagagcaatcgaaaatgatatttttattgtagcttgtaatagttgtggtgaggatggtcacaccaattatgctggaaattcaattgtcattaatcctaatggtgaaattttagaccatttagatgataaagaaggtgtactaacaacacatatcaatgtagacttagtagatcaacaaagagaatatattccagttttcagaaatctaaaaccacatctttataaatag

SEQ ID NO: 6279 - DNA, 1431 bp, Staphylococcus epidermidis
atgaaaaagtttaacattaaacattcatttatgcttacgggctttgctttcatggtaactacatcattattcagtcaccaagcacatgctgaggatagtcatcctattgacactaatttttctaaagaccagattgataagaatacagctaagagcaatactatcaatcgagtgaatgacactagtcgcataggaaatagtatgaattcggataatgagttagatacagatatcgtttcaaatagtgactcagaaaatgacacatatttagatagtgattcagactcagatagtgacttagattcagatagtgattcagactcagatagtgacttagattcagatagtgattcagattcagacagtgactcagactcagatagtgattcagattcagacagtgactcagactcagatagtgattcagattcagacagtgattcagactcagatagtgattcagattcagacagtgactcagattcagacagtgactcagatagtgattcagattcagatagtgattcagactcagacagtgactcagactcagatagtgattcagattcagatagtgattcagattcagacagtgattcagactctggtacaagttcagataagggttcacataccggaaaaaaacctggtaaccctaaaggaaatacaaataaaccttctcaaagtaatacgaatcaaccccaaaggcctaaaaacaatcaaacaaatcaaaacaatataaacaataatattagtcatacacgtactagtggagatggtgcgccttttaaacgtcaacaaaatattattaattctaattcaggtcatagaaatcaaaataatataaatcaatttatatggaacaaaaatggcttttttaaatctcaaaataataccgaacatagattgaatagtagtgataataccaattcattaattagcagattcagacaattagccacgggtgcttataagtacaatccgtttttgattaatcaagtaaaaaatttgaatcaattagatggtaaggtgacagatagtgacatttatagcttgtttaggaagcaatcatttagaggaaatgaatatttaaattcattacaaaaagggacaagctatttcagatttcaatattttaatccacttaattctagtaaatactatgaaaatttagatgatcaggttttagctttaattacaggagaaatcggctcaatgccagaacttaaaaaacctacggataaagaagataaaaatcatagcgccttcaaaaaccatagtgcagatgagataacaacaaataatgatggacactccaaagattatgataagaaaaagaaaatacatcgaagtcttttatcgttaagtattgcaataattggaatttttctaggagtcactggactatatatctttagaagaaaagagtaa

SEQ ID NO: 6280 - DNA, 741 bp, Staphylococcus epidermidis
atgaaaaggttatgggtatccctattaaccgttctattctacggtttagctcaaatactacctgggttggttttaggtaaccatttacttggagatatgtctaaaatgcaaactgcccaaacaatgagtatcatgcaagtatctatctttatcatcgctgcattgttaatcattttcatgcaagcaaccattaaaaatcctactcaattagaacaaggacataaggaacctaaaagatatattttcgcctgggttctattaggattttgtattgtgatgatttaccaagtcatcatcagtataattttatttgccatcaatggcagtccgcaaagaagtccaaacactgaaaggttaatggctattgctaagcaaatgccgatatttatcgttttaatatccatagtaggtcccattttagaggaatacgtttttcgtaaagttatcttcggagaattgtataactttataaagggatcacgtgtggtaagctttatcattgcttctatagtaagttctctaatattcgctttagcacataatgacttcaaatttataccggtatattttggaatgggagtcattttctcacttgcttatgtttacacaaaacgaattgctgtacctataggcatacacatgcttatgaatggttcggttgtattaactcaagttgtgggtggagattctattaaaaaattgcaagaacaagcaacatttatattccatcttatattttaa

SEQ ID NO: 6281 - DNA, 285 bp, Staphylococcus epidermidis; identical to SEQ ID NO: 4367

SEQ ID NO: 6282 - DNA, 1620 bp, Staphylococcus epidermidis
atggcaaaagatcttaaattctctgaagatgcgcgtcaagcaatgttacgtggtgttgataaattagcaaacgctgtaaaggttacaattggacctaaagggcgaaatgtggttctagataaggattacacaacacctttaattaccaacgatggtgtaacaattgctaaggaaatagagttagaagatccatatgagaatatgggtgcaaaattagtgcaggaagttgcgaataaaacaaatgaaatcgctggggacggtacaactacagcaacagttttagcacaatcaatgattcaggaaggtcttaagaatgttacaagtggtgcaaatcctgtaggcttaagacaaggtattgacaaagcagtgcaagtggctatagaagcgcttcatgagatttctcaaaaggttgaaaataagaacgagatagcgcaagttggagctatttcagcagcagatgaagaaatcggtcgctacatttctgaagcaatggataaagtaggtaacgatggcgttatcactattgaagaatcaaatgggtttaatacagaattagaagtagttgaaggaatgcaatttgatcgcggttatcaatcaccatatatggtaactgactcagataaaatgatagctgaattagaacgtccatatatattagtaacggataagaaaatttcatcattccaagatattcttccattattagaacaagttgtgcaggctagtcgaccaattttaattgttgcggatgaagtagaaggcgatgcacttactaatattgttttaaaccgtatgcgtggaacatttactgctgtagcagttaaagccccaggatttggtgatcgacgtaaagcaatgttagaagacctagcaatattaactggtgctcaagtcattactgatgatttaggtttagaacttaaagatgcatctcttgatatgctaggtactgcaaataaagttgaagtgactaaagatcacacaacagtcgtagatggtaatggtgatgaaaataatattgatgctcgagtaggtcaaattaaagcacaaattgaagaaactgattcagagtttgataaagaaaaattacaggaacgcttagcaaaactagctggtggcgtagctgttatcaaagtaggggctgcaagtgaaacagaacttaaagaacgcaaattaagaattgaagacgcattaaattcaacacgtgcggcggtggaagaaggtatcgttgctggtggtggtactgcgttagtcaatatatatcaaaaagtaagtgaaattaaagcagaaggtgatgttgaaacgggtgttaatatcgtattaaaagcattacaagcacctgttagacaaattgctgaaaatgcaggattagagggttcaattattgttgaacgtttaaaacatgctgaagcgggcgttggtttcaatgcagcaacaaatgaatgggttaatatgttagaaaaaggtatagtagatccaactaaagtaactcgttcagcgttacaacatgcagcaagtgtagctgctatgttcttaacaactgaagcagtcgttgctagtattccagagccagaaaataatgaacaaccaggaatgggtggcatgccaggtatgatgtaa

SEQ ID NO: 6283 - DNA, 285 bp, Staphylococcus epidermidis
atgtttatcctttggttattagaaaattatccacttggattaatagtattatgtgacacacacacaaacattaataaagatatttcaacgcattcattccgtcacacgcattgtgcattacttattgcggctggtgtacacattaaagaaattcaagaacgactacgccataaagatatcaataccacaatgaacatctacgcaaagattacaaaatcatataaaaaagacgcctcccaaaagtttagccaacttatgaaaaacgtctcaaaagatttattttaa

SEQ ID NO: 6284 - DNA, 390 bp, Staphylococcus epidermidis
atgagcaatcaatatagtaagaattatgttgatagtattgttgcatctacgaatatgatttttaaatatgcttatgatatgaagttaattaaagtattaccacatgagagaattaaaagacctaaaaaacgtttttctgttgaagaattagaaagctctgaatttaaaaagaagtttttagagaaagatgagctacttgagtttctaaatgtggctaaaaatcaacatgctccactcaatagctttgaagtatttaccacactagcttacacaggttgtcgtgcaggtgagatactagagttgaagtggtctgatattgactttgaaaacaatacaattagtattactaaaacctattacaatccgaataacaataagaaaaagtattaa

SEQ ID NO: 6285 - DNA, 222 bp, Staphylococcus epidermidis
atggcaacatatgaaaagcgtggtaatacatggcgatatcgtatttccacaggtaagaatccaactactgggaaatataaaattatatctaaatcaggctttaaacgtaaatcagatgccaaacatcatgccgaaatggtcgaacatcaattaagaaatagcgactatattgcaccatctacatatacatttaaaaaaatcgcaagtgcatggcttaaataa

SEQ ID NO: 6286 - DNA, 393 bp, Staphylococcus epidermidis
atgttagaagataaaaacgatattagacttttatatcaatcaattcaagaattagcatcagaaatgggacaaagccaactaaacactaaaactgttagtttaatatttttagaaatggatttaaaatatagtgtttttgaggaggttcaagctaatttccataaatatatcgctcatagaaattctaatgaaattatgtatttagatttagttaaaataattaattctgctctgcctacagatagagagttatcatcggtaataattaatcagataattataggttttgctaataattattatccaatattaaaggagattgctagcaacattataagtgaagaaggacatacaatctataaacattttaatcctaaaaatatagatgattaa

SEQ ID NO: 6287 - DNA, 471 bp, Staphylococcus epidermidis
gtgaatttaagtaaaagtattggatcgctagttttaagtgctattgtagtttcttcagtttcccctttagcaaatgcgaatgaagttcaagaaagttctcaaaaagtataccaaccacaatatgtaaatgttgatggtgttaaaattaatcgaaatcccgatttacctcaaaatcctcaagctcaagaacgaatcggagcaacaaaagtagcaattaaatttataataaatcataaaagcgatgcaagaaaagtaattaaaaaagtcggtggcaataaagcggctaacttgtttgataaagcttattcacctatagtgaaagaattgaaaccattacttaaattgtcagatgtaccagctcaagctgttggagacgctgcatatcgaggagctttaaatgctggtttaagtaagggaaatgccgggataatatcaacaactattaaagaatcaatatcatggttattttaa

SEQ ID NO: 6288 - DNA, 816 bp, Staphylococcus epidermidis
atgaatgatgaaactaaaataaaaaatttatcgcaagctatacaatattcagaagaatttatatatcatcaaagtacatatataaatgaacattaccaagaattaaatctagattttaatattcaaatacttatgaatttcttttattcaattatcgaaacttcagatggtatatattctttgatgtatgacaaaaatattggatcaatcaatgctttatcaagaattcaatacgaatctgtaatacaattcttaactatgctagagggagattttaaagtaaatatattaagttatgaatatcatcaaatcaaagatattgtgaataaaaacaattatttacttagcgtcaataaaatgtttagccaaccttattttaaaatggaacaagaaaagtggaaaaatgctttaaaagatgaaaaatttaatgtagttaaaaaacaactacctaaaaataaaaaatttacaaattggtttaatgtgaccaaaggcaagccaacttctataaaacaactaattaagaattattttaagtctacaaagttattggataaacaagcagtagaaatgtattatagtttactatctggaaatattcataatcataatgttaatagattcatagagaataattcattattaccaatccgtagagataatttaatagattcatcaatagaattagttacaagttttttgatggcaagtttgataagttttgttgaatttcttgaaaatgaattgaacattaaaacaaaaaacaaagaagaactaacgagtttcttcaaaaacagtttaactgaaatgaaaaaatag

SEQ ID NO: 6289 - DNA, 300 bp, Staphylococcus epidermidis
gtgaaagagaatgacctagcacatggagaatttggtaagtggcttgcgaaagtgaatttaaatcattgggtagcacagaagatgattaagattgcttctaatccagagttaaatacgacgatgtcgtcgcatttaggaatggaagcactttatgaaatctcgaccttacccgaaccagaacacactaaggaacacacaacatcaaatggcgaaataaagacactagatgagatgacggtacgtgaattacttgagttaaagaaacaacttaagcaacgaatggaggtgaattttatatga

SEQ ID NO: 6290 - DNA, 1269 bp, Staphylococcus epidermidis
atgaaagacatcaaaactaataattcgaaattaatacaaacatatttaagtaagaaaactataagatatggcacagcaagtgcattaacattggcactctatttatttaacagtaacgtaactgcatatgcgaatgaaaatactgcaaatcaaaatcaagaaacatcaccaaaaacttcacaaacagcacctataagtaataaagaaaatacagattcaacagctgtaacaacagatcaaaataataatgatgaagaagaatacgatgcgtcatatgaattaccaattctttatgtaactgtctggctagatgatcaaggaaatatcattaaagatgctgtggaagatgctaaaacccctgcttcagaaaggcaaccggtgaaaattcctggttaccaacattatagaacctctgtgagtgacggaatcactaaatttatttatcgtaaaattagcacagcacaatcacctatagttgaaaataatcaacaagataataatacaaataaagttgttgaaacaaccaatcaaaataaagatgaagtgaatgaaaaagaacaaaatcaagcaaatacttcagtaacaaatacacaaattaacaaaaacgagaaagatgaagacacaaatacaccacagaaagataaagacgagaaagacacaaaaactccgaagaaagatagagaggagaaaaaaccagtaataccaaaaagcggtaaagacgagaaagaatctaaagacagaaaaacaccaaaaaaagacaaaaaagagaaaatcacaaaaactccgaagaaagatagagaggagaaaaaaccagtaataccaagtaacggtaaagacgagaaagacgaagacagaaaaacaccaaaaaaagacaaaaaagagaaaatcacaaaaactccgaagaaagatagagaggagaaaaaaccagtaataccaagtaacggtaaagtcgagaaagccgaagacagaaaaacaccaaaaaaagacaaaaaagagaaaatcacaaaaacttcgaagaaagataaagaggagaaaagcccagtaataccaaaaaacggtaaagacgagaaaaaatctaaagacacaaaaataactaagaaagacaaagaagacgaaattacaacaacttctaagaaagataataacaatgatgtacaagataaattaccggaaacaggtaaaacaaacgatattcaaaatcctgctttaataatgttacttgctggtttaggtttattaggattatttagaaataaaataagagaatag

SEQ ID NO: 6291 - DNA, 1290 bp, Staphylococcus epidermidis
atgatgaatccattagcccaaaaattgaatgatgaaataaagcaatcaagtccagaagtattagatatgatgtcacaattaggtaaagatatgttttatccaaaaggaattttatcgcaatctgccgaagcaaaacgcacaacatataatgctactattggtatggcaaccaaaaaagaaggtaaaatgtacgcaaattcacttaaccaaatgtttaatgaccttacaccggatgaaattttcccatatgcacctcctcaaggtgtagaggaattacgtgatttatggcagaaaaaaatgcttaaagaaaatcccgacttaaagtctaaatctatctctcgtcccatcgttacaaatgctctcacgcacggtctttctctagtagctgatttatttgtagatacagatgataccgtcttattaccgacacacaactggggcaattataaacttgtatttagcacacgtcacggtgctcatatcgatacgtattctatttttgatgactcaggacacttcactacatctgaacttgtaaaaacattaaaagaatataaaaaagacaaagtgattattattttaaattatcctaataacccaactggttacacaccaaataaagaagaagttaatactattgtaaatgcaattgaagaactagctaataaaggtactaaagtagtaactgttgtcgatgatgcatactatgggttattttatgaagaagtttaccaacagtcgattttcacggctttaacacaggtgaaatcttcaaaccttttaccagtgcgtttggatggagctactaaagaattcttctcttgggggttccgcgttggctttatgacgtttggaattgatcataaaacgttaaaaaatgcgctagaagctaaagtaaaaggattaattcgtagcaatatttcaagttctccactaccttctcaaagtgcaatcaaacatgtacttaaacatcatgagcaatttgataaagaaatcgatcaaaatatcaatattttaaaagaacgctacgaagtaactaaacaagtagtatatgataataaatatgccaaatattggcaagcctatgactttaattcaggatactttatgtcattgaaattaaatcaagtcgatccagaagaattacgtaaacatttaattaataactattcaattggtattattgctttaaatagcacagatattcgtattgcctttagttgtgtagaaaaagaagatattccttatgtctttgagtctattgctaatgcaattgatgatattaaataa

SEQ ID NO: 6292 - DNA, 171 bp, Staphylococcus epidermidis; identical to SEQ ID NO: 4392

SEQ ID NO: 6293 - DNA, 378 bp, Staphylococcus epidermidis; identical to SEQ ID NO: 4393

SEQ ID NO: 6294 - DNA, 915 bp, Staphylococcus epidermidis
atgaacgcgatagaacttaaagatgttaattatcgatctaacgcatttcaattgcaagatgtctccttcaatgttcctaaaggatatgttacaggttttataggtggaaatggtgcggggaaaactacaataatacgattaattatggatttaattcaatctgaaagtggtacaatctctgtttttgagaaagatataaaaattcatcctcgtgaaataaaaaataaaattggatttgtgtattctgagatttattttaatcaaaaatggacagtaaaaaaattagaaaatatcattgcccctttttatgatcgttgggatcatgaaatatttataaagtatttaaaattttttcagctgccatataaaaataaaataaaaactttctcaaccggtatgaaaatgaaactatcattagcaattgcattcagtcatcatgcagaattatttatcttagatgaaccaacttcagggttagacccattaataagaaatgaattacttgaaattattcaacaagaattgatagatgaaaataaaacagttttcttttcaacacatattatttctgatttggaaaaaattgcagattatatcgtttttctcagtgagggtgaaatcatattcaatgagtctagggataaactatcgcaaaaatacaaaatcgttagtggttctaatgaagacttagatgaagagttggacgaacttttgatttacaaagaaagtaagcaaacaggctatattggtttaacagaatattatcaaacatttaatgaattgtttggtagtggtgttgaaataaaagatgcatctatagaacaattgatgatttatttagaaaaaagtaaacataaacgaaatacaaattcaaaatacaaagtgagatttaactatgaagcaattaatgattag

SEQ ID NO: 6295 - DNA, 648 bp, Staphylococcus epidermidis
atgattagaaacttaaaattacgtagctggacactaattatttacgcattattgcttttattctttcccatttatcatttgttaaataaagatacaccactatattcaattatctcaggaccaatcggattaatactgacgatgatatgtttgatagatataggtcatttattcagagttaatcgtagattaggtggttcatcttcatattatttcttttatagtttgcctgtatcaaagagagatttgcttaacgctaattacatgacatgcattttattaacttttataggtgcgcttatcattagtttatatggatacaacacaagcacaataaaaacagattcgatttatttttcgacgactttttcattcatagtagggaatttcttttctatacctatagcgtttagtaagagtactgaacgtaaagatcgagatattccatatatagcttatattgtaggaattatggtggttctgccatttactttatcggtcatttttatcttaatcaattatcttacacacaatgatagccatatcccaatgatatactcatatttcttaaattatggtctattagttgtaagtagcattttcttagtcattaattatttgattcaaattaaaaaaataaagtattaa

SEQ ID NO: 6296 - DNA, 873 bp, Staphylococcus epidermidis
atgaaattacaacatattaccaaaaaatatggtcaaaatactgttttagacgatatagattttgatttcggcgagagtcaaatcgttggtcttatcggtaaaaatggagttggtaaaacaactttgatgaaggtcatgaataataacatcattaactatcaagggaaagtcgacatgcctaaaagtgagaatgttggttatttaattgagcatcctaagttatatggaaacaagacaggtttatttaatttaaaattatttgcacaagtattaggcgatggtttcgataaggaatatgcaaatcatattattgaagcttttggaatgaaaccatatatcaagaaaaaagttaacaaatattcaatgggaatgaaacaaaaattatcaattgcagtttcattaatgaataaacctaaatacttaattttagatgaacctacaaatggtatggatccagatggttcgatagatgtattaaagacaattcaatcacttgttcaacaattagaaatgaaaatattaatctcaagtcataaattagaagacattgaattgatttgtgatagagcagtatttcttagagatggtaagttcgttcaagatgtagatatgaaagatgggggaccagaggatagtactattcttactttacaaaaagatgactttaataaagctttagattctctttctgaaaactttaaagtacagcagtctcaaaaagaatcgggagaaattatcattaaagctcaaaatgattatagagagttacttaaatcgttatcccaactagatatttatccaaaatatattgaaacacgtaaaagttcactacgtgatacttactttaatattaatcaaagaggtgataaataa

SEQ ID NO: 6297 - DNA, 732 bp, Staphylococcus epidermidis
atgaagagcttacaattagtcaaatatgatttaattagtatacttaaaagtccgtatacttatttagcatttatacttgtaattggaatgacggtattccaagctagcatgatggcaaattatagttctgcacataaagttaatatagatatggtttttaatttagctaattggcttttcttgtttgctggacttttattcattataaaaacaataacaagagattactcacaaggtactatacaattgtttatgagcagaataactagcagaatgggctatatcattactaaaacagtatccattgtattaatttcattcttatttacaattattcactacttggtaataattattatacaatctacaactaaaagtgaaaaaatggatggagatagatttttaaataatatttggttttaccttattttctttttattctttggattattcttattactaatcactttaatagtagaaaaacctgctgtcatatttactctaggtattttcttaatactcatcgttccgtttattcagccatttattccaatgattccgaatattggcgatgatattcaggattcatttaaatatataccatttacgtatttaactgaaaaaatgactggtgagattaaattctctaattggcaatggtttatctctattgcatcaatagtggtcttatttattgcaaatatgttatatgcatcaaagagggatatttaa

SEQ ID NO: 6298 - DNA, 366 bp, Staphylococcus epidermidis
atgatgaacattccaatattaaagcatactattgaatttctgaacatcaaagcaagaatatttcatagagatgatgatacacatttgattgatcaatatttaacaaatggtaaatcaagggctatccctatctttgtcttcatgaacgattcattcgaacaattgacagtttggagaccaagagcaaaagaagtacaaagttttgtcaataaaattagaagtaataaattgccagataaaacccatcctaattttgaggatcgacttaaaaaaacacatatcattattagtcaaagatatagaactgattcaatattttggaaatcaatttttaacccaataattaatcaacttttatataaataa

SEQ ID NO: 6299 - DNA, 486 bp, Staphylococcus epidermidis
gtgcgaattcaaagtagatggttaatattcgctatttttttaactggagctatttctttattgataggtttgacttattacaaaagtataaaatctgtggatttatctggttacagtgtgaatcaaattagtttaaatcatggttttaatccaaaaggatttgtggttaataagaaaattaaattagatagatataccttttacaatgataaaaatcataaagattttacagtaaaagtaaaaaataaaacgcataaggttaaaggcatggttttagtcaaagatgataaagttgaaacaaattttggtattaaaatgggtgacccaattgataaagtcatcaataaattgggagaaaactacaagattaataaagtagggaaaaattatcactcaatgacttatgtagaccgttttaataaattaaaattaaacattttatataaagataacattgttaaaagaattgagttctttagtaaataa

SEQ ID NO: 6300 - DNA, 558 bp, Staphylococcus epidermidis; identical to SEQ ID NO: 4400

SEQ ID NO: 6301 - DNA, 837 bp, Staphylococcus epidermidis
atgaaaaagctttttattagtggtttaatcatatttattattttctttgctagtggtgctatgacttggtttactatagataaaaataaatacgataatcgacattataccaaaacaataaatagcaaaattgaacatttatctataagtacagtaacaaccaatgttaatataatttctggaaaaaaattagctgtttattttactggagataataaaataaatgttacaaaaaataataaaaggttaagtattaaagaaaaacgtgcagtagatagaggatatggattaaattttaatccatttcactcaaacaatagaaagctaacaattgttgtaccagaaaaagaccttaaatctcttaatattcaatcgttattgggagaaattgatttaaatcaagtgaatttgaaacatgtttcattggaaacagatagaattatacaacttaaacgatctgaactcaatcaggtaaacatcgaatcttctaaagcaaatttttatattacagactgtttaatcagggaaggtcgtatgaagcttgataagggtataactcatgttaaaaatagtacattaagtgatactgttttcttggttaatagaggagatatttctatgacggacatgaaatctagcaatgatataaaagcttctacacaaagaggtaatattaattatcgttttggcgaaaaacctaaaaacaccttgcttaaacttcatcctggtcatggaaataaggaaattaaaaatcgatatttcgataaaggaaaagtgggaagcagcgataatatattagaattttacactgtagatggtgatattaaaattgaataa

SEQ ID NO: 6302 - DNA, 1041 bp, Staphylococcus epidermidis
atgcaaaaagtacgttctgatataatgactcatcgtggttctcactatgatttaggagtaaagactgctctttggttacaaaccactcctttattaaaaaatcgaaataaagaatggcgaaagagaattccacgttttgatattgatgtcaaggaaacctatgatatatttcaaatctattcgccacagatttgggaagaaataattggtatgcaagatgtattgaatctacctacaaaacaaatgattttaaattttggccattatcgatttactgatttaaaggacagtggttgcacagtatataaaggtcgtgattttttagtccgaaattatgattatcatcctgcaacatatgatggtagatacttattatttcaacctaatgacgggggattatctcaaataggaccgacttcaagagtgactggtagaatggatggtatgaacgagtatggtttagttatggcatataattttatgcatcgtaaaaagcctgcaaatggatttgtatgttacatggttggtcggctaatacttgaaaattgcaaaaatgtaactgaagcaatcaaatttttaaaggaagtaccgcatcgtagttcattcagttatatactaatggatagacattcgaattatgccattgtcgaagttacacctcgatcaatagatgtaaggtatgaacatatatgcacaaatcattttgaattgcttacccatgaaaatagaaactatacaagagaatctaaagaacgcttaaatcgtgtaataaataaaacaactccttctacaaacaaagatatcgcattcaaattatttaacgacccgcaatacgaaatctatagcaaactatttaaaagttggtctggtacaattcatacttcactatatgaacctaattcattaatagcatggatgacattaggtcaaaacagtcatccaacctcaatcaatttttctaattggttaaaaggaaagaaattgaacataaattactttgaaggcgaaatagatacaccattaacttttgccacacactaa

SEQ ID NO: 6303 - DNA, 171 bp, Staphylococcus epidermidis
atgtggaactttattaaagggttattcaaatttgtctttagtttattagctattactacagtagtagtaggcatcggtgtagttgcctttgcttatatttttaaaaaagactttgaagatatcgaaagaaaaacgaaagaaatcgtttctgatatcgaaaacaacaattaa

SEQ ID NO: 6304 - DNA, 399 bp, Staphylococcus epidermidis
atgaaagatatatttaatgaaatggattaccgtaatataccacgagacatgctagataaaaatattcctaccggtcgtggtatggttaaatgggcaccattcgcaactttaccagaacagtttgaaacaatttatcaatatatgatagatcaaaataaagtgagcagaccagtgctttcagacgaccaactttcgcaactaaatatacatttacatgaagcactacaacaatcacgcccagtcaatatcaaatattacgaagaaggatatattaattttatagagctcattgtacatcggattgattcaataaattatgagattgaaggtactgctcctcattcaagagaacgtcataaagtttcatttttagatattatagatatttcttttatataa

SEQ ID NO: 6305 - DNA, 1029 bp, Staphylococcus epidermidis
atgacattaggttatataggttcttatactaaaaagagtggtaaaggtatatatcgcttcaaactaaatgacgaaacaggagttattgaagcgttagaaactggttatgaaattgaagcgtcaacttatcttactcgtaatgaatcgtttttatatgcgattactaaagaaggtgaagaatgtggtgtagctagttttagtattaaagaagatggacaactggaattaattaataaatgtctagaatcaaaacagggaactggttgttacattcaagtgtctagtaatggtaaatatttatttgaagcggtttatggtgcaggacttgcaaggatttataaattaaatcaaattacgggagcaatagagaaattaatagaagaacttgcgcatgaatttccaactggctcacatgaaagacaagattcatcacatgttcattttttaaatgaaacacctgatcataagtatgttgtagctactgatttaggtacagatagagttgtaacatacaaatttggtgaggatggtttaaaacaatatgcagtttctcaattcaaaaattcagacgggcctcgccacatcgcttttagtaatgatggacgacacgcgtatatcgttcacgagctatcaaatgaggtgagtgttacagaataccaagacggtaagttcattgagctagagagacattcaactattccaagtgactttaacggggaatcgaaattagcagcagtgagactatcacatgatgggaagcacttatatataagtaatagagggcatgatagtattgctatatttgaagttttagaagatggcagatcactgagaagtattgaaatacaaccaagttacgatgcctttccaagagactttaatataactgaatcagataactatttaatttgcgcacatcaagaaggagaatcaaaagtttcaatttttgagcgtgataacataactggtaaactttcattaaaagataaaaaagctatagcaaatgaaggtgtttgtgtactactataa

SEQ ID NO: 6306 - DNA, 1380 bp, Staphylococcus epidermidis
atgacaataattagagataaatttaacaatagtaaagctttttttaatacgcataaaacaaaaaaccttaaatttcgaaaacaacaacttaaattactaagtaaaaatatcaaaaatcatgaaaatgaattattagatgccttatataaagatttaggtaaaagtaaggttgaagcatacgcaaccgaaattggtatgcttttgaaaagcataaagttaatgcgcaaagagttaaaaaattggtcgaaaaccaaacaaacggatacaccactctacttattccctacaaagagttatattaaaaaagaaccctacggtacggtgcttattataggaccatttaattatccggttcaattagttttcgagcctctcatcggagcaatagctgccggaaatactgctatagttaaaccttcagagttaacacctcatgttgccattgtgatcaaggacatcattgaagatacatttgatgaagcatacgtttctgttgttgaaggtggcattgaagaaacccaagcgttattaagtttaccatttgattatatgttctttactggcagtgaaaaagtcggaaaaattgtttatgaagctgcagcaagaaaattaattccagttactcttgaacttggcggtaaatcacctgtcattgtcgatgatacagccaatatcaaagtagcgagtgaacgtattagttttggtaaatttactaatgctggtcaaacatgtgtcgctccagattatatattagttcagcggaaagttaaaaatgatttaataaaagctcttaaaaaaacaattactgaattttacggagaaaatattgaaaaaagccctgatttcggacggattgttaatcaaaaacactttaatcggttgaatgacttgattcaaattcataaagataatgttgtttttggaggtaatagttctaaagaagatttatatattgaacctactttattggataacataaccaatgacaataaaatcatgaaagaagaaatattcggtcccattttgcctattattacttatgataatttcgatgaagtacttgaaatcatccaaagtaaatcaaaaccactaagtttgtatctttttagcgaagatgaaaacatgacacatagagtggttgaagaattatcattcgggggcggtgcaattaacgatacgttaatgcatttagctaatcctaacttacctttcggtggtgtaggttcttcaggcataggtcaatatcatggtaagtattcttttgatacatttagtcatatgaaatcatacacatttaaatctacacgtctagaatcgagtttatttttccctccatataaaggtaaatttaaatatattaaaaccttcttcaagaactag

SEQ ID NO: 6307 - DNA, 930 bp, Staphylococcus epidermidis
atgacaaaaacttttattttcgggcacaaaaatccagatactgatgctatttcttcagctttaattatggctgattttgagcaacaaactggtaatactgaagcaaaagcttatcgtttaggtgaaataagtgcggaaactcaatttgcactagattattttaacgtagaagctccagaattattaaacgaagatttaaaaggacaagatgttattttagtcgaccataacgagtttcaacaaagtgcagatactatttcaaacgctacaattaaacatgtgatagatcatcacagaatttctaactttgaaacagctggccctttatactatagagcagaaccagttggttgtagtgcaacaattttatataaaatgtataaagaacgtggatttgaaattaaaccagaaatcgctggacttatgatttcagctataatttctgatagtttattatttaaatcacctacctgcacaaaagaagatgtagatgctgctcaagcacttaaagatattgcaaatgttgatttagaagcatatggtttagaaatgttaaaagcaggtgcttcaactacagataaatctgctgaaacacttgtcaatatggatgctaaatcattcaatatgggagattatgtaacacgtattgctcaagtcaatactgtagatattgatgaagttttagatcgtaaagaggaatttgaaaaagttatgttagaaatgagtgccaatgaaaaatacgatttattcgttcttgtagttactgatattattaacagcgattctaaaatccttgtagttggtgctgaaaaagataaagttggagaagcatttaaagtacaactagatgatggtatggctttcttatctggcgttgtatcacgaaaaaaacaagttgttcctcaaatcactgaagttttaactcaataa

SEQ ID NO: 6308 - DNA, 555 bp, Staphylococcus epidermidis
atgagtaacaaagcattaatcattgtagattactcttttgattttattgacgataatggtaaattaacatgtggcaaacctggacaagaaattgaaacttttattactcagcgtataaaaaattatcataataatcaacaggaaatatttttcctaatggacttgcattatgaaaatgataaatttcatcctgaaagtaaattattccccaatcataatattcatcaaacaccaggtcgtgagttatatggcgaggtaggtagattatacaactcaattaaagaccaaatgaatgtacattatttagataaaacgagatacgattcattctacggtacaccattagatagtttattacgtgaaagacaaatcaatgatattgaaattgtgggtgtttgcacggatatttgtattttgcataccgctgtttcagcatacaatttaggttataacatcactatcccaattagaggcgtagcatcttttaatcaagatggtcatcaatgggcactctcccattttaaaaattctcttggtgcaaaagtagaagattaa

SEQ ID NO: 6309 - DNA, 1098 bp, Staphylococcus epidermidis
atgtttatcaatgcaaaagatttcggattaaaaggaaaaagtaaatataaggatacaagagcgattcaaaaagcattaaattacgcaaaaaaaggcagacacactgtttatatacctaaaggaacttattatatcagaaaagctttagttatttatgattctacaacattgttattggaagaaggtgcaacacttttaagaaaagggaaagatgcattattaaaaaatggtagacgcttaaagctatatcatggctataatggaaatagtcacatttatattaaaggaggaacttttgatatgaatggaggcgaatatccatataataatacagccatgtgcatgggacatgcagaagacattcaaattttaggtgtaacattcaaaaatattgttggagggcatgcactcgacgcatgcggaatcaatggtttacacatatcagaatgtgaatttaaaggatttcttgatattgatggagatcgttctttttctgaagcagtacaattggacatacaagtacctggtgcttttcctaaatttggaactacagatggaacgattacgaaaaatgttgtcattgaaaaatgttattttggctgttcagatcatcctaaaatgaaagcgtggaatagagctattggctctcatgccagtagatataactgctattatgaaaacattcatatcaatcaaaacatctttgataatttaaatgagtatgctttaactcctctaaagtcaaaagacacatttattacaaaaaataaatttataaattgtaatggtggaataagatttcttggagtgaaggatggtaaaaatgctgccgatcctattacaggacaagtgatggaaactcaagctggtgagaatttcaatgtgataggtaatacttttattggtaagatgaaaagagatgcgattcatattagaagttatcatcacgtccaacatcaaaacgtttttatagcggcaaatcaatttgaagatgcttcacaatcaatacatttagaaaatattaatggacttactttaaatcaggaacaaacaaaaatcaaaatcaagagtattgatgtgaaaaacatcagtaattaa

SEQ ID NO: 6310 - DNA, 804 bp, Staphylococcus epidermidis
atgcatttatattatctaggacctaaaggaactttttcatatctagccgctaagcaatttgaatcacatgaacagtatgacttcattccattatctaacttgcatgaagtcattcaatccgtatctaaagataaacaggctgtcggaattgtccctattgaaaactctattgaaggtactattaacattgtcgctgattcattagcacatcatgatgtatacgcacatggtgaaattcaactagatatagatttttcactttacggtcatcattcaaattcacttgatgatattcataaagtatattcaattgctccagcaatcagtcaaacaataaactacattcatcgtcaacagtttgactatgattatgtagatagcactattcaaagccttaacatgataaaagatggtattggagcaatagctcctcttgggagtggggaaacttatggctaccatactttagatcaacatatacaagattaccctcataatgtaactagatttttagtagtgaaaaatcatactcattttattgaacatccaaacacaactatcttccttatcacgcctaagtatgataagccaggacttttagctagtgttttaaatacttttactttattcaacataaatttatcgtggattgaatctagaccacttaaaactcaattaggtatgtatcatttttatgttcaagccgatactgctataaataatgatgtgaataaaattatttcaattttagagactttggattttcaagttaaaattatcggcgcttttaataagaaaaactaa

SEQ ID NO: 6311 - DNA, 1068 bp, Staphylococcus epidermidis
atgctaatagataaagcaagatcatttattcagaccatgtatagcgaattaaaatataatactaatgaagttgaaaatagaatgaaagagattgagcaagaaattaacttgactggtagttacacacatacttatgaagaattatcttacggtgcaaaaatggcatggagaaactcaaatcgttgtattggtagactgttttggggttctttaaatgttaaagatgcccgagatgtatgtgacgaaaaagaatttataaaatttatacatacacatattaaagaagctactaacggtggaaaaatcaaaccatatattacaatttttagtcctgaagatacacctaaaatttataataatcagttgattcgttatgctggttatgaaaatgttggcgatccatctgaaaaaaaggttactcgtttagctgaacatctaggttggaaaggtaaaggttcaaattttgatattttacctctgatttatcaattgcctaacgacactataaaaatacacgaacttccaagtgatattgtaaaagaagtttctatacatcatgaacactatcccaagctttcaaaattaggtttaaaatggtatgcggtacctattatttcaaatatggatttaaaaatcggtggtattacttaccctacagcaccttttaatggatggtatatggtaaccgaaattgctgtacgtaatttcacagacacctatcgttataatcttttagaaaaagttgcagaagcttttgaatttgatacacttaaaaataattcatttaataaagatcgagcactcgtagagttaaatcatgctgtgtatcattcatttaaagctgatggtgtttctattgttgaccacttaactgcagcgaagcaatttgaaatgtttgaacgaaatgaacatcaacaaaacagagatgttactggtaagtggtcttggctggcacctccactttcaccaactttaacttctaactatcatcatggatatgataatacaatgcatcatacgaatttcttctataaaaaagaagaacctatgaagtgccctttccattaa

SEQ ID NO: 6312 - DNA, 1470 bp, Staphylococcus epidermidis
gtgtaccaatataacgacgatagcttaatgttacacaatgatttatatcaaattaatatggctgaaagctactggaatgatggtatccatgaaagaatagcagtgtttgatttgtattttcgaaaaatgccatttaatagtggatatgcggtattcaacggattgaaacgcgttgtgaatttcatcgaaaactttgggtttacaaatgaagatatcacatatttaaaatcgataggttacgaagaagattttctaaactacctaaaagatttgaaatttacagggaatattaaatctatgcaagaaggtgaaatttgttttggtaatgagccattattaagagttgaagcacctttaatccaagcgcaacttattgaaactattttgttaaatatcattaatttccaaacattaattgcaactaaagccagccgaattcgtcaaatagcaacgcatgacactttgatggaatttggtacaagaagagctcaagagatcgatgctgcactgtggggcgctagagcagcctttattggagggtttgattctacaagtaatgttagagcaggaaaactttttaatatacctgtatctggcacacatgcacacgcactagtacaaacatatggtgatgagtatatagcattcaaaaagtatgctgagcgacataaaaattgtgtgttcttagttgatactttccatactttaaaatcaggagtaccaaccgcaattaaggttgcaaaagagttaggagatactattaattttataggtatcagattagattctggtgatattgcgtacctatctaaagaagctcgtagaatgttagatgaggctggttttacagaagctaaaattatcgcatcaaatgatttggatgagcagactattacaagtttaaaagcacaaggcgctaaagttgacggatggggagtaggtacaaaactgattacaggatatgatcaaccagccttaggcgcagtttataaattggtttctattgaaacagatgatggcacaatgagtgatcgcattaaattatcaaataatgctgagaaagttactacaccaggcaaaaaaaatgtttatcgtattattaataataaaacaggcaaggctgagggcgactatattacgctagaaggtgaaaatcctaatgacgaatctccattgaaaatgttccatcctgttcacacttacaaaatgaagtttattaaatcatttaaagcggttaatctacatcaatctatatttgaaaatggcaaacttgtataccatcttccagatgaatatgaagctcaggactatcttaaaaataatttaagtattttatgggaagaaaataaacgatatcttaacccgcaagattatccagtagatttaagcactaaatgttgggaaaataagcataagcgtatttttgaagttgctgaacacgttaaagagatggaggatgaaaatgagtag

SEQ ID NO: 6313 - DNA, 828 bp, Staphylococcus epidermidis
atgagtagattgcaagatgttgtggttaatgaaatgaaagtaaaaaaacaaattgacagtgtagaggaaatccaggaaattaagcaatttattaaagcgtatgtaaaatcacattcatttatacaaactcttgttcttggaatatcaggtggtcaagactctactctaacaggtaagttagcacaattagcagtaaatgaattgaaagaagagggacgtaactgtaaatttatagcagtgaaattaccttatggtgtgcaacaagacgctcatgaagtagaagatgcacttgagtttattaatcctgacacaacatatacagttaatattaaaccagcagttgatcagagtgttcaatcacttagtgaagcaggcatcaaacttactgattttcaaaagggtaatgaaaaagcacgtgaacgaatgaaagttcaattttcaattgcttctaatactcaaggtatagttttaggaactgatcactctgccgaaaatattacaggattttacactaaatatggagatggtgctgcggatattgcgcctatctttgggttaaataaaagacaaggtaaacaattactagcttatctaggagcacctaaacacctttatgaaaaagtgccaacagctgatttagaagatgataaacctcagttaccagacgaggaagcactaggcgtatcttatcatgatattgatgattatttagaaggtaaagaaattcctggaactgctcgtgaaacaatcgaaaaacattatgttagaaatgcacataagcgtgaacttgcttatacacgatattcatggcctaaatataacaaatga

SEQ ID NO: 6314 - DNA, 627 bp, Staphylococcus epidermidis
atgtcagcaattgctcaaaatccatggttaatggtcttagcaatttttataattaatgtatgttatgtcacatttttaacaatgagaacgatattgactttgaaaggttatcgttatgttgcagcagtagttagttttatggaagtcttagtttatgttgttggtttagggttagtaatgtctagcctagaccaaatccaaaatatttttgcttatgcattaggattctcagtcggtattatagtaggaatgaaaatcgaggaaaaacttgcgttgggttatacagttgtcaatgttacttcatcggaatatgagttagatttaccaaatgaattaagaaatttagggtatggtgtaacccactacgaagcatttggtagagatggaagtcgaatggtaatgcaaatattaacaccaagaaaatatgaattaaagttaatggatactgtcaaaaacttagatcccaaggcatttattatagcgtatgaaccaagaaatattcacggaggattctgggttaagggtgtacgtaaacgtaaactgaaagcttatgaaccagaacaactggaagttgtagtagatcacgaagaaatagtaggtggtagctcaaatgagcaaaaagtttag

SEQ ID NO: 6315 - DNA, 180 bp, Staphylococcus epidermidis; identical to SEQ ID NO: 4425

SEQ ID NO: 6316 - DNA, 1296 bp, Staphylococcus epidermidis
atgatagaacgttattcaagagatgaaatgtctagtatttggacggatcaaaatcgctatgaagcatggttagaagtagagattctagcgtgtgaagcatggagtgagttaggttatattcctaaagaagatgtaaaaaaaattcgtgaaaatgccaaagtaaatgttgaacgcgctaaagaaattgaacaagaaacacgacacgatgtagttgcatttacacgccaagtttctgaaactttaggtgatgaacgtaagtgggtacattatggattaacttccactgatgtagttgacactgccttaagttatgtaattaaacaggcaaacgaaatccttgaaaaagatttagaaagatttatagatgtattagctgctaaagctaaaaaatatcaatatacattgatgatggggcgtacacatggagttcatgctgagcctacaacttttggcgtaaaaatggctctttggtatactgaaatgaaacgtaatcttaagcgttttaaagaagtgcgtaaagaaatagaagtagggaaaatgagtggagcagtaggaacatttgccaatattccacccgaaattgaggcttacgtatgtgaacatttaggaatagacactgcagctgtttctactcaaacattacaaagagatcgtcatgcttattacattgctacattagcactaattgctacatcaatggaaaaatttgcagtagaaattcgtaatttacaaaaaactgaaactagagaagtcgaagaggcatttgcaaaaggacaaaaaggatcatcagcaatgccacataaaagaaatccaatcggttctgaaaatattacaggtatatctcgtgtgattcgaggatatattactactgcatacgagaatatacctttatggcatgaaagagatatctctcattcttctgcagaacgtatcatgttaccagatgttacaattgctctagattatgcacttaatcgatttacgaatattgttgatcgactaacagtttatgaagataatatgagaaataatattgataaaacgtatggtttaatcttctcacaacgcgtactactagcattaattaataaaggcatggtacgtgaagaagcttatgataaagttcaacctaaagcaatggaatcttgggaaacaaaaacaccatttagagagctaattgaacaagattcatctataactgacgttctatcaagtgaagaattagatgattgcttcgatcctaagcatcatcttaatcaggtcgacactatattcgcgcgtgctggtttatcttaa

SEQ ID NO: 6317 - DNA, 303 bp, Staphylococcus epidermidis
atgcaaattgaaaaattaagaggtcagtcattagatgaattatttgatgcgatcttagcactagaaaacagagaagaatgttatcagtttttcgatgatttatgtactgtaaatgaaatacagtcattatctcagagacttcaagttgctaaaatgattaagcaaggttatacttatgcaactattgaagaagagtctggtgcatcgactgcaacgatttctagagtaaagcgttcgttacaatggggtaatgatgcttatacaatgattttggatagactaaatattgaaacaaaggcataa

SEQ ID NO: 6318 - DNA, 693 bp, Staphylococcus epidermidis; identical to SEQ ID NO: 4428

SEQ ID NO: 6319 - DNA, 2190 bp, Staphylococcus epidermidis
atgaatgcgctagtaaaaaatatgaattcagagcaaagtgaagcggttagaacaacagaaggcccattgcttattatggcaggtgctggatcaggaaagacacgtgtgttaacacatcgcattgcgtatttattagatgaaaaagatgtatcaccttataatattttagctattacgtttacaaataaagcagctaaagaaatgaaggcgcgtgtcgaacatcttgtgggagaagaagcgcaagtgatttggatgtccacttttcactctatgtgtgtaagaattctgagaagagatgctgatcgtattggcattgaaagaaatttcactatcattgatcctaccgatcaaaaatcagtgattaaagatgtattgaaaagtgaaaatatagacagtaagcgatttgagccacgtatgtttattggtgcaattagcaatttgaaaaatgaattaaaaacacctgaggatgctcaaaaagaggcgaatgattttcactctcaaatggttgcaacggtttacaaaggttatcaaagacagttatcacgtaatgaagcactcgactttgatgatttaattatgacaactattaatttatttgaacgtgtacccgaaactctagaatactatcaaaataaatttcaatatatacatgtagatgagtatcaagataccaataaagcacaatataccttagtaaaactattagcaaacaaatttaaaaatttatgtgttgttggtgattctgaccaatctatttatggttggagaggagctgatatacaaaatattttatcttttgaagaggactatcctgaggcaaagacaattttcctcgaacagaactatcgttcaactaagaatattttaaatgctgcaaatgaagttataaaacataattctgaacgtaaacctaaaggtctatggactgcaaattctggaggagacaaaattcagtattatgaagctatgactgaaagagatgaagcagaatacgttgttaaagaaataatgaagcatcaacgcagtggtaaaaaatatagtgaaatggctatattatatagaacaaatgcccaatcacgtgtacttgaggaaacatttatgaaatcaaatattccttatacaatggttgggggtcaaaagttctatgaccgtaaagaaattaaagatttacttagttatttaagagttattgctaatagcaatgatgatattagtttgcaacgtattattaacgtgcctaaacgtggtattggaccttcatctgttgaaaaaatccaaacctatgcacttcaaaataatataagtatgtttgacgcattggctgaggtagattttataggtctctctaaaaaggtaactcaagaatgtatcagtttttatgaaatgattcaaaatttaatcaaagaacaagaatttctcgaaattagtgaaatcgtagatgaagtactacaaaaatcaggctatagagacatgcttgatcgagaacaaagtattgaatcacgaagtcgattagaaaacttagatgaatttatgtctgtacctaaagattatgaggaaaatactcctttagaggaacaatcacttattaattttctaacagatttatcattagttgctgatattgacgaagcagatacacagaatagtgtaacattgatgacaatgcattcagcaaaaggtcttgaatttcctatagtttttattatgggaatggaggagtcgttgttcccacatatcagagcaataaaaagtgaagatgatcatgaaatggaagaggaacgtcgtatttgttatgtagcaattacacgagcagaagagttgctttatatcacaaatgcaacgaccagaatgttgtttggtcgttctcaatccaatatgccatctcgatttttaaaagaaatcccagaagacctacttgatagtcataccggtcaaaaaagacaaactatatatcccaaatctcaacctaaaagaggttttagtaagcgtactacatcaactaaaaaacaagtttcatcatctgattggaaagtaggagataaagttatgcataaagcatggggtgaagggatggttagtaacgtgaatgaaaaaaatggatctgtagagttggatattatatttaaatcagaaggtccaaaacgattattagctcagttcgcaccaataacaaagaaggaggactcatag

SEQ ID NO: 6320 - DNA, 1998 bp, Staphylococcus epidermidis
atgcaagatgttaaaaagcgtgtggaaaaattacatgacttattgaatcaatatagttatgaatattatgtacaagataatccctcagtgcctgacagtgagtatgataagttattacatgagctgattgaaattgaagaaaaatatccagaattcaaatcgacagactctccaacagtgcgtgtgggtggcgaagctcagtcttcttttgaaaaagtaaatcacgacacgcctatgttaagtttaggtaatgcttttaatgaagaagatttaagaaaatttgatcaacgtattcgtgatagtattggtaaggtcgaatacatgtgtgaacttaaaatagatggtttggctgtttcgctcaaatatgaaaatggtcgttttgttcaaggacttacacgtggtgatggtacgacaggtgaggatatcactgaaaatctaagaactatacatgctataccactaaaaattaaagaacctctcaattttgaggtccgtggggaagcttatatgccacgtcgttcattcattcatttgaataatgaaaaagaacaaaatggtgaacaaccttttgcaaatccacgaaacgctgctgcaggctctttaagacaacttgactctaaactagctgcgaaaagaaagttaagcgtcttcttatatagtgtgaatgacctaaccgagtttaatgcaacaacacaaagtgaagcgctagaggaattggaccaattaggttttaaaactaaccaagaacgtgaacgagtatcagatattgagggcgtacttaattatatagagaaatggacaagcaaaagaggatctttatcttacgatattgatggtattgttataaaagttaacgatttatctcaacaagaggaaatgggttatacgcaaaaatctccaagatgggcgattgcttataaatttccagctgaagaagttattacaaaattattggatattgagctaagtattgggcgtacgggtgttgtgacaccaactgcaattctagaacctgtaaaagtagctggtactacagtttcaagagcctcacttcataatgaagatttaatacatgaaagagatatacgtatcggagatagtgttgttattaaaaaagccggggacatcatccctgaagttgtaaaaagtattttagatagacgacctaacgaatcggaaatttatcatatgccaacacattgtcctagttgtggacatgaattagttcgtattgaaggagaagttgctttacgttgtattaatccaaaatgtcaggcacagcttattgaaggacttatacatttcgtttcaagacaagcgatgaatatagatggtttaggtactaaaattattcatcagctatacgaaaatcagttaatcaaagatgtcgcagatattttctatttgaaagaagaagatttattaccattagagagaatgggaaagaagaaagttgataatcttttattagcgatagaaaaatctaaagaacagtcattagagcatttattatttggactgggtattagacatttaggtgtaaaagctagtcaagtacttgctgagcgatatgaaacgatggatcaactttttaaagtaactgaaagtgaattaattgaaattcaagatattggagataaacttgcacaatctgttgtaacatatctcgaaaatagtgatattcgttcattaattgaaaaattaagtaataaaaatgttaatatgtcttataaaggaattaaaacaactgaaatcgaaggtcatcctgattttagtgggaaaacaattgtattaacagggaaactcgagcaaatgacgagaaatgaagcatctgaatggttgaaaatgcaaggtgctaaagttacaaacagcgtgactaaaagtactgatattgtcatagctggagcagatgcagggtctaaattagccaaagctgagaagtatggtactgaaatttggactgaagcagcatttattgaaaaacaaaatggaatctaa

SEQ ID NO: 6321 - DNA, 1209 bp, Staphylococcus epidermidis
atgaagcgaacaatatttttactcatgtcgatactgttattattaacggcttgcggagatggacataaacaaacttcatcagataaagaacaaagtgaacataaggataaccataataaaaatcaagtgaaacaaatagcgactgataaaaaagttcaaggtgataactataggactatattacccttcaaagaaagccaggctcgtggattattacaagataatatggcaaatggttataatggagaagattttgaaagtggtttactagaattaagtaaagaaatctttccaacaaataagtatttatatcaagatggacaatatttagataaaaaaacgattaatgcatacttagatccgaagtatacgaaaaaagaaattgacaagatgagcgaaaaagaaaagaaaagcaaaaatgctaatgagaatcttggactcaatccatctcacaatggtgaaacagatgaagagaaaatagctgaaaattctccagcctatctttcaaatatactcgagcaggatttttatggaaatagtgattctaaaggtaaaaatataaaagggatgacaattggtttagccatgaatagtgtttattattacaaaaaagagaaagatggcgaaacatttagtaaagatttatctgataaagagattgaaaagcaaggtaaacagatggctagtgaaatgctttctcgtttacgtgagaatagtgatttgaaagatattcctattcattttgctatctataaacaatcaagtcaagattccattacaccaggtgaatttatagttggtactacggttgaagagggtaaaactaaaattaactcttgggataatattaatgaaaaagcagccttaattccttcgtcaactgcagctgattatgatgaaacgctgaataataactttaaacagtttaatgataatttgcaatcgtatttttcaaacttcacacaagcagttggtaaggttaaattcgtaaataaaaaagctaaacaacttacagttgatttgcctatagattattacggacaggcagaaacgataggtattacacaatatgttacagagcaagccgaaaaatattttgataaactagatgagtatgaaattagaatcaaagatggaaatactccacgtgctctcattagtaaaactaaagacgataaagaaccacaagttcatatctatcataattag

SEQ ID NO: 6322 - DNA, 1536 bp, Staphylococcus epidermidis
atgtttacattaggtacagctctcagtaatcaaattgatgcaaattggcagacttacgttatgattattgtctatttcataatccttctaattattggcttctatggttatcgacaagctactggaaacttaagtgaatttatgttgggaggacgtagtatcggaccatatatcacagctttatcagctggtgcctctgacatgtctggatggatgattatgggacttccaggttcagtatacagtacaggtttatccgccatttggataaccattggattaaccttaggtgcatacattaattattttgttgttgctccaagactacgtgtttatactgagattgcgggagatgctattacactcccagacttttttaaaaatagactagatgataagaaaaatattattaaaattatttcaggattgattattgtcgtatttttcactctatatacgcattcaggtttcgtttctggcggaaaactctttgaaagtgcatttggattgaattatcatgctggactcttgatagtggctattatagttattttttacactttctttggtggctatttagctgtatcaattactgatttttttcaaggtgtgattatgcttattgctatggtaatggtacctatcgttgcattgcttaaactcaacggttgggatacatttcatgatattgctcaaatgaaacctacaaacttagatttatttagaggaaccactgttttaggcattgtttcattattctcatggggactcggatattttggtcaaccacatattatagtaagatttatgtctatcaaatcacataaattactaccaaaagccagacgtctgggaataagttggatggcagtcggtctattaggagcgattggtgtgggattaacaggaatttcatttatatctgaaagacatattaaattagaagatcctgaaacactatttattgtgatgagtcaaatattatttcatccgcttgtaggtggatttttattagcagccatccttgctgcaataatgagtactatctcttcacaattactagtaacatcaagttctttaactgaagatttctataaactaatcagaggttcagataaagcatcatcacaccaaaaagagtttgttttgattggacgcttatcagttctacttgttgcgatagttgctattacgattgcttggcatccaaacgatacaatactaaatttagttggtaatgcttgggctggttttggagctgcatttagtcctttagtactctactctttatattggaaagatttaacacgtgcaggagctattagcggaatggtagctggtgctgtagttgttattgtttggatttcttggataaaacccttggctacaatcaatgcattctttggtatgtatgaaatcattccaggtttcatagttagcgtattgattacgtacatcgtaagtaaattaacaaaaaaacctgatgattatgttattgaaaatcttaataaagttaaacacgtcgttaaagaataa

SEQ ID NO: 6323 - DNA, 303 bp, Staphylococcus epidermidis; identical to SEQ ID NO: 4433

SEQ ID NO: 6324 - DNA, 1458 bp, Staphylococcus epidermidis
atgagtattcgttttgaatctatcgaaaaattaactgaattaatcaaaaataaagaaattaaaccttctgatgtagtaaaagatatatacgcagctattgaagaaactgatccaacaatcaagtcattcttagctttagataaagaaaatgcaataaaaaaagccgaagaattagatgaattacaagctaaagatcaaatggatggtaaactatttggaattcctatgggaatcaaagataatatcatcacaaaagatgtagaaactacatgtgcaagtaaaatgttagaaggatttgtacctatttatgaatcaactgtaatgaacaaactacatgatgaaaacgcggttttaattggtaaattaaacatggatgagtttgcaatgggtggctctacagagacttcatattttaagaaaacattaaatcctttcgatcacacagcagtaccaggaggatcttcaggtggttctgcagcagcggttgcagcaggtttagttccttttagtttagggtcagacactggtggttctattagacaacctgcatcttattgtggcgttgttggtatgaaaccaacttatggccgtgtatcacgtttcggtttagttgcatttgcttcttctttagatcaaattggaccaatcacgcgtaatgttaaagataacgcattagtacttgaggcaatttccggtgttgatgcgaatgattctacaagcgcacctgttgatgatgtagattttacttctgatattggtaaagatattaaaggtcttaaaattgcattacctaaagaatatttaggtgagggtgtaagtgaagaagttaagacttctgtaaaagaagcggttgaaacgttaaaatcacttggtgctgaagttgacgaagtctcattaccaaatacaaaatatggtattccatcatattatgttattgcgtcatcagaggcttcagcaaatttagcgcgatttgatggtattagatatggatatcattctaaagaagcacaatcgttagaagaattatataaaatgtctagatcggaaggctttggtgaagaagtcaaaagacgtatcttcttaggtacttttgctttaagctcaggttattacgatgcatactataaaaaatctcaaaaagttagaacgttaattaaaaatgattttgacaaagtatttgaatcttatgatgttgtggttggaccgacagcacctacaacagcatttaatattggcgaagaaattgatgatcctttaacaatgtatgcgaatgacttattaactacaccagttaatcttgccggtttacctggtatttcagttccttgtggacaatcaaacggacgcccaattggtttacaattaattggtaaaccttttgatgaaaaaacgttatatcgtgtcgcttatcaatttgaaacacaatacaacttacatgacgcatacgaaaatttataa

SEQ ID NO: 6325 - DNA, 1428 bp, Staphylococcus epidermidis
atgcattttgaaacagtaatcggacttgaagttcatgttgagctaaaaacggactcaaaaatgttctctccatcacccgcacattttggagctgaaccaaattcaaatacaaatgttatcgacttagcttatccaggtgtattaccagtagttaatagacgtgcagtagattgggcaatgagagcttcaatggcattaaatatggatattgctacaaattcaaaatttgatcgtaaaaactatttctatccagataatccaaaagcatatcaaatttctcagtttgatcaacctattggagaaaagggctatattgatattgaagttgatggagaaacaaaacgtatcggtattacacgtcttcatatggaagaagatgcaggtaaatcaacacataaagatggttattctctagtagacttaaaccgtcaaggtacgccattaattgaaattgtatctgaacccgatattcgttcacctaaagaagcatatgcttatctagaaaaactacgttcaatcattcaatatacaggtgtatctgattgtaaaatggaagagggatccctacgttgtgatgctaatatttcacttcgtccatatggtcaaaaggaatttggtacaaaaactgaattgaaaaaccttaactcatttaactacgttaaaaaaggtttagaatatgaagagaaacgtcaagaagaagaattattaaatggtggagagattggtcaagaaacacgtcgatttgatgaatctactggtaaaacaattttaatgcgtgtgaaagaaggttcagatgattatagatatttccctgaaccagatattgtaccattatatgtagatgaagattggaaagcacgtgtaagagaaacaattccagaattgccagatgaacgtaaagctaaatacgtaaatgatcttggactaccagaatatgatgcgcatgtattaacattaactaaagaaatgtctgatttctttgaaggcgcaattgaccatggtgcagatgttaaacttacttccaactggttaatgggaggtgttaacgagtatcttaataaaaatcaagttgaattaaaagatacgcaactaacacctgaaaatttagctggtatgattaaattaatagaagacggaacaatgagtagtaaaatcgctaaaaaagtttttccagaactagcagaaaatggtggaaatgctaaacaaattatggaagataaaggtttagtacaaatttctgatgaagcaacactacttaaatttgtaacagatgcattagataataatccacaatcaatagaagattataaaaatggtaaaggtaaagctatgggattcttagtgggccaaattatgaaagcttctaaaggtcaagctaacccacaaaaagttaatagcctattaaaacaagaattagataatcgttaa

SEQ ID NO: 6326 - DNA, 951 bp, Staphylococcus epidermidis
atgagaaaacgtgcaagaattatatataatccaacatcaggaaaagaactttttaaacgtgtattaccagatgcactgattaaacttgagaaggcaggttatgaaacgagtgcatatgcaactgaaaaaattggtgatgctacttttgaagctgaaagagcactagaaagtgaatatgatttactcattgcagctggaggtgacggtacgttaaatgaggtggtcaacggaatcgccgaacaacccaatcggcctaaattaggtgtaataccaatgggcaccgttaatgactttggaagagcacttcatttaccaagcgatataatgggggcgattgatgtaatcattgatggtcacacaaccaaggtagatattggaaagatgaataatcgttatttcattaacctagctgcaggggggaaactaacacaagtatcttatgaaacaccaagtaagttgaaatcaattgtaggaccgttcgcgtattacattaaaggattcgaaatgttacctcaaatgaaagcagtagatgtacgtatcgaatatgatgataacatcttccaaggagaagctttactattccttttaggtttaacgaattcaatggctggctttgaaaaattagttccagatgcgaagcttgacgacggttatttcacgttaattattgtagaaaaagcaaatcttgctgaattgggtcatattatgacactagcgtctcgaggtgagcatacaaaacatcctaaagtcatttatgctaaagcgaagtctattaatatttcatcatttactgatatgcaacttaatgttgatggtgaatacggtgggaaattacctgcaaatttccttaatttagaacagcacatagaaatttttacacctaaagatgtatttaacgaagaactattagaaaatgatacgataactgatattacgcctgataagcaataa

SEQ ID NO: 6327 - DNA, 1371 bp, Staphylococcus epidermidis
ttggaaacaattaagaaaaacgaagttaaaacgggaaaggttattgatttaactcatgagggacacggagttgttaaagttgatcgatatccaatttttattcctaatgctttaattgatgaagaaattaaatttaaattaattaaagtgaaaaagaattttgctataggaaaattgatagaggtcataagtgaaagtgatgatagagtgacaccaccttgtatttattatgcaaagtgtggtggttgtcaattacaacatatgacatatagagcgcaattggatatgaaaagagaacaagtagttaatctttttcatagaaaaggcccttttgagaatacggttataaaggaaactattggcatggtcaatccctggcgataccgtaataaatctcaaattcctgtaggtcaaagtaactcgaatcaagttataatgggattctatagacaacgtagccatgacattatagatatggatagttgtcttatacaagatagacaacatcaagaagtaatgaatcgagtgaagtactggctcaatgaattaaatatatctatatataacgaaaaaacaaaaacaggtttaatacgtcatttagtagtaaggactggttatcataccgatgaaatgatggttatctttgttacaaatggagcaacatttaaacaatcagaactattagtaaacaagctaaaaaaagaatttccaaatataacaagtattaaacagaatataaacaatagccattctaatgtcataatggggcgtcaatcaatgactttatatggtaaagataaaattgaagaccaattaagtgaagtaacttatcatatttctgatttatcattttaccaaattaactcatcacaaactgaaaaactttatcagcaagctctgaattatgctcaattaacaggaaaagaaatagtattggatacgtattgtggtataggaacgattggtctatatatggcaccactagcaaaacatgtttatggtgtagaagttgttccgcaagccataaaagatgcggaagacaatgcgactaaaaaccaacttaaaaatacgactttcgaatgtggaaaagcagaagatgttatcttaacatggaaatcacaagggattaaaccaggcgtagtcatggtagatccacctagaaaaggatgcgatgaaactttcttaactactcttttaaaattaaatccgaaaaggattgtttatatatcatgtaacccttcaacgcaacaaagagatgcgcaaatattggctgaacaatacgagttagtagaaattacaccagttgatatgttcccacaaacaactcatattgagactgtagcattatttgtacgtaaagacgaagagtga

SEQ ID NO: 6328 - DNA, 543 bp, Staphylococcus epidermidis
gtgcataaaatagatttatcaggcaacaaatttcaaatccaacgatttgttctgttgcaaattgtattggcgctatttacaatactatttacttataaatgggcttatcaaacaacgcatatcattgaacaaaatcttgtcatgaatcttatttttggatttgtaggtttcgcagtactagttattttgcacgagtttattcatcgtattttgttcattatattttctaaaggtgaaaaaccatctttaaaatatgataaaaacaaaattattgtacagttctctcagacttgttttcatcggtggcaatttacaattatcatgatagcaccacttgttatcataagtgcgaccttactagcacttattcaaatatattccttttcatctttaatctttatgtttagtatacatacaagttattgtatgatagatgtgtttttagtagcattggcattacaaagcaaattcaaatatatacaaacctatggagaaggtttgtatctttatcatcaaaagcctactcaaacctattatgaataa

SEQ ID NO: 6329 - DNA, 1071 bp, Staphylococcus epidermidis
atgactgaaagaagaattattcatatagatatggattatttttttgctcaagttgaaatgagagataatcctaaactaaaaggaaaacctgtcatcgttggcggtaaagcgagtcatcgaggcgtagtttctacggcatcatacgaagcaagagcttatggtgttcactctgctatgcctatgactcaagcacataagctatgccccaatggatattatgtaacaagccgttttgatacttatagagaggtatctggtcaaatcatgaaaatattcagaagttatacagaattagtagaacccatgtctttagatgaagcttatttagatattacacatttagtgagaccggatttaccagcatcaaccattgcaaattatattcgcagagatatatacgaagtaacacgtttaactgcgtcagctggcgtgtcttataataagtttttagcaaagttagcgagtggtatgaacaagccgaatggtttgacagtaattgattacaataatgtacatgaaatattaatgcaattagatattggagattttccaggggtaggcaaagcttcgaagaaaaaaatgcatcaacatcatatatatacaggtcaagatttatataataaagatgaatttgaattaatacgtttattcggtaaaagaggacgaggtttgtataataaagctcgaggtatagaccataatgaagtaaaggcgagtagagttcgtaaatctgttgggactgaaaggacattttctacagatgttaacgatgatgatgttattttaagaaaaataagagagctttcaggaaaaacagcagaacgtttaaataaaattcaaaaatcaggtaaaacagtcactgtaaaaataaagacctatcaatatgaaacaatctcaaagcaaaaaagtttgagagatcctattcgtactgaaactgatatctataatattgcctatactttatataacgacttaaaagatccagagattccgattcgattaataggtgtaacggtcgggagtttagagcaatctgattttaaaaatttaacaatatatgattttatttaa

SEQ ID NO: 6330 - DNA, 555 bp, Staphylococcus epidermidis; identical to SEQ ID NO: 4440

SEQ ID NO: 6331 - DNA, 501 bp, Staphylococcus epidermidis; identical to SEQ ID NO: 4441

SEQ ID NO: 6332 - DNA, 1314 bp, Staphylococcus epidermidis
atgagacaatggactgcaacccacatggctaagttagcaaggaaagcaagtatagctgtaggtaaaaagggtacagacttgccgggacagattgcaagacgtgtggatcataatattttaagaaaattagctaaacaagtagatgacattgtttttataagtgggactaatggtaaaacgactacatctaacttaattggacatacattaaagaaaaatcaaataaacattattcacaataatgaaggagcaaatatggcagcagggataacttctgcttttattatgcaaagctctaagaatactaatattgcgataattgaaatagacgaaggatctattccacgtgttttaaacgaagtcacaccttctatgatggtgtttacaaatttctttagagatcaaatggatcgatttggtgaaatcgatattatggttgataatattgcaaaatcaataagtaacaaagggataaaattattattaaatgcagatgatccgtttgtgagtcgcttgaaaattgcaagtcattccattgtgtattacggaatgaaaaaatttgcgcatgactttgaacaaagtacaatgaatgaaagtaaatattgtcctaattgtggacgattattgcaatatgactatatacattataatcaaattggacattatcattgtgagtgtggatttaagcgagaagaacctacatatgaagtgtcatcatttgatgcttcaccattcttaaaaatgataataaaccaaagtgagtttaatatgaaaattgcaggagattttaattcttataatgcaatagcagcctataccgtattaagagaattaggattaaatgatgatgcaatacgcaaaggatttgaaacatatacgtctgataatggtcgcatgcagtatttttcaaaaaataagaaggaagctatgattaatctagcaaaaaatccagctggaatgaatgcaagtctatcagtaggcgagcaaattgatgataaaaaaatttatgttattagtcttaatgacaacgcggcagatggtcgagatatttcatggatatacgatgcagactttgaaaagctagctacccaagatatcgaagctattattgtaagtggtacgcgtgctgaggaactacaattacgtctcaaacttgctgaagttgaagtgcctattaaggttgaaaaggatatctacaaagcgactgcattaactatgaaatacagttcatttacggtagcaattccaaactatacatcattaacaccaatgcttgaacaacttaatcgctcatttgaaggagggcaatcgtaa

SEQ ID NO: 6333 - DNA, 726 bp, Staphylococcus epidermidis
atgaatgaactaacggtttatcatttcatgtcagataagcttaatttatacagtgatattggtaatatcatggcattaaaacaaagagctaaaaaaagaaatattaagataaatgttaaagaaatcaatgagactgagggagtcacatttgatgattgcgatattttcttcattggtggtgggagtgatagggaacaagcgcttgccacgaaagaattaagtaaaattaaaacttctttaaaaaatgcaattgaagatggtatgcctgggttaactatatgcggtggttatcaatttttaggtcataagtatattactcctgatggtaccgagttagaaggattgggtgttcttgacttctataccgagtctaaaaaagaacgcttaactggagatatcattatagagagtgatacttttggcacgattgttggatttgaaaatcatggtggtagaacatatcatccgtatggaacattaggccgagtaacgtatggttatggtaataatggtaacgatcgaaaagaaggtatacactataaaaatctattaggttcttatcttcacggcccaattttaccaaaaaatcatgaaataactgattatctacttgagaaagcatgtgaaagaaaagggatactatttgagcctaagaagatcgataacacagaggaagaagctgccaagcaagttctgattaaacgtgcaaaagaaaataaaaaataa

SEQ ID NO: 6334 - DNA, 537 bp, Staphylococcus epidermidis; identical to SEQ ID NO: 4444

SEQ ID NO: 6335 - DNA, 987 bp, Staphylococcus epidermidis; identical to SEQ ID NO: 4445

SEQ ID NO: 6336 - DNA, 756 bp, Staphylococcus epidermidis
atgattgttaaaactgatgaagaattacaagcgttaaaagaaataggttacatttgtgcaaaagtcagagatactatgaaagaagctactaaacctggagtgactacccgtgaattagatcacattgccaaagatttatttgaagagcatggggcgatatcagcgcctattcacgatgaaaacttcccaggtcaaacttgcattagtgttaacgaagaggtcgcgcatggaatccctggtaaacgagtaattcgtgaaggtgacctagttaatattgatgtatcagctttaaaaaatgggtactatgctgacactggaatttcatttgttgtagggaaatcagatcaaccacttaaacaaaaggtttgtgacgtagccacaatggcttttgaaaatgctatgaaaaaggtgaaaccaggtacaaaattgagtaatattggaaaagctgttcatgcaactgcacgccaaaatgatttgactgtgattaaaaatttaactggacatggtgttggacaatcacttcatgaggcacctaatcatgtcatgaattattttgatcctaaagataaaacattattaaaagaagggcaagtcattgcagtagaaccattcatatcaacacatgctacatttgtaactgaaggtaaaaatgaatgggcttttgaaactaaagataaaagttatgtcgctcaaattgaacacacggttatagttacaaaagatggtccgttacttacaactaagattgatgattaa

SEQ ID NO: 6337 - DNA, 387 bp, Staphylococcus epidermidis; identical to SEQ ID NO: 4447

SEQ ID NO: 6338 - DNA, 702 bp, Staphylococcus epidermidis; identical to SEQ ID NO: 4448

SEQ ID NO: 6339 - DNA, 1047 bp, Staphylococcus epidermidis
atgaatcactacataagagctataggctcaatgcttatattagtatatagtatgcttattgcttttttatttattgataaagtgtttgtaaatattatcttttttcaggggatgttttatacacaaatatttggaatacctgtttttctatttttaaatttattaattgttcttttatgtattatagttggatctgttttagcttataaaattaatcaacaaaatgattggattatttcacaaatagaaagatcaatagaaggacaaacagtaggtatcaatgatcaaaatatcgaattatatacagaaacgatagatatttatcatacactagttccattaaatcaagaattacatcgacttagaatgaagactcaaaatttaactaatgaaaactacaatattaatgatgtaaaagtcaaaaagattatcgaagatgagcgacaacgacttgccagggaattacatgattctgttagtcaacaattatttgctgcgagcatgatgctatcggcgataaaagagtcgaaattagaaccacctttaaatcaacagataccaattcttgaaaaaatggttcaagactcacaacttgaaatgagagctttgttattacatttaagaccgataggtttaaaagataagtctttaggtgaaggaattaaagatttagtcatcgatttacaaaagaaagtaccaatgaaagttgtgcatgaaattcaagattttgaagtgccaaaaggcattgaagatcacttgttcagaattacacaagaagctatttcaaatacattgagacattcaaatggtacaaaagtaactgtggaattatttaatcaagaggattatcttttactaagaattcaagataatggaaaagggtttaatgtagatgaaaaatttgaacaaagttatggtttgaaaaatatgcgagaacgagcgttagaaattggtgcgacgtttcatattgtatctttacctgattcaggtacacgaattgaagttaaggcaccattgaataaggaggagaattcaagtggcgattaa

SEQ ID NO: 6340 - DNA, 630 bp, Staphylococcus epidermidis
gtggcgattaaagttttatttgttgatgatcatgaaatggtaagaatcggtatttcaagctatctttcaactcaagaagatatagaagtagtaggtgagggtgcttctggtaaagatgctatcactaaagcgcatgagctaaaaccagatttaatattaatggatttacttatggacgatatggatggtgtagaagcaactactgaaataaaaaaagatttacctcaaattaaagtagtcatgttaacaagctttatagaggataaagaagtttatcgtgcacttgattctggagtagatagttatattttaaagacaacaagtgcaagtgatatagctgacgctgtgcgtaaaacgtatgaaggtgaatcagtatttgaaccagaagtgttagtaaaaatgcgcaaccgtatgaaaaaacgtgccgagctttatgaaatgttgacagaaagagaaatggagatcctattacttatagctaaaggatactctaaccaagagattgcaagcgcctctcatatcaccatcaaaacagtaaaaactcatgtaagtaacatactaagtaaattagaagtacaagatcgaacacaagcagtaatatatgcgttccagcataatttaattcaataa

SEQ ID NO: 6341 - DNA, 1179 bp, Staphylococcus epidermidis
atgtcaaaaaaagagaaaacaacttctaaatatcttaattcaatagaagataaagagcataaaaagaataaaaaaatagaagttgaccgtacatatatagaacctcaagaattccaatctaagaaacctaaaaaaaagaatcaagtattttttgtttcccgactgaataaaccagcaaaatacaccgaaaactctaatttcttttcttacctgatttataggataggtaaagatgacgctgcaggtttagcagcacagatgacatatcattttgtattagcacttttcccaatgctaatttttttacttacgctacttggtcaatttatcacgattgatgctaatcagattaatcaaaaagtaagtcaatatgtccctgatcaagaaacagctagcatcgttggtggaattgttaaagatatctctgacactgccagtggaggtattttgtcagttgggttaattttagctatttggtcagcatcaaatggaatgtccgctattattaactcatttaatgttgcttatgacgttgaggattctcgaaacggtgtagtagttaaattattaagtattctatatacacttgttttaggtgcagtatttgttgttgctgtagtacttataacactaggtccagtcattaataaatttttatttggaccactaggtattgataatcaaattgaatggatttttaatttagtacgaattgttattccattgattattattttcatcatatttactgtactttattcagttgcacctaatgttaaaacaaaattacgttctgttattcctggcgctattttcacttccattatttggttactagggtcctttgcattcggttactatatttcaaactttagtaactattcgaaaacatacggaagtttagctggtattatcattttattcttatggttgtatatcacaagctttattattattatcggtgctgaaatcaatgcaattattcaccaaagaaaagtcatagctggtcacacgcctgaagaagccgctattaaacatgatgataacaatgaaaatcactataacgaaaatacgacttatgaatactatgaagatagcaaagatgtagatatctctaatgaagatgacacgtataatatcaatcatcaatctaaagaagaacatcacacaagcgactga

SEQ ID NO: 6342 - DNA, 285 bp, Staphylococcus epidermidis; identical to SEQ ID NO: 4452

SEQ ID NO: 6343 - DNA, 465 bp, Staphylococcus epidermidis; identical to SEQ ID NO: 4453

SEQ ID NO: 6344 - DNA, 216 bp, Staphylococcus epidermidis
atgtcattatctaatgaagaaatgatttctaatataagacaaaaattaaatattgtaaatcaagcattacttaatccggaaaaatttaaatcaacacctcatcaagacataagcgaaatatatgaattcgtaatgtctaaagattcattctcgcctagtgaggttacggctattgctgaccatttaggacagcttagacaagatatggaggattaa

SEQ ID NO: 6345 - DNA, 1242 bp, Staphylococcus epidermidis
atgacgaattatcataataagttaaaacaatatgcagaattattagtaagagtgggaatgaatgtacaaccacagcaacctgtttttatacgttcatctgttgaagcgttagaattaactcatttaatcgtcgaggaagcatataaagcaggggcagaagatgttcgagtgagctacacagacccgaaattaaaaagattaaaatttgaaaacgaatcagttgaacactttgaaaaacaagaactcaaacaatatgatattgaagagcgtctggattatgttaatcgtggcgcagcgaacttggcgctcattgctgaagatccagagctattaaatggaatagatgcgcaaaagttaaaagcgtatcaaactgtatactcaaaaggatttaaaccatatatggaagcaagtcaaaaaaaccaatttccatgggtagtggctgcgttccctactagggattgggcacgtcgtgtctatccagagttggatgttgaatcagcatatattaaattcattgatgaagtatttgatattgttcgtgtagatggacaaaatccaattgaaaattgggaaaaacacattaaagatttaagtgttcatgctaaacgattacaagagaaaaactatcaagctttacattacatatcagaaggcacggatttaatagtagggttacctaaaggacacatatgggaagatgcaacaagttatgtaaatggggacggtcaacctttcattgctaatatccctacagaagaagtttttacagctccagatagaaacaatgttaatggatatgtaaccaataaattacctttaaatcttaatggtaacattatagacgggtttacattgacttttaaagatggtgtgataattgatgtcaaagcagaaaaaggtgagaaattacttaaagatttaattgcaactgatgaaggtgcttgtagattaggtgaagtagcactagtgcccgatgattcaccaatatcaaatcgacgcacaatattctataacactctttttgatgaaaatgcatcatgccacctagctatagggtcagcttatagttttaatatcaaaggtggtactgaaatgactacagaagaaaaaattgcaaatggactcaatgattccaatattcatgaagatttcatgattggtagtcctgatttaacaatttatgggatattgcaagatgaaacaaaagaattagtttttaaaaatggaaattgggctaaatag

SEQ ID NO: 6346 - DNA, 531 bp, Staphylococcus epidermidis
atggctaacacaaatagaaaaagcaaaaaaatgtcagatgctaaatgcatcaaaacaagacaggtatatccacaagataccaatcatcatcacacaatgttcggtggaactttaatggcaaatattgatgaaatagctgctattactgctatgaagcacgctggcaacccagttgttactgcatcaacagattctgttgactttttaagacctattacaactggagatattttatcatatgaagcaatggtttcttatgcaggaacaagttcgatggagatatgtgttcaaattgttattgatgatgtttataaaaacgagcgccacttggccgctttaagttttttaacttttgtagcattggatagtgatggaaaaccaacatcagtacctgatgttgaacctgaaacatctgtagaaaaatggttccatgaaactgcgccacaacgtgttgctagacgtaaagaacgtcgtaaagaaagtatagatacaattgaatatttatctagagttagacatatcgaaaagtaa

SEQ ID NO: 6347 - DNA, 1143 bp, Staphylococcus epidermidis
atgataatatcaaacaaatcccctatttctatcaacaatgatccatgggaagcatataatgatattttagaacataaccaattaacattaagtaatatagaatttacaactacaaatttatgtaatatgcgttgcagtcattgtgcagttggttacactttacaaactaaagatcctgatcctcttccaatggatatcatctatcgacgtttggacgagatacctaacttaagaacattgtctattacaggtggagaaccaatgttttccaaaaaatcaatcaaaaacgtcgttaagcctctacttaagtatgccaaacatcgtggtatatatgttcaaatgaattcaaatttaactttacctcaagaccggtatttagatattgcagaatacatagatgttatgcatatttcacataattggggaaccattcaagagtttactgatgttggctttggtgcaatgagaaaacaacctcctctaaaagccaagttgaaattatatgagcaaatgcttgaaaattccagcactttatcagaccaaggcatgttcgtatcggcagaaacaatgcttaatcaaagcacagtcccttatctaagtaaaatacataacgaagtggtaaatgacatgaaatgtagccgtcatgagattcacccaatgtatccatctgattttgctagccaattaaatgtattatctcttaaagaaatgaaagaagctattcatcatttgttagatatacgtgatgaaaacacatggatgttgtttggtactctacctatctatccatgtttaaatgatgaatatgatcaacatttattgcaacgtttaagaaaatcgaagaatgttacaatgagaaatgaccctgatggtcgtagccgtttgaatgttaatgtatttactggcgatgttattgtgactgattttggtgatgaaaatggtacaatatctaatatacaaaaggataaattgacagatgtattcaaccagtggttaaatactgaccttgcacaatctttaaattgtcattgtgcagaatatcaatgtctaggtccgaatgttttagttaaaaatatgtattacccaaatactgatttcaagaaaaaagaacaaatcatgcatcaacatcaaatattttcataa

SEQ ID NO: 6348 - DNA, 162 bp, Staphylococcus epidermidis; identical to SEQ ID NO: 4458

SEQ ID NO: 6349 - DNA, 519 bp, Staphylococcus epidermidis; identical to SEQ ID NO: 4460

SEQ ID NO: 6350 - DNA, 810 bp, Staphylococcus epidermidis
atgaaaagaagcgataaatatacggatgattatattgaacaacgttatgagtctcaacgacctcattacaatacatattatcaaccaatagggaaaccaccgaaaaagaaaaaaagtaaaagaattttcttaaaagcaattatcactatattaattttattgattattttttttggtgtcatgtactttatttcttcaagagcaaatgtagatgatttaaaatcaattgaaaataaaagcgattttgttgctgccgaaaatatgcctaactatgtaaaaggcgcatttatttcaatggaggatgagcgtttctataaacatcatggctttgatataaaaggaacgacaagggcattgttttcaactattagcgatagagatgtgcaaggtggaagtacaattacgcaacaagttgtaaagaattattattacgataatgaacgatcctttacaagaaaaatcaaagaattgtttgtagcgcgtaaagttgaaaagcaatacagtaaaaatcagattttaagtttctatatgaataatatttattatggtgataatcaatatactgtagaaggtgctgcaaatcattattttggtgtaacggtcgataaaaacaattcaaatatgagtcagattagtgtgttacaaagtgctatattagcaagcaaagtaaatgcaccaagtgtgtatgatgtaaatgatatgtcgaataattacatcaatagagttaaaaccaatttagagaaaatgaaacaacaaaattttattagtgaagcacaatatcaagaagctatgtctcaacttggaaattaa

SEQ ID NO: 6351 - DNA, 804 bp, Staphylococcus epidermidis
atgccaaaggtaactaaaatagaagtacaaaaaaagaataaagaacgctttaatctctttttagatggagaatttgaaatggggatagatattgatacattagttaaatttaacttaaaaaaagatcaaatacttgaaccgtcagatatgcagaatattcaagaatatgatcactatcgtcgaggtgttaatcttgcaattcaatacttgtcttataagaaacgtactgaaagagaagttatacagtatttagaaaaaaacgatattcaaagtaatgctattcaagatgtcattgactattgctataaggaaaaatttattgatcatgaagactacgcagaaagtttaaaaaacaccatgatacacactacagataaaggaccagaaatatatagacaaaaactctatcaattaggtattgaagttacgattattgaaaaatatgtcgaagcatatgaacaacaacaaccattagatgacgtcatcaaagttgctaaaaaagtgatgaagtctaaaaagggtcctgaagcaaaggtaaagcaaaaagtaacacagtcacttctccaaaaaggatataagcttgaaacaattcaactagttatgaatgaaatagatttttctcaagacgaagaaacattagaccatttattgcaacgtgatttagagaaagtctataataaaaattgtaaaaaatatgacagtgataaaagtgttattaaaaccatagaggcactcatgagaaaaggctataattatgataaaattaaatctaaattagaagaaagcggtatatctaatgaataa

SEQ ID NO: 6352 - DNA, 315 bp, Staphylococcus epidermidis; identical to SEQ ID NO: 4463

SEQ ID NO: 6353 - DNA, 1518 bp, Staphylococcus epidermidis
atgggaagctcaatagttttaaaattactcaaggtaacacattactatagaaattataattcaaaaaaatggtatcgaccattaggttatgatgctgaggacatcaacctaaataatatttctttgcatatatatcaaggtgaagcattaggtataatcggagaacctggatcttctaaaactttgattggtagaattttaagtggttcagtgaaacctgataaaggtaaggtcgtccgaactaaaaacttgtatttcggtgatattgatgatcgaaagattaataatttaactgtgagccaatatgtgagcgaactcgtacaactttttccttatgaagtaacagagcataaagttgaacaaattattcaatgggcacatttaggtgattacatagaagaaaaggtttctaatttaagcgaaaaatcatacgcacaacttttacttagtattgcacgttcttcaaaaaacgatattatcattttaaatcatgttttatcacatttagatgaaacatttatagaaagagctacagttttatcaaaagattatattgaagctaataaaacactagtcttaattgataatgatatagaaaagataagcaaaacaagtaactacataacatgggtatcacacggccagatacgcaaggaaggttctctaaatcaggtattaccaacttttagagaacatgaaaaagatcgtactagtttaaaatcagaaatggaaattgagaactttgattatgattggaagcagaatcgctctcgtattcctgaaatgacttataattttaaaagaatagaacgttataatcatgctaagccaccaagatttctagtgagattttggaccttatttgtcagctttttgattgggcttgttttaatgagcgtacttttctttaacaacttaggtatggtcaaactagggaacattaatacccaagcatccatacagaatcagaataaagatacttacgaagaaaaacttgcatatggattagcattagatggatcagttactttaaacgggtctaaagatttaaaagtacctaagtatagtttaattacaattactggagaaaataacaaaagatatcgggtcgaaatgaatcaaaggagatatagtgttagtaaaaatcaagtgttttatttcaatccagctgggttatacgaatctcatacttttaagaaattgtcaccttatataaaatcaaattatagtacttacgtagagtactttaacagtcatttacatcaaaaacatgataaagtaacagaaacgcttagacctgataaagataaaaagtatgttgtaccgatcacgcaacaacctataaaaatgatatttggtgataatgataaactgtctggatttgttattccaatgacaaataaaacggaattgaaaaaaacatttaatatcacgaaagatgtatggattacaaaaagtggaagcggttattttatcgctgatatgaaagaagaaaaatggatttatattgaattgtag

SEQ ID NO: 6354 - DNA, 831 bp, Staphylococcus epidermidis
atgatagataatttaattgtatatattaaaaacttaccacatctttttagtttttgtactcaaaggcttaagcaaacatggaagtggtttgcaattagcctaattataggactagtaattattctagcattagagggattttttaatttcaaccatactaccgatattgttcaagtgcgttggttattcagaatttcatcattcatcatattcagcattattatacaatctatttatatagcttataagtactatatcagagatttcgttgtcatgaagtcatttcatatatctgcagttacacctactatagttatagcgatgttaggtttaataacaatacttattctggggatagttattattattcttaagcctgtgaattttgaagcatcaatactttcatttttatattatttagtaattttagcaatttttatcagtgtgacttcgataatattgggcttgctgagttatgcaattaaacatgtaaaactgatatttattatagtaagtgctatcagcttctttatggttccaattacatacatccctaatacaaatttaaatgtggttaatcatattatgatgttaaatcctctgtattatttcgtaaatggtagttcgcaagctatagtatttggtacaatcagcatgagcaatttaccttatcatttatatattattattttaattggaatcatctgtgtgattaattatgcgcttgtgcgtcacatagcatttgataaatatcaaaaccaatctaaccaaaagaattattcaaaaaagaataaagaaaaggaatgtttaaacgtaaaattagataagtaa

SEQ ID NO: 6355 - DNA, 975 bp, Staphylococcus epidermidis
atggacacagccacacatatcgttatgggtgtgggtcttacagctttagcaacgcaagatccagttatggcagaatcatttgctgctactgcgacgactttaatcgcaggttctttaataccagacggtgatactgtattgaaattaaaggataatgcgacatatatttcacatcacagaggaatcacacattcattaccttttacaatattatggcctatattaattacattttttatatttgtaatatttagccaaacgaatcctttacatgtatggttatgggcacaactagcagtgtttttacatgtctttgtagatatttttaattcttatggtacacaagcattacgtcccataactaacaaatggattcaattaagcgtgattaatacctttgatccgataatattcattattttaagtaccggtgtcttattgtggatattaggtattcacccgtatattgttttctttccaattatattaattctcataggctattatattgtaagatttaagatgcaagcagcaattagaaaacaagcactccaaaaaattgagcaatcgcatacaccagtaaaagtattcgtagctccaacaataaaatttcatgtatggcgggtcgcaatacaaacagataagcatgattatgttggtgtttccaaatggaaaaatgtagatttcactgataaagttaaacgccagtctatgactcctgattcgatattatggaaagttaaaggtaataaagatatatatacatttttaaacttttcttcaatttaccgttggcaaactacaccattagatgatggcaccacagaaattcgacttatggatttacgatacttaaataaaggtcgttattcttttgtagctattgcacatttaacacttgaaaatgaaattgatcactcttatattgggtgggtatttagcgaagataaattacaacgtaaattattttcataa

SEQ ID NO: 6356 - DNA, 1044 bp, Staphylococcus epidermidis; identical to SEQ ID NO: 4467

SEQ ID NO: 6357 - DNA, 543 bp, Staphylococcus epidermidis
atggtaaaggaatccatacctaaagaaggagaaaacattaagattcaaagttataaacatgatggtaatattcatcgtgtctggtcagaaaccacaattttaaagggtacggaacatgtgattattggtggtaatgatcacactttagtaactgaaagtgatgggcgtacatggattactcgagaaccagcaattgtgtactttcattctgaatattggtttaatgttatttgtatgtttagagaagatggtatttattattattgtaatttatcttcgccttttgcatgtgacgaagaagcgttaaaatatattgattatgatttagatatcaaagtttatccgaacggaaaatatcatttacttgatgaagatgagtacgagcaacatatgaaccaaatgaattatccacacgatatcgatattattttaagaagaaatgttgatattttacaacaatggatagaacaaaaaaaggggccttttgctcctgactttataaaggtatggaaagaacgttataaaaaaattagagattattaa

SEQ ID NO: 6358 - DNA, 1737 bp, Staphylococcus epidermidis
atgataaaacgatatttaaagtttgtaaaaccttatagatatcgtattattgcaacaattatagtagggattattaaattcggtattcccatgctcatacctttattgattaaatatgctatagatggcgtgattaataatcattcgcttacaaatcaagaaaaatttagtcaccttggtgtagcaataggaattgcattatttattttcttaattgttcgcccgccgattgagtttattagacaatatttagctcaatggacaagtaataaaatactatatgatattcgtaaacaattgtataatcacttgcaagcactaagtgttcgcttttatgcaaataatcaagtcggtcaagtcatttcaagagtgattaatgatgtcgaacaaacaaaagactttattcttactggattgatgaatatctggcttgactgtataacgattattatcgcactttctattatgttcttccttgatgtaaaattgacgtttgctgcaatttttatttttccattttatattttaactgtttattttttctttggaagattacgaaaacttacacgtgtgcgctcacaagctctagcagaagtacaaggtttcttacatgagcgggttcaaggaatgtctgttattaaaagttttgctattgaagacaatgaagctaaaaattttgataaccataacaagaattttttacaacgagccttccaacatacaagatggaacgcatattcttttgctgctattaatactgttacagatttaggcccaataattgtgattggcgtgggttcatatttggcaattacaggatcgattactgtcggaactctagcagcatttgtcggttatctagaacaattatttggaccacttagaagactagtatcttcatttactacacttacacaaagttttgcatctatggacagagtatttcagttaatggatgaggattacgacatcaaaaatggcattggagcacagccaattaaaatcagtaagggtcaaattgatttaaaacatgtgagtttcaaatataatgaaaatgaaaaagaagtattacacgatattaatttaacaattaacaaaggcgaaactgtagcatttgtaggtatgagtggtggtggaaaatctactttgattaatcttataccaagattttatgatgttactcaaggtgaaatacttatcgatcatcataatgttaaagatttcctaactggtagtttaaggaatcaaataggcttagtacaacaagataatattcttttttctgatacggttaaggagaatattttgttgggtaggcctgatgcgactgatgatgaagtcgtagaagctgcaaaaatggcgaatgcccatgattttatttcaaatttaccgaatggatatgatactgaagtaggagaacgaggagttaaattatctggtggacaaaaacaaaggttgtcaattgcacgtatctttttaaataatcctcctgttttaatattagatgaagcaacaagtgcattggatttagagagtgaagctattattcaagaagcacttgatgttttaagtaaggatagaacaacattaattgttgcacatcgtctatctaccattactcatgcagatagaatagttgtaatggaaaatggacgaattgttgagactggcacacaccaacaattaattaataaacgcggtgcttatgagcatctttatagtattcaaaatttataa

SEQ ID NO: 6359 - DNA, 1095 bp, Staphylococcus epidermidis; identical to SEQ ID NO: 4470

SEQ ID NO: 6360 - DNA, 1290 bp, Staphylococcus epidermidis
atgaaatttactgaaagcgaacgtcttcagcaactttctaatgaatatattttgggaggtgtgaattcaccttcaaggtcgtataaagcagtaggtggtggggcaccagtagtaatgaaagaaggtcatggcgcttacttatatgatgtagatggtaataaatatatcgactatctacaagcttatggtccaataataactggtcatgcacacccacatatcaccgaagctatccaagatcaagcagcaaaaggcgtactttatggtacccctactgaattagaaataaatttctcaaaaaaacttagagaagcagttccttctttagaaaagattcgtttcgtgaactctggtactgaagcagttatgacaacaattagagttgctcgtgcttatactaaaagaaacaaaatcattaagtttgcaggctcttatcatggtcattctgatttagttttagtggcagctggaagtggaccttctcaacttggttctccagattctgctggtgtcccccaaagtgttgcacaagaggttattacagtaccgtttaatgatatagaatcatatagagaagctattgattattggaaagacgacattgctgcagtattagtagagccgattgtgggtaattttgggatggtcatgccacaaccaggtttcttagaagaagtaaataaaatttctcatgataatggaacattagttatctatgatgaagttatcactgcttttcgtttccattatggtgcagctcaagatttattaggtgttaaaccagacctcactgcttttggtaagattgttggcggtggtttaccaattggaggctatggtggtcgacaagatattatggagcacgttgcaccattaggtccagcctatcaagcaggaacaatggccggtaacccgttatctatgagagcaggtattgctttattagaggtacttgaacaagaaggtgtttatgataaacttgatcaattaggtcgtcgtcttgaagaagggttacaaaaattaatagataagcatcatattacagcaacaataaatcgaatctatggctcactgacattgtatttcacaaatgaaaaagttacacattatgaacaagttgaaaactctgatggagatgctttcgctcaattctttaaattaatgttgaaccaaggcattaatctcgcgccttctaaatttgaagcatggttcttaactacagaacatactgaagaagatatcgatcgcacactagaagcagctgattatgcatttagtaaaatgaaataa

SEQ ID NO: 6361 - DNA, 459 bp, Staphylococcus epidermidis
atgattagtaaaggtgaacaatttccctctttttctttagaaaatcaagatggcaattttatttcaaatgaaacaattaaaggtcgtaaaacgattctttatttttatccaagagataatacaccaacgtgtactactgaagcttgtgaatttagagatcacattgaagattttaatcaacttgatgtagatatatatggcataagcgcagattctaaaaagaaacatcaaaattttataaaaaaacaccaattgaattttgacttactcgtagataaagattatcaacttgctaataaagttggggtttaccaattgaaaaaatcatttggcaaggagaatatggggattgtaagaacaacatttattctcgatgaaaatggtaacattattgatgtgattgaaaaggtaaaggtaaaaacacaaattgaaacaataaaaaatattctggagggttaa

SEQ ID NO: 6362 - DNA, 951 bp, Staphylococcus epidermidis; identical to SEQ ID NO: 4473

SEQ ID NO: 6363 - DNA, 453 bp, Staphylococcus epidermidis; identical to SEQ ID NO: 4474

SEQ ID NO: 6364 - DNA, 270 bp, Staphylococcus epidermidis
atggataaaataaacaaagaagataccgatactaaaaaagatagtaataacaactataaacatcaaaatgaccatatagatagacaaggtttaaatggttatcaaaaaactgatttagatcttgagatagaacgagaactacaggaaatgatggaaaatggagaatctaataaagaaacaaaaagtaagcatttcaaaatcttatctttcgtttcaatgattgtcattgtagtgatagccatcatacgattcatccaaaaaacgatataa

SEQ ID NO: 6365 - DNA, 1065 bp, Staphylococcus epidermidis
atgtacaaattagttaagcctttattattcaaattagatcctgaacgagcacatggtttgaccatcaatgcgttgaagtgtgttcaaaaatgttcacccattttacctatcgttaataagttatttacttataacaatccaatattaacgcaacacattcacggtatttcttttgataatcctatcgggttagctgcaggttttgataaatcttgtgaagttccaaaagcacttgaaaacattggcttcggtgcaattgaactcggcggtataacacctaagcctcaaccaggtaatccaaaaccacgcatgtatcgtttactagaagatgatgcactcatcaaccgtatgggattcaataataagggtatgaataaagcactaagtaatttacgtaatcattcatgctcaataccagtaggattaaatgttggtgtgaataaaacaacttcctatgaaaatcgctatcaagattacattaaagtgattgacacatttaaaaatgacgtctcattctttacagtgaatattagctccccaaatacagaaaatctccaaaactttcacgacgaagatgaattttcgatgttatgtgatgctttaaattcatttaaagctaagaacaatattaatgtacctatctttttaaagttaacatctgatatggaattagatggttttaaaaaaatcttgccttcaattacagatacattcgatggggttatgttggcaaatacgacacgacaacgcgatggattaaattcaaaaaataaaatacaaaaaggtggcttgagtggcagaccattattccaaagaaacttacaactggttaaatatgcctatcaacaaacacgaggtaacttcttaattattggaactggtggtatattcagttctgaagatgctatcaaaatgttaagaaacggtgcatcattactacaaatatactcttcattagtcattgaaggaccaggtttgactaagaaaatgaataaagaaattgcgcattatttaactcgacatggttatgctaatgtaagtgatattattggtttagatgcataa

SEQ ID NO: 6366 - DNA, 858 bp, Staphylococcus epidermidis
atgaatgaacaatggatgagcgcattgccacttgacaatgtgaaagacatttctccagtaagtggcggagatgtaaatgaagcatttaaagtcactacagttgaagaagatattttttttctactcgttcaacgtcaacgatcagaagccttttatgccgcagaaattgcaggactaaatgaatttgaaaatgcaggtataacagctccaagagtaattgcaagtggagagataaatggagatgcatatttattattaagttttcttgaagaaggtagtcaagggagtcaaagagagcttgctcgattagttgctagaatgcatagccaataccaacaagataataaatttggattccgtttaccacatgaaggtgcagatatttcctttgataattcatggactgagacatggaaagagatttttataaatcgtagaatggatcacttacaagatgagttattacgtgtaggattgtggaaacaagaagataaaaaaatgtatgaacgtgtaagaaaagttattgttgatgaactttcaaatcatactagtaagccctctctgttacatggtgatttatggggaggtaactacatgttcttaacaaatggccaacctgctttatttgatcctgcaccactatatggagatagagaatttgacataggaatcactacagtatttggtggatttacacaagagttctatgatgaatataatcaacagttaccactagccaagggatcacaaaagcgtatagaattttatagattatatttacttatgatacatttacttaaatttggaggtatgtatgctgatagtgtacaacgctctatgaaaatcattttagaataa

SEQ ID NO: 6367 - DNA, 1380 bp, Staphylococcus epidermidis
atggcagataaactgcaaagagaattaagcaatagacatatacaattaattgctattggcggggctattggaacaggtttatttcttggtgctggccaatctattcatttagcaggcccatctatcttactaacatacataatagtaggttttgttctctttatgttcatgagagctatgggagaattactgttatccaatttaggatttaaatcgtttggtgacattgctcatcatcatattggttctatggcaggttttatggtggggtggacatattggttaacatggattatttcaggaatggcagaagtgactgctgttgccaagtatgtttccttctggtatccaacaattccaaactggttaacagctgcagcgactattttagttttagttgctttaaatctattcagtgctaaattatttggagaattagaattttggctatctattattaaagttttgactattttagctttgatagccgttggtgttgttatgattgtatttggaatgaagacaagctatggccctgcaacggtaacgaatatatggaaagacggaggctttttccctaatggtgcacaaggtttcttcatgtcattccaaatggcaattttctcatttattggtattgagttgattggaataactgcaggggagactaaagatcctcacaaaacaattcctcaagcaattaataatgtaccgtttagaatattattattttatataggatcgttggcagttatcatgtctgttgtaccatggcaacaattgaatcctgctgacagtccatacgttaaaatgtttggattagttggaatcccttttgcagcaggtattattaactttgttgtacttacagctgcagcctcttcttgtaatagtggtatatttgctaatagccgtacgatgtttggattagctggaagaaagcaaggtccagcattcttacatagaaccaataagcacggcgtaccacattatgctattttagtgacatgtggcttattaagtatttcagtcgtgttaaatgcaatttttaaagatgcgactaaagtgttcgtacaaattacaacattttcaactgttttaaatattatgatttggacaattattatgatcgcgtatctaggttatttaagacatgaaccgaaacagcataaagaaagtaactataaaatgtggggcggaaaatacatggcttacagtattttagggttctttgcatttatttttattatactattgattaatagtgcaacgcgttatgccgtactttctgcacccgtatggtttgttatcatgctattgatgtatcaaaaatataaaaaagaatctcgcaaagctaaaattaaaaatgaggaagagtaa

SEQ ID NO: 6368 - DNA, 1059 bp, Staphylococcus epidermidis
atgtcgacgataaaaaatatcgatggaccaaaggattttgtttttagggtgttatcaggggtagcaattggaatagtagccggactcgttccaaatgcaattttgggagaaatttttaaatactttatgcaatatcatcctattttcaaaactttattaggggtcgttcaagccatccaatttacagtgccagcgcttattggagcattgatagctatgaagttcaatatgacacctttagcaatagctgtagtagcaagtgcctcatatgttggtagtggtgcagctcaatttaaacaaggtacatgggtaattgcgggaattggggatttaattaatacgatgttaactgcatccatcgccgtgttacttattttattaatagaagaacgtgttggtagtatggctttaattgttttttcgacagttgttggtggtttagcagctacaatcggcgtatttactttaccatatgtaaggttaattacaacgggaattggtaacatggttaatagctttactgaattacaaccagtgtttatgagtatgttaatctctatggtgtttagttttataatcatatcaccattgtcaactgtagccatagctattgctattggattatcaggtattgctgcgggatctgcttcaataggtatagcagcgacagaagctgtattattgattggtaccagcaaagttaatcatgtaggtattcctttatcaatatttttcggtggggtgaaaatgatgatgccaaatatggttaaataccctgtcattatgattccgattttcttgacagcggcaatatctggtattgcttcagggattattggtatttcaggaacaaaagaatcagcaggatttggttttatcggaatggttgggcctattaatgcctttaaatttatgcatgttgattctgcatggttaagtttattacttattgtcatcgccttttttgttgtgccgtttctagttgcatggattttagatttaatacttagaagattaattcatttgtatgagaatgatatttttaaatttatgggataa

SEQ ID NO: 6369 - DNA, 1425 bp, Staphylococcus epidermidis
atgtcagggaaactagaagaattacaattaaaagtagctcgattaagtcgacgtactcatgaattaggtattccaattatggtattatttgaggggattcctgcttcggggaagacacgtttatcaaatgaattactattgcacctagatgccaaatattcgcgatttatagctactaaatcgccagagtcaaacgatttacgttaccaatttttacaaaaatattggaatactttaccacaaaagggcaatataaatatttattttagaagttggtattcacactttttagattataaagaaaataaaattaagcatgatcaatataaaaattatgatgttttagtcaatcaaatttatcattttgaatcgatgttaaagaatgataactatgaaattataaaatttttcatagaaataaatgaagaaaaacgcaatgaacatattcaacagacaaaagataatccattaactagatggaaagttcaagaatatgaaaatgttatacctcaagaaagttatctaaatcaaatgcatcaattcatcaacaaagataaagattggaaagtgatcgattacacagagcgcgagcatgcttttgaaaaaatgtacttacatttaatagatagacttgagcaagctataaaaaaagttgaacaacaaacaactaaagtcaacggtaagttcacatcaagctttacgacttctttatttaataataatcttgagaaagtagacaaaaaaacgtataaaaatctcattgttgaattgcaacagagaatgagagaaatccaatttgctttatatgaaagaaagattccccttgttttggttttcgaaggtatggatgctgctggtaaaggtggcaatattaaacgtattagagaaaaattagatccaacaggatatgaagtgaatggtattagtgcacctacggatgtcgaacttaagcatcattatttgtggagatttgctaaaaagatgccaaaatcaggtcatatagaaatatttgatcggagttggtatggtcgtgtactagttgaacgtgtagaaggttttgcaagccagaatgaatggcaacgagcatctgatgaaatcaatcaatttgaaaagatgtggacagatgaaggtacaatcatattaaaattcttcttatgtttagataaagatgagcagcttaagcgttttaaagaccgtgaaaataatcctgataaacaatggaagattactgaagaagattggcgtaatagagaaaaatgggatgaatatttagaagcaagtcatgatatgattgaatctacaaacacttcatatgccccttggtatattgttccggcagatcataaaaaaacgagtcggattgaagtacttaaaacaattattagaaaatgtgaagaagtactatggggagttaagacgtattaa

SEQ ID NO: 6370 - DNA, 708 bp, Staphylococcus epidermidis
atgaaaaaaacagttatcgcttctacattagcagtatctttaggaattgcaggttacggtttatcaggacatgaagcacacgcttcagaaactacaaacgttgataaagcacacttagtagatttagcacaacataatcctgaagaattaaatgctaaaccagttcaagctggtgcttacgatattcatttcgtagacaatggataccaatacaacttcacttcaaatggttctgaatggtcatggagctacgctgtagctggttcagatgctgattacacagaatcatcatcaaaccaagaagtaagtgcaaatacacaatctagtaacacaaatgtacaagctgtttcagctccaacttcttcagaaagtcgtagctacagcacatcaactacttcatactcagcaccaagccataactacagctctcacagtagttcagtaagattatcaaatggtaatactgctggttctgtaggttcatatgctgctgctcaaatggctgcacgtactggtgtatctgcttcaacatgggaacacatcattgctagagaatcaaatggtcaattacatgcacgtaatgcttcaggtgctgctggattattccaaactatgccaggttggggttcaactggttcagtaaatgatcaaatcaatgccgcttataaagcatataaagcacaaggtttatctgcttggggtatgtaa

SEQ ID NO: 6371 - DNA, 1809 bp, Staphylococcus epidermidis
atgaacgagaacaattatagacgtctcaacaaaacttataaaccgcactatttgcctggtttagatggtttgagagctatagcagtcattgggataatcatttatcatttaaatacgaaatggttatctggtggattccttggagtagatactttttttgtcatttctggttatctcataactagtttattattaagtgagtattatagaaataattctattaatttagttaatttttggcttagaagatttaaacgattaataccagcaatgatgtttgttgtcacggttgttttaatatatacattactatttaaacccgaattaattattagtataaaacatgatgctatagcagcacttttctatgtttctaactggtggtatatcatacaagacgtagactattttaatcaatttgctgtagcgccattaaagcatttgtggtcattagctattgaagaacaattctatctattctttccatttatacttttaggcttattaaagtttttcaaaaagagaactacaatgattattctattaatcatctctttattatcattaactgcaatgataacgatacatatgtatacaggtaacaattctagagtttatttcgggactgacacacgtttacaaacgttattattaggatgcttactagcatttatttggccaccgttctctttcagaaaggatatatctaaaggtgctaaagcaagtataagtgcaataggcatagtcggaatggcagtgctcatttatttgtttgtagtggttagtgatcaagataaatggatatatagtggaggattttatgccatctcgttcttaacactgtttgtcattgcaagcgttgtgcatccatcaagtgttttaaagaaaatactaagtttcaagttatttatttatataggtaagagatcgtatagtttatatttatggcactatcctatcattatttttatgaatagttatttcgtacaaggtcagattccttggtttgtatatatttgtgaagtgatacttatgtttgtcatggctgaagtatcttataaatttatcgaaacacctattagaaaaaatggatttaaagcattcacggtgataccgaaaaatttaacaagattttcaagaacgattattgtgttaatcttgcttgttccttctgcattcatagtatttggtgcctatgatagtttgggtaaagagcatgataaacaacaagctgcgaaacaaaaatcttttaaaacgaaccagaaagcaaaacctaaaaagccagatgaaaataatcaagataagtcttcacaacaacattttaatcctaaagaagcgtctccattattgctgggagattcagtaatggtagatatcggtcaagtctttagtgaaaaagtaccaaatgctaatattgatggaaaagttggccgacagttaattgagggtaaagatttaatcaatcaaaagtaccaagattatactaaaaaaggtcagagtgttgtgatagaacttggtacaaacggtgagtttacgaaagatcaaatgaatgaattaattgattctttaggtgaagcagatatttacttaattaaggtaagagtaccgagagactacgagtctactaataataaaattatggaacaagtagctaagaaacataaaaatgttcatattgttgattggtataaaacatctgaaggtcattctgagtattttgcatatgatggtattcacttggaatacagtggtgttaaggcattatctaatgaaatcattaagaaaatgaaagaagttaatgaaaaataa

SEQ ID NO: 6372 - DNA, 462 bp, Staphylococcus epidermidis
atgaattttgaaggtaaattagttggtaaggatttaaaaattgcgattgttgttagtagatttaatgattttattactacacgtttacttgaaggggctaaagatacacttattcgtcatgaagtagaagatacaaatattgatgtagcttatgtgcctggcgcattcgaaattccactcgttgcaaaaaaattagctcaaaaaggtgaatatgatgctgtgataacattaggatgtgtgattagaggcgcaacttcacattatgactatgtatgtaatgaagtagctaaaggtgtttctaaagcaaacgacatttcagatactccggtgatttttggagttctaacaactgaaagtattgaacaatcagttgaaagagctggtactaaagctggaaataaaggttcagaagcagcagttagtgcaatcgaaatggctaatctaattaagcaaatcaattaa

SEQ ID NO: 6373 - DNA, 1182 bp, Staphylococcus epidermidis
atgcaattcgatacaattgagttggctatagaggctttaagaaatggagagagcattattgtagttgacgatgaagatagagaaaatgaaggagatcttgtagctgttacggaatggatggatgataataccattaattttatggctaaagagggtcgtggtctgatttgtgcaccaattgataaatctatagctgaaagattaaaactacaatctatggagcaaaataacactgatatttatggcacacattttactgtaagcattgatcattataaaactactacaggaatcagtgcacatgaacgtacacaaacggctagagcactcatagatgaaaatactaatcctgaagattttcatcgtccggggcacttatttccacttatagcaaaagagaatggtgtgttaacacgtaatggtcatactgaagctgccgtagatttggcacggttaacaggagcacaaccagctggagtaatctgcgaaattatgaatgatgatgggacaatggctaagggtgaagatctccagtcatttaaagaacgccaccatttaaaaatgattactataaaaagtttggttgcttttcgtaaggctgttgaacttaatgttaatcttaaggcaaaggtcaagatgccaactgattttggtcattttgatatgtatggatttacaacggattatagcgatgaagaaatcgtagctattgttaaaggagatttaaaaagcaatcctaatgtacgtatgcattctgcttgtctgactggggatatttttcatagtcaaagatgtgattgcggggcacaacttgaagcgtcaatgaaatatattgacgaacatggtggaatgattatttatttacctcaagaaggtagaggaatagggttaattaataagttgcgcgcatatgagttgatagaaaaaggttatgatacagttactgcaaatcttgctcttggttttgatgaggatttgagagattatcatgttgcagctgaaatattaaagtattttgatataagtgaaattaacttgctcagcaataatcctaaaaaatttgaaggtttagaagattacggcattgagattgtagatagaattgaacttatcgttccagaaacacaatataaccatagttatatggaaactaaaaaaaataaaatgggacatttaatatag

SEQ ID NO: 6374 - DNA, 633 bp, Staphylococcus epidermidis
atgtttacaggtatcattgaagaaataggtactgtacaacaagttcgctctgagcaatcagtaagaacgcttgaaattaaagcacaaaacattttagttgatatgcatattggtgattcaataagtgttaacggtgcatgtttaactgtgatagatttcactgactcaagtttttcagttcaagtcatcaaagggactgaaaacaaaacatatcttggaaatgttcaacgtaatacagaagttaatctcgaaagagccatgagtggtagtgggagatttggtggacatttcgtgttaggtcatgttgatgagcttggaacaatttctaaaatcaatgaaactgctaactcaaaaattatttctattaaaacaactaaaaacattttgaatcaaatggtaaagcaaggttctataactgtagacggagttagtcttactgtatttgatttacatgattatacttttgatatacatcttataccagaaacacgtcgatctactattctttcatctaaaaaagtgggcgacaaagtgcacttggagtctgacgtactattcaaatatgttgaaaacatcatgaatcaaaatcaatcgcagttaacagaagaaaagcttagagcatttggtttttag

SEQ ID NO: 6375 - DNA, 1032 bp, Staphylococcus epidermidis; identical to SEQ ID NO: 4485

SEQ ID NO: 6376 - DNA, 1485 bp, Staphylococcus epidermidis; identical to SEQ ID NO: 4484

SEQ ID NO: 6377 - DNA, 852 bp, Staphylococcus epidermidis; identical to SEQ ID NO: 4483

SEQ ID NO: 6378 - DNA, 216 bp, Staphylococcus epidermidis; identical to SEQ ID NO: 4482

SEQ ID NO: 6379 - DNA, 480 bp, Staphylococcus epidermidis; identical to SEQ ID NO: 4481

SEQ ID NO: 6380 - DNA, 444 bp, Staphylococcus epidermidis; identical to SEQ ID NO: 4480

SEQ ID NO: 6381 - DNA, 444 bp, Staphylococcus epidermidis
atgagtaaaaatgaattcatcaaaagagtaaataagcaattatggtttttagatgctaaagagaagaatgcgcttaacaaatatattgactcagttgatcagaataaaagtattgataccaataagccaataagattttcaaatgaatatttaaagaaatttatatttaatcataagaaaaaatcgacttctcatgtgttcgtacttttaatttgtatggttttagcttatgcatttttgctcggactctttattttagggttagtggccagcttagctatcgtgcatgcctatatcaacccaaatattgatttatcagtttttgttatgttaactgttttgattgtcgcgataattataatgattgctagtttatatgctattaaacatacgactgcattgtttactaagaagcttttagaatataaatttaataaaaggtag

SEQ ID NO: 6382 - DNA, 714 bp, Staphylococcus epidermidis; identical to SEQ ID NO: 4478

SEQ ID NO: 6383 - DNA, 309 bp, Staphylococcus epidermidis; identical to SEQ ID NO: 4477

SEQ ID NO: 6384 - DNA, 366 bp, Staphylococcus epidermidis; identical to SEQ ID NO: 4476

SEQ ID NO: 6385 - DNA, 354 bp, Staphylococcus epidermidis; identical to SEQ ID NO: 4475

SEQ ID NO: 6386 - DNA, 780 bp, Staphylococcus epidermidis; identical to SEQ ID NO: 3546

SEQ ID NO: 6387 - DNA, 939 bp, Staphylococcus epidermidis
atgccaaattttgagaaatacaatttatcacaagtaaaaactgaaagattttatcaactgcctaaatatttatttgaagatacatattttaagaaaatgtcagcagaagccaaaattatgtatgcgttactaaaagatcgttttgaattatccatccaaaatgaatgggtagataaaaataataacatttactttattttcagtaataaacatttgtgtgagtacttaggttatgcagaacaaaaaatcataaaattgaaaaaagagttaataaattttaatttactgactcaagaacgtgttggccttaataaacccaatagattatatttattaaaacccaattatgatattgaagtcagtcataccaaggaacttctaaattcacagttccagaacaatgaatttagaagttctagaactatgaatttaagtggtcaagaaccaccaaattcacagtctaatgatactgatttaagtaagactgactatataacaactaagaataatgatatgaatgatatgaatgatatatataacaattcaacaaaccacaatcattcgaatcatacaaatcatcaacaatccgaatttgataatgacgcacttaagttccaagttctcgaagaattgccacaacaaattcaggactatttaagtaaatttgaaattcgagaaatccgaattattaaaagtgtattactcaaaggaaaaaaatcatttaataatgcacacgatacctattatcgtttagaagatgttgaatttgaaattgtaagtgtgttgaaacgttttaaagcaatgctgctacaaaagaatgaaactgttgaagctatgcaagggtatctaatgcaatcaattaaagctgaacttgaagaaacacacgcactgtatatgcgacgtcaaaacattaaaaaatataacatctttaatcaataa

SEQ ID NO: 6388 - DNA, 447 bp, Staphylococcus epidermidis; identical to SEQ ID NO: 3544

SEQ ID NO: 6389 - DNA, 300 bp, Staphylococcus epidermidis
atggcaacgactaaattaagtgccaccaaatcaacatcacgagcgattaattacgctgaaaaacgtgcagtcgaaaaaagtggcttaaattgtgatgtcgactatgccaaatcgagttttaaagcttctcgtgagttatatggtaaaaccgatgggaatcaagggcatatcattatacaatcgttcaaacctggcgaagtcgcgcccgaacaatgtaatcaattaggattagcactcgctgaaaagctcgcaccaaatcatcaagacaagaagaaactcgttcaactcgtttctaaatga

SEQ ID NO: 6390 - DNA, 198 bp, Staphylococcus epidermidis; identical to SEQ ID NO: 3542

SEQ ID NO: 6391 - DNA, 384 bp, Staphylococcus epidermidis
atgagcgaacaaaacacatttgtggctagcaacgaaactgttgggcgaaaccgtaaacccaaccgtaaggcgccgaaacaaattagttttcgtgtgagcgaatccgaatatttaaagttacaacaatcagctgaaactttaaatatgagtgtgcctgctttcgttaagaaaaaggcacaaggcgcccgattggtcgcacctaaattggataaggcaacgcgacaatcggtagcgaaagatttgagtatgttgggcgcaaatgccaatcagattgccaaatattgcaaccaacatcaacacgaagcgccgaactatgaagcattagaacgtaatatcagcgaattacgtgaaaggttggatgatatatggacaacactaaagtaa

SEQ ID NO: 6392 - DNA, 1200 bp, Staphylococcus epidermidis; identical to SEQ ID NO: 3540

SEQ ID NO: 6393 - DNA, 705 bp, Staphylococcus epidermidis; identical to SEQ ID NO: 3539

SEQ ID NO: 6394 - DNA, 468 bp, Staphylococcus epidermidis; identical to SEQ ID NO: 3538

SEQ ID NO: 6395 - DNA, 1173 bp, Staphylococcus epidermidis; identical to SEQ ID NO: 3537

SEQ ID NO: 6396 - DNA, 732 bp, Staphylococcus epidermidis; identical to SEQ ID NO: 3554

SEQ ID NO: 6397 - DNA, 621 bp, Staphylococcus epidermidis
gtggaacgtaatggtaggtcttttgaaaaatttgttttatttacttcatacaaagtagatttagacgaagaatgtttatctattagtgttaatcctgatttaaaacatattttaaattctataacagctgattttacgaaatttgaattaaaagaaatgacccatcttaaatctacttacgctaaaaatatgtttagattgcttaaacaatataaacatactggttatattaaaataaatatatctgattttaaaaatcgtctagatatacctaaaacttatcagatgaatgatataaccaaacgtgtattaaagccaataattaatgaactttcttcaatttttaataatcttaatatcaataaaattaaggcaaaaaaaggacgtaaaattgaatggctagagtttacctttgacgctgagaaacgtattcactccaagcgacagcctgaaataaaagatgtaggtaaaccacgacagatgataagtcgtgagaaaacgccaaaatggttagaagaacgagataatccgaaatatcagaataaatataacgttgacgaaaattttgaaaaagataaagaagcttttttaaagcaacttaaagtggattgggaagaataa

SEQ ID NO: 6398 - DNA, 396 bp, Staphylococcus epidermidis
atggtaacattatttacttcaccaagttgcacatcttgccgtaaagcgaaagcatggttacaagaacatgatattccgtatacggagcgtaacattttttctgaacatttaacaattgatgaaattaaacaaattttaaaaatgactgaagatggaactgacgaaattatttcaacacgttctaagacatatcaaaaattgaatgtagatatagattcattaccattacaagatttatactcaatcattcaagataatcctggcttgttacgtcgtccaattattttagatgacaaacgtttacaagttggatacaacgaagatgaaattcgtcgtttcctatcacgaaaagtacgtacgttccaattacaagaagcgcaacgtttagttgattaa

SEQ ID NO: 6399 - DNA, 990 bp, Staphylococcus epidermidis
atggaaactttattctcaggaattcagccaagtggtattccaacaattggtaactacattggtgcattaaaacaatttgtagatgttcaagatgactatgaatgttttttctgtatcgtagaccaacatgcaataacggtaccacaagaccgcttaaaattacgcaaacaaatacgtcaactcgcagcaatttatttggcaacaggtattgatccagataaatcgactttatttattcaatctgaagtccctgcacacgtgcaagctggttggatgcttacaacaatagcttctattggtgaattggaacgtatgactcagtttaaagacaaagctcagaaacgcgcagatggagtgcctgctggtctactcacttacccaccattaatggcggctgatatcgtgatttacaacactaacattgtccctgttggtgatgatcaaaaacaacatatggaactgacacgtaatttagtagatcgtttcaatagtagatataacgatgtattagtaaaaccagaggtacgaatgcctaaagttggtgggcgtgtgatgagtttacaagatcctactaaaaaaatgagtaaaagtgatgataatcagaagaatttcatttctttattggatgaacctcatgtcgctgccaaaaaaattaaaagcgctgtaacagattctgacggtataataaaatttgatcgtgagaataaaccaggcatttcaaatttactttcaatatattctggtctaactaatgaatctattaagaatattgaatctaaatatgaaggtgaaggttacggtaaatttaaaggtgatttatcggaaatcgttaaagattttcttattaatttccaagaaaaatatgcaagcttttataattctgatgacctagatgatattctagataaaggtaaagaaaaagctcaaaaagcttcatttaaaacattgaaaaaaatggaaaaagcaatgggcttaggtcgaaaaagataa

SEQ ID NO: 6400 - DNA, 1644 bp, Staphylococcus epidermidis
atgaaaggttttaaagtcttaattattttattaagtgtatgcataattttatctgcttgtagtaataagcagagtttatattcagaccaggggcaagtttttaggaaggtaatcacacaagatatgactacattagatacagctttaattacagatgctgtttctggtgatatagcagctcaagcttttgaaggattatatactttaaataaagaggataaagctgagccagccattgcaacatcttttccaaagaagagtaatggtggcaaaacacttacgattaatttaagaaaaaatgcaaaatggtccaatggagattcggtaactgcatatgacttcgtatatgcgtggagaaaggtagttaatcctaagacggcttctgagtttgcatacataatgagcgatataaaaaatgcagatgaagttaatgcaggtaaaaaatcagtcaaagatttgggtatcaaggctataggtaaatatcaattacaagttgatttagaaagacctgtaccttatattaatgaactattagcacttaatacatttaatcctcaaaatgagaaagttgctaaaaggtttggagaacaatatggtacaactgctgaaaaagcagtgtacaatggaccatttgaggtaacaaattggaaagtggaagataaaattcaattagttaaaaatgaacaatattgggataaaaagaatgtaaaattagataaagtgaactataaagtattaaaagatcaacaagcaggtgcatcgttatatgatactggctcggtcgatgatactattataacttctgaacaagttgataaatatagaggagaatctgctttgaattatcgtttaacagcagcaacattctttattaaaatgaatcaaaaaacagttcctgaatttaaaaataagcattttacattggctatatctcaagcaataaataaaaaagggtatgtcaattctgttttaaatgatggttcgctaccatcaaataattttactggagtaggaactgctgatacaccggatggcaaagattttgcaagaaccatcaaatcaccattaaaattcaaccctgatttagcgaaaaagaattggagagaagcacaaaaagaattaggaaaaaataaatttacttttacgatgaacacacaggatacacctgcttcaaaaattgctgccgaatatataaaatctcaaattgaaagtcatttgccaggtgtgacactcaaaattaaacaaatgccatttaaacaaaaaactactttagaattagcaaataactatgaagcaagttattcagggtggagtcctgattatcctgatccaacagcatttcttcaaacaatgacgaaaaataatgcacagaataatacagattggagtaataaagaatacgatcaattactcaaagatgctaatagcaagcttttacgaaagccaggtgaacgtaatacctcattacaaaaagcggaatatatcttattacatgaagcgccagtcgctcctgtttatcaaaaaggagaagcacacttaacgaatccgcaagtaaaaggattacaatatcacaaagtagggcctgaaacgacgcttaaacatgtctatattgataaatcaatcaatagggagacaggtaaatag

SEQ ID NO: 6401 - DNA, 942 bp, Staphylococcus epidermidis
atgagtaatgaaaatgtattattacaagttaaaaacttaaaacaatattttaatcaaggtaaacataatgaagttaaagcgattgataatataagttttgatgtttataaaggggaaacgttagggcttgtaggagagtctggatgtggtaaatcaacgactggaaaagccattatcaaattaaatgatattactgatggtgcaattgagtatgatggtaaagatattcatcaaattagaaaacgtaaagagcgattgaagtttaataaaaaaattcaaatgatatttcaagatccatatgcatctctaaatcctcggttaaaggttatggatatcgtagctgaaggaatagatattcacaaacttgctagtagtcagcgggatcgaaagaaacgtgtatacgaccttttagaaacagttggtttaggtaaagaacacgcgaatcgttatccacatgagttttcaggcggacaaagacaacgtattggtatcgcacgtgcattagctgtagagccagaatttattattgcagatgaaccgatatcagcattagatgtatcgattcaagctcaagtcgttaatcttttattaaagctacaacgtgaacgtgatattactttaatgtttattgctcatgacttatcaatggtgaaatatatttccgatagaattgcagtgatgcacttcggtaaaattgtagaaattggaccggctgatgatatttataattatccattacatgattatactaagtcattattaagtgcaattccacagcctgatcctgatgttgagagaaatcgtcaacgtgttttatatcatgaagatgcaacgcttaatgaagaacgtcaattaaatgaaattagaccacaacattatgtattttctactcaaaacgaagcagttaaattgaaacaaaagtatggtttgtctgttaaataa

SEQ ID NO: 6402 - DNA, 1080 bp, Staphylococcus epidermidis
atgacagaaacggtattagaagtaaatgatttgcacgtttcctttgatattgctgcaggagaagtgcaagctgtcagaggcgtggattttcatttgaataaaggggaaacgttagccattgttggagaatctggatctggaaaatctgtaacaactaaggcaattacaaaactttttcaaaaagatacaggaagaataaaaaagggagaaatcttatttttaggtgaggacttagctcagaaaagtgaaaaagaactgatacagctaagaggtcgagatatttcaatgatatttcaggatcctatgacttctttaaatccaacaatgcaaatcggaaagcaagtcatggaacctctgattaaacataagaaattaagtaaagcaaaggccaagcaaagagcattggaaattttgaatttagttgggttacctcgtgctgaaaaacgatttaaagcctatccacatcaattttcaggaggacaacgtcagagaatagttattgcaatagcattggcatgtgagcctaaaatattaattgctgatgagcctacaactgctttagatgtgacaatgcaggctcaaattttagatcttatgaaagaactacaaaataagattgaaacttcaattatctttattacgcatgatttaggcgttgtagcaaatattgcggacaaagtagccgtaatgtatgggggacagatggttgaaacaggggatgtgaatgaaatattttatgatcctaaacatccctatacatggggattactttcttcaatgcctgatttaacaaccagtaatgacacggatttaattgcaattccaggtacaccaccagatttacttcatccacctattggtgatgcttttgcacgtagaagtcgatatgccttagatattgatttcaaggaagaaccgccttggtataaagtgtcacccactcattttgtaaaatcttggttgttagatgcaagagctccgaaagttacgccaccatcaatggttcaaaaacgattaagaacaatgccaaataattataaacaaccacaaagagtagagagggtggcttttaatgagtaa

SEQ ID NO: 6403 - DNA, 1071 bp, Staphylococcus epidermidis
atgagtaataaagaagatgttacaaacattaatggcgatatttctaatggcacgatgtcacatacaagtaatgatatttcgaatacagattttataattagagatttagacttgaatcaagagccggaaatgccgcgtgaaagtaagaatttttggcaagatgcttggtcacaattgaaacgtaataaattagcagtaatcggaatgataggtttgttgcttatagttattatggcatttataggaccattaatgaataaacacgattttgctgagcagaatgttgatcatcgtaatctcccagcaaaaataccattattagatcatgtttcatttttaccttttgacggtaaaggtacggacggtaaaaatgcttacaaagaagcaggtgcgaaagaaaactattggtttggtactgatcaacttggacgtgatttatggacacgtacttggaaaggtgcgcaaatttcactttatattggtgtagttgctgcattattagatatttgtattggcgttgtatatggagccatttctgggttctttggaggcagggtagatgatgtgatgcaaaggattttagaaattattgcttctatacccaatttaattgtcgttattttattcgtacttatttttgaaccttcaatttggactattatattagctatgtcaattactggctggctggggatgagtagagtggtacgtggagaatttttaaaattgaaaaatcaagaatttgttttggcatctcaaacattgggtgcttctaaattcaagttaatctttaaacatatactacctaacactttaggagctattgtcgttacatcaatgtttaccgttccaagtgcaatatttttcgaagcatttttaagctttattggaataggggtgcctgcacctaagacgtcattaggatctcttgtcaatgatggacgtgcaatgttgttgatacatcctcatgaattatttattccagcaatcattttaagtttattgattttattcttctatctatttagtgatggactacgtgatgcattcgacccaaaaatgcgaaaataa

SEQ ID NO: 6404 - DNA, 927 bp, Staphylococcus epidermidis
atgactaaatatgtgttgaaacgattgtgttatatgtttgtgtcgttatttattgttataacaattacatttttcttaatgaaattaatgccaggatctccgtttaatgacacaaaacttaatgcgcaacaaaaagaaatattaaatgaaaagtacggtttgaatgatccagtagcattacaatatgttaattatttgaaaaatgtagtaacaggtgattttggcaactcatttcaatatcataatatgccagtgtgggatttagttaaaccacgattgataccttcaatggagatgggaataacagctatggttattggtgttgttttaggtttagtattaggtgttgctgctgctactaaacaaaatacatgggtagactatacaacaacaattatctctgttatcgcagtatcagtgccgtcatttgtcttagcagttttattgcagtatgtatttgcagttaagttagaatggtttccagttgcaggatgggaaggtttttctacagctattttaccttctctagcactatcagctacagttttagcaactgttgcaagatatattagagctgaaatgattgaagtactcagttcagattacatacttttagctcgagctaaaggaaattctgctttaaaagtgctctttggacatgcattacgaaatgcattaattcctattattacaatcattgtacctatgttagcaggtatattaacaggaacattaacaattgaaaatatctttggtgttccaggattaggtgatcaatttgttcgttctataactacaaatgatttttcagtcatcatggctacaacgatattattcagtactttatttattgtttcgatctttattgtagacattttatatggtgttatcgatccaagaattcgtgtgcaagggggcaagaaataa

SEQ ID NO: 6405 - DNA, 372 bp, Staphylococcus epidermidis
atgtccataaattcttatttgctttcgtcattatttacgccagttttatcaataattatatggttattttattcaaatcactttataaatttagtcaacatcttattttatacatcattcattatttttataattgctttccttattttactcattcaagaaggaatatttgatgctacaagttttggatttcgtcgtttaaagtatcaactttcctcaactaagagaaaacgtatgatgaaaaatgaccactttttcaatccacaaaaagttaaaaaagaaagttatattatttctccatgggtagttccaacattgattattaacctcacttatataattgtgagtatcggagtatctttattaatataa

SEQ ID NO: 6406 - DNA, 1245 bp, Staphylococcus epidermidis
atgaataaaaataatagagttgttataacgggtatcggagccttatctccaattggtaacgatgctaaaacaacatgggacaatgcactaaaaggtgttaacggtatagataaaatcacaagaatagatactgatgattataatgtacatcttgctggtgaattgaaagattttaatatagaagaccacattgatagaaaagaagctcgccgtatggatcggtttacacaatacgcggtggttgctgcaagagaagcggttaaagatgcacaattaaatattaatgaaaaaaatgccgaccgtattggtgtatggattggttctggtatcggtggtatggaaactttcgaagttgcacatacaacacttgtagaaagaggaccacgtcgagtaagtccatttttcgttccaatgttaattcctgatatggctactggtcaagtttctattgatttaggtgccaaagggcccaatggttctacagtaacagcttgtgctacggggactaattcaataggtgaggcatttaaaattattcaacgtggtgatgcagatgcaatggtgactggtggaacagaggcacctattacacatatggcaatcgcagggtttagtgcaagtcgtgcattatctacaaacaatgaccctgaaacagcttgtcgaccattccaagaaggccgtgatggctttgttatgggtgaaggggcaggtattgttgtacttgaatcattagattcagctaaagagagaggtgctgaaatttacgctgaagttgtaggttatggttcctctggcgatgcacatcatattacagcacctgcgcctgaaggtgaaggcggctcaagagctatgcaagctgctttagatgatgctggaatcaaagctcaagatgtacagtatttaaatgcacatggcacaagtacaccagttggagatttatatgaggttcaagcgattaaaaatacattcggtgatgctgcgaagtcattaaaagtaagttcaactaaatcaatgactggacatttattaggtgctacaggtggaattgaagctattttttctgcgctatcaattcgtgattcaaaggtagcccctacaatacatgcaatcacaccagacgaagaatgtgacttggacattgttccgaatgtagcccaagacttagacattacctatgcaatgagtaatagtttaggatttggtggacataatgcagtgttagtatttaaaaaatttgaagactaa

SEQ ID NO: 6407 - DNA, 942 bp, Staphylococcus epidermidis
atgaatgtgggtattaaaggttttggtgcatatgcacctaaaaatattatagacaatgcctattttgagcagtttttagaaacttcagatgaatggatttctaaaatgactggtattaaagaaagacattgggcagacgaagatcaagacacatctgatttagcatacaatgcaagtattaaagcgatagaggatgccggcattcagccagtagatatagacatgattatcgttgctacagctactggggatatgcctttcccaagcgtggctaacatcttacaagaaagactaggaacaggtaaggttgctactatggatcaacttgctgcatgttctggctttatgtattcaatgattactgctaaacaatatatacaatctggtgattacaaacatattttagttgtgggtgctgataaattatctaagattaccgatatgactgaccgttctactgctgtattatttggagacggtgctggagctgttgtcatgggagaagttgctgaaggtcgtggtatcattagctatgaaatgggttcagacggtagtggtggtaaatacttgtacttagatagagaaactggcaaactcaaaatgaatggtagagaagtatttaaatttgctgtgagaattatgggtgatgcatctacgcgtgtagttgagaaagctggtttatcgtctgaagacatagacttatttgttccacatcaggctaatattagaattatggaatctgcgagagagagattaggaatagaaagagaaaaaatgagtgtttcagtaaataaatatggtaatacttcggctgcctcaataccattaagtattaatcaagaattgcaaaatggaaaaatcaaagatgacgatactttagtcttagttggcttcggtggaggtctaacttggggcgcaatcgttattaaatggggaaaatag

SEQ ID NO: 6408 - DNA, 183 bp, Staphylococcus epidermidis
atgacattcatttgggcagtattgttacttcaaatggttaatttcgtattgaatagcttaaatagtggaccagaactaaatgtaattaatccaattattattgctgtcatcttcactattgttgtagctattttagatccaattcttaagccgtctaaaggttcaaatcaatacgaatcttaa

SEQ ID NO: 6409 - DNA, 276 bp, Staphylococcus epidermidis
atgttattaaatatcatagaaggagtgacgcatatcaatcctaaagtattaaaagctctagcaatcacatctaatgtactattagttattggaatcatctgtttaattatgctaaagctcatgttagctattgcattttttgttgtatcattaacaattagtctcgtcatttttaatgttatgttcagacaccgtacaggtatgaaaattgcaattaatgtctcgttctttatagtgatgattgctatcgtaatagcctattttgtattattttaa

SEQ ID NO: 6410 - DNA, 777 bp, Staphylococcus epidermidis
atgttaaagaatactcggcttcgaatgacgacattgttcataattagcatactcgtcattttagcaatactttttcttatatttgatacaaacctttttaaaaatgatgttaaacatacatttaaagaagcggtgtctcttcaaacaagtgagggaaatatccatactaaagaagttaatggtaagtttatatatgcttccaaacaagatatagagaaagctatgcaaataaaacatagtgataatgatttgaagtacatggatatatcagaaaaagtacctatgtcagagaaggaagttaaccatatcttaaaaggaaaaggtattttagaaaataagggatcaacgtttattaaagcccaagataaatatgaagtgaatatcctatatctcatcagtcatgcactagttgagacaggaaatggtcaatcagatttatcaaaaggaattaaagaaggtaaccatcactattataacttttttggtattggtgcttttgatgaagatgctgtaaagactggtaagagttttgctaaacagaagaagtggaccactcctgaaaaagcgataatgggtggcgcgtggtttgtgagataccattactttaaaaataatcaattgagcttatatcaaatgcggtggaacccacaaaatccaggccaacatcaatatgctagtgatattcagtgggccaataatatagctgatttaatggagaaatactatgataaatatggaataaaaaaagatcatataagaaaaaaatattacaaataa

SEQ ID NO: 6411 - DNA, 1125 bp, Staphylococcus epidermidis
atgaaaatagcaatagtaggcgcaggtataggtggtttaactgctgctgcgttattagaagaacaaggtcatcaagttaaagtgtttgaaaaaaatacttctataaacgaattaagcgctggtattgggataggagataatgttttaaaaaaattagggcatcatgaccttgctaaaggcattaaaaatgctggtcaaaatcttaccgcaatgaatatttatgatgagcaaggcaccccattaatgagcgctaaattgaagtctcattccctaaatgtcgcattatctagacaaactttaattgagatcatacagtcatatgtcgaagaatcatctattcacacaggatttaaagttactaaaattgaacaaacgagttgtaaggttaccctacattttaccaaacaggaaagtgaatcgtttgatttgtgtattggtgctgatgggttacattctgtagtaagagagtctgtaggtgcacgaactaaaattcgttacaatggttacacatgttttagaggcatggttgaagatgtacaatttaatgaccaacatgttgcgaatgaatattggggtgttaaaggacgagtaggtatagtcccattaattaatcaacgtgcttattggtttattactgttcatgctaaagaaggagatccaaaatatcaatcttttggaaaaccccatcttcaagcatattttaatcactttccaaatgaagtgagaaatgtgttagaaagacaaagtgaaacaggtatattacttcatgacatatatgatttaaaaccactgaagacattcgtttatggacgtactattttaatgggcgatgctgcgcatgccactacgcctaatatgggacaaggtgctagtcaagctatggaagatgcaattgtattagtgaattgtttagaaaaatatgattttaataaagcgattgagcgttatgataaacttagagttaaacataccgcaaaagtgattaggcgttcgaaaaagataggtaaaatggctcaaaagcatcataaattaactgttaaacttagaaataccgcgatgaaattaataccaaatgctttggcatcagctcaaacaaaatttttatacaaatccaaagaaaagtaa

SEQ ID NO: 6412 - DNA, 954 bp, Staphylococcus epidermidis
atgacaaaagtttatattgcaggcgcaatacctgaagtgggacttaacttattgaaagaacattttgaggtagacatgtatgatggcgaggggcttattgataaagaaaccttaaaaaaaggggtagaacatgcagatgcattaattagtttactatcaacttctgttgataaagatattattgatagtgctaataaccttaaaattatagcgaattatggtgcaggttttaataatattgatgtcgaatatgcaagacaacaatatatagatgttacaaatacaccacacgcttcgacaaatgctactgctgatttaacaatcggtttaattttatcagtagcgcgtagaattgtagaaggagatcatttatccagaacaacaggttttgatggttgggcacccttattcttccgaggcagagaggtatcaggaaaaactattggtattataggcttaggtgaaattggaggtgcagtagctaaacgcgcacgcgcatttgatatggatgttctgtacactggtcctcatcgtaaggaagaaaaagaacgagatatcggtgcgaaatatgtagatttagatactttacttaaaaatgcagattttattacaatcaatgcggcatataatccatcactgcatcatatgattgatactgaacaatttaataaaatgaaatctactgcctatttaattaatgcaggacgtggtccaatagtaaatgaacaatctttagttgaagcccttgataataaagctattgaaggtgctgcattggatgtatatgaatttgagccagaaatcactgatgcattaaaatcatttaaaaacgttgtgcttacacctcacattggtaatgcaacatttgaagctagagatatgatggctaaaattgttgcgaatgatacaataaaaaaattaaatggtgatgaacctcagtttattgtcaattaa

SEQ ID NO: 6413 - DNA, 318 bp, Staphylococcus epidermidis
atggcttggttatttctaatgatagccggaagttttgaaattttgggtgttgttctattaaatgaactatcacgtacaaagaataaaatttatgtcatttttttaggattagcatttatattaagttttagtacattaaaatttgcaatggtatctattcctatgggtactgcatacgctatatggacaggaattggtacagctggtggtacattaattggaatgattttttatagagaatctacacgtttaagtagaattttatgtattttattaatcatcatttcagttgttggattacgtttaataagttattaa

SEQ ID NO: 6414 - DNA, 327 bp, Staphylococcus epidermidis
atgcaatggcttaaagttatattagccggttttattgaaatcatctgggtcactggacttgatcaagcgcactcattgtttacatggatatttaccctcttttttattgctttaagcttttttctagtcattgatgcttcgaagcacttaccagttggtacggtatatgcattttttgtcggaatcggtgctgttggtacagtgttagttgatatgattttcttcaaccaaccatttactttcactaaaatctttttaataatgacccttattttaggaataataggattaaaactgacaactgatgcaacgaaagaagggagataa

SEQ ID NO: 6415 - DNA, 474 bp, Staphylococcus epidermidis
atgaaaaaaatcaaagcaatctcgacattggtagctggacttggtatagcatttctaggtcacacaacacatgcagatgcggctgaaaataacaatcaacaacaaagtacatataactatagtacaactgaagtatcattttctaattcaggaaatttatatacttctggccaatgtacttggtatgtttatgataaaactggtggaaaaatcggatcaacatgggggaatgcaaatagctgggcaactgcagctcaagcagcaggattcactgtaaataatacacctgaagaaggtgcaattatgcaatcatctgaaggtgctttcggacatgttgctttcgttgaaagtgtcaataatgatggttctattactgtatcagaaatgaactatgatggtggtccattcgctataagcacacgaacaatctctgccagtgaagcaagttcatataattacatccacctgaattaa

SEQ ID NO: 6416 - DNA, 495 bp, Staphylococcus epidermidis
atggataaacacacgaattacaatgaattaaaatctaagaatgtgtctgatcaaacttcatcagataatttatcgaatgacagtacagtacaccaccaatcaactattcaaaatgaggaaagtcaagataatcgtttaatggcaatgttaatttatttattaagtttatttactggtatcattggtcctttgattatttggttactcaaacgtaaagagtcccgacttattgatgtatctgggaaaacgtatctgaactattttatttcttatactatctattcaacagtaggcgtgatatgtatgtttatgattgttcctttaatgaatataagtgaaagtttagccatcttattattaattttgctgctggtggtagtcttcatcttattggcattgttaataatgtcatttgtgtgtacaattattgcttgcgtaaaatatatgtctggcaaaacttacactatcccactcacgataccttttataaaataa

SEQ ID NO: 6417 - DNA, 1071 bp, Staphylococcus epidermidis
atgaaaatagctattgtaggttcaggtaatggtgcagtaactgctgcagtggatatggtagataaaggtcatgatgtacgattatattgtcgtaacgaatctattagtaaatttgatgtcgccctagaaaaaggtggctttgattttaataatgagggagaagagaagtttatagagtttactgatattagtgatgatatggagtatgttttagatggtgcagacattgttcaggtaattattccttcatcattcattgaatattatgctaaagtgatgtcaaaatttgtgacgaacgaccatctcattttctttaacattgctgcttcaatgggttcaatacgatttatgaatgtattagaagatcgtcatattgatgtccatccacactttgcagaagcaaatacattaacatatggtacacgtgttgactttaacaatgctaaagtagatttatctttaaatgttcgtcgggtgttcttttcaacatttgatcgtagtgagttaaatgaaagttatgaaaaggtatctaaaatttacgattatcttgtaaaagaagaaagtttacttaaaactaatcttgaaaatggtaacccagaagtacatcctggaccaacattattgaacgttggacgtattgattattcagaagagttttctttatataaagaaggcataacaaaacatactgtgagattattacatgctattgagatagaacgtttaaatttagggagaaaattaggttttgaattatcgactgccaaagaatcacgtattcaaaggggttatttagaacggaaagacgaggatgaaccgttaaatcgtctttttaatactagtcctgtgttttctcaaattccaggaccgaatcacgttgaaaaccgttatttaactgaagatatcgcatatggattagtattatggtctagtttaggacgtgtcattgatgtcccgacacctaatatcgatgctgttattatgatagcttcaactattcttgaacgcgatttctttgaagagggcctcactatcgaggaattaggcttagataaattaggattagagtaa

SEQ ID NO: 6418 - DNA, 1398 bp, Staphylococcus epidermidis
atgactcaaaagtatagatatcctacttttttagaatctatttctactattttagttatggttgtcgttgtagtaattggttttgttttctttaatgtcccgatacaaatattattattaatttcttcagcttatgcagcattgattgcacatagagtgggattaaaatggaaggatttagaagaggggattactcatcgattgagcacggcgatgccagctatctttattattttagctgttggaatcattgtaggaagttggatgtattctggaacagttccagcgttaatttactatggacttaaatttttaaacccaagttatttattagtatctgcatttataatcagtgcaatgacttcaatcgctacaggaacggcttggggatcggcatctacagcaggcattgcactcatatcaattgctaatcaattaggtgtgccagcaggtatggctgctggtgccattattgcaggggcggtttttggtgataaaatgtctccattatctgatactacaaatttggcagctcttgtaactaaagttaatatttttgctcacattaaatcgatgatgtggacaacaatccctgcttctataataggattggctatatggtttattgttggattacaatataagggagacgcaaatacacaacaaattcaaaatctattaaaagaattaacaacaatttataacttgaatttttgggtatggatcccacttattatcatagttttatgtttaatatttagaatctctacagtaccgtcaatgcttatctctagtatcagtgctttagttattggaacattcgatcatcaatttaatatgaaagatggttttaaagcttcttttgatggatttaatcatacaatgctacaccagtctcatatttcagataatgctaagacgttgattgagcagggtggtatgatgagtatgactcaaatcattgtaactatattttgtggttatgcttttgctggtattgttgaaaaggcaggttgtttagacgtaattttagagacaatagctaaaggcgtaaagtcagttggaacactaatattaataactgtagtttgtagtattatgctagtatttgcagctggagttgcttcaatagttattattatggtaggcgtacttatgaaagatatgttcgaaaagatgaatgtctcaaagtcagtgttatctcgtacacttgaagattcaagtacaatggtattgccactcattccatggggcacatctggtatatattatgcacaccaacttaatgtttcagttgatcagttctttatatgggcaatcccatgttacttatgtgcattcattgcaataatttatggctttacaggtataggaattaaaaaaataagtagaaaataa

SEQ ID NO: 6419 - DNA, 1425 bp, Staphylococcus epidermidis; identical to SEQ ID NO: 2766

SEQ ID NO: 6420 - DNA, 1002 bp, Staphylococcus epidermidis; identical to SEQ ID NO: 2765

SEQ ID NO: 6421 - DNA, 252 bp, Staphylococcus epidermidis
atgttgaaaaaaatattattatctctagttgtattttatcaacgttttatttcgccacttacaccaccaacatgtcgattttatccaacatgttcacaatacactagagaagccatcgaataccatggtgcactaaagggactttatctcggtgtacgacgcatacttaaatgtcatccattgcataaaggtggctttgatcctgttccattaaaaaaagataaaaattctaaaaccacacatcatcattaa

SEQ ID NO: 6422 - DNA, 468 bp, Staphylococcus epidermidis
gtggagtttgaggataaagatggaaggattgtaacattgaactataaaaatgaaaatgatatgcctaatggcaatcacgttcttgcaattcctgtatacaataatcagttattatttacaaaccatcaacatcgtgggatagagtttcctggtggtaaagttgaaataagcgaacaaagtaaagaagcagtaattagagaactatacgaagagacgggtgcaatcgcaaaatttatctattattttgcacagtatagtataaaaatggggcatgatgagccgtttataaaggacgtttacttcgttgaagtaagtcatttggaatatgtagatacctattacgagactttaggcccttgtctttatcatcaaattaatgatattcctttaaataaaagaagttttttaatcaatgataaggcgattcttcattgtttggaaagggtgaaaacacttggattttattaa

SEQ ID NO: 6423 - DNA, 762 bp, Staphylococcus epidermidis
atgccaatcgaatatgaaactcatttttttaatgaagtaacatatcttgtagattatttaaaagtcaaggctctgatgatgatttcgaaaaataaaaaagatatcaaacgtatcgttatatacttaagaggtggtaaagggcaagttggaagagtgagagctgcaagacttatgcaatttgcaaatgaatatactttagttataggtccatactatagaggaaataatggaagtgaaggaagagatgaattttactgcggtgatttaaatgatgtaacgcatttgattcgacttttaaatcaaaactatccttctgcatttatacatatggtaggattttcacgtggaggtctacaaggattacttacttttaatgatttgcctgtagatagttatatgatttggggtggcgtatctgatatacatttaatgtatgaagaacgagttgacttgagaggtatgctacgacgaatggttggacatccaaaaaaagatgcgaaagcttataaaagcagagatgcaatgcaatttataaaaaaagatagtcctcctattcttattattcatggtggcaaagatattcaagttggaatacatcaagcttatgatttagaaaaaaaattaaaatccaaaggaatttattatcaaacctattatcaattggatgaaggtcatgtaccacgacctcctgcgatgagagacgtaattcgatatatacatcaatggatgaacgacgtcgaaaataaaaatttaaatatatag

SEQ ID NO: 6424 - DNA, 1593 bp, Staphylococcus epidermidis; identical to SEQ ID NO: 2761

SEQ ID NO: 6425 - DNA, 1200 bp, Staphylococcus epidermidis; identical to SEQ ID NO: 2760

SEQ ID NO: 6426 - DNA, 909 bp, Staphylococcus epidermidis; identical to SEQ ID NO: 2759

SEQ ID NO: 6427 - DNA, 837 bp, Staphylococcus epidermidis; identical to SEQ ID NO: 2758

SEQ ID NO: 6428 - DNA, 2610 bp, Staphylococcus epidermidis
ttggatattaatcaaatgacatatgctgtacaaggtgccttacaaaaagcagtcgcgtacagtaaagaatatgaattacaaaacattgaagttgaagcattgttaaaagctgcaatgaatgaaaatgatagtttatttaaaagtatattagaacgagcaaatattgatgttgatcaattaataaaagcatacgataatcaattaagtcattatccaactgtacaaggtgacaatgttcagtatggacagtatattagtgctaaaacaaatgaattattagataaagccgaaaaatatatgaagtcctatgaagatgagtttatttctatggagcatatattacgtgcagccatagatactgatgaaactactcaaaaatgggtcggtaataaagtagaagtgataaaagaaattataactaaagttagagggggaaatcatgtgacatctcaaaatccagaagtaaactatgaagctttagaaaaatatggtcgtgatcttgtagaagaagtacgtcaaggtaaaatggaccctgtcatcggtagagatgaagaaatacgtaatacaattcgtatattaagtcgaaaaacaaaaaataatccggttttaatcggtgaaccaggtgtaggtaaaactgcaattgttgaaggtttagcacaacgaattgtacgtaaagacgttccagaatcattactcgataaaacgattttcgagcttgatttaagtgccttagttgcaggtgcaaaatatagaggtgaatttgaagaacgtttaaaagcagtattgaaagaagtaaaagaatctgaaggtcgaatcatcttattcattgatgaaattcatatgttagtaggcgctggtaaaactgatggtgctatggacgcaggaaacatgttgaaaccaatgcttgcgcgtggtgaattgcattgtataggtgctacgacattaaatgaatatcgtgaatatattgaaaaagattcagcattagaacgtcgtttccaaaaagttggggtcagtgaacctgatgttgagaatacaatatcaattttacgtggtctaaaagaacgttatgaggtctaccatggtgtacgtatacaagaccgtgcacttgttgcagcggctgagctatctgatagatatattaccgatagatttttgccagataaagctatagatttagtcgaccaagcttgtgcgacaatacgtacagaaatgggatcaaatccaacagagttagaccaagtaaatcgtcgagtaatgcaattagaaattgaagaaagcgccttgaaaaatgaatctgataacgcaagtaaacatcgtttagaagagcttcaagaggaattatctaatgaaaaagaaaaacaatcctctttaaaatcacgtgttgaacaagaaaaagaaaaaattgctaaagtacaagaaaaacgtgctgaacttgatagtagtcgtcaagctcttgaagatgcacaaacagaaggtaatcttgaaaaagcagcagaattacaatatggtacaattccgcaattagaaaaagaattgcaagaatttgaggaagcctttcaagatgaaactggcgaagatagtgaaagaatgattcgtgaagtcgtttcagatgaagaaataggcgacatagttagtcaatggacaggtatacctgtatctaaacttgtggaaacagaaagagaaaagctattaagtttaagtgacatcttacacaaacgtgtagtaggtcaagataaagcagttgatttagtatcagacgcagtagttagagcacgtgctggaattaaagatccgaatagaccaatcggaagtttcttattcttaggacctactggagtaggtaaaactgaattagcaaaatcgcttgcttcatcacttttcgattctgaaaaacatatgattagaattgatatgagcgaatatatggaaaaacatgctgtatcacgtttaattggtgcacctccaggttatgtaggtcacgatgaaggtggtcaattaactgaagcagttagacgtaatccatactcagttattttgttagacgaagttgaaaaagcacatagcgatgtttttaatgtattacttcaaatactagatgaaggtcgtcttacggattctaaaggtagaagtgttgactttaaaaataccattatcatcatgactagtaatattggttcacaagtattacttgaaaatgtaaaagatgctggtgaaattagtgatgatacagagaaagcagttatggacagtctacatgcatacttcaaacctgaaatattaaatcgtatggatgacatcgtgttatttaaaccattatcagttgatgatatgagtatgattgtagataaaattttaacacaattaaatatgagattattagatcaacatatctcaattgaagtgacagaagaagcgaaaaaatggctaggtgaagaagcgtatgaaccacaatttggtgcaagaccattaaaacgctttgttcaacgacaaatagaaactccaattgcacgtatgatgattaaagaaagtctacctgaaggtacaataattaaagtagatttaaatgacaataaagaacttgattttaaggttgttaaacctacgtcttaa

SEQ ID NO: 6429 - DNA, 1824 bp, Staphylococcus epidermidis
atgagaaaaaaattaaataatgaatatcgctctgctaaaaaaatacgatatatgcctggattagatggtttgcgagcaattgcagtcattggtattattatttatcacttgaataaacaatggttaacaggtggttttttaggcgtagatactttttttgttatttcaggttatttgattacgagcttattacttaaagagtatgaagatactggaacaataaatcttaaaaatttttggattcgtcgtattaaaaggttattaccagcggtatttgcattaatagtagtagttggaattgcaactttattattgcaccccgaacatattgtaagagttaaacatgatatgatagcagcaatattttacgtatctaattggtggtatattgctaaagatgtcaattatttcgagcaattttcttttatgcctttaaagcacctatggtcactagccattgaagagcagttttacctctttttcccagcagtactcttattatttatggcaatagttaagaaaaagaaaaatgtcatactgatattttggatcatatccctggtttcattattaatgatggttgttatttctcaacctcacttgaaccattctagagtatattttggaactgatacaagattgcagacactgcttttaggtgtacttctagcatttatctggccaccttttaaattaaatcccaatccacctaaaggattaaaaactgtgattaatagtgcgggtatcataggacttacatttttaattctattatcctttactgttagtgatgaaagtgattggatttataacggtggattttatcttatttcaacaatgactttgctaattattgcaagtgttgttcatccaacgacaattttagctaagttattaggaaatcctttatttgtatacattggaaagcgttcatacagtttatacttatggcattttcctgtaattagctttattcatagttattttattgatggtcaattaccaacttatgtttatattatggatatcgtaattactgtattattagccgaattatcatttagatatgttgaaacgccattaaggaaggaaggtctaaaggcttttacatataaaaaaacttacaaacctcagtttattagaacaattgtaacgttaattatgttgttaccttttatttttatattagttggagctttcgataaattcggaaaagatacaatttcaaataaagcacaaacatttaatacaaacgaggctgatcaatatcttattcatatgataccgattgataatatttcgttaactagcgatggtaaaaccaaagagaataagaaagacaatgatgtatatacacaaattaagccattattaattggtgattcagttatggtagatataggggaacaatttaaaacgaaagtacccaaagctaaaatcgatggcaaagtcggtcgtcaactctatcaggccgagagcctcgttaaaaatcaatatagacattataataaaccatcagaccaaatcatacttgagttaggtacaaatggtgattttacaaaagaacaattagataatttaattgataaatttggcaaagcacaagtgtatcttgtgaatacaagagtgccaagatcatatgaaagtcatgttaatgagttgatggcaaaagcagctaaaaataaaaagaatgtaaccctaattgattggtatagtcgctcaaaagggcatacagagtattttgctccagacggaatccatcttgaaaatgatggcgtagaggcattgacagatgagatattaaaaaatataaagaagaaataa

SEQ ID NO: 6430 - DNA, 309 bp, Staphylococcus epidermidis; identical to SEQ ID NO: 3550

SEQ ID NO: 6431 - DNA, 822 bp, Staphylococcus epidermidis
atgcaaccttatttaatttgtctagatctagatggtacattattaaatgacaataaagaaatctcaccttacactaaacaagtattaaccgaattacaacaatgtggacactacgttatgattgctactggaagaccctatcgcgcaagtcagatgtattatcatgaactaaatatgagcacacctgttgttaactttaatggagcatttgtacatcatccaaaagcaaacgattttaaagtgatacatgaagtacttgatgtagaaatttctaaaaatattattacagcacttcaacaatctcatattacaaatatcattgctgaagtaaaagactatgtctttataaatagttatgattcaagactttacgaaggtttttcaatgggaaatcctaaaattcaaacaggtaatttacttgaaaatcttaatgaagcacctacgtcattacttgttgaagcagaagaagaaaatattcctgaaattaaagatatgttaacacatttttatgcagaaaatattgaacatcgtcgttggggcgcaccgtttccagtaatagaaattgtgaagcgtgggattaacaaagcacgtggaatcaagcatgttcaaaactatttaaacatcgccgacgatcatatcattgcgtttggtgatgaggacaatgatatagaaatgataaagtttgcgacccatggcattgcaatggccaatggcttgaaagatttaaaggaaatagcaaatgagactacgtatagtaataatgaagacggaataggtcgttatttaaatgacttttttaatttgaaaatacgttattattaa

SEQ ID NO: 6432 - DNA, 1317 bp, Staphylococcus epidermidis
atgaataaaattataatagtcggtgcagttgctggtggtgcgacttgtgcaagtcaaattcgaagattagataaagagagtgaaatcattgtttttgaaaaagatagagacatgagctttgctaattgtgcattaccttattatattggcaacgttatcgaggaccgtcgtaaagttttagcatacacgcccaatcaattttatgacaaaaagcaaatcactgtaaaaacataccatgaagttatacaaatcaatgatgagagacaaacagttactgtcttaaatcatcaaactaatcaaacttttgaagaaagttacgatacattgattttaagtcctggcgcatctgcaaatcgattaaacactcatagtgatatctcatttactgtgcgaaatctcgaagatactgaaacaattgatacctttattacgaataccaaagcacaacgtgcacttgttgttggcgcgggttacatctctttagaagtccttgaaaatttacatcatagagatttggatgtcacatggattcatcgctctacaaatattaataaactaatggatcaagatatgaatcaacccatcatcgacgaaatagaaaaaagaaatatcacttatagatttaacgaagaaattagtcacgtcaatggacatgaagttacattcacatctggtaaagttgaaaactttgatcttattatcgaaggtgtaggtactcatccaaattcacaatttattaaatcatctaacgtcatactgaatgataaaggttatatcccagtaaatcataatttccaaacaaatataccaaatatttatgcattaggtgatgttattacttcacattatcgtcatgtgaatttaccggcacaggttccacttgcttggggagcacaccgtggtgcaagtattatagctgaacaactttctggaaattcgtctattcactttaaaggttatctaggaaataatatagtgaaattttttgactatacattagcaagtgttggcatcaaaccaaatgaacttaaaaatttcgattatgatatggttgaagttaagcaaggagctcatgcaggatattacccaggaaattcaccactacatttacgtgtttattttgaaaaagactctagaaaacttatacgcgcagcagcagttggtaaacaaggtgccgataaaagaatagacgtattatcaatggcaatgatgaataatgctactgtggatgatttaacagaatttgaagtagcatatgcacctccttatagtcatccaaaagatttaattaatttaattgggtataaagcgcaataa

SEQ ID NO: 6433 - DNA, 156 bp, Staphylococcus epidermidis
atgtataaagaatataacatgactcaacatactctaccaatggaaacttcagttcttatccccacaaataatatttcacgacatgtaaatgatattgtagaaacaattcccgatactgaattcgatgaattcagacatcatcgtggcttaatataa

SEQ ID NO: 6434 - DNA, 135 bp, Staphylococcus epidermidis
atgaagaattataattggaatatcttaaaggctattttgggtatctctggaatgttcgttctagggatagataaagccaaaagagaactaggatttgtactaatgacatttaatataagaaaagtaacggtttaa

SEQ ID NO: 6435 - DNA, 165 bp, Staphylococcus epidermidis
gtgtttggtaaaaaatctaaacgtttttttgaatttttcaacaaattcactcctttgaaatttcctataattaaattttgtctcaaacaaattctaattatagcattaaatatattaattataaatggaatttcatttataaccaaacaagatttaattgtataa

SEQ ID NO: 6436 - DNA, 3426 bp, Staphylococcus epidermidis
ttgaaaaattcaaaaaaacgtttagattttttaccaaacacgttaaataagtattcgattagaaaatttacagtaggtacagcttctattttagttggagctactttgtttttaggagttagtaatgaagctgaagcagcagaaaaaatcgactcaccaactaaagaaaaggtagcaacagctgaagagccagcaactaaagaagaagcaacaacagctgaagagccagcaactaaagaggaagcaacaacagttgaagagccatcaactaaagaagaagcaacaacagctgaagagccatcaactaaagaagaagcaacaacagctgaagagccacaagagataaataataagagtaaacagttactagacatggataaaaatagcacaatcgacgaaaaaatcgactatgcaaaacaaactataaatgaactgaatattaatcaaaatgatatttctaatattgaaacttcaattaaaaataatagtgatttaaaaaatttatctaaagaagaattaaataacgaaattttacgagctgcattagtaaatgaatctaacaataatgactatggtttacaaacattatcagctattgaacctttaacaactaatgttagaaataaaaataattcattaagtccagtatctaaacttagaatgttggcaactgcaacatcaggtcaaaatgttaatgataaaattaatatcaaaaatgctagtttgacacttaacaagaagaataatcaacatgatgataatacggtttggccaacaagtaatgagcaattaagattatctgctgattacgaactggataatagtattaaagaaggagatacattcactataaaatatggtgattacattagacctggtgctttagaacttccagctaaaaatacacaactacgtagtaaggaaggttcaattgtagcaaacggtatttatgatgaaaatacaaatacaactacatacacttttactaattatgtagaccaatatcaaaacattacaggtagctttaatcttttagcaacaccaaaaagagagacagtaactaaagataaacaaagttatcctatggatgttaccatcgctaaccaagaagttagagaaaactttgtagtagattatggtaatcataaagaccatcttacaagtgcagcagtagcaaatgttgataatgtaaataataaacataatgaagttgtttatttaaatcaacctgggaatagaatttatgatgcaaaatatttctcaacagttcaaaacggtaattttatacctaatgaaataaaagtgtatgaagtattagatgataatgttttagttgatagctttaatccgaatttaaacggatctgcagttaaagatgtaactagtgaatttacacctaaatatagccttaataatactagagtagatatagatcttaaccgtagtaatatgaacaaaggaaaacgttatattattactcaagcggttaaaccatcaggtactggcaatgttactacaaattatgaattaacacgttatggtaaccaagaatcaagatacccaacaggcactaaaagtacaaccgtcagttatattaatggttcttcaacagcacaaggagataacccaacatacagtcttggagactatgtatggttagataaaaacaaagatggtatccaaaatgatgacgaaaaaggtattccaggtgtttacgtcattcttaaagatagtaataacaaagaattacaacgtgcaaccacagatgatacaggacattatcagtttaataacttacaaaatggaacatataatgttgaatttgttattcctaataattacactccatcgccatcaaatacaattgataatgatactattgattcggatggtcaaaaagatggagatagtaatgtagtggtagccaaaggtaccattaataatgctgacaatatgactgttgatacaggtttttatgaaacacctaaatatagccttggggactatgtatggaaagacactaacaaagacggtgttcaagattctgatgaaaaaggaattcaaggtgtaacagttacactaaaagataagaacggtaacgtattaaaaacaacaacaacagatgaaaatggtaattatcgttttgataatttagatagtggtgactatatagtacattttgaaaaaccagaaggtttaactcaaactactacaaattcaggtagtgatgaaaacaaagatgctgatggtgaagaagtacatgtaactatcactgatcatgatgactttagcattgataatggatacttcgatgaagatagcgacgcagacgcagattcagatgcagatgcagactcagatgcagatgcagatgcagatgcggacgctgattcagatgcagatgcagactcagatgcagatgcagactcagatgcagatgcagatgcagatgcagatgctgattcagatgcggacgctgattcagatgcagactcagatgcagatgcagatgctgattcagatgcggacgctgattcagatgcggacgctgattcagattcagatgcagactcagatgcagatgcagactcagatgcagatgcagatgcggatgctgattcagatgcggatgctgattcagatgcagatgcagactcagatgcagactcagatgcagacgcagactcagatgcagactcagatgcagacgcagactcagatgcagatgcagactcagatgcagatgcagactcagatgcagatgcagatgcagactcagatgcagatgctgattcagatgcggacgctgattcagatgcggacgctgattcagatgcagactcagatgcagatgcagactcagatgcagatgcggatgcagattcagatgcggacgctgattcagatgcagatgcagactcagatgcagatgcggatgctgattcagatgcagatgcagactcagatgcagactcagatgcagacgcagactcagatgcagatgcagactcagatgcagatgcagactcagatgcagatgcagatgcagactcagatgcagatgcagatgcggacgctgattcagatgcagatgcagactcagatgcagatgctgattcagatgcggacgctgattcagatgcagacgcagactcagatgcagatgcagacgcagattcagatgcagacgcagattcagatgcggatgctgattcagatgcggatgctgattcagatgcagatgctgattcagatgcagacaaagatcataatgacaaagcagataaatcaaatgataacgaattacctgatactggtaataacactcaaaataatggcacattatttggttcattatttgctgcacttggaggactattcttagcgggcagccgtcgtaaaaacaaaaataatgaagaaaaataa

SEQ ID NO: 6437 - DNA, 1617 bp, Staphylococcus epidermidis
atggattttgactataaattagataaattattaaccgaagtaaataataaaagcgaaattaataattatgtttttataagtttgggtaaacctaacatcaaagcccaagttaaattaatcaaaaaaactaattatcttaagcaagatatttcgaaattagcacttaaatttaaaaagaagacaggtcagtttccagagtggattaaattagatattgttacgtcaacagaaaaagttctatttaaagaattaagaaaagaattgattaatacaagacgtaattatgtggattttggtatagcatttgatagtcaatggaatttagcagtgttacctgaagaaattaatgcgaatgcttttgttcgaccagataattctactaaagaattatttctttctgaaaaaaatattaataattatttacgtaaatatacgactaataaaaaggcattttctagtgaattttataatgaaaaagaagttgttaaattttatacacatggtttcttcataggtaatgagaaagtatatgaactatacagcaatggttatagaaaaggtttaagaaaagtagatcatttagagaatgaaattgatcaattaattgaaagtagcactaattttttacagaatatgttgttagataatggtaagtatatttatggatatttcccacattttgataatgaaattggattttataatattttaagacattcatcttctacatatgctttgatagaaggattagcttatttaggcaaaaggttacaacccgttgaaaaggcaattgattatgttatttcaaatcaattacttgaagttgaagataaagcatatatctatgatgatacggaagacgctaatgaaattaaattaggacaaaatgcttcatttatattcgctatatgtgaatatttaaaacatgagaataatcctaaatatcttgaagctgctcaaaaagtagcgaaaggtattctttcaatgattgatgaagatacgtatgaaacgacgcacttattgaattatcctgatttaagcgtaaaagagaaattcagaattatttattatgatggcgaagctgcgcttgcattgttgagactatatcaaagagataataataaagtatggttgaaaactgtagaaaatttaatggatcgtttccttaagaagaaatattggcaatatcatgatcattggctaggttattgtacaaatgaattaattcaaattacccctcaagaaaaatattttgaatttggtataaaaaatgtgaatacgtatctagattatattaaaaatcgtgaaactactttcccaacattcttggaaatgttaatggctacttatagattagtacaaaaagccaaagaaactggttatggggaattagtaaatcatttgatagatgaggaatatttaaaagaagttattgatattagagcagattatcaaagagtaggcttcttttaccctgaaactgcaatgtactttaaaaatccatctagaattttaggaagtttctttattaaacaccatggttatcgtgtccgtattgatgatattgagcattatctatcaggatatgtacagtaccaaaaggcgttcaaagggtag

SEQ ID NO: 6438 - DNA, 600 bp, Staphylococcus epidermidis
atgattatatatatattaattaacatcgccatcgtcttgctaattcttggcttcgatttataccgacatcgtttcagacagcttaagtttagctccatattattatctgttttaatcaatagcatgattgatatttttgcgattaatcaattcaattttattacgatgtttaccgtcacgctatttatgatatggacacttttacaaatatatttaaatttcaagctatatccttttgtaatttctgaccaaaagtttattgctataatactagccattgttataagcttattgcaatttattacagataaatcgagcacacaatcggtgtacatgtccatcccatatttatcacccacgatatttataataggggcgattttactttttgtaggtactttcaaaatagacgaagttgaacgtctttcactatttcgtaaaattaaaagaccaatgacaacaggtacaattattattatcctatctctcatatcaacgatgattttaacgcccttttggtatgtctttttaatcatttatagcttactcattggttttatattatggcaaggtgttttcttcataaaagataaaaaataa

SEQ ID NO: 6439 - DNA, 714 bp, Staphylococcus epidermidis; identical to SEQ ID NO: 3820

SEQ ID NO: 6440 - DNA, 420 bp, Staphylococcus epidermidis; identical to SEQ ID NO: 3819

SEQ ID NO: 6441 - DNA, 672 bp, Staphylococcus epidermidis; identical to SEQ ID NO: 3818

SEQ ID NO: 6442 - DNA, 588 bp, Staphylococcus epidermidis
atgattttaatgatagataatcaagattcctttacatataacttaatagattatattaaagtacaaactactgaagaagtgaaaatcatttctgtaaatgatttgatgacacagcatctcgatgcattgaatccgagagcgattgtcatttcacctggacctgggaaacctagtgattatccaatactatcatccgtattagaaatatttcaccgtcacgttcccattttgggcgtctgtttaggttttcaattaatcattgaatactttggaggaaacattattcataatgataaacctattcatggacatattaccaagataaggcatagcaatgagggtatttttaaaggtctaccatcgtattttaacgtgatgcgataccattcacttatggctgacccctctacaatacctagcgcattaaaagtcacagctctgaacaacgagaatgttattatggctgttgcacatcataagtatcctatttatggtttacagtatcatcctgaatctatactaagtgaatatggtcacgaacaattaaatttattcttaaccgaggtaggggttaaatatgcacattga

SEQ ID NO: 6443 - DNA, 1152 bp, Staphylococcus epidermidis
atgcacattgaatttaagtatcgctattatgaaaatgaaaaggactatgaagactatcaattagaaatggataactttcaagattctaaaattgcatatcgtcttgatgaagtaggggatgtcattcactttgcagaacaagaacaacgtaacggaagctatgttgcactttatgttacttatgaagcagcacctttttttaataaggaaatggtggtcaataatgtgaaacaatcccatatttttgctgcagcttattcatttaaatcggtcaattcgataaaaaatataaaaaaagtaatgcccaataaaaatcatataaaaactgaaggattttatttttgtgaaagtgataaagcgatgattaacaagatcaaatcgattcataaagccattattgaaggggcaacgtatcaggtgaattacacaacccgcttaaaagcagaagttttctgtcctataagtcacttatattatcaacttactatgtcacaaaatggtaattataccgttttaatggacacacctgatataaaagtagcatcaatatcgcctgaacttttctttcaaaaaggtgactataaaggtaaatcaaatatgattgttagtaagccgatgaaagggactatgcctagagggaaaaatgttaaagaagatgagctatattataataatttaaaaacctcctctaaagatatggcggagaatgtgatgattgtagacttattacgtaacgatattacaagaattgctcaaagtggaactatagatgtacctgaattgttttcgattgagaaatatgacacagttttccaaatgaccagtacagtgtgtggccgattacaagatgacattcaattgatagatatgatgcgagcgctctttccttgtggttctattacaggtgcaccaaaaataaatacaatgcaatatatagctcagttggaggacatgccaagatccatttactgtggaacaattggcttattacttccaaaccaaaggatgatatttaatatccctatacggacaattgagtataatcatgaagaagcggtttatggggtgggtgctggtataacaattgattcagtacccgaaaatgaagttcaggaatttcacgataaaactaaaattttggagcggttataa

SEQ ID NO: 6444 - DNA, 609 bp, Staphylococcus epidermidis
atgcatttatttgaaacaatgaaattggataagggattcattcctcgtcttgattaccattatcaacgtatttcaacttctagtgagcatctaggatttcaatttgatcatctattttggaagcagtttattcataatataaaaaccttgcattcaaaaggggtatatcgtttgaaggtgacgttaaacaaagaaggtgaattaaactatgagttatttccgatacccgataaacctttttttaccgctcgactagttcaacaaaaaaagaatattgataaagtaatcataactaataaaacaacagaacgtgattatttaacacataatcatttcacagacttaatactgatctatgatgaagatggtaaaattttagagtttgacattggcaacgtgatgatacaagaaagagataaattatatacaccaacatataaaggagacatgctccccggctgtatgagacaatctcttatagatcaaggcaaagttatagaaaaagatttttatatcgaagaatttaaagaaaaaatcaaatcgagtcaaatcaacgtctatttaatcaatagcttaagagaggttgtcggtgttaaagtatatgtataa

SEQ ID NO: 6445 - DNA, 207 bp, Staphylococcus epidermidis; identical to SEQ ID NO: 3814

SEQ ID NO: 6446 - DNA, 732 bp, Staphylococcus epidermidis
atgaaaatatatagtcaaggcgaccaagccattgttgtttcaatagagaaaaatgtatctcaaagactgacagaagatttactttcattgagagcatatttaattgataaatcatatccatttattactgaaattgtagctacagagtctgacctaatgatttgttatgacgcaagagatatgattaaacatcaccatattcagtcaccatttttatatatgaaagctttaattgattctataaaattagaaattagacatcatcgacaacaacttcaagcaaaatatattcaaaaacaacaatctgttaatattccagttatatatgggggagaatttgggcctgatttacaacatttgttaaagcatcttaaactcaaattagaggattttgtaaaattacatactcaagaaaaatattttgtatcaatgatggggtattcaccaggatttccgtatcttactggaatgaataaaaaattgcatgtgaaccacacaagtgaaaagaaaaaattcatcccttgtggatcagttattatggaaggaaaaaaatgtggaatagttactactgatacatataatgattggttagttatcggatatacaccagttcaacttttctttcctgagcaacaaaactttacattattaaagctaggagacaatgtcacgtttgagtctaaagatatcaatgaaatagaactaggagattataaaacatgtcaatcataa

SEQ ID NO: 6447 - DNA, 1005 bp, Staphylococcus epidermidis
atgtcaatcataattgaaaatagtggcctatttagtagctttcaagattttggaagaaagggatatgaacatgaaggtgtcatcccgagtggcgcactagatgaattagcacatgaaatagccaaccgtctggttgcaaatgacaaaaatgaagcaacacttgaaatgactcaaaaaatggcaacaattcgtttcactgagccggcacttatagctttaacaggtggtaattttaaagctgaaactgaacatatgaaaatttatcctaataaattatatctcatcaatgaaggtgagacattgaaatttaatgaaaccagtcgtacatcacgtgtttatctagcagttggtggaggttttaaactagaaaaatggcttcattcagcatctacagattttaatgtggaaattggtggttttgagggaagaaagcttaagaaaggtgatgaaatagaattaaaacaccactattctcaacgacatcttaagctatttgaaaacttatctgacaaacgtacaactgattggggaattgatggttacgcattgtctttcaattatgtttcggatgtttttcatgttataaaaaataagggaacggaagattttaaaaaagaggcgacgcgtcgttttacaacggctgaatatagtgtgtctagtaaaacaaatagagtaggtatggtgcttgatggcccccaaatcaaagcatactatgatgatatgccggctcatcaatcagtaaaaagaggaaccattcaagttaagagagatggcacaccgattgtattattaaacgatcattatacattaggaagttatcctcaaataggtacaatcgcaagctatcatctaacaaaattagcccaaaaaccacaaggctcaaaattgaaatttcaatttatagatatcgaaactgcagaaaaaaacttaataaagtatagcaattggttaaatcaattgttccatggtattgaacaccgtatgcaattagaaatgttaaagtga

SEQ ID NO: 6448 - DNA, 201 bp, Staphylococcus epidermidis; identical to SEQ ID NO: 2558

SEQ ID NO: 6449 - DNA, 225 bp, Staphylococcus epidermidis
atgaaagactggacaattaacaatcattccaaacgacaattgattattcaaagtaatcatgatgatatttcgattatagaaccattgcgaaatggttcttttaaaatacttgctgaatttaatgcgttaaatacagattacattcaagtttatgaccacacacttgttgtttctatacatgagaaagagattagtgtgtttgatcgatcttcacagtcaatttaa

SEQ ID NO: 6450 - DNA, 285 bp, Staphylococcus epidermidis
atggaaaaccttacaaaagaacaaaaatatacaatagctaaattttataaattatatatggaaagatctaatgcggggcaaccagaagaagaagctaatcattttaaagattctgtaacggcacaggatgattatttttgtgatagaaaatatgaagatttcattcataactgtaaagtcttaataaatgaaggttacttagatggcgaggttgaagataacaaaatatataatattcaggttacaacaaaagcttttacagaaattgagcgtagctttggttaa

SEQ ID NO: 6451 - DNA, 747 bp, Staphylococcus epidermidis
atgagagacaaagacaatcaacattcgagattatattatattattttgacaatcgttattatcgcaatttgcgttgttgttgtaatactttttaatactttaaagacaaaccgttcttattctaccgatagatacgcagattttactgaattaaaaaaagatacgataaaaaataaagattggcgtattaaaacaaaacacagtaaaaataaggatattttagtcactgcaattcacggtggaggtatcgaaccaggtacgactgaaattgcacgacgtatttccaatgttggaaaatataatttttatacctttgaaggtcttcgaaagtctaataacgatcaactacatgtaacatccactcattttaacgaacctatattagataagttacttaaaaacactaaagaaacattatctatacatggattctctggagatgaccctattgtttatatcggaggtaaagataaagagatgtctcactctatcgcgaaagaattacgtaaaaaacactttactgtaaaagaaagtcctaacaaaatcgatgcaaagtcatcagataacatagctaataaaaatgaatctaactcaggtgtccaattagaactcacgactgcattgcgaaaacagtttttcaaacattataaattagatcgacatacacgtagtgattcagataaatatactaaagatttttacaaatttgcgaacgcagtgcaaaaaggtatcgaaaaggtaaattaa

SEQ ID NO: 6452 - DNA, 234 bp, Staphylococcus epidermidis
atgaataaaaatctattaaaaaaatacttgaatgatgatagtttcaaatcagttgtcgttgttatagggaataagagaatcgtattagagaatgatattcatgttgattatgaaaacgaagttattatttatccatgtaaaaattgtacacgtattataccgtttagttcaatttcctatttagaacttattgataagcaagaccaatttattaactattttaaagaaggatga

SEQ ID NO: 6453 - DNA, 555 bp, Staphylococcus epidermidis
atgaaattaatatctaaaagcatatacttatcatttatattttttatttttagtctcatgttatttaccaatcaaagtttcgctaatgataataaacgttttcagctaaaaccaggtgacattattgttacaaaaggtcctgttttaaatggtttttttggtcactgtagtttggcaattgatcatgacactgtacttcaaattgaaggtccaggggataaaccaatgacggaagattttgaatcttatcgtgacagatatggaaaaggtaaaaatgaatggataaaagtctatcgatgttcacaccctaacgctggaacaaaagcagctcaatgggcaaagaaacattatgagaatagcgatagcgaatatcttgttacattcaacttaaaaagtgaaacatttacatattgcactaaaattatatatcaagcatataaatacggcgtagataaaaattccgtaagtgatcacggtttatatattatttcaccctatgcgctaacagataattttacagatgaatataaattaaaattagtaaaaacatattaa

SEQ ID NO: 6454 - DNA, 189 bp, Staphylococcus epidermidis
atgagcttacatttccaaattttgctgtggctttctatcttatttatcatcgcaggaacgatattattggtaacaatgcttaaaaccaaaaaagaagaacgaaaagaatcttatctaggctttactgtaattttcttaatctttggttttgccatcttaatttatacttttatattcggaattttataa

SEQ ID NO: 6455 - DNA, 138 bp, Staphylococcus epidermidis
ttgagacatacacatcattgtcgtttttatggtgaaaataaaaaaattagtaatactttattatatgtgaatcaatttaatgttatagttatttttaaacctctaacaactgtaatttcatcacaagaacaaaaataa

SEQ ID NO: 6456 - DNA, 204 bp, Staphylococcus epidermidis
atgtctttttatgattttattttaggatttatcaatgacgatacgccattaggtcatttagcacaatacatttttaatgatgcttgtttcccaaaggaagagaaaaataataattctataagaacctatgtgcttcttaattataatgatcgtcagttaatcgaaagtacaaatcgtgcaattagtctatatcaattaatttga

SEQ ID NO: 6457 - DNA, 240 bp, Staphylococcus epidermidis
atgatgtctactcatagtcaatgtaactatgtcaatcctaattcaatttctttagattgggaatgtttaattataagcaaaacagatatgctactcgatggtgtacctaaagaattaattaatacttggttagatcaaaatgttatcgagccgttttgtgttcgtaataatgaaataaactttaaaactaaagatgtttggaatgctcttaagacccataactggtattattcaaattaa

SEQ ID NO: 6458 - DNA, 588 bp, Staphylococcus epidermidis
ttggttaaaacattatatttaatgagacatggtcaaacagtatttaacttaaaaggtaaaatacaaggggctagtgattctcctttgactgcattaggtgtacaacaagcgaatgcagcacaacaatattttaaaacgaaaaatattcattttgactatctttattcatcaccacaacaaagagcatgtgacacgttagagaacgctgtaccaaaccaacaatattggtgtgtaaaagatcttaaagagtgggggtttggattatttgaaggggaaagtatcgagttattaagagctattaaacaacctagatatttgtatggtgacgctgttgtaccatttggtggagaatcaagatctgaagttgaacacagggtttatcgagcactctatgaaatgatggatacaacagatggagagacaattctagcagtgagtcatggtagcactattggtttgtttgtaagaaatatattagggtatgacatgggaagtaaatttgaaataggaaattgtaacattgtaaaatttgaatacgatggagaagaatttatctttaaagatttaattaatcccattaaaaaatag

SEQ ID NO: 6459 - DNA, 501 bp, Staphylococcus epidermidis
atgaacaatatccgtttattgaatcaaaacgatttggattcctatattgaattaatgaaatttggtcaccataattatgaatgggatcgttactatttagaaaatgttagcattgatagactcaaaactatcttgtctaatcatactgattattggaatatatttggtgcttttgaagatgatgaacttgttgcaacatgcactttaaaacaaatgaattatgtaggtaaatgccataaagctattcttgaaaataattttgttaaaaataatgatgaaattgttaaccgagaattaattaatcatattattcaatacgctaaagaacaaaatatagaaacattgatgattgctattgcatcaaacaatataagtgctaaagtgttctttagttctataggttttgaaaatcttgcttttgaaaaaaacgctagcaaaattggcaatgaatattttgacgaaaattggctcatttattcaacaactgagtcatcagattaa

SEQ ID NO: 6460 - DNA, 453 bp, Staphylococcus epidermidis
atgttttggatatttaattttatatttagctttcttgcttcactctttttctgtgtcatatttgatgcccctaggaagttgtattttgcttgtggctttgtcggcgcttgtggatggatggtttatactgtattatttaacggctttgaactccatacgatttactcaagctttttcggtagtttagcgttaggtttacttagtcattatatggcccgtcgaaaaaaagagcctgtaattatttttatggttacaggtattatacctctggttccaggaggacttgcttatgatgccactaaaaatttagtgttattacactttggaaaggcgattaacacaatgcttgaagtgacattaatagcaggtgctattgctttaggtttattatttgctgatcaaatttctaaaatcgttatttcaggttttgctcgtaccagaaaaagattgtaa

SEQ ID NO: 6461 - DNA, 765 bp, Staphylococcus epidermidis
atgaataaggatacaattgaaacatctcgtgaagcattgataaaagatgttgttatgattgctgctcgtatattacttgaatctggagctgaaggtacacgggtagaggataccatggcacgtattgctacaaaattgggctatcctgaaagtaatagtttcgtgactaatactgtaattgaatttgttttacataatgaagcatatcctcggttgtatagaattaaaactcgagatacgaacttaataaaaatttctcaagctaatgaaatctcacgtcaaattacaaatggcacaatgacgcttgaagaagctaagtatcaattagaggaaatatatgttgctaaaagagatagcagtctaccttttaaaggaattgccgcagcaattatcgctacgagcttcctctatctacagggaggtcgtctggttgatatcatcacagctgtattagctggaacgattggatacttagtagtagaaatattagatcgaaagctacacgcacaatttattccagaattcataggttctttggtaataggtattatttctgtaattggacatgcatttgttcctagcggagatttagctacaattatcattgcagcggtcatgccgattgtacctggagtactgattacaaatgctatccaagatctattcggaggacatatgttaatgtttactacaaaatctttagaagctttagtcaccgcctttggtataggcgctggtgtaagttcaatattaattttagtctag

SEQ ID NO: 6462 - DNA, 750 bp, Staphylococcus epidermidis
atgagtgaagcagcagaaactttagatggttggtatagcttacatttattttatgcagtagactggacaacttttcgtttaattgctgaagatgatcgtgaagcaatgattactgaattggaaacatttattaaagataaaacagttgctagagaatcacatcaaggtgatcatgcaatttataacattacaggtcaaaaagcggaccttttactatggtttttacgtccagaaatgaaagagttaaatcaaattgaaaatgagtttaataaattacgtatcgcagactatctcattccaacttattcctatgtgtcagtgatagaattaagtaattatttagcaggcaaatctgatgaggatccttatgaaaatccccacgttaaggcacgattataccctgaattaccacattctgaatatatatgtttctatccaatggataaacgacgcaatgaaacttataactggtatatgttacctatcgaagaccgtaaaactttaatgtataaccatgggatgataggtcgtaaatatgctggtaaaatcaaacagtttattacaggttcagtaggttttgatgactatgagtggggtgttacattattttcaaatgatgtacttcaattcaaaaaaattgtctatgaaatgcgttttgatgaaacgactgctcgttatggcgaatttggtagtttctatattggtcacattctaaacatcgaagacttcaaacaattttttagtatataa

SEQ ID NO: 6463 - DNA, 990 bp, Staphylococcus epidermidis
atggctgatttattatctgtattacaagacaaattatccgggaaaaatgtaaaaatagtattacctgaaggtgaagatgaacgagtgctcattgctgcgactcagctacaaaaaactgactatgtttcacctatcgttctaggaaacgaagataatattaaatctcttgcttctaaacacgctttagatttaactcaaattgaaatcatagatccagcaacgagtgaacttaaagatgagcttgtagatgcttttgttgaaagacgtaaaggtaaggcaactaaagaacaagcagttgaattattagataatgtaaattatttcggaacaatgcttgtgtatactggaaaggctgaaggtttagtgagtggtgctgcacattctactggagatacagtcagaccagcattacaaattatcaaaactaaacctggtgtatctagaacatctggtattttctttatgattaaaggcgacgaacaatatatttttggagattgtgcgattaatccagaattagatgctcaaggacttgctgaaattgcagtagagagtgctaaatcagcacaaagctttggaatggaccctaaagtagctatgttaagcttttctacaaaaggttctgctaaatcggatgatgttactaaagtgcaagaagcattgaagttagctcaagaaaaagctgaagcagatcaattagatcatgtagttattgatggagaattccaatttgacgctgctattgttcctagcgtagcagagaagaaagcacctggtgcaaaaattcaaggtgatgcaaatgtatttgttttccctagtctagaagcaggtaatattggttataagattgctcaacgtttaggtggatacgatgcagtaggaccagtcctacaaggattaaactctccagtcaatgatttatctcgtggttgctcaactgaagacgtttataacttatctattattacagctgctcaagctttacaataa

SEQ ID NO: 6464 - DNA, 840 bp, Staphylococcus epidermidis
atggacttagcaactaaatattttaatcaaatcaactggcgttatgtcgatcattcaagtggtttagagcccatgcaatcttttgcgtttgatgacactttttccgaaagcgttggtaaagatttatcttgtaatgtagtacgaacgtggatacatcaacacaccgtgattttgggcattcatgattcgcgtttaccatttttaagtgatggtattcgttttcttacagatgaacaaggatataatgcaattgttaggaattctggtggcttgggtgtcgtattagatcaaggaattttaaacatatctttgatttttaaaggacaaaccgaaacgactattgatgaagcctttacagtgatgtatttattgattaataaaatgtttgaggatgaagatgttagtatcgatactaaagaaattgagcaatcgtattgcccaggaaaatttgatttaagtattaatgataagaaatttgccgggatttcgcagcgacgagtacgtggtggtatcgcagtgcaaatatacttatgtattgaaggttctggctcagaacgggcattaatgatgcaacagttttatcaacgtgcgcttaaaggggagactactaaatttcactatccagacatagatccctcatgtatggcatctttagaaacccttttaaatagagaaattaaagtgcaagatgttatgtttttattattatatgcactaaaagatttaggggcaaacttaaatatggatcctattacagaagacgagtggacacgttacgaagggtattatgataagatgttagaacgcaatgcgaaaatgaatgaaaaattagatttttag

SEQ ID NO: 6465 - DNA, 921 bp, Staphylococcus epidermidis
atgactagacaaggatacggagaatctactggaaagattattctaatgggtgaacacgcagttacatttggtcaaccggcaatcgcaattccatttaatgctggaaaaattaaagtcctcattgaaagtttagatgaaggtaattattcttctatcacaagtgacgtatatgacggaatgttatacgatgcccccgaacatctaaagtctatcattaatcgctttgttgaaaaaagtggagtgaaagaaccactatcagtaaaaattcaaactaatttgcctccatcaagaggtttaggttcaagtgctgcagtagcagtagcgtttgtacgcgccagttatgattttatggatcaacctttagatgacaaaacattgattaaagaagcaaattgggcggagcaaatcgcacatggtaagccaagcggtattgatacgcagacgattgtgtcaaataaacccgtctggtttaaacaagggcaggccgaaacattaaaatcactaaaattaaatggttatatggttgtcattgatactggagtaaagggttctaccaaacaagcagtagaagatgttcatgtattatgtgaatctgatgaatatatgaaatatatagagcacattggtacacttgttcacagtgctagcgaatcgattgaacagcatgatttccatcatttggctgacatatttaacgcatgtcaagaagacttgagacatttaacagtaagtcacgataaaatagaaaaattacttcaaattgggaaagaacatggtgccattgctggtaaactaactggtggaggaagaggtggcagcatgcttcttcttgcggaaaatttaaaaactgcaaagactattgttgctgctgttgaaaaagctggcgcagcacatacatggattgaacatttaggaggttaa

SEQ ID NO: 6466 - DNA, 984 bp, Staphylococcus epidermidis
ttggtgaaaagtggcaaagcacgagcacatacaaatattgcgttgattaagtattgggggaaagctgatgaaacttacattattcctatgaataatagtttatcagttaccttagatagattttatactgaaacaaaagtgacatttgaccctgattttactgaagattgccttattttaaatggtaatgaagtgaatgccaaagagaaagaaaagattcaaaactatatgaatatagtgagagatttggctggaaatcgtttgcatgcgcgaattgaaagtgaaaattatgtgccaacagcagcaggacttgcttcttcagcgagtgcttacgctgctttagctgccgcttgtaatgaagctttgtcattgaacttatcagatacagacttatcacgattagctcgacgtggttcaggttctgcttctagaagtatttttggtggatttgccgaatgggaaaaagggcatgatgatttaacttcatatgcacatggtattaattccaatggttgggaaaaagatttatcaatgatatttgtagtgattaacaatcagtcaaaaaaagtatctagtaggtcaggaatgtcactaacaagagatacttctagattttatcaatattggttggatcacgttgatgaagatttaaatgaagcaaaagaggcagtcaaaaatcaagattttcaacgcttaggagaagtcattgaagcaaatggtttacgtatgcatgccactaacttaggcgctcaacctcctttcacgtatttagtgcaagaaagctacgatgctatggcgattgtggaacagtgtcgaaaagccaatttaccttgttactttacaatggacgcgggtcccaatgtaaaagttttagtagaaaagaaaaataaacaagctgtgatggaacaattttttaaagtatttgacgaatcgaagattatagcaagtgatatcattagctctggtgttgaaattattaagtaa

SEQ ID NO: 6467 - DNA, 1077 bp, Staphylococcus epidermidis
atgattcaggtaaaagcccccggaaaactttatattgcaggcgagtatgcagtaaccgaaccaggatataaatctattcttattgcagtaaatcgctttgtaacggcgacaattgaggcgtcaaataaagttgaaggtagtattcattccaaaacattacattatgaaccagttaaatttgaccgtaatgaagatagaattgaaatctcagatgttcaagctgctaagcaactgaaatatgttgtgacagctatagaagtgtttgaacagtatgtgcgcagttgcaatatgaatttaaagcactttcatttaaccattgatagtaacttagcagataactctggtcagaagtacggattaggttcaagcgccgctgttttagtatctgttgttaaagctttgaatgaattctatggtttggaattatcaaacctttatatttataaattagctgtaattgcaaatatgaaattacaaagtttaagttcatgtggtgatattgcggttagtgtctacagtggttggcttgcatatagtacgtttgaccatgactgggtgaaacagcaaatggaagaaacatcggtgaatgatgttttggaaaaaaattggccaggcttacatatcgaacctttacaagctcccgaaaatatggaagtccttattggatggactgggtctccagcttcttctccacacttagtgagtgaggtcaaacgtttaaaatcagatccaagtttttatggtgattttttagatcaatctcatgcttgtgtagaaagtttaatccaagcttttaaaactaataatatcaaaggtgttcaaaagatgatacgtataaacagacgtattattcaatctatggataacgaagcatcagttgaaattgaaacagataagctaaaaaaattatgtgatgtcggtgaaaagcacggtggcgcttctaaaacttcaggtgctggtggtggcgattgtggcattactattatcaacaaggtaattgataaaaatattatttataacgaatggcaaatgaatgatatcaaaccattgaaatttaaaatttatcacgggcaataa

SEQ ID NO: 6468 - DNA, 342 bp, Staphylococcus epidermidis
atgaaaaataaatttttaatctgtgatgagtgtcaggctgtaaatttaaagtctttgaagcgaaaattagaaaaattagatccggaagctgaaattgaaataggctgtcaatcttattgtggaccaggtcgacataaaacatttgcatttgtcaataatcgaccacttgctgcgttaaccgaagaagaacttatggaaaaggttacaaaacaattaaaaaaaccacgtgatccagaagaagaagagcgactaagaaaacgtaacgaagaacgaaaacgtcgtaaagaagaacaagatcgcaaacttaaggaaaagttaaagaagcgcaaagcagagaaataa

SEQ ID NO: 6469 - DNA, 1101 bp, Staphylococcus epidermidis
ttgaataacaagaactatcaaggcttaaattcaaagaacaatatagatgttctaaattataacgccaaatttatttctaacgagataatagaactacaggatagtaatggaacaattcaagaaacaattaccgcagataagatattaatcaacactggttcacgtgcgaatatcccagatatcaaagggatagatacagctcaaaatatatatgattctacaggattactaaatattgactatcaacctcaagaacttgttattattggtggcggttatatcgctctcgaattcgcttcaatgtttgcaaattttggaacacatgtaacaattcttgagcgtggtgatgctatcatgacaaatgaagatcaagacattgcaaatcttattgtcaaagatttacaagataaaggtgtgactataaacactaatactagcactattgcattttcaaacaataaagatcaaactatcatacacacaaatcatggagaaatatcagctgatactgtgctcttagccacaggtcgtaagccaaatacaaatcacttaggtcttgaaaatacagatgtgaaaattggaaaacaaggtgaagtgattgtaaataaacatttgcaaagtacagtgaaacacatatacgctgcaggtgacgttaaaggtggattgcaatttacgtatatttcactcgatgattatagaatcattaaatcgcatctatttggtgatggttctagaacaactgaaaatcgtggcgcaatacctcatactgtctttattgaccctcccctatctagagtaggactaattgcaagtgaggctaagttacaaggatacgatattctagacaataaagtctttgtcagtaacataccccgtcataaaatcaataatgattctagaggtttatttaaagcagtgattaataaagatacaaaagaaattttaggagcgtcattatatggcaaagaatcagaagaactgattaacttaatcaaacttgctatagatcaacatattccttacacagtattaagagataatatatacacacatccgacaatgaccgaatcctttaatgacttgtttttagaaccactttga

SEQ ID NO: 6470 - DNA, 1377 bp, Staphylococcus epidermidis
atgaattatgaacgtagctatttacgttcgtgtcaggtcagtacattagaacaaaaagaacatggatattctattgaagaacaagaacgaaagctcaaatcattttgcgagataaacgactggagcatatcagatgtatttatagacgctggtttctccggagctaagcgtgacagaccggaattacaacgtatgatgaaagatattaaacgatttgacttagtcttagtgtataagttagacaggcttacacgtaacgtgcgtgatctacttgatttattagagatattcgaacagaataacgtagcatttagaagtgctactgaagtttatgatacatctacagctatggggagattgtttgtcacactagttggtgctatggcagagtgggaaagagaaacgattagagaacgagtgatgatgggtaaacgtgcagcaattaaacaaggcatgatactcacaccaccacccttttattatgaccgtgtagataatacttatattcctaatgattataaaaaagtagttttgtgggcatatgatgaagttttgaaaggtgtcagttcaaaaggtatagctaggaaattaaacgattcagatataccacctcctaatggcaaaaggtgggaagatagaacaataacgagagcactaagaagccctataacaagaggtcattatacttggggagatgtatttatagaaaactctcacgagcctattattaccgaagaaatgtatcaacaaataaaagaaaggctagaagaaaggattaacactaaaatagtaagtcatgtatcagtgttcagaggtaaatttatttgcccaagatgtggtggtacattaacaatgaacacagcaactagaaagagaaagaaagggtatgttacttataaaacgtattattgcaacacatgcaaaggtaaaaaggaaagtttcggttttgcagaaaatgaagcattaagagtttttcacgatcacctgtctaaactagacttagacaaatacgaagtaaagacaaaacaaaaagatgatgttgttactattgatatagataaagtcatggaacaacgtaaaaggtatcataaattatatgctaaagggttaatgcaagaagaagaattatttgaattaatcaaagaaacagacgaaacaatcgcagaatatgaaaagcaaaaagaattagtaccaagaaaaacactagatgtagataagataaaaaaatttaaaaatgtattgttggaatcatggaagatattctcgttagaagataaagcagactttattaaaatggttattaaatctatagatatagattatgtaaagcttaaaaacaggcattccattgaaataaaagagatagaattttattag

SEQ ID NO: 6471 - DNA, 651 bp, Staphylococcus epidermidis
atgaaaaagtttttagttttaatatttgcaagtttgttggtgttaggtgcatgtgggcaaagcgaggacaactcgaaaaaagatgatgataaaaaatcagaaagtaaatcagataagaagtcgaatgatccaaagaaagataaaaaatcagatgataaagaaaaatctgctaatgaaagcaaagaacaaaattcttcaagtacagaggaaaagaataatgaaaatcaaaataataataataaacaaaacactcaagataactcatcaaatgaaaatcatcaaaatacacaaagtattgatataacaaatattaaagatagaggcactttagagtctgtcatctatgggaattatagtgaaacagaaaaaattcaagcttacaatagtgcagtagcaaacggcgtcatacctcaaggtaatgttatggaaggacctgctagtgcagcttatgaaagttcgttaagagttgaaagtggtcaagaaaagtcaatttatgaaaatgttcctcaaagctctgggggtacagatgcaggcatgactgattacgatgaagtaaataaatcaatgcaatcaacaaaagaaaaacctagtagatgggttcaggaacaaatagaatgggcagaagaaaatggtaagttagaagacaactaa

SEQ ID NO: 6472 - DNA, 1140 bp, Staphylococcus epidermidis
ttgaaaaaaataatagctataattttttttagcctattagcagttatgactataatatttgctgaaattgacacccactttaatcatgaaaaagtttcttttgttgcagttggagataatttaattcatccagttgtttataacgatgcaaaaactcatcacaatgactatgatttttcaccaatgtataaaaacgttaaaccttatataaaaaaatttgatattgcttacatcaaccaagaatcaccaatgggaggggatgatataccttattcaggttttaaaaggtttaatactcctagcgatttgtcgaaatatttggttgaatcaggatttaatttaattaacggatcaaataatcatgctctcgataaaggtacacatggcgttaatcatagagttaatctatgggaaaagtataaagaaaaaggagttatgttcactggtgtatacaaaactaaaaaagataatgagaaacttcaaattataaataaaaatggaataaagatagcaatacttaattatacatttggtactaatggacttaaaccagaaaataaatatcaaattaattatttgaatgaaaataaaataaagcgagacgtcaaatacgctaaaaaatatagtgatgctgtcatcgtttcaactcattggggacaagaaagtcatcattatccaaataaaaaacaagaaagatatgctaaagtattcgcaaattcgaatgtcgatgcagtaataggtatgcatcctcatgtaattcaaccggtaaaatgggtaaaaggtataaataatcacaaaacacttgtagtttactcattaggtaattttttaaatggtcaaaacactggtaatgaaagtaataatctttgtggtagcataaatttcgatataacaaaaaaagggcagaaaattgtgattaaaaatgttcattggaaatccttagtaaattactatagagaaagaataccaggcaataaagattctagatatgattttactgtttacccactagacaaatacaacgacaaaatggcaaatgaacatggtatgcaaagtggtgaaaacaaggatatgactaaagaacatatggaaagaattactaatgaaattattgataaagaatttttaaaatctaactaa

SEQ ID NO: 6473 - DNA, 465 bp, Staphylococcus epidermidis
ttgtcacgttatgagcaattactatcagaaaatgaacacattaaaataagggatactcattcattacctaacggatatagtggtttttataaagatggtgtaatacttatagataaaaacttacccgaaacacgaaaagctgaagtgttatacgaagaacttgcacaccacaaacttacatacgggaatatattagaccagtctaaatggattaaccgcaagtttgaaaactacgcgagacgtcacggatatgaggcagcactgcccttacgtatcatcgtagaggctcatcattacggtgtaagtaacttatatgaattagctgaatatgttcaattaagtgaagagcacgtattagaaatattggaacattacaaaaataaacacggtattggaactcactacggcgattactctattacgtttgagccgttgagagtgtacaagttacaccatattaattaa

SEQ ID NO: 6474 - DNA, 333 bp, Staphylococcus epidermidis
atgacaaatttttcagacaacctaagtaaattaagaaaatcacgtaacttatcattgaaagaattaagcgacagacttaatgcaatatatgaagttaaattttcaaaagcatcaatagatagatgggaaaaaggtataactagcccttcaatggaacatgctagtgctctttctgattattttaatgtttctttagatgagctaagcggaagaaaagaaatgaaaatcgaagaacctcaaactctagcagcacaccttgaaggcgaattaaaacaagaagatgttgactatattatgagtttaatagatagatttaaaagtgaagacaaataa

SEQ ID NO: 6475 - DNA, 246 bp, Staphylococcus epidermidis
atgaataaaaagagatatcaatatttaagaaatttcattgatgctagtcagtattctcataaagatgtagctaatatgataggcatgaacccagctcgctttagtcaaaagattaatagaaacaaaagtaattttacgatagatgaggcgagtgcaatatgtgaagttttagacattagtatggatgaatatttttttaatcaaaacgtctcaaaaatgaaacgagaggcgcaaacaactcaataa

SEQ ID NO: 6476 - DNA, 747 bp, Staphylococcus epidermidis
atgcaagatttacaaactaaaccgaacatcggagaaatgttcaatattcaagaaaaagaagacggagaaatcgcaatcagtggtcgagaacttcatcaagcattagaagttaagactgcttataaagattggtttccgagaatgcttaaatacggattcgaagaaaagacagattatacagctatcgctcaaaaaagagcaacagctcaaggcaacatgacccattatattgatcacgcacttacattagataccgcaaaagaaatcgcaatgatccaacgtagtgaacctggtaaacgtgcaagacaatatttcattcaagtagaaaaagcatggaatagtccagaaatgattatgaaacgtgcattaaaaatggctaataacacaattaaccaactggaaacgcaaattgagaaagataaacctaaagtattgttcgcagacgcagtagctacaacaaaaacttctatcttagtgggtgagttggcgaaaatcattaaacagaatggtgtcaacatcggacaacgaagattgtttgaatggttacgacaaaacggtttcttaattaaacgtcaaggtgtcgactacaacatgccgacacaatactcaatggaacgtgagttgttcgaaattaaggaaacatcaatcacacattcagatggtcatacatcaattagtaagacacctaaagtaacaggtaaaggacaacaatactttattaataaatttttagcggaagaactttaa

SEQ ID NO: 6477 - DNA, 234 bp, Staphylococcus epidermidis
atgaacattcaagaggcgactaaattagctatgaaaaatggtaaaccgatttatcgctcgtctgaatttgacacatttaaaaaaccgggtgacaacttagaacttttacctacaaacagttatggatatgtagtcgtgaaaccaagacaaaaagccttctatccattatggcaaccaatggcagaagacttattagcagatgattgggaagtagtgggactaaaaaagaattaa

SEQ ID NO: 6478 - DNA, 339 bp, Staphylococcus epidermidis
gtgcttactaatgaagctgagttcgttttgcttcaactttatcgttgttatgaagacgatcttcaagatggtaaaaataaaagtgaagcaaggtattttgaagatgaacatagtgttcgcgataattactttattggaatagattctgaagattttcatttagctctaaaggaactttcaagctacggttatttaaatacaccgaaatcaacaatggatggctacccagaatttatacttgaaccatcagctatagctgagatgcaaaatcgctacacgaagaatctaaataaagtattaaaaaggattaacgaattgaaaaagttaattcttttttag

SEQ ID NO: 6479 - DNA, 117 bp, Staphylococcus epidermidis
atgccagaacacattcaacaaatgttatttgatttcgcattagaaagaggatatatcgaaaaacttttagaaatgaaaggagagaaagaacaaaatgaacaaattacaactcattaa

SEQ ID NO: 6480 - DNA, 681 bp, Staphylococcus epidermidis
atggatatgaaaaattattacggtctagaccctgctgtaaaacaactgctagacaattataggaatcaaataagttattttaataaaattcctaaaaaccatttaaatgaagttattggtattgctaaacacgtaaagtctgtttctagttataattctgcagttataaacgcagcattaaatacaaattcattttttaatactgatggatatatgcagtttaaaaatggtgttttaaatactaaaaagatactagattctgctaatttccaaagaaatttattttctgaaaaagtacttaatgacttcataaactctactaactttcaaaaagatgaagttaaaaaagtcagtaatcgtttgagacaatcttttatcgatgctatcgatgtctcttcttttagtgaaaccgtcgactctccccatccagtagatgatgaatatactgataaaaacaacagtgtattcaaagattcgctcaatcatagtattgtttctccttctgcaaagtttgtaaaaagtatttcagttggatcagcaactggggtaactacaccggtattaattagaactatttttgatcaatacgttgattattttgctttttctgcggtaattgcgacgttattaacttgttatctaatagcaaatcaactcattgaaaacgattcagaaaattaa

SEQ ID NO: 6481 - DNA, 264 bp, Staphylococcus epidermidis
atgactaaaaagcttaaaccaattcaaagtatttatctagaactggttcatgaacactttaaatctaatcaaaagtgtgacttaggtttatctcgtacttttgatgacgaactcattatcgagttcttacactatcacaatcattataaaacaaataataaactgatacagatttttgaatctaaaccagaaagccacaaaagattaaagaatttagtcattgaagtaatgcgtggccaaagaaaaatcaaaaaaggagcctaa

SEQ ID NO: 6482 - DNA, 1950 bp, Staphylococcus epidermidis
atgaatttaactattaacaaactgacaatcgaaaactttgcaggctttaagaaacaaacatttgaatttaatggccaagatgcaagagtgtacggagctaatggcacaggtaagactactacagcaactgcactacagtggttgttatttgataaaggtttagatggctcaacgaagtcatttaatccagtaccgttaaaagaaaataacgaagaagattatgaacttattccaacagttgaagttgaattaaataaagatggtaaaactttaaaaatcagaaaagaaagtcatccaaaatacactaaaaatcaaagtaataatcgcaaagaatatagtcgttctagaacaaagaaacagtatatcaatgatgaaagtttaaaagtaaaagatttccaaagtcgtatcgctgaactggtagatgaagatgtatttaaactcattactaatcctgcagcatttaatgacttggaatggaagaaacaacgtgaattgttatttgaaattgcagaccaaattaatgatgaagatatcatcaaaacgaataaggactttaagaatttaaaagatatcttaggtgattatgatatcgaagtaaaaacaaaaatcctaaacgataagattaagcaaattagaaaagacattgaagatataccagtcagaatcaatcaaactgaaagcaataaacaagatgtccctgagcatgacgaagaacgttacaacacagttaaacaaaaaattgaacagttaggtaatgagagagttgatattcagaatggtaagtctgagattgaccttcgtaatcaacttgcagataaacaagcagaactgaaacgtcttgaagataatcatgatgctaacaatgaaagtcgtattcattcagcaaaaaataaactgagcgtagaaaatggtacagtggccaacttagaaacgaaaatcagaaacaacaaacaacaaattgattacgaatcaaaacgtcgtcaagcattgctatctgagtatcatgatttcaaagaaaaagaagaagaagttagagcaagacaatttcaacctagtactgataatgtttgctcttgttgtggccaagcgttaccacctgaacaagttgaagaagtaaataaaaaagcattggccaaatttaataaacaacaatctgaagatttagaaaacctaaaacaaaagactgaaaagatactttctgatggcaaagaaatcaagccactaatcgaaagattagaaagtgaaaacaatgacttacaaattaaagtcaatgaagctaatgaaagagtgcaacgtattgaaaatcgaattaataaattgaaagcaggcaatgttgatattactcaaacagatgagtacaaatcaattctaaatgacatcaatgtaatcaatcagaaacgtaaagatattaaaactactattagcgataaagtagccaagattgatggacaaattaatgaactcactcaagaaaaagttgcatttgaaaatgctaaagcgattgaaagttcaaatgaacatttggataaagtcattaaggatttacgcagcgaagaagatcaactacttgataagaaagaggattatgaacatcaactttatatcttgaaagaatttacaactaccaaagtcaaaatgctgactgaaaatattaataagaaattcaaaatggctaactttaagctattcaatcatcaagttaacggtgaaatcaaagaaacatgtgtctgcacagttgaaggcgttgaatataacggtggccttaacaacgcagcaagaatcaatgttggattagatgttattaacacattatccacacactatggaatctctgcaccaatcttcatagataacgcggaaagtgtgacagatattattccgacagaagcacaacaaattcaattagtagtaagtggccaagataaaacattaagaatggagactatataa

SEQ ID NO: 6483 - DNA, 924 bp, Staphylococcus epidermidis
atgactgaaaataataaattacaaactattgaacaacaattagtacaagaaaagaacgtatctgacaacgtattaaacaaagtgagagttttagagtcaaaaggcaatttggaattgccaaatgattattcaccaagtaatgccatgaaacaagcatggttacaaatcagccaagataacaaattaatgagttgtaacgatgcaagcaaagcaaatgccttattagacatggtaacgcaaggtttaaatccagctaaaaatcaatgctactttattccttacggcaacaaaatgcagttacaacgtagctatcacggtaatgtaatgatgttaaaacgtgatgcaggtgctcaagatgttgttgctcaagtgatttataaaggcgatacattcaagcaagaaatgggagaaacaggacgtatcaaagcgattaaacacgaacaagaattctttaacatcgacaaagaaaacattatcggtgcttactgcacaatcgtatttaatgatggacgagataactatattgaagtcatgactattgaacaaattaaacaagcatggatgcagtcatcaatgattaaagatgaaaaagcattacaaaattctaaaacacataataacttcaaagaagaaatggctaaaaaaacagttatcaatagagctgctaaacgttatatcaacacatcaacagatagtaatcttttcaaatatgcacaagaatctgaacaacgtcaacgtaaagatgtcctagatgcagaagtggaagaacaagcaaatcaagaagaacttgattttgaacaaccacaacaatatgaagatgctcaatttaaagaagtagaagaatctgaaccagctgatgtaagtaactttgaagaagtattgcaagaagcacctaagcaagaaagtgagaaagagccattttaa

SEQ ID NO: 6484 - DNA, 486 bp, Staphylococcus epidermidis
atgactataggcactcaacaagcaattcttacagaaagtcatagaatatgtacaatcaaagcaaaacaagcactaagaatcggtacatggtcgatactaccatttgatattgaacatgacgctaacgaaccagttggctttttactcaaaagcgttcatggttacaaagttttgtatgtcacagatacaaaatatctcaaatataagttcaaaggcgttacacacatgatgttagaagtgaattacatctacgaacagatgcagcaaaacattaaagatgaagtaattcataacgtattggccaatcgtattatggagtctcattttagcttagaacatgcaattggaatgttagaagcaaatgatttatcaaaactagaagaaattcacttaattcatttaagtagtaataacgcaaacgctactcatataaaacaaagtattcaggaagttacaggcgttcctgtttatgtaggaggacaataa

SEQ ID NO: 6485 - DNA, 468 bp, Staphylococcus epidermidis
atgattaacagagtcgtattagtaggtcgtttaactaaagatcctgaatttagaacaactcaaagtggaattgatgttgcaactttcacactagcagttaatcgtaatttcacaaacgcacagggcgaacgtgaagcagattttatcaatattatcgtatttagaaaacaagcacacaatgttaacaactacttatcgaaaggaaaattagcaggcgttgatggtcgaattcaatcacgcagttatgaaaatcaagaaggtcgtcgagtatttgtaactgaagtagttgcagatagcgttcaatttcttgaacctaaaaacacacaacaaggtggtcaacaagacgcttaccagcaacaaactcaatcacaaacacaacgtggccaaaatactaaaccacaaggacaaaatcctttcgcaaatgctaatggaccgattgatatcagtgatgatgatttaccattttaa

SEQ ID NO: 6486 - DNA, 966 bp, Staphylococcus epidermidis
atgccggaaaaaacttatattccgggaggctatattctattatctcggaggcttatagaaagcgaaatatgggataagcctcccatgtatttaaaagtttggatttacattcttacaaaggcaaggcacaaagcgaatcaaaaatttagtcgtggagagttattaatcagtattccagagattcaagaagcttgcagccataaggttggattcagaaaagttaaaccaacaaaagaccaaatttacaacattattgagtggctacgaagcgtaaatgaaagcaactatgaagacgattacgaaaacgacacgaatacaactatgatagcaacaacgaagacaacacggggaatggtcgtaaaagtgcttaactacaacgtttatcaagagccgaaaaattacgaagacaacggtgtaagcaactatgaagacgttacgaagacaactacgaaagcggaacgaaagcaacgactacccaatactatacacaagaatgtaaagaatgagaagaatgataaaaatgtaaagaatgagaagaatgttgttgtaggcgacgacttcgctacgatttacaacctgtatcaagaaaacatcgaacagataccaagtccgattacaactgaaaaactaactcaagatatggatcattacggaaaagagttagtagcgtatgcaataagaaaagctgcactgaataattctcataattacaaattcatagactacttactcaaagattggcgtaagcgtaacttaacaaccataaaagcagttgaacaatacgaacaacaaagacaggaacaaaaagaacagtcctatcaacctaaagtaacgcaatcaagagaaaagacaccagaatggttgaagaatcgtaatcaagaaaaagaaacggttgatgatgatcctgagtttgaaaaagagcgactagcatttatgaagcagcttgaacaagattggtcggaataa

SEQ ID NO: 6487 - DNA, 228 bp, Staphylococcus epidermidis
atgggacttatcgaaagatattacctatatagagttgatggcacagaagatattaaagtcgtcaaatacgaggataacacgaatgaggtttattcgctcacaggcgctcattttagcgacgaaaagaaaattatgacagatagagagctaaaaaactttaaaggcgtgcatgaccttaaatatgagcaagaactaggattgcaagcagacttatttgaattcttatag

SEQ ID NO: 6488 - DNA, 408 bp, Staphylococcus epidermidis
atggaaatagaaattaaatttaacgagacgtataaggcgcctatcgggtcaccacgtccacgttttaaaaaagtaggtagatatgttcaaacatacatgccaacgtcttacaccaagcacaagacttatatacaggaacaaatgccaaaactattaacagataagaaactgaaagtgtcgttgcacttttattttgagccacctaaaagttggtcgaagaaacaaaagttaatcgcgataggcacatataagagaactaaaccagatgtagacaacttaatcaaaacagtattagacgctgctaatgagcatatttggaacgatgataaccaagttgtgcatatagatagttttaagcaatatgcagaagaaccaaaaataatcatgaatgtagaggaagtagagtga

SEQ ID NO: 6489 - DNA, 507 bp, Staphylococcus epidermidis
atgaaaaataaattaatagcggaacaattaaaggagttattacaaatacaaaaggagtttgacgatagaattccaacacttaatttacatgatagcaagattgcgtacgttgttgaattctttgaatggtttaatacattggaaacgtttaaaaactggaaaaagaaaccaggtaagccattagatgttcagttggatgagttagcagacatgttggcgtttggattgagtattgcgaatcaatcgaatgtgagtgtaaaagctctatcagaatcattgcctaacgttgagcaagactttgattatagaacgtcagatattatgtacagactgatggaagatgttattcattttggattaggtgatgaagacccagtgttattaccatttaatattgcatataacttatacacaatcgaccaactagtcatagcatacaaaagtaagatggaaaggaaccacgctagacaagatggaacagcagacacagaaaaaggttacgtctaa

SEQ ID NO: 6490 - DNA, 156 bp, Staphylococcus epidermidis
atggaacagcagacacagaaaaaggttacgtctaaacatgttgaaatcgatacggttaaaaaagacattttagaaaaagtaaaagaggtgcatatggaagcacaggaaagtaaagacgtattagaagaggttaaaagaatattaggtagggagtga

SEQ ID NO: 6491 - DNA, 303 bp, Staphylococcus epidermidis
atgagcaaatcagcgaataatgtattatcttctttttgctatttcagtgtatttttcatgccttttttgtttccacttatcgtttggatattagctagtggtgatacgtcgaaacatgctggaaaagctttgctttatcatatattaccaatttttttcatgttaatagcagccgtattctttaccggatttagcaccaaccaatctaatacaatatttataataggttttattatagctttactaggaatatactatgtgattaaaaatttggttttaggaataaaattattatttgcttag

SEQ ID NO: 6492 - DNA, 177 bp, Staphylococcus epidermidis
atgattaaaaaactaataagaatatggtttactatcgcaatgtacgagttaggcaaatggattggaagagagttgtattacaagttgactgcaaacgatgaggtggaagtgcctaaggatttttaccataagaacgatcaaatagatatagaaaaactatatacgaaaggacgatga

SEQ ID NO: 6493 - DNA, 150 bp, Staphylococcus epidermidis
atgtggattattgtttcgatcatattagctattgcactcttaatatcattatgtgttcaaactggattgagaattaaactaagcgagcataagcaacttaatgaattattgaataagcagattaaatattttaaagataatagaaaataa

SEQ ID NO: 6494 - DNA, 447 bp, Staphylococcus epidermidis
atgaatctaggtaaagaagacataccaaagttagaacagttctttcgtaagtacgaagatatgaaagggcaactattatataggcgatacgagatattatatcaacctcaagatacaaatactggtgggggaaaatctaatcttccaagcagtcctgtagaaaatgaaataattgagctacataaagatgataaatatcgtaacttacaggcaactatcacagcggttgaagatgtgtatagaaatgcgacacctgaacagaaagctattattgaatacaggtattgggaaaaagacttattaatatatgagtggccagacattgcacatgaactaacaaaggcaagagaagataacaaagtgattagcagagatgctacacttcgcatgcgtaaccaattgatgagagaaacagctaaacgaattggttggataagctttgattaa

SEQ ID NO: 6495 - DNA, 471 bp, Staphylococcus epidermidis
atggctagaccacgtaaattgaacctacaaaagaagggacaccgaactaaagaagaattacaagaagctgagaacgttgaaaatgggctttatgagtttgatcagattgatgcagaaagcttaccagaagatttaaccgaaggtgctagtaaagaatgggtgcgtgttgttcctcttttacaacaattaccaattgcagaactcgactatggtttgataaaaaaatattgtcaattagttgatattagcgatgaagcatatcaagaaatgcaacaagtaggcacatatcaacctgataaccatcgtaaaacaggaccatatgtcacattcatggatactacaagagagattataagcatatgcggtaagttaggtatgacaattgatagtcgtatgcgcttagttgtaccggttgaaaaagacaaagcaaaatctgtttatgatgaatttggtgttgatgaagatgactaa

SEQ ID NO: 6496 - DNA, 1752 bp, Staphylococcus epidermidis
atgactaacgttaagatacctaaagcatatgaagaacttctgaatatacctaataatctaagagatgatgcatacaaatattgtgttatggttctatctggtgcatacattacatgtaaggatactagacttgcctgtattcgtcatttaaaagatatacataggtcgaaagataattctgaatggaattatgtttataaacctaaacgtgctaaaaaggtcattaaatttatggagacgttacctgatacaaaaggtaaaattcataaactaactttgtttcaaaaattcatagttgccagtgttagaggttggtttactaaagataaagatatgttgagatttaaaaaagcatttatctcaatggcaagaaaaggagggaagtcacttttagtaagtgggcttgtcctttattcatttttatttgatagagaaccggcagaaggtagacaaatcttttgtgcagctaatgataagaaacaagcaagcgttgtattcaacatggtaactaaacaactcatgcatttagtatcaaaagtaccagaattaaagaaagacgttaaaaaagtacgcgagttgcttaataacttgcgtgatgactcttttgttatgccattgtcacgtgataccagtgcagtcgatggtttcgaaccgtttctagcagttattgatgaataccatgcagctaagacagacgaaatggtcgaattaattcaatcaggtcaaggtaacttatatcaatcacttatctttattatcagtaccgcaggttttaacttgaattcgccaatgtatacaaatgaatggccttacgctaaagatatcttagttgaagtttatgatgatccagaatactttgcgattatctacgaacaagattcggaagatgaatggcaagataaaacaacatgggctaaatctaatccattaataaatgagtcagacgacttgaaagaacaaattgaagagtatttagaaaagcgcgtagcagaggctaataaaaaaggatctatgttcaaggtacttgttaaaaacttcaattattggttacaagcaagtacggaatcctacttagatttcaatgattggaaaaagaatgaaacagattttgatatacatgggtctaaaacttatatcggcctagatttgtcgcgtgctgatgacttaaccgcagtatcattcattcatcttaatgaagatagtcagcaatattatgtgacaagtcattcgtttgtggctactaaaggtggactggatggaaaaattgatagagattttattgattatagacaacttgcagaaaacggttattgtacgattaccgatttgcaaagcggtattatcaatacagaccaagttttgaattacattgaagattacatcaatcaatacaacctagatgtacaagcgatatgttatgacccatattcaatacatggtgttattgcagaaattgaacgtagagattggccatatgatttattagaaatcagacaagggccacaaacgttatctaatccgatactagattttagattgaaagtgattaacggtgacatcaaacatcataaaaacccgttactagacattgcgattaaaaacgcggtggctaaagatactaacgactcattaatgattgagaagaaaatgaacagagaaaagatagatccactcatgtcgaccatatttgcttatgtaatggcttgtgaacatgaatgggatacagaaactttaatgccactatttttataa

SEQ ID NO: 6497 - DNA, 1233 bp, Staphylococcus epidermidis
atgccattacttgatttagggtttataagtaaacaagaaaagatgaacagagatttagagagattgttgtattggcaagaacatggcacacattcaagctatgttggtataaacgcgttacggaacagtgatgtatttactgctacacgaattatttcagcagacattgccagcactaaattaaaggttaaaggtcatgaaacaaatactgtgatgaaccaaatattggatttgttcaacaataatccacattcagacttaccaggttggcactttaagtttataatcatcgccaacatgttactcaatggacaatcttttgttgaaattgtacgtgataaaaatgacttccccgtaggctttcacttcttacataatgatttagtaggagttgaagaaaaagacggagatattgtctacaacgtgagcgaagatgtagaaggtaacgctgttaagataactagtgatgatatattacacttcagatatatcacgttagatggatatgtgggttatagtcctttatatgcactagcacatgagattggtatatcacaaggctcaaagagtttcttgcgtaatttctttgacaatggtggtacttcaacatcagtgttaaagtataaaaaaggtcaaatcaatgctgaacaattaagagatttgaaaaagaatttctcagaaagtcaattaaaaaacaatggtggattagttgctattgatgacacaatggaatttagtagattgcaaattcctactgaagtattgaacttcttaaacagttataagttcagcacttcacaagttgcaaaagcgtttggtttgccagtatctaaattaggtattgaaaccgtcaatacatctatcacacaagcaaaccttgagtatttgcaaagtacattagacccaatatttaagatgatgattgcagaactcgaaacgaaaatatttaagtttgttgattctgattacgaattagagtttgactcatcacgtctcatcgacattgatccagagctacaattacaacgtattactgaattgcatagtaaaggaattatttcaacagacgaagctagaagtgtatttggttatcaacctattgaacatggcgagcaaccattggttgaccttaatagagcgccacttaacactttagaaaattaccaaaaatcgaagattgataaagaagtcgaaaagaactccattaaagggggtgatgagtatgacgaatag

SEQ ID NO: 6498 - DNA, 558 bp, Staphylococcus epidermidis
atgacgaatagtaacgttgacactgggcagcaagacatggttgttgaaggttacgcaattatctttaattcaatgagtgatgacttgggtgggttcagagaaatagtagcgccaaatgccttagacggtgtagatgtaagcgacgtgaaatgtttaattaatcacgatttcagctatgttataggtcgaacgcaagcaggaacacttgagttacaagtggatgaaaaaggattgtattttaagtgccacttacctaacacatcatacgccagagatatttatgaaaatattaaggcaggtaacgtaaatcagtgtagtttcttctatacattaccacctaatgattcaacagctcgtacatggcaaaacattgataacgagtacgttcaaaccataaataaaatcgatgaacttatcgaagtcagtattgttacaatacctgcctacaaagatacatcggttgaggtcggtcaacgtgcaagagatttaaagaaatttaaacagttggaacaaatgaaaatagctttagatttagaaagcctacgttttgaaacgtga

SEQ ID NO: 6499 - DNA, 1329 bp, Staphylococcus epidermidis
atggccaatttagatgagcgcaaaaaagaaatcgctagtctgatttctaaagcgcaagaagcagtcgaaaaggtcgaccttgaaactgcacgtaatttaaaagctgatattgatgcaaagaaaaaagagtttgaagaactcgaacagctttcacaagaaattgaagcatcagcacctaagttagaagaaacaccacctcaaagtgaaggtgcagaagaaactgataacaaagcagcagaagaaaaagaagatacctctgttgatgatgctaaaggcgaagaaaagtcagatgataaaccatcaaatgacgacaaaccatcttcagaagaaaaactagaaccaccagctatcgagaaagtagaagaacctactgaagaagaaaaagacaaaaagaaaaaagaaggagcgaaacgttctatggcgaaattaaatcaaaacccagagacaaacgaagaagtattagcgtttgaacagtacatgaaatctaaaggagcgaaacgtgacaacgttaaatcagatgacgttggtgtaacaattcctgaggacatcaaatacattcctgaaaaagaagtgaaaacagtccaagacttatcagagttagtacaaaagacttcagtttcaactgcatctggtaagtacccaatcttaaaacgtgctaacgctaaattcaacactgttgctgaattagagaaaaaccctgagttagctcgtccggaatttgaaacagttaattgggaagttgaaacgtatcgtggagcaattccaatttcacaagaagcattagatgattctgttgcaaatttaacagcaatcgtatctgaaaatattaatgaacaaaaaataaatactttaaacgaacgtattggtgaagttttaaaagcattcaatcctactagtgtatctaatgttgacgacttaaaagaaattatcaacgttaaattagatcctggttatgaccgccaaatcatttgtactcaaagcttctatcaagcagtggatacattgaaagataaaaatgatcgttatttattaaatgattcaattatcaatacttcaggtaacactttacttggaatgaacgtaactgtagtacgtgatgacttgttaggtaaaaatggagatgcactagcatttatcggtgatgtaaaacgtggtgtgttatttgcagaccgtacagacgtttctgttcaatggattgaaaatgaaatctacggtaaatacttgatgggtgctttccgttttgatgtaaaacaagctgataaaaatgctggtttcttcgtaacatttgaagatgcagcagaacctagtggcggcgatttaggagcataa

SEQ ID NO: 6500 - DNA, 342 bp, Staphylococcus epidermidis
atgttcaaaataaataacgttgaatctataaaaaaagcaatacgtgtagaccatgactttgatgatgatttgattatgcaagtttatttacctggagcaatcagtgaggttaaggctgctgtttctttagatgaagaagatgataaattctacaacaataatcctatattcaatttagcggtcttaaatattattgctcaccactacgataatcgttcaatcacatctaatgaacaatcatttgatgtgcctgcatcatcaatgaaacttatacaaacattaagaagtaatctagttaagtggcgaaaagataacatcgaggtgatagccgatgaatcttaa

SEQ ID NO: 6501 - DNA, 330 bp, Staphylococcus epidermidis
atgaatcttaacgagcttgattatagggttgctttttattctgtctcaaataatgggcctgaagcaggagcggataactgggaagaagtttttagttgcttcgctggtctatatgaacctacgcaaaaagatgtgcaattaggaaatttagaaacgagtaaacgttctgtaactattaatattagaaatgcacagcctgactttctacctacagtcaatcacgtatttgaaattaaaaatggaatgtatgctgggttaacttttgacattaagaacgttgcgcctgctaaaactcctaattacatcaaagtggtaggtgaagaatcatag

SEQ ID NO: 6502 - DNA, 288 bp, Staphylococcus epidermidis
gtgagtattatcaaaagtaatatgaaaacttttaaagacactggagagtcggtagaagaaactacactttcaaaacctatgacgataaacggtgtaaggactgttaaaattcattggcgtggtcccaaacaacgctatcgaattattcatctaaatgaatatggtcactttgatcgttcaggaaaatgggtaaatacagcaggtaaaggcgtaattgaacgtgcaatgcgagaaggacgtgaaacctactttcaaacggttaaagaagaaataaaaaggcgggtgtag

SEQ ID NO: 6503 - DNA, 405 bp, Staphylococcus epidermidis
atggaagatatcacaataaagatatacgaggcgattataaataacgaagaaataatgaaacttgtccccaaaaataacattaaattcttcgattatccaaacgcgcaagaaatcaaagatatagtgattgtcattgatccattagatacaccaaagcccgatgattttgctgacaatgataatttgacgtatgaatatttatatcaaatagacgtatttgtaaaacagaaccaaggtgtaaacggacgagtcatatcagataggctcgtctttttaatacaacgaataatgtgggaagtattgggatttggtgaaacatcttccattaaaccagaatatatcaaagaatttagtatctaccgacaagctaaaagatttgaaggtaaacaatattttaaaatttag

SEQ ID NO: 6504 - DNA, 627 bp, Staphylococcus epidermidis
atggcagagaaaaactatcgttcatttacaggtttaacagaattttattacaaagtgcatggtgaaggcggcgttcaaaaagttgctgatccagaacgcattaaatatttacaagaaatttcagtatcaaaagaccaagacattgaaaaagcatatggtgataaccaagtggcagaaatggcagttgctaacggaacaattgaagtagaagctggtttccacaaattaccattagaagatagggtggcactgtttggtttagagaaatctgaaagtggcatcgtttcagttggtaacgatacacctccatacgtagctgttatgttcgctaaaactatggaagatggttctcgtgaatatgtaggattacctaaaggattattcacattccctgaattagaaggtaacacaaaagaagatggtgtagaattcagctcagattctactactgctgaattcatgcaagctaaagttaagggcttcgaagaagaaaaagcaatgttattaggtcacgatgctaaaggtacatctgttatgaaggatgctatctgggaagccatctttggtgattctgcagaaagtagtaatccatctgatgacacagcagaatcagaattaggcgcataa

SEQ ID NO: 6505 - DNA, 186 bp, Staphylococcus epidermidis
atggctaagaaaaaatatgaagttttacacaaattcatcgatttagaggataagaataaagtatataacgctggtgatacttatcctaaaccagcaaacaaaaaagtgtctcacgatcgcatattagacctttctacaagcgataacaaacgtggcaaggtattaatcaaagaaatagaagaataa

SEQ ID NO: 6506 - DNA, 363 bp, Staphylococcus epidermidis
atggctaaacgtaattttattaaattagtacaagtagacaaaaaaggtaacgcagtaacagattcagaaggtaacgcaaaattcgacacttatattacacctacacaaattccattccgtaaaatctatgatgcagctgatttaatggatggtacatcagatgaaagcacttctgcccaagaaaatatcgatcaaatgttagacatggtagttgatatttataacaatcaatttacaaaagatgatttattagacagattacatgcaccagatgctgtagaagagttacaacaacaaattcaatttattgcacaaggtcaaatggatgacgaaagaaaaaagcaactagccaaaatgatttaa

SEQ ID NO: 6507 - DNA, 153 bp, Staphylococcus epidermidis
atgaaaaaactcatactgcaaatgatgaaagaaggcggcaaggatatcaatgacatattagacatgccttttgcttttttcatggagttagttgacgaaagtaataagaaaaacgtcaagaaaactgacagtatgattaatgcattcatgtaa

SEQ ID NO: 6508 - DNA, 4497 bp, Staphylococcus epidermidis
atggcagaaagaatcaaaggtttacagatagacctgtcgatgcgagatgtaaatataagtaagacattggctggagtaaaaagagaatttagagcattaaactcagacctcaaactatcaagtaataactttaagtatggagaaaaaagtgctaatgcctacagatctcgtatgaatgatttagatggagctattaaacaaggtactgctaatttagattcacttaaatctcaatatgaagaagttgctcgaacgcaaggtgctaatagtgctagagctgtcagattacgtactgagtacaataatcaagccatagcagttaataaaatgagagatgaatatagtagattaaacagttactatagggaaaatttttccattgcaggtcgattgagcaattcttttaaaagtgttggttcaaacatgcagaatgtaggtcaacaagcacaaaatttaggtagttctcttacaagtaaaattactaagccagcgttagtagctggcactgcaatggcaggtataacggctaagctaggttttgacagattggtcggtcttgatactgctaaagcaaaactcgaaggtttaggctattcaactaaagaagtgggttcgattactgatcaagtaacacatgcgattcaaggcggtatgacaacaatggctgaaggtaccgatgttgcagcaggtgcattagcggcaggagtaaaacaaggtaaagaattagaaaagtatattaaattagttggtgatgcggctgtcggaagcaatagaccggtatctgaaatggcaatgatatttaatagagttcaaggtcaaggaaaactgatgactcaagaattaaatatgattgaagaaggtatgcctggatttagtaatgctatggctaaacatttaggtgtttcatatgatgcatttagagaaatggttaccaatggcgaagttagttcgaaagagttcttaactgtaatggacgacttcgcaggtggtatggcaaacgcttattctaaatcatggaaaggtatggtacaaaactctaaggcctatataggtcaaattggagaagcgttcttaagcagtacctttgaacaagccaaaggtggtttgcatgaatttgaatctatgttgaaatcgccaggagccaaagaatgggcggctaaaaccggcgaacaacttggtaatacattagcttcgattggcaacggtattaaaggcctaatagattggtggcaaaatttagacggttccactcaaaagacattaggtggtattgtcaaatggttaggtatcactttagttactatggggccagtattaactatattcggtaagatggcaagcactattggtggcatgtttagtggaatgtctaacttaatacaattcttcattagacataatggtgcggctaaagtatctgctgcatcgcaagcaatatggaatggtgttactgctactgctcgtggtatcgcaaatggttatagattagcaatatcagctttaagtacatctcaaactatacaagctttgaaaactaaaattgctgcagctgcaacaacagcttggactgcagttactaaaggtgcagctttagcaactaaaggcttaggattagctataagatttatgactggtccagtcggtatagtcattacagccatcggattattagtagctgggcttattcatttatggaaaacaaatagctcgtttagaaatagtgtgattactgcttggaatgctattaaaaattcggcagtaactatattcgggtttattaagacttatatagtagctatatggaatgctataaaagctgcaacaattgcagtatggaacggaattaaaaccgttgctgtagctacatggaatggtattaaatttgctgttcaacatcctatacaagcattaaaaaatgttttatccgctttatggaacggaatgaaagcagcagctattaaaatctggaccgccttgaagaacggtgttatagcaattattaaagcgtatgttgcgcaagtgaaattcaatatcaaccttatcaagcgtatagtagttacgatatttaatgctattaaaaatttcgctattaaagtgtggactgcactaaaaaatgctgtattaaaaattgttcgatctttacgcaaaggtgttctttctgtgtttaacgcgttaaaaaaaggcgtttctgcaatatttaatgctataaagaatgccgcagttagaatatggactgctatgaaaaatactgtcattaatcgagcaaaagcattatggtctggagttaaaaatacatggaatgcactcaaaaaaggtacaattggcatatttaaagcagttggtagcttcatgagttctaaatggaacggtattaaaaaaggtactgttaataaagctaaagctctatggtcaggcgtcaaaggtgcttggggatcacttaaaaaaggtactcataacaccatgaatgctgttggtggcttcatgagcaagaaatggaatggaattaaaagtactactgtatctatagtaaatagcatgaaatcgaaagttatgggcaccatgaataaaatgagagacggtatcaaaacagttaccggtaaaattggtaatctttttggcggaatggtcaaaggtgttaaaaaaggattgaataaattgatcagtggcgttaactgggttgctgataaattaggtatggataaattaccgtctattaaattaagtacagggacaaacgcatctaaaaaatatgtgagtcatgggaaaattaaccgagacacttttgcgacagtcggagacaaaggtagaggtaatggccctagtggatttagacatgaaatgattgagtatcctaacggtaaaacgactattacccctaatagagatacaaccacattcttacctaaaggttctaaagtttataatggtacacaaactcatgcgatgctatcccaaatgcctcgttttagtatcggttcagctatcaaagaaaaagctgaatatatgtttgaaaaaggtaaaaaagatattaaaggcacagtaggtaaaggcaaggacttgggaggaaatgcagtagatcaagtgaagaaagttggttctgaggttgcggttaaagctaaaaaggttggaagtgcagttatatcaggtataggagatgtatttgattatataggacaccctggtaaattagttaacaaaatttttgacaaagttggatttaactttaattttctcaaggatgcacctttaccttttgatttaatgcaaggagcctacaagaaattaaagagtggtgtcaaatcattatttgacgaatggcttaatgatgccggtggcggcgatggctcttcctttactaagttcccaattactacgggatattatcctaatggtggcgctcctggttatagttttggtggaggtcatcattacggtattgactttggcgcaccttttggtacgacaatcaacgctacgaatagcggacagttaggtgaattgcataactttggcggagggcttgttgcaagacttttaacaggtcaattcacattattttttatgcacttatctaaaatattgaaacacggtaaagtacaggcaggagaacctatagctaaaacaggtaatagtggtaactggactactggtcctcacttacatttccaagtcgaaaaaggtagacataatgatattactaaccagaatactgtaaacccacttaagtggctcaaaggtcacggtggcggaaaagttggtggtagtggttctgcaaacgcacgtagagcaattcaaagagcacaatctattttaggtggacgttataaatcgtcttatattaccgaacaaatgatgagagttgccaagcgtgaatctaatttccaagccgatgcagttaacaactgggacattaacgctagaatgggagacccttctaaaggtatgttccaaatgattgggtcatcttttagagcatatgctaaaccaggacacggaaatatgttaaacccaactgacgaagctatatctgctatgcgttacattgtaggtaaatgggttcctattatgggaagttggagaagtgcatttaaacgtgctggagattatgcttatgctacaggcggagttattaatacatcgggaatgtatcaacttgctgaagggggttatccagaaattgtaatccctacagatccaagcagacagtcagatgcgatgaaattgttacatcttgctgcgagtaaaattagtggaaataacagaaataaacgacctaaccaattacgtacacctagtgttattagtaatacagttgataacgcagaactactactacaaatgatagaaaatcaacagaaacaaataaacgtgttaatggaaatagcacgaagtaataaaactattgaaaaacaaccgaaaggtttttcagaacgcgatgtaagtcaggcacaaggttcaaggttaagactcactgcttatagccagggaggtttataa

SEQ ID NO: 6509 - DNA, 834 bp, Staphylococcus epidermidis
ttggaaaataaaaaagtaaaaatatttaacgatcatttcgaagaaacactaacggaccttcctcatcttaagtttttagaatttgaagaagaggatttagatagaaagtctaatcagattgaagttaatggtagcgatggcgttttacaaggaccgatgaatttcggtccttttaatttgatactgagattttcatataaaggcatggattataaagaatatagattagcaaaagaaaagttacgtcaattgataaataggagagatccttatttcgtatggcattcagatatgccaggtaaaaagtatgcagttataccagagggagtgagtaatgaaaacctaacaagtcaatttggacttattgaggtgacttactctgtctacaaaggatatgcagaatcattaaaagacacttctgaatttagttggactgatgaaagttggcagtttgaacaaggtgttataggaagtgatgaagttaaatataaacacaatattcgttactttaaaatatttaacggctctaaagacaccattaaccctttattaagacacaaattaaatattaattgcacacttacagcaccctatggatttgaaatcgttaatctaaccacaaatgatatatttgaatataaaaaacctctcaaaaagcgtaatacggtttcgattataggagtgcatccgtatattaataataaaagagttggtaaagacacaaattatgattttattactttagcgccgggttggaatgaaattttaattagaggtcacaatatatccaatagtcctaaaacagaatttatatttaattacatttataggtag

SEQ ID NO: 6510 - DNA, 1560 bp, Staphylococcus epidermidis
ttggaaaatctaatatttatgaatagagaagggacattttcggaaattgttaatgactttgattttggttcctttaaatatgaatatgaacaaaataatgagcgatccatatctctcactgcttataaaactaatgttaacgccgatatattcgatagtttgattaatgaaaattatttaatttggaagggtcagaaatatgttattaaatctactgaacttaagtatgaagaaggtgtaatacttaatgaaattgaggctaagcatatttctatggaatttcaaaatcattatatacctaaagatttagatgatgagtcactgaatgatgaagatgaaactgaaacaaaaatttctatgaaagttaaagagtaccttgattttgcattcaaaaataataaacttaatttcgattataagttacatggaaaatttaatgagagtaaatatattgaagagttcggagataaaaatggtttagaacatcttattgaaggtgctgagcattttggctatatattttttgctgataataaaactttccatatttatacacctgataatttttataaaaaatcagatgaaatattagtttataaatataacaatagttcggtttcggctaaaacaatcacaactgaattacgtacctacattcaaggatacggaaagaaaaagtcaaaatccgaaacgaaaaactataaacctataaaacctaaagacttctcgtattctggaaattttaataaagaaggtacttggtctactgaacatataggagactccttttataagacattttattgtaagtggggaaatgaaaacttaacttggaatcttaaaaaaggacctaaaggtggaataatcgaagtatttattgatgataagtccaaagggacttttgattgttacagcgctcatgcttcgacgcaaaaagtgattttagctaaaggattatcaaaaggtaaacattcttttagaggagtttttaaatcgaaaaaatccggcattgattataagaaatctaatccagtcatgtatgttggtactagtaaaagtagtgttttaaatctaactgcagttcttaaaggtaaagatatttatcatgtatatgctgagtataagtctccatattataagcaatatggtaaatcagaagcccctacaatatatgatgataatattacaagccaatcagagttaaagaagaaattaaaagaaacacttgatgatattccaacaatcgaagtagcaacgaattatttaggattagaaagtattcatgaaaataatactattcgatttatacacaaacctatcgggtttaataccgatttaaaagttgtcaagcttactgaatatcatccccttgtttcgcagcctattgaagtggaattcagtaatattcagaaagatattatacaaatgcaatcacagttcaatcgtaggttaagaaagtttaataatcttatgaaaaaaggattcaaaactagtgactattctttaaatgtgttacaggaatataacgaaacagtaggaagtgtattgattgatgagtaa

SEQ ID NO: 6511 - DNA, 174 bp, Staphylococcus epidermidis
atgagtaaagaagtatcgataagatatctacaagatagagatggagaagaatattttccagtcacgcacatagaggcagtaataggttcagatgtttacttagacaaaatagaaaatttggaaaaagaaaatgaagaacttaaaaaaagaatatctcatttagagaaggaataa

SEQ ID NO: 6512 - DNA, 1863 bp, Staphylococcus epidermidis
atgttattaactttagactttcctattcaaatagggcacacatttagaaccaagatgataaataattttagaataatacttaattattataatgaattagatcatcggcatcgagcacacgcagaaactaagcatcatgctcatcaagccatgcaagttgattatagaaatacaaacgtttctgcatttttagattatcttaatggtaatattaatgggcttgttttaggagcaaatggagacggtatagctgaaacaaaacaagccagagtatcaatagatggtaccgtacatcccttgttgcaagaaaggcttcttcatgacttcttaggaattaacagaaaattagataaagaaatacattcaaatggtgcagttgattttatttggaatcctccatatataccaggaaatagattaggtgaaaatggaacaccaaataattgggaaccagaatcccatattgaagcatttttaaatcctttagttgataatcaatatgttacaaaagaagttgtcggagaagatacatcaggaaaatataatgtgtacaaattcacgtttgaaccacaaaattacaacaaaactttacttatcacttcatgtatacatggtaatgagaccactggatttttcgatatgtgtcatatactcaacctattagtcaatgagtgggaaaagtatcctcaattaacttacttaagaaaaaatgtacgtttaatttatgttcctatggttaacccgtggggatttgcaaatcaaaaaagagagaatgtgaataatgtagatttaaacagaaattttgattataactggaaagcaggtaaagggacagatccagataaatctaacttcaaaggcgaaagtcctttttctgaaaaagaatcacaaaatatgcgtaacttagttcaacgtatagataatttgacagctcacttggatttgcatgatatcatttctgtaaataatgattactgtttattttatcctcgatgggccaatcaaaaaaataataatatgactcaactcattaacaatttaaaaagtaacggagatctcgttgtttggggttccagtacgttatcatcttttagtaattgggtaggtattcgaaataaaacaacgtcatatctttcagaaataaatgaaaaacgtgtcggtgaaaagaaaagtcccgaagaaatgagacgttcagtacgctgggtaggtaatgtaatttttagaatggcacaatttgaatcttatcaaaatggtcaaacatctttagatccttttattaaagttatggtctatgatgatagatttaacaataaaacatctgaagtcattaccttacgtgcagaaagaaatgaatggcaacgtataatgatgagtcagcagcgtttcaaagttttagcaaatggatttgtagagctctatggatatgtgactataaacgttgatagagaagttacagtggggattagtcctaatattgttcaaaactatcatccattctttgggtttaataaaagtagaaaacgtaatctattttcaattgaacataaactaaacaaaggaaatacgacttttcctatatatgctgctgctggtgttcaaatgtcaacgattactgaaccaggtactaaacgtactgatacagtaatgccagtattagatgttaagaaaaaaggtgctggcattgtaacaataaaacaaattaaattatttgcgaagttcactcctacgcattctgctaattctattcagatactaaaatctggagaatacggtaatcttaaagaagatacgttcacacaaatttaccctaatactatatacgatgatgatttaagaaacgttataaatgaggaggaaaaataa

SEQ ID NO: 6513 - DNA, 1095 bp, Staphylococcus epidermidis
gtgactaaaaacaacgaacctttattaattagtgaagaaaacactgaaacgtacatatatcttgaatcctctaacggttctaatcaagtagtagaaaatgtacgttttattgaccctttgaatggtgttattgaagtaaccatacctattgaattcttacaagcttcaacgaatacaactgttataggtcaaatatatatttcgattaatcatctaaatcaggtagatagcgataaatcatcaactgcagttttaaacgaatttgaattcaaagtgggtaacgcaataataaataaaattaatggtgcaactaaaattaaatatatacgtatgtttgatgaattaaaaaaacaaattaatgcacgagctactgaaatacaagaacaattagataatttagaagattacgttgttaaagtgaaaaatgcaagtgatgaaggaattacaaaaattcagattgaaacaaaaaaaggattggacatacttaatcaacaacatagtaaaagtttaaaagacgtcgaggaatctcttagcgcagctaaaaatacaattcaaaatctttatgaggaatatgacaacgatattgaaacaaaaggggggcaatatcttaaagatttaagaatcgaagttaggaatattgaaaatatattaagtcaagagggatacgtcacaattgatgaacatcgtaaaatctttactgaaatacaagaaaagttacctgaatcttcagattggatcgaatatgatttaattaatggagctataaaaaataggcattataaagctgaaggacaaaatggttttaattgcgcttataaaactattcaacatcaagattacaaggaagtgattttaagaattaacgctgacaatttcaaaagtggaactgctatagcgaagttaccgagtgaattaattacaagtacgcaaactgcgttcctaagaacggtgcctgttaaagcttgcggtgctcaattaacaattgaacctaatggagatgttaaagtttatatttctcagagcgatcagtggtcagtaagtcgtgaagcttatatttacggagaaattagaatgatagataaaggaggtgaataa

SEQ ID NO: 6514 - DNA, 624 bp, Staphylococcus epidermidis
atggatacttataaatctatgactgaacttgtaaggaatgaaaaagattggatgattgagacgcaagatagaaatagtaaatcacttataactgctatacacggaggtggtatagagtgcggtacttctgaattagcgttattggttgcagaattatcgaatgcaaactacttcacttttaaaggtttaaaaccgaaaaacaataggactctacacgtcacttcaacaaattatgataaccccaatttactatattggaatcaatttatgaatgtaacgatagccatacatggttattcaagcaatcaagcaaatagttatattggtggattggataaaagacttatatcacttattactcacaatttaaaagtttcaggttttaatgtggaagccgctcctgaaagaattgctggtaaagaaattaataatataactaacaaaaacgcctgtggaatgggtgtacagattgaaatatcaactcagcaaagaaaagaattttttagtcgaaacgattttagtcaaaagaatagagaaaatacacataattggacagaagacatgtattactatgctaatgctatctgcgctgcaattaatgatagaaagtgggtagaaacatga

SEQ ID NO: 6515 - DNA, 426 bp, Staphylococcus epidermidis
atgaagaaaacacaccgtatgactgaaatggaatatattaatgttatttctttattatttattggaacaatagctatggctcgaggttctttttttatatttgcttctgaaattcaagtcgataaaagcccattgtatagtagtattaatgaaataatccccttaagtatttgggggattccattctttataggaggattatgtttagcaattgcagctatgtctttaccttatagaaatattaacaaagtttatagtattactcttattttaggagggattatttgttctgtgtttttctttgtaattacgttagctggtattagtgattctttaaattggatgtcacctcttatttattttttaactactttaacgtgtggtggttatgcttactttggagtgttgcattatgccaaacaatga

SEQ ID NO: 6516 - DNA, 408 bp, Staphylococcus epidermidis
atgccaaacaatgaattgccccaaagttattatgaagatagggacgctattcataaaagaataagagaggttgatgaaaaacatacgaacaattataacaatttaagtttgttattagcagaatttaaacctacacttaatcaaatggtcgaggcaactaaagagatgagtgctgaacagaaaaaaacaaaccaacaaattatagaacaaggccaacgattgtttgtcgtcgaaaaagatgctcaaatgcttaggaaacatttaagtcaagaagaacaagaagcaaaagagaaaggtaaagaaaataaagagtttattttaaaagctacaggtatatttgttggtggaggtggtgtggcttggcttatccatccattgttcgactttttaaaaaatgtgattaattaa

SEQ ID NO: 6517 - DNA, 399 bp, Staphylococcus epidermidis
atgagaggtttgaaaattttattaattcctataatagtcattatattattagtaatgggattacttttcggattgagaatttacggtgatcatcatccaaataatgaaaatgtaaaagatttgaatatgaagaaccctcttgagccgacaaaagaatattatgtaaaaactactaaaccagtaaaagaaaagcctaaagaagatgcagatcaaactcatgtatacgagacaacaggttatgataaaaatggtaatagtaaaaaaattaaatatgtaggaatgaaaagactgaaactcaatcactatttaaaaattaaacaaaaattagatacagttaaaagttatgaagaagttaaaaaaaacgatattcctaaagaagcacgtaaacatttaaaataa

SEQ ID NO: 6518 - DNA, 411 bp, Staphylococcus epidermidis
ttgaaaattaattggattacacgtttaaaaaacggaacaacactcacagctttagttggtgctatattattatttgctaaacaagtaaccgaagcatttggtttagatatatcaagtcaacttgaaacaataagtagtattctggggagtattattacaatacttgtagctttaggtgttgttacaaaccctaacactaaaggatttgctgatgctggtattgacctagaaataaataaaccgcgcaatcaagaaacgcatcctgtacagtttaaaagtgagtcaggtgcagtgaaacctgaagttttcgacactaacgaaccgtttactgatgattctgatgaagaggaattcgaatttaacaatggtggaggaggagccccagatgaaaacacaatctcaaatcaataa

SEQ ID NO: 6519 - DNA, 1464 bp, Staphylococcus epidermidis
atgaaaacacaatctcaaatcaataaacgtttaagagattataaaaacggtgtagtagatagtccatacagagttaaacgttggacgagttatgacgcttcctttggtgctatggaaccaggatgcattgataaagatcgtgtttatcacgcacagtgtatggatttggcgatagattatgtaatgtggttaactgataatcaaacagaaatgaggggcgatgctaaaagctctttaatgaataaattccctaaagactggaagattgtagaaaataaaccgtcaacggtacccaaaaaaggttggatagctgtatatacatctggaatttattcgcgttatggccatataggtatagtgtatgaaggtggtaatacgaactccttccaaatacttgaacaaaattggaatggctgggctaataaaaagcctagcttacgatgggataactattatggtttaacacactttattgttccgcctgtagcgaaagaaatagaagcacctaaaaataatgcaaaatcagctcctaaacagtcagttaaggaaaatagtagcatcaaagttaacactaatcatataaaaggttggactatgactaaaagaggacgtaaacctaaagctgtagttattcataacgatgctggtacaatgaattcaaagcaatactataacaatctagtaaacgctgattacagtagattagcaagaggtatagctcatgcatacgctgatagaaacggtatttgggaagctatatcagaagatagaattgcttggcatgtttctgatggcgttcaaccgggttcaggtaattttgaaacttatggaatcgaagttaatcaatcattgtacgtaagcgataaagctttccttaaaaatgaacaagcagctcttaaatttgcagcgcataaacttaaaaagtgggggttaccagctaacagaaatactgttcgtttacacaacgaatttagttatacagcttgtcctcatcgttcagctaaattgcatactggtattgatccaacaaaacaagcatggactaaggcaacacaacttaagttaaaagattacttcattaagcaaattagggcatatatgaaaggcagtacacctaaagtaactacagtcaaaaacaaacctggcagtgcttccactccagctaatagacgagatatgaacggttggaaaatcaataagtatggaacttattacaaatcagaaatagctcgctttacgccaaacactcctattaaaactcattatgttggaccatttagaagttgtcctgttagcggtgtattacagccaggtcaaacaataaaatatgacactgtatgtaaacaagacggtcacgtttgggtgagttatacagcttataatggtaatgatgtttggttagctgtgagaacatggaataaaacaaatgatagtttagggaaattgtggggtacaatcaattaa

SEQ ID NO: 6520 - DNA, 1083 bp, Staphylococcus epidermidis
atgttaaattttgataatttagtaataccaaatgatttatctaagttctcaaaaagtgatttaagggatttagcaacagaattagatatttctagcgatactaaaagtaaaattgatttagctatagaagtatataacaagttcaatgaaaacaagaatgtgaacaaaaaagtaagtaatttaataagtagtaaactacttgcgggtagaacggctgttaaatggtttaatatagacgaaagtttaagttataataagatgatagaaagtttggatgaagagtatcataatttatttgataatattcaaataccaaggatagaagatttaagtacagagcccactattttcggtattgtttcaaatgattctacaaatgaaattttcatcagattaatatataaaagtggtgtgaaatctgatatgtatgggaaaaatattgtaaaaacaccagtatctggatattctactatatatattaactttaatgatcgaatattggagtatcgtggcgatgctaaaaaaggaaagagaactgtggatagttttattgattatattaataaaagtaataattcgctccctacaaatgacaaatttgattttacggtagaagatgttgctaacaaattacaaggcgaactaattgatacagtatcttttccagatataattattgaagatgattcagataaatttggagctattttattagtattagaagcattagatgaatatttcaaagaaaataacattgaaaaattagaaagtgcattaatgagagtgaatgaattgtttgataataatataggagaaaacatcatgcctttttcatcacttttactttctggtttagaaaccgtaggtttgggaagtaataaagagttgagaaatactccactatataaatatttaaaaactaatttaacccaaacgactggttttattaaaataaaagtaacagaaggaaacgtagttaatgagtatactgttagagtggggattcaaactcaaagtttattttttacatcagatgtaagtgaaaatgtaattggttatgttagaaaagctctatttgattaa

SEQ ID NO: 6521 - DNA, 798 bp, Staphylococcus epidermidis
atgactattactttcgttactcgagagaaattacaagaatttataaagcaaatatgttttagtccgattgataaatttacacccagtaagtttgctaaatttgctaatattagtattgatgattcatttgaattactgattgatcacgtagctactaaagaattagaattaatctgggaactaaggtgtcctaattgcaacaaagtcaattctttagataatagtaaagattttgataaatatgaatgtaatttctgttatgaaacattcgacatagacaggagtgatttgtatccaaaatttcgaatttcaaagaaatatagagaccatttagttaattctaaaaatgatgatgattctggaaaaaagtttgaaaaagctgttgcaaatatttctgagaaaaacatacctttatcaagtataaatataaatgaatcaacgtggaaaaaaattcagaaaatcaataacccatgcataattaatattattaatggaggtgataatgtgaatataaacagtaacagctttaataattcagatataaataattcaagtatacaaagtatacataataaccaaatcaatatagttcctgagcaatatattaatgatttagagaatgatataaaaaattttgatgatgaagtaatacaagaaatgaatgaaaaatatttagaagatttaaaaaaatctttaaaaaataatgataaagagaatgccaaaaaattcttgtcattcatggaaaaaactttaggtagtttatcctctatagcaacaatttctggctatctcaattaa

SEQ ID NO: 6522 - DNA, 141 bp, Staphylococcus epidermidis
atgaaaaattatgatttgattattattggttttggaaaagcaggtaaaacattagcggcacatgctgctggtcatggacaaaaggttgcagtggtagaacaatcaacaaagatgtatggtggtacatgcattaatgtatag

SEQ ID NO: 6523 - DNA, 423 bp, Staphylococcus epidermidis
atgaatttagaattcaatattgcagtacatgtattatgttttcttgctcaacacgatcaagaacaattcaatagtaaagaattagctaaattaacatgtctgaaccctgtacaacttaggcgcgttctagcatatttaactgaacacaactatatcaaagttcaacgtggtaaagcaggaggctatcaagccaatcaacatactgctcaagtagatttagccaagttatatcaacactttgttttagataaaaataatagccaaagacgatttactggcgattctgacagtcattgtcaaatttctaagaaaattgctcatacaatgtcacattattattctcaagaacatcaaataattttagatttttacaaaaataaaaatattacagatgttttggcagatattttacaggagggataa

SEQ ID NO: 6524 - DNA, 933 bp, Staphylococcus epidermidis
atggtaaatcaagtacaattaggtaaatctagtgtcaacgtttttcctatcgcattaggtacaaatgcagtaggtggccataatttatatcctaatttggatgaagagcaaggtaaagaagttgttcgtcaagctattgataatggtataacattattagatacagcatatatttacgggcccgaacgttccgaagaattagttggacaagttgtaaaagaatatccacgcgagaaagtgcaaattgcaacaaaaggttcacatgttattaaagaaaatggagaagttgttcaaaataacgatccagaatttttaaaacagcaagttgaaaatagtttggaacgtcttcaagtggattatattgatttgtattatattcattttcctgatgacgatacaccaaaagataaagcggtagccgctctcaaagagcttaaagatgaaggtaaaattaaagcaataggtgtatctaatttctctttagaacaattaaaagaagcgaataaagatggatatgttgatgttgttcaattagaatacaatttattacatcgtgaaaatgaagaagtaatggcatatgctgctgaaaataatattacatttgttccttacttcccacttgcttcaggtatactagctggcaagtacgatgaaaatcaaacatttgaggatcatcgtgcagaacgtcctgattttcagccagacgtattcaaagataatgttcgtcgtgtaaaagcattaactgatattgcagaagcacatgatacaacgattgccaatgtcgtgttagcattttatcttacacgtccatcactagatgttgtcattcctggtgcaaaacgtgcagagcaagttgttgaaaatattgatgctgcaaatattgaattatcacaaggtgaaatagacaaaattgatagtttattcccaatttaa

SEQ ID NO: 6525 - DNA, 480 bp, Staphylococcus epidermidis
atgtatagtgtcagacaagcaactgaaaaagatgttgtagcgataagagatgttgcgacaaaagcttggtataacacatatttaaatatttatgctgcttcaacagttaatgaactgttggccgcttcatataatgaaacgcatttaaaaaagagactaaatgagcaattatttttagtggcagaagaagatagtgagattgttggttttgcaaattttatttatggtgaagagctttatttatctgcacactatgttagacctgaatctcaacatagaggttatggaactcgtttgctagaagcggggttgaaaaggtttaaagaccagtatgaaacagtttatttagaagttgataacaataatagtaatggcatcgaatattatcaaaatcatggattcgagattatccgctcatatcaacctgaaatgtatggtgaaatcatggatttagctttaatgaagaaatcatggatttag

SEQ ID NO: 6526 - DNA, 1299 bp, Staphylococcus epidermidis
atgacgctatcatcatatgcaacgagtaaattaacagaagaaaaggtatttaaagatccaattcatcgatttatccacgtacaggatcaattgatttgggacttaattaaaacaaaagaattccaacgcttgagacgtattaaacaactaggtactttgtatttatcattccatacagccgaacatagtcgttttggacactctttgggtgtttatgaaattgtgcgccgaatgattgatgagacatttataggacaagacgcgtgggataatactgatcggccactcgcgttgtgtgctgcgttgttacatgatttaggtcatggtcctttctctcatagttttgaaaaaatatttaatacagaccatgaagcatttacacaagctattatcacaggagacactgaggttaatggtgtactaagtcgagtctctgataactttcctaaacaagtagctgatgtaattaataaaacgcacgataataagcttgttatttctatgatttcctcacaaattgatgctgatcgaatggactatttacaaagagatgcatattttacaggcgtaacgtatggctcatttgatatggagcgtattttaaggttgatgagaccatctaaagaagaagtgttaattaaagatagtggtatgcatgctgtcgaaaatttcattatgagtcgttatcaaatgtattggcaaatatattttcatccagtaagccgtggtggggaagttttattaaacaattgtttaaaacgagctaagcagctttataatgaaggatatgaatttaaaatgtatccaaaagactttataccattctttgaaggaacaatgacgattgaacaatatgtagaacttgatgaagcagttgtattgtattacttgaagaaatggattcatgaaaatgatacaatattaagtgatttatcaagacggtttatcaatcgagatttatttaaatatattcctttcgacggttcaattattaccatttcggaattgcaagaattatttgaagcgggtggtattaatcctgattattactttgtaagtgaagcattttcagatttaccttatgattatgatcgcccaggctcaaatcgcaaaccgattcatttattaaaaagtaatggtggaattacagaaataagtaatcaatcattggtgattaatagtattacagggattaatagagaagaccataaattatattatcctaaagagatgattttaaaaattaaagattatcaaattaaaggttctattattaacttacttaatgaattaaattaa

SEQ ID NO: 6527 - DNA, 507 bp, Staphylococcus epidermidis
ttgtctgagaaaaaaggtttcaatttcaatattataaaaaatgatccactagatggtcataaaggaaccaatattggttcgattagtttagataatattgccccggtttttatagatgttgaaaatcagaaggcatttgttgatattggtggtatgcacgcacgtgctgaagttgaaaagggtgtcaagtggattactgacaaatcacaagttgaaggtgaggaggctaaagcatactggctatgttgggtgacgaccgaacgtagtgaacaagggccatattatgcgggtgtgactgcatgctatttattagttaacaaaagtattagacgtggttataagagcatgccagaacatgttaatatgatggataagtcaatgaaacatcaatttatcatcgaccaaatcggtgatgataacaaacaaattttaaaaaaatttctacaaaatcataacgttgaaatgtggaataattctagtgaagaactatatcgagcatttgaatag

SEQ ID NO: 6528 - DNA, 1188 bp, Staphylococcus epidermidis
atgacaaaagcattatatttagattgccacgcaggtattgccggagatatgctactttctgctttagttgatttaggagcaaaccctgaagacattgaatcagaactaaaaaagttacctttagaccaatttaagctacattttcaaaaaagagtaaaacaaggtattcatgcaatgacattaaacattaatgttaaagaagcaaatcatcatcgtcacgttaatgatatatttaaaatgatagatgacagtacacttccagaaagggttaaatatcgcagtaagaaaatttttgaaatcattggtcaagcagaagctaaaattcatggcatgtcgtttgaagaagttcactttcatgaagtgggggcaatggactctattatagatattattggtgggtgtattgcactagaacaactagggattaacacattatactgttcagctattccaacaggtcatggtaaaatcaatattgctcatggcatttatccaatccctgcacctgctactgctgaaattcttaaaggtataccaatagcacattttgatgttcaaagtgaactcacaacccctactggtgctgcatttgctaagggacttgtttcatcgtttgggccatttccttcagcaacaatacaacatataggctatggcgccggcagtaaggattttgatttccctaatatattaagggttattcaatttgaatctgaattcgagcaacaagatagcgtccaagtaatagagtgtcaaatagatgatatgacacctgaagcattaggttattttatgaataatgcgttagagcagggtgctttagatgcttactatacgcctatatttatgaaaaaaagtcgcccaagcacgcagttaacgttaatatgtaaattacatgataagacatatttcgaacaacttatcttacaagaaacaagttctttaggcgtcagaagtacttctgttaatagaaagaccttgagccgcgcattcaaaattctttctacacaacacggcactgtttccattaaattcggcctacaaaatggaaaaattatgaaaatgaaacccgagtatgaagatttgaagaaaatagctaaaacgacaaatcaaccgtttcaagtaattcataacgaggtattacaacaactctatcaaacatatcgtataggaaatatacttcaataa

SEQ ID NO: 6529 - DNA, 777 bp, Staphylococcus epidermidis
atgagccatagttataattctatagaagaggtgctcaaagctgtaaaatcaaatcaactatctattaatgatgctaaagcccaactcagtcattatgacgaattgggctttgctaaaattgacttacatagagcacagcgtcaaggatttcccgaagttatctttgggcaaggaaaaacaaaagaacaaatcactaaaatcatctctagtttgatatttcataatgaagttattctagtgacacgtgttgatgaaatgaaagcaaaatacattttacaacattatccaaacttggaatatcatcaaactgcacagttaattagcactccactaaaagatataccacaatctaaatactatgtttctgtactttgtgctggaacttctgatttacctattgcagaagaagctgcattaaccgctgaaatcatgggagtaagtgtaaaacgattttatgatgtcggggtttcaggtattcatcgcttattatccaacattcatgatatacgcaaagggaaagtttctatcgttatagctggaatggaaggcgctttagcaagtgttgttggaggattagtcaaccaccctgtatatgcagtaccaacgagtgtaggttatggagcaaacttgaatggggttaccaccctattatcaatgataaatagttgcgcacccggaaccagcgtattaaatatcaataatggatttggtggcggttacaacgctgcacagattattcatatgctagaaaataaagagagtgaggtatctttatga

SEQ ID NO: 6530 - DNA, 828 bp, Staphylococcus epidermidis
atgactgaattaaatactaaagaaatgaaattagacgcactattgaaagacatgcagagtgtagtaattgctttctcaggtggagtagatagtagcttgttactgaaaaaagcgattgatgttttaggtgttaactatgttaaacctgttgtagtaaaatcagaattatttagaaatgaagagtttgaactagcgcttaaacttggacaaagtctaggtgttgaagtattagaaactgaaatgtctgaacttcaagatgcgaatatcgttaaaaatacgcctgaaagttggtactatagcaagcgcttgatgtatagtcaacttgagaatattaagaataaactaggatttaattatgtgctagatggtatgattatggatgacttagatgattttcgtcccggattaaaagcaagagacgacttttgtgttcgtagcgttttacaagaagcaaaactatataaatctgaagttagagaattaagtcatcaacatgacttgcctgtatggaataaaccagccttatgtagtctagcatcaagaataccttatggtgagaaattaagttttacaaaagttaacaaggtcaacgaagcagaaaaattcattttaagcctaggtatcaaccacgtacgagtacgctatcatcacaacatagcacgcattgaagtaaaagaagatcaattaaataatcttcttaaattgaaagacagtatcatattacatttgaaagaattaggatttgactatgtaacaatggatttagaaggctatcgtacaggtagtatgaatgaaatcattgataccaaatctacaagttttaaataa

SEQ ID NO: 6531 - DNA, 1269 bp, Staphylococcus epidermidis
gtgaagacgcaagttttgtacggaaaatctgaaattgaaatcaatgtgcctgatgatagcacaatcatagagcctcaaaacatcgacgctattcaagattatgaatcagcaattaaaaatgtattaagaaaccccacaaattctaaacctttaaaagaaatggtaaacagtaatgatattgtttctattgttattagtgatattacacgtccaacgcccaaccatattcttgtacctttactaattgaggaattaaatcatgttcctcgtgagaatttcgtaattattaatggtacagggactcatcgagatcaaacgcgagatgaattgattcaaatgttaggtgaagatattgtaaattcagtaaaaatcgttcacaatcattactcagaaaaagaaagtctagctaaagtgggacacagtcaatatggatgtgatgtttatttaaacaaagcatatgtagaatccgattttaaaattgtaacaggttttattgaaccacactttttcgccggattttcaggtggacctaaagggataatgcctggaattgcaggtttagaaacaattcaaacatttcataatgcaaaaatgattggcgatccgagatcaacgtggggaaatttagaagacaatccagttcaagatatggcacgggaagttaaccgtatgtgtaaacctgactttttacttaatgttgcattgaataaaagtaaagaaattactgcagcatttgctggtgaaatctttgatacacacaaagaaggatgcgcatatgtaaaagatcatgcaatgtttaaatgtgatcaacgctttgatattgttatcgcatcaaattctggctatcctttagatcaaaatttatatcaaacagtaaaagggatgagtgcagcgagtaaagttgttaaaaaagacggtcatattattatggtatctgagtgtgcagatggctttcctgatcatggtaagtttgccgaaattttcaaaatggcagacacacctcaaggtattttagaacttattcacgatccaaactttaaggaagttgaccaatggcaagtacaaaaacaagcaagtattcaaacttttgccaatgtgcatgtttattcagaacttactgaccaacaacttaaagactcgatgttaatcccaacctctaacattgaacatacaatacaagaattagaacatcgatatggtcgtaaattaaccattggtgttatgccacaaggtcctttaacaataccgtacgtagaagataaagaataa

SEQ ID NO: 6532 - DNA, 1023 bp, Staphylococcus epidermidis
atgaaagcagctgtggtaaccaaagatcatagagtaagtattgaagaaaaacgtttaagagaattaaaacctggagaagctttagtaaagactgaatattgtggtgtatgtcacactgatttacatgttaaaaatgcagatttcggtgacgtaacaggtgtaacattaggacatgaaggaattggacgtgtcattaaaattgctgataacgtagattcattaaaggtaggggatcgtgtatctatagcatggatgtatgcagcatgtggtaattgtgagtattgcacaactggtagagaaacattatgcagggatgttctcaatgccggatatactgttgatggggcaatggctgaagaagtcattgttgatacgaattatgcagttaaagttcccgtaaatcttgatccagcggctgcttcatctattacctgtgcaggtgtgacaacatataaagcagtaaaagtgagtggtatcgaaccaggacaatggttaggcgtatttggtgtgggaggattaggtaatttagcattgcaatacgccaaaaacgtaatgggcgcgaaagtcgttgcatttgacattaatgatgataaattaaattttgctaaagagcttggtgctgatgcaatcataaattcaactaatgttgatcctattgaggaagttaagcgtctaacgaataataaaggattagatgcaacggtgattactgctgtagctaaaacaccttttaatcaagcagttgatgttgttaaggcgggtgcacgtgtggtagcagtaggacttccagtagataaaatggatttagatattccacgtttagtgcttgatggaattgaagtcgttggttcattagttggtactagacaagatttaagagaagcatttcaatttgctgccgaaaataaagttattcctaaaatccaattaagacaattatatgaaattaacgatatttttgatgaaatggaaaaaggaacaataacgggtcgaatggtaattgatatgaaaagcacgcactga

SEQ ID NO: 6533 - DNA, 405 bp, Staphylococcus epidermidis
atgcgatttaaattaaaagaagatgaaattttagaatttttagatttaaattttctacaacaaacatttgaaaaagggcgtctccttattgggcaaaataagagacaaccattacacgtttattattttggagaaaaattcttggctcttttaaatgtaaattttaacacttttgaatatattaaagtagatgaagtcgattataatgatataaaaaaaatcactttaaaagacggactgctttttaaaaaaatgtttattgagaccgaggattttatgtttaactatagtacatctaaagctcttttaagtgattttcaaaataataattttaattactttattcaaaacaaaaagagcgtgttatatttgaagatgggcatttcctctaaaatatatgattga

SEQ ID NO: 6534 - DNA, 417 bp, Staphylococcus epidermidis
ttgaataaaaatattaacattcaaacccgtcaagttttgaaacagaatggtgaaaagcagagatttgagtttactacaaaaggttcttggcaacaaaaatttgcagattttatacgttacgaagaacaaattgaagatgctaaagtcaatgttacgattaaaattgaagatagcggtgtaaagttaattcgtaaaggcgacattaatatgaacttacatttcgtcgaaggacatgagacgacaacactctatgatgtacctgccggaaaaatacctttaactgttaaaacactaagccttatgcatttcgttactcataatggcggtaaacttaaaatacattatgagttatatcaagatgaacaaaagatgggttcttatcaatatgaaataaattataaggagataagcgaatga

SEQ ID NO: 6535 - DNA, 1662 bp, Staphylococcus epidermidis
atgaatataatcgatcaggttaaacagacgctaatagaagaaatagaagctagtattagaaaagctaacctcgcagaagatattccagaaattaaaattgaaatacctaaagatactaaaaatggagattattcttctaatattgctatggttttaacaaaaattgctaagcgtaatccacgtgagattgcgcaagctattgtcgaacatttagatacaagcaaagcacacgttaaacaggttgatattgctgggccaggtttcatcaacttttatctggataatcaatatttaacagacattattccagaagctatcacaaaaggtgatcgatttggatatgcaacacaatctaagaatactaacattttattagaatatgtatcagctaatccaacaggagacttacatattggtcatgctaggaatgcagctgtaggcgattctttagctaatattctcattgcggctggttacaatgttacacgtgaatattatattaatgacgcaggtaatcaaatcactaatttagcacgatcaattgaagcacgatacttcgaagctttaggtgatacgagttatgagatgccggcagacggttataatggtaaagacattattgaaatcggtaaagatctcgctgttaaacatccagaaataaaagactactctgatgaagaacgcttaaaaacgtttagacaacttggtgtcgattatgaaatggaaaaattaaaaaaggatttatctgattttaacgtgcactttgataattggtttagcgaaacatctttatatgaaaatggcgcgattaaaaatacattatctaaaatgaaagagctaggctatacgtatgaagcagatggcgcgacttggttacgtacaagtgactttaaagacgataaagatcgtgtattaataaaaaaagacggtaattacacttatttcacaccagatacggcctatcactacaataagattaatagaggaaatgatattttaattgatttaatgggtgctgatcaccacggttatattaaccgtctcaaagctagcttagaaacatttggtgtagacagcgatcgtcttgaaattcaaattatgcaaatggttcgccttatgcaaaacggagaagaagtgaagatgagtaagcgtacaggcaatgcgattactttacgtgaaattatggatgaagtcggtatcgatgctgcacgttatttcttaacaatgcgtagtcctgattctcattttgactttgatttagagttagctaaagagcaatctcaagacaatccaatttattacgcacaatatgctcatgcaagaatttgttctattctaaagcaagctaaagaacaaggtattgaagtgtctactgatgcagacttttctaaaataaataatgataaagcaatagacttattaaaaaaagtagcagaattcgaatcgacgatagagagtgcagccgaacatcgcgcacctcatcgtctaactaattatattcaggatctagctgcagcattccataaattttacaatgctgaaaaagtgcttacagatgatacggaaaaaactaaagcacatgtagctatgattgaagcggtgcgtattaccttgcacaatgcattagcattagtaggtgttacagcaccagaatctatgtaa

SEQ ID NO: 6536 - DNA, 636 bp, Staphylococcus epidermidis; identical to SEQ ID NO: 3920

SEQ ID NO: 6537 - DNA, 756 bp, Staphylococcus epidermidis
atgatgaaagaacgcttcagtcccaaaacgctttctgacattaccggagttagtatacgcacgcttcattattatcatgaaaagggattactcgtgccacaacaaatgagtgctaatggataccgatattataatgttcaagatatttcaaagttacaatatattctctttttaaaggaattagatttaacattaaagcaaatacagacgtattttgaaggtgatagtgattttagaactaaaatattacatgataatttttatcacattgttaaaaaaagagatcgcttaaacgatattatccgtacgttagaacatcattttcacaaagataacgatgagattgaggtaactacaatgcaaaatttcaatttaaatgaacagtatgaaaaagaagcagcaagtaagtatggagatactcattattatcaagcatataaagataaacaaaaatgtaaggatgaatcagaacagcaaaatcattttgaggaaattaataagcaattaaatatgttttttgacgaaatgaatcaactatacttaaacaaagtttctatacttgaagcaagtggaaaaactaagaaattacaatgtattttgaaagaacaagttcctaattgtgacaatcaatttttagaatatatagctcagatttatattgaggacgagcgatttgtaaagtttattaacaagcaacgtgaacgtggtttgaatttatacatttctgacgcgataaaaacatttattaaattataa

SEQ ID NO: 6538 - DNA, 888 bp, Staphylococcus epidermidis
atgaaaagtaaactatggatagttatatgtgcattgattgtagtactggctgcatgtggtcaagatgccaatcattcatctaataataaagacactgaaaaaagcgataaaaaatatcatagaattatttcgctcattcctagtaacacagaaattttatatcgcttaggaatcggagaagatatagttggtgtatccactgtggatgattatcctaaagatgtaaaaaaaggtaaaaaacaattcgatgcgatgaatttaaataaagaagaattaataaaagctaaaccggatttgattttagcgcatgagtcacagaaaaattctgcaggtaaagtgctaaagtcacttaaagataagggagtaaaagtcgtttatgtgaaagatgcacaatcgattgatgaaacttatgatacttttaaatcaattggacaattaacggatcgtgaaaaacaagctaaagaacttgttgatgaaacaaaacacaatgtagacaaaatcattaactccgttcctaaacatcataagaaacaagaagtgtttatggaagtatcgtctaaaccagacatttacactgccggaaaagataccttctttaacgatatgttagagaaactagatgctaaaaatagttttgatgatgttaaaggttggaaatcagtaagtaaagaaagcattattaaacgtaatcctgatattctgatttccacagaaggtaaatcaaaatcagactacatagaaatgataaaaaaacgtggcggttttgataaaattaatgctgttaaaaatacacgtattgaaacagtagatggggatgaggtttctcgaccaggtcctcgtattgatgaaggtctaaaggatttaagagacgatatatataaaaaatag

SEQ ID NO: 6539 - DNA, 945 bp, Staphylococcus epidermidis
atgaataaatatagaagtgtcattatatggttatttattttaatattaagcatgagcttaagtttaagctgggatgtaggaaaacttgatgatgtttttaatcaaaccatactattccaggttcgtttacctagattacttgaagccatgctcactggtgcagtacttacattagctggccaagtgtatcaaattgtgttaaataatccacttgcagatagttttacattgggattagctagtggtgcatcattaggatctggaattgctttatttttgggacttagttttttatggttccctatattttccattattttcagtttaatcacactgttacttgttttaagtgtttcagcgatgttagccaaaggatatcctgttcaaatgcttatattaacgggattactacttggtgcactattaaatgcattattgtatttgcttgttttgattaatcctaagaagatgaatccaattgctagttatctgttcggtggttttgcatcagctgaatatcaggatgttataattattagtttgatagcatctgtcgcaatcatagtattatttttaatgcgaaaaggaattaaattactgcaagttggtgaattgaaaagtcagtctctaggattaaatgtacaacaagttacgtatattgttcttatagtagcctccatcatgacagcagttgtggtcgcatacgttggagttattggttttataggcatgattattccacaactgattagaaaattttattggcgttatcaaataggtttacaaatgttattgaatataatcataggtgctgtagtcatgataattgcagattttataggaagtacaatgatacaacctatacaaattcctgtaggcatcgtgatggcattgctcggtgtaccagtcctattttatattttaattaaacagactaacatatga

SEQ ID NO: 6540 - DNA, 729 bp, Staphylococcus epidermidis
atgaatttaaactgcattaaggctatcgtctttgatttagaaggtactctattagatagagtaaaatcgcgtgaaaagtttatagaagagcaatatgaacggtttcatgattattttattcatgtgcaattagcagattataagaataaatttattgaattagacgatgatgaagacaacgataaacctgatctatataaggaaatcattaaacaatttcatatcgaccgtcttaaatggaaagatttatttaatgactttgaaatgcatttctatcgttacgttttcccttactatgatactttgtatacattagaaaagttatcgaaacatcattacatgattggtgtgattgcaaatggaaaatccaaaattaaacaatttagattgcattcattgggtattatgcacgttattaattatttaactacttctgaaactgtaggctatcgtaagccacatcctaaaatctttgaagatatgattgatcaattgggggttaaaccatctgaaataatgtatgtcggagatgatgcattaaacgatgttgctcctgcacgtgcaatggggatggtaagtgtgtggtataaacaagaagatgcagaattggagccattaacagaagaagtagattatacgattactaccatagaggaattgcttaaaattttaccagataattttgaaacagaaggagaagaacaacatggcaatggatttaattactaa

SEQ ID NO: 6541 - DNA, 798 bp, Staphylococcus epidermidis
atggcaatggatttaattactaaacaagacggtacaacattacactatagtactatgggacaaggatatcctgtcgtactcgtgcataccgcttttgataattatgctgtttttaatgatttagctaaggtattagcaaagtcttttcaggttgtgcttatcgatttgagaggacatggttactctgataagcctagaaatatagagttttatgactttgctgacgatataaaatttttattagatgctatatatatagatgaagcagcatttattgggcacgagatgggggcacttattgctgctgatatgtctgttagaaatcctggctatatatcctcaatcacattagttaatcctacttcaatagaaggtgaattgcctgaagaacgcttgttcagaaaatatgcgcataaaatacgtaactgggaagataataagcaagaaaaatttttagataaacgtagatattataaagcgcgtaagatgaataaatttttaaagcatgtcgttgatacaaatagtatttctactaaagaagaaattcaagctgttaaagatgtcttcaaatctgaaggtattgcagatgttttcaagcatgttcaagttcctacgcttattgttgctggagaacacggagaacgtacaactacactagaagctaaagaagtcgcagatttgattcaacactgtgaatttaacgtctatcaacattcaagtgcatatccttttgttgaagaacaggctcaatttactcaagagacaacaaacttcattcaacaacatgcacctaaataa

SEQ ID NO: 6542 - DNA, 510 bp, Staphylococcus epidermidis
atgaagaaactaataacatcattacttgttttaggattagttttaactggagtaagcgttggaaacaacgttgaagcggcaactggtaattcaatgaaaacagtacaacaattaaacaaaggtgataaatcattagaaaacgttaagataggcgaatcaatgaagagtgtattaaaaaagtatagtcatcctatctattcttataacccaaatagtaatgaaaagtattacgaatttagaactgataaaggtgttttgctagtaacagctaatgataaaaaagaaagaggaaatgttacacgcgtatcaatgacatataatgatgcaaacggcccttcatacaaagccgtaaaacaacaacttggtcataaagctataagtcgtgtacattataataatgttacaggtaactttggctatattcaaaaaggtcaagcaagttatcaattcagttcaaattcaccaaaggataaaaatgtgaagttatatcgtatagatttaaataaataa

SEQ ID NO: 6543 - DNA, 123 bp, Staphylococcus epidermidis; identical to SEQ ID NO: 3912

SEQ ID NO: 6544 - DNA, 720 bp, Staphylococcus epidermidis
atgcgtacgaatgataaagtattactcgaaaatattaatgattattttagtcacaaaggaatgtcaccacacttaattgatgatataaaagaaaaatatcgacaagatattaaaaagtctgaagaaaaagatcaagattacattgaatatagaggtaaatcacctgcgcaattaatattaacaattcagcgtaatttgtttgcattacaactcaatccaatgattttctttatcattaactttattcttatttcatatttgtacgataaacaatatgtaccttttcaagcaattaccggtataagcttgttttattgcttagttatatttccaataacactcattttatatgtgcgtattgccaaaaaaaattatctatacagtaataagtatgaaatgagaactggaataatcattggtattattgctttaattctagtaattatgcaagggtttcactttaactgggctattattcctatttctatctatggtcatcagtttgtatttttcgctggaattattttaagtcttgttggtatattctttaaacgtatagaatttgtaggagttggcttactattttgtcaaaaaacaatagatgcaatggtaactgacccggaaattgcacagtttttctctttagcaatttggattatacttgttgtgctaatcattttttatacgatacgtttatctgaacgcactaaatcatcataa

SEQ ID NO: 6545 - DNA, 777 bp, Staphylococcus epidermidis
atgaataaaattcaaatttgtaatcagattgaacttaactatattgatgaaggcgaaggcatccccatcattttaattcatggattagatggaaacttggcaggatttaaagatttaaaaaatgaactcaagaagcagtatagagtaattacttatgatgtcagaggtcatggaaaatcttcacgaacagaatcatatgaattaaaagatcatgttgaagatttaaatgatttaatgggagcattaaatatcgattctgcacatattttaggacatgatatggggggcatcattgcgagtgaatttactgaaaaatatcaatataaagtgattacattgacaattgtttcggccaaaagtgaagacattgcaaatggtttcaacaaattaatggttgattaccaagaagaattagcagggtttaataaatctgaggcaatgattattttattctctaaattatttaaagagaaagataaagcaatgaaatggtatcaaagccaaaaattatacaatagaccaactccggaagaaagtgcaattgcagtacgtgcattgcttaatattaaagatttaactcgtgttcatcataatgtgtccatacctactttaattgtgaatggtaagtatgacccactcatacaaaataaaagtcattatgatatggatcaatattatgatcaagttacaaaaattgtatttgataattcaggacatgcaccacatatcgaggaaccagaaaaattcctgaaactctacttagattttgttagttaa

SEQ ID NO: 6546 - DNA, 375 bp, Staphylococcus epidermidis; identical to SEQ ID NO: 3909

SEQ ID NO: 6547 - DNA, 954 bp, Staphylococcus epidermidis
atgaccaagcaacgcatcgttatttcttcattactattcattttcattctcacaacttgtagttttagttacattactttctctaaattaacttctgaaacagaagatattaaaaatataaaaactataaaagcaaagcccaaattactcctttcaacaactggtatacaagcccctcttaacagctatattttctattacactcccactttaggacaactccaaaaacttttagtaaaaaatcatagcaaagtatctaaaaacactccagtgttagaatattacaattatgaaaaagatcatttatatgaggaactccaaaatacacttagtaatgaacgtaacaacaaaactttaaattctaaaaatgatttacattattattcattccttaatcagctaaaattacaaatgattcaaactaaatcctcaattaaatccactttattttcaccaattaatggaagtatttcatatattaattctatcccttcaaaaccaaacgaaaagatagtgcaaattaatagcaacgaacgtattattcgtgctaatatatcagaatctgagttgaatttattaaaaataaatcaaaatatttctgtaacatctagtgacaacactcaatttactagtaaaattaaagaaatttcgaatataccatcaaaaataaaaaatggcgtctcatattacgacattttactttctacacaacccaattatcaaattggaacacactttaaaatcaaattagcctcaaatgacatagagttacctacgtcagctattgttcaaaaacgctatgttttaattctaaaaaacgggaaaattacaaaaagagaagtaacatacaaaaagagtttaaaaagtgggtatattaatataactaaaggcttattgatagatgaaaaagttgttaaaaatcctacttctaaattaataaacatttatatataa

SEQ ID NO: 6548 - DNA, 894 bp, Staphylococcus epidermidis
atgttacttcctattcaaacttcaatcaactcaaggctaagccaatttacccgttcatctttttatgcttcaaccatatcttttgctgtcggaacaatatgcttacttgtgcttaatcttattgttcatccacaagtattaacaccagaattcttttctaaacaaacacttaactatacttgggtcctaggaggactattaggtgttatctatttaactggaaacttattattattaccaagattaggcgcagcacttactgttgttattacggttacagggcaaattattatgggtgtaatcattgatacatttggattattgggcgcccatcaacaatcttttacattatttaaaggtgttggaattatatttttaattactggaattatatttatgaattatgttcgtagacatcctgttaataggcataagaatacaccaatagtattctggttgcttattggattcgtatttggtttcgctccgccaatccaaacaacaatcaacagcacactggctcaacacacacactcatccatatttgcttcactcatatcatttagcgttggtacaatagcgttatttatattaacattagtatttaatcgtagtctgaaaatatcatctactcataaaacactaggtaagattaaatctatttattttattggagggatactaggaatggcattcgtaacatctaatattattttaatgcctttcttaggagcagctttaactactataattgctatgatgggccaaatgattatgggtattattatcgatcatttcggtttgttgggttcacctaaaaacaaaataacatcacgtaagttaggtggattattatgtatagctataggtattattttattacgattattttaa

SEQ ID NO: 6549 - DNA, 147 bp, Staphylococcus epidermidis
gtgaatgttccgaggtgtcatacagccgatactattttgatgaatcattataataaaatgcacattaaacaagttttagaattaaaaaaagcgagacatcattttgaatttgatatctcacttcatattaataaaagaacaatgtaa

SEQ ID NO: 6550 - DNA, 225 bp, Staphylococcus epidermidis
atgtcaaaaactttggaactcgtatttaaatcaaatcttaataaacccgtcaaattactattacccgattttaacgctattactacagaacaattaattaaagaaagtatgaaccaacttttagaattagacattttaagatttagtttgggaaagcctgtcaaaatttatgctgcacaacttattgataaaagtacaactgttatatttgaagataaaaattaa

SEQ ID NO: 6551 - DNA, 207 bp, Staphylococcus epidermidis; identical to SEQ ID NO: 3904

SEQ ID NO: 6552 - DNA, 2403 bp, Staphylococcus epidermidis
atgagtttagtatatcttatggcgactaatttattagtcatgctcatagttttattcactctgagtcatcgtcaactaagaaaggttgcgggctatgttgcattaatagctcctattgtgacatctacatattttattatgaaaataccagatgtgattcgaaataagtttattgctgttcgattaccatggatgccttcaattgatattaatttagatttaagattagatggtttaagtttaatgttcggcttaattatttcgctaataggtgtgggtgtatttttttatgctacgcaatatttatcccacagtacggacaatcttcctagatttttcatctatttactattatttatgttcagtatgattggcattgtaatagctaataataccatcttaatgtatgtattttgggaactcacaagtatttcctcattcttgcttatatcctattggtacaataatggtgaaagtcaattaggcgccattcaatctttcatgattacagtgtttggtgggctagcgttattaacaggatttatcattttatatatcattacaggaacaaacacaattactgatatccttaatcaacgcaatgcaatttcacgacatcctttatttataccaatgattttgatgctattattaggtgcttttaccaaatctgcacaatttccgtttcatatttggttaccaaaggccatggcagcacctacaccagtaagtgcttatcttcattcggcaacaatagtaaaggctggaatctttttactatttagatttacacctttattgggacttagtaatgtttatatttatacagtgacatttgttggtctaataactatgttatttggatctttaactgctttacgacaatacgacttaaaaggtatactcgcttattctacaataagtcaattaggtatgattatgacaatggtaggtctaggtggcggttatgctcagcacacatcagatgaattgtctaagttttatattttagttttatttgctggcttattccatttaatgaatcatgcggtttttaaatgtgcattatttatgggcgttggtatcattgatcacgagtccggaacacgtgatattcgtttgctaaatggtatgcgtaaagtcttccctaaaatgcatattgtcatgttgctcgctgcattatctatggcaggtgttccttttttaaatggctttttaagtaaggaaatgtttttagattcgttaactaaagcaaacgaacttgatcaatatggcttcgtattaacgtttgtgattgtttcaataggtgtcatcgcgagtatattgacttttacttatgcactttacatgataaaagaaacattctggggaaattacaatatagaaaaatttaaacgtaaacaaatacatgaaccatggctatttagtttaccagctgtgattttaatgttactcattccagttatcttctttgttccaaacgtttttggcaactttgttattttgcccgcaaccagatctgtatctgggataggtgcggaggttgatgcatttgtgccacatatttctcagtggcatggtgtgaatcttccattaattttaagtatagttgttattattattggacttattttagctctagttgtgaattggaaagaggttacgcatcaaataatcaaaagtgcttcgattacagatggctatcggaaaatttatagagaatttgaattatactcagcccgtggtatacgtgcattgatgaataataaattgaattattacatcatgattacattatttatttttgtagctattgtagtttatggatatttgactgtgggttttcctcatgtacatcagcttcatattagttctttcggaccgttggaagttatcttatcagttgtaacattgattatcggcatttcattaatctttattcgtcaacgactaacgatggtggtattgaatggaatgattggattcgcagttacattatattttattgcaatgaaagctccagatttagctttaacacagttagttgttgaaactattacgacaatcttatttattgttagtttttcgagactacctaacatccctcgagttaaggcaaatttaaaaaaagagaccttcaaaatcattgtgtcacttgttatggcattgacggtggtatcacttatttttgttgctcaacaagcagatggtatgccttcaattgctaaattttatgaagatgcatatgaacttacaggtggaaaaaatattgtcaatgctatactaggtgacttcagagctttagatactatgtttgaaggactagtgttaatcatagctggattaggtatttatacgttacttaattacaaagataggagggggcaagatgaaagagaatga

SEQ ID NO: 6553 - DNA, 426 bp, Staphylococcus epidermidis; identical to SEQ ID NO: 3902

SEQ ID NO: 6554 - DNA, 345 bp, Staphylococcus epidermidis; identical to SEQ ID NO: 3901

SEQ ID NO: 6555 - DNA, 1503 bp, Staphylococcus epidermidis
atgatgagtaatttaataatattgcctatgttgttgccttttgtatgtgctttaattttagtcttcactaaaaataaaaatcgtatttcgaaaatcctatccattacaactatgattgttaatacaatgatttcaattgctttacttatttatgtcgttaatcataaaccgataacacttgattttgggggatggaaagcacctttcggcattcaatttctaggtgattcactgagtctgcttatggtgtcagtatcatcttttgttgttacgctaataatggcatacggctttggtagaggggagaagcgagtcaatcgatttcaccttcctacatttattcttttattaacagtaggtgttattggttcgtttttaacttctgatttatttaacctatacgtgatgtttgaaattatgcttcttgcttcgtttgtacttgttacattaggacaatctgttgaacaattacgtgcagcgatagtatatgttgttctgaatattttaggttcgtggttgcttttattaggaattggcatgttatataagacagtcggaacacttaatttctcacatttagcgatgcgattgaatcatatggaaaataaccaaacaataacgatgatatctttagtatttctagttgcttttagttcaaaggcagcactagtgattttcatgtggttacctaaagcatatgcagtgcttaatacggaacttgccgcgttatttgcagcattgatgacaaaagttggagcttatgcgcttattcgtttttttactttactattcgaccatcatccaagcgtcacgcatacattgctcgtgtttatggcttgtatcacaatgattatcggtgcatttggtgtcatcgcttacaaagatattaagaaaattgcggcttatcaagttattttgtctattggattcattattttaggtttaggttctcatactatatcaggtgtaaatggtgctatcttctatttagccaatgatattatcgttaagacattattgttttttgtaattggtagtcttgtttatatgtcaggctatcgaaattatcagtatttaagtggactggcaaaaagagaaccattctttggtgttgcatttgtcgtggtaatttttgctataggtggcgtgcctccatttagtggctttccgggtaaagtcttaatattccaaggggctattacaaatggtaattatattggtttagcacttatgattgtgacaagtttaattgctatgtatagtctttttagagtgatgtttataatgtattttggtgatgctgacggagaacaggtacaatttagaccactacctatttatcgtaaaggtttacttagtgttttagttgtagtggtattagcgataggtattgcagcccctgttgttctgaaagtaacagaggatgcaacaaatcttaatatgaaagaagatgtctttcaaaagaatgtaaatacacatttgaaggaggttaatcataagtga

SEQ ID NO: 6556 - DNA, 483 bp, Staphylococcus epidermidis; identical to SEQ ID NO: 3899

SEQ ID NO: 6557 - DNA, 303 bp, Staphylococcus epidermidis; identical to SEQ ID NO: 3898

SEQ ID NO: 6558 - DNA, 465 bp, Staphylococcus epidermidis; identical to SEQ ID NO: 3897

SEQ ID NO: 6559 - DNA, 2040 bp, Staphylococcus epidermidis
gtggagatatttgaaactctactcatatttgtcgcactagttattgtgagctcctttgtacatactttcatacctaaagtacctcttgcatttatccaaatttttcttgggatgattttatacctcactcccattccagttgaattcaattttgattctgaattatttatggttacattgattgcaccactactattcgttgagggtgttaatgtttcaagagtacatttaaggaagtatatcaaacctgttatgatgatggctctaggtcttgtcataactaccgttataggcgtaggattgtttattcattggatttggcctgaattacctataggtgctgctttcgcaattgcggctatactttgtcctacagacgctgttgcggtacaagcaatcacgaaaggaaaggttttaccaaaaggttcaatgaccattcttgaaggtgaatctttacttaatgatgctgcaggtatcatttcatttaaaattgccgtaggtgtattgattactggaactttttccatttttgatgcgattcaacaatttttgattgcctctattggaggtgctattgttggtctaattataggcatggctttagtgagatttcgtttaacattaatgagacgtggcattgagaacattaacatgtttacatttatacaattgctgacgccgtttgtcacttatttgattgctgaattattccatgcatcagggattattgcagcagtagttgcgggactcgtgcatggatttgaacgtgaccgtatagctcaaacgagaacacaattacagatgagctataatcacacatggagtattttaggctacgttttaaatggttttgtgttttcaatcttaggttttttagtacctgaggtaatagtgaaaattattaaaactgaaccgcataatttattattcttaatcgtcatcacattgctagtcgctcttgcggtgtatctctttagatttgtgtgggtatatgtactttatccttatttctatttatctgtcagtccattccaaaaaatgatttctaaaaatgatgaagataaagttactgagagtaaacctaagcgtagcttatatgcactaatcatgactctatgtggtgtacatggaaccatttcactcgcaatcgccttaaccttgccatatttattagcaaatcatgaaacatttgcttatcgaaatgatttattatttattgcttccggaatggtaatattaagtttaattattgcacaagtcattctgcctttagtaacgcctgatagccctgaagtgaagataggtaatatgtcatttaaagaggcgagaatctacattttagaacatgttatcgattacctaaatcaaaaatcgacgtttgaaacgagttaccgttatggaaacgtcattaaagattaccacgataaactcacatttttaaaaacggttgaaaaggaagatgaaaactccaaagaactagaacgacttcaaaagattgcatttaacgtagaaacaaaaacgctagagaaattggttgatgatgacgaaattactgagagtgttcttgaaaactatatgcgttacgctgaacgaacagaagtgtataaacaagcttcgttattaagacgaattattgttggtttaagaggaatgctattgaaacgtcgtgtaaaaacaaaaattaattcggcatcatctcttagtgttactgataacttattagaattgggtaaaatcaataagcttgttcattataacgtcgtaagtcgtttagccaaagaagctactactgataataaactagaagtaggtatgatttgcgatggatatctgatgagaatagataacttaacaccaaacaatttctttaattccagacatgaagatacacttaccaaaattaaattaaatgctttaagagaacaacgtcgtattctaagagaactaattgaaaatgatgagataacagaaggtactgcattaaaattaagagaatccattaattatgatgaaatggtaattgtagatagtatgacataa

SEQ ID NO: 6560 - DNA, 930 bp, Staphylococcus epidermidis
gtgaaaaaaattctcgctttagcaatagcatttttaattatccttgccgcatgtgggaatcacagtaaccatgaacatcactcacatgaaggaaaattaaaagttgtaactacaaactctattctctatgacatggttaaacgtgtcggtggaaataaggtcgatgttcatagcatcgttccagtaggacaagacccacatgaatatgaggttaaacctaaagatattaaagcattaacagatgctgacgttgtattttataatggtttaaacctagaaactggaaatggttggtttgaaaaagcacttgaccaagcaggaaaatcaacaaaagataaaaatgtgatagcagcatcaaataatgttaaaccaatatacttaaatggtgaggaaggtaacaaaaacaaacaagatccacatgcatggttaagtttagagaatggaattaaatacgtaaaaacaatacaaaaatcactagaacatcatgataaaaaagataagtctacatatgaaaaacaagggaatgcatatatatcaaaattagaagaacttaataaagatagtaaaaataaatttgatgacatacccaaaaatcaacgtgccatgatgacaagtgaaggtgcatttaaatattttgctcaacaattcgatgttaaaccaggttatatttgggagataaacacagaaaaacaaggtacacctggtcaaatgaaacaagccattaaatttgttaaagataatcatttaaaacatttattagtcgaaacaagcgtagataaaaaagctatgcaaagtttatcagaagaaactaagaaagatatttatggtgaagtatttaccgactctataggtaaggaaggtactaaaggtgactcatactataaaatgatgaaatctaatattgatacaatacatggtagtatgaaataa

SEQ ID NO: 6561 - DNA, 837 bp, Staphylococcus epidermidis
atgttagatttcattaaccatttgcttagttatcaatttttaaatcgtgcattaatcacatctattttagttgggattgtatgtggaacgatgggtagcattattgttttacgtggtctttctttaatgggtgatgccatgagtcatgctgttttaccaggtgttgctttatctttcttatttaatattccaatgtttatcggggcacttgtaacaggaatgcttgcaagtttgtttattggttttattacttcaaacagtaaaacaaaaccagatgctgcaataggaataagtttcactgcattcctagcatctggcgtcataattattagtttaatcaatagtacaacagatttatatcacattttatttggcaatttattagcaattacacatcaatcattttggacaacaattgtcattactgtactagttattttacttattattatcttttatagacctttaatgatttcaacatttgatgcaacttttagtcgtatgagcgggctgaacacaacattaattcactactttgtcatgttattactcgcacttgtaactgttgcgagcatacaaacagttggaattatccttgtagttgctttactaatcactccagcttctacagcttttttaatcagtaaacaactttatgccatgatggtaattgcaagcataatcagcgtgataagttcgattatcggtttatattttagttatatatataatattccaagtggagcaactattgtaatctgtacctttatgatttatattgtaacgctattaattactagaattaaaaataaacaaaaaaggagcgctttaacgtga

SEQ ID NO: 6562 - DNA, 747 bp, Staphylococcus epidermidis
ttgctcgaagtgaatcatttgaatttatttttgggaaaaaagcacattcttaaagatattacattctcattacctataaatggtgaaatcattggtattgtaggacctaatggtgccggtaaatcatctcttctcaaagcatttatcggagaatttaaagcgaccggtaaacatacattatatgatcaccctatacatacacaacttagatatattacatatatcccacaaaaagctcatatcgatttagattttcctataaaagtggatcaagtaatactatcaggatgttatgaagacattggatggtttaaaaaagcaagtgtagttgaaaaaacgaaacttaaccaattacttaatgatttagaactcgaccatatacgccatcgacaaattgcagaattaagtggtggacaattgcaacgtgttcttgttgcaagagcacttatgagtaatagtgatatttattgtttagacgaaccttttgttggcatcgacatttatagcgaacaacttattatgaagaaaattaaacatttaagacatatgggtaaattgattttaattgttcatcatgacttatcaaaagcagatcaatattttgaccgcattttattattaaatcaatcgttgcagtttttagggccaacaaaagaagcattatcatctgaacgattaaatgcaactttcattaattacaaagatgattcgcttttaacactatcctcacaagggagtacgaattag

SEQ ID NO: 6563 - DNA, 645 bp, Staphylococcus epidermidis; identical to SEQ ID NO: 3892

SEQ ID NO: 6564 - DNA, 747 bp, Staphylococcus epidermidis; identical to SEQ ID NO: 3891

SEQ ID NO: 6565 - DNA, 795 bp, Staphylococcus epidermidis
atgcattttaaacgtgttgtaaagtggggattgaatatgtatcaaaaccaaagaataaaagataaaattaacatattaggtgtaagttttgataatactacaatgctggaaatggtagaaaatattaaacaattcatatctagcaatacagatgataatttatttatagtgactgctaatcctgaaatcgtggattatgcaactgaacatgagctatatagaaatttaattaatcaagctgattatgtagttccagatggtacaggaatagtaaaagcttcaaagcgattaaaacagcccttaaaacggcgtgtgccaggaatagaacttcttgaagaatgtctgaaaatagcacatgtcagccatcagcgcgtatatctgcttggatctaaaaatgaaattgttgagtcagcagagaaaaaacttcaatctcaataccctaatatccactttgcacatcatcatggctatattcatctagaagatgaaacagtcataaaacgtataacaagttttaatcccgattacatttttgtaggaatgggatttccaaagcaagaacaatggattcaaaagcataaggacaagtttaagcacactgtaatgatgggcgtaggtgggtcgtttgaagtattcagtggctcaaagaaaagagcacctcaaatatttagaaagttaaatattgagtgggtatatcgtgtgcttattgattggaaacgcattgggagaatgataagtattcctaaatttatgttaaaggtagcaatacaaaaatataaaatgaaatcaaaataa

SEQ ID NO: 6566 - DNA, 795 bp, Staphylococcus epidermidis
atgagcgtttcggtaaatattgaaaatttaacaaaagaataccgtatctatagaaataataaagatagaattaaagatgcattaatacctaaaaacaaaaataaaacattttacgctctggataacgtaagtttaacagcgcatgagggagatgtgataggcttagtcggcatcaacggttcaggtaagtctactttaagtaatatgattggtggctctatttcaccaagttccggtgaaataacgagacatggtgatgtgagtgtcatcgctattaatgcaggactaaatggacaattgacaggtgtagaaaatattgaatttaaaatgctctgcatgggctttaaaaggaaagaaattaaaaaattaatgccggaaattatagaatttagtgaactcggcgaatttatttatcaacctgttaaaaaatattcaagtggtatgcgtgcaaaacttggattttcaattaatattactgttaatcctgacatattagttattgacgaagcattatcagtaggcgatcaaacatttactcaaaaatgtttagataaaatttatgaatttaaagcggctaaaaaaacaatattttttgttagtcataatattagacaagtgcgtgaattttgtacaaaaatcgcttggattgagggcggtaaactaaaagaattcggcgaacttgaagaagtattacctgattatgaggcgtttcttaaaacttttaagaaaaaatctaaagcagaacaaaaggaatttagaaataaattagatgagtcacgttttgtcgtaaaataa

SEQ ID NO: 6567 - DNA, 813 bp, Staphylococcus epidermidis; identical to SEQ ID NO: 3888

SEQ ID NO: 6568 - DNA, 1092 bp, Staphylococcus epidermidis
atgagattgataattaaaaagatttatatcatagctattgtgcttttaaatatggtttttaaaccgtttaatataaattcgaagcacattgtgataatgatgacctttaagcaagatatactgcctattatagaggccttatgtagtgaaggataccatgtgacggttataggtaaaaaaatatatcagaaagatattaataacattaatcatgcatattttatacctgccggaaataaatatattatgagacatatgaaagtattaagtaaagcaaaggttattattttagatacgtattatttaatgatgggtggctatcagaagaaaaaagggcaaactgttattcaaacatggcatgctgctggtgcgcttaaaaattttggcttaactgatcatcaagttgatttaaaaaataaggctatggtaagacaatacaaaaaagtttatgatgctaccgattattatttggtaggtggggagaaaatggctcaatgttttatacaatcgtttgatgcatctccatcgcaaatgttaaagtttggacttccaagactgacccaatactttagaagcaatcttaagttagaacaacaacgattaaaaaagaaatatcatattacaaataaactcgcagtatatgttccgacttatagagaaggtcaagtagcacaacgtactattgataaagaaaactttgaacggcacttgccgaattatacgttattgagtcatttgcatccttcgactgttgattgtcaaacttctcattcaatcgacgttacttcattgttaattatggcggatattattataagtgattatagctcattacctattgaagcaagcgcacttaataaaccgacacttatttataattatgatgaacagcaatatgaaaaagtaagaggattgaatgaattttattatgctattccagaacgatacaaaatgagtaatgaagagtcaattatacaagcgatacaggataacgatgagcaatttcaatctttatttaatgattggcatcaatataactcaaaagatagtcttaaccagttagttcattttattaataagttggtgaaataa

SEQ ID NO: 6569 - DNA, 1065 bp, Staphylococcus epidermidis; identical to SEQ ID NO: 3886

SEQ ID NO: 6570 - DNA, 399 bp, Staphylococcus epidermidis; identical to SEQ ID NO: 3885

SEQ ID NO: 6571 - DNA, 1728 bp, Staphylococcus epidermidis
atgaaagaacaaaaccctttgtttttcttatttaaaagactctcatggccatatgggttaatcattgcagcggttatcattacttcgttgggaagtttaagtggtttattagtaccattattcactgggcgtttagttgataaattttcggtcagtagtattaattggggaatgatagctatatttggctcgattttcttagttaatgcattgcttagcggtataggcctatatttgttaagtaaaattggtgaaaagattatttatgcgattcgttcattattgtgggaacatattattcaattaaaaatgccgttctttgataaaaatgaaagtggccaattaatgagtcgtctaacagatgatacaaaagtgattaatgaatttatttcacaaaagctacctaatttattgccttctgttttaactttaataggttcattagtcatgctatttatcatggattggaaattaactttattaacatttattactattcctgtatttattttaatcatcgttcctttgggacgtgtgatgcaaaaaatatctaccaatacgcaatctgaaattgcgaacttcagtggattattaggtagagtgcttaccgaaatgcgtttagttaaagtatctaatactgagcgtttagagttagataatgcgcatacaaatcttaaaaaaatatatagattaggattaaaacaggctaaaatatcagcagtcgtacagcccatttctggtgttgttatgctattaactattgcgattattttaggttttggtgcattagaaataggtactggagcaattactcctggaacacttatagctatgatattttatgtaatccagttatctatgccactgattaacttatcgacactagttacggattataaaaaagctgtgggtgcgagcagtcgtatatatgaaattatgcaagagcctattgaacctactgaagctttgtcagaatctaaagacgttacaatcatcgacggcgaattagtatttgagcacgtggattttaaatatgacgttaaaaagattttggaagatgtgtcatttagtattccacaaggtgaagtgagcgcgtttgtaggaccttctggttcaggtaaaagtacgatttttaatttaattgagcgcatgtatgatattgaacgtggagatattaaatacggtaatcaaagtatttttgatattccactttcaaagtggcgcacaaaaattggttatgttatgcaatctaattcgatgatgagtggaacgataagagataatattttatatggtattaatagaaaagttgatgatgaagagttaatagagtatgctaagctagctaattgtcatgattttattatgcagtttgacgaaggttacgacacgatggttggtgagcgtggactcaaattatcaggtggtcaacgacaaaggatagatatcgctagaagttttgttaaaaatcctgatattttgttattagacgaggcgacagcgaacctagatagcgaaagtgaattgaaaattcaagaagcacttgaaacacttatggaaggcagaactactgtagtcattgctcatcgactttcgactataaaaaaagctggtcaaattgtctttattgataaaggtgaagttaccggtaagggaacacatcatgaattgatggcaagtcatgataaatacagacattttgttacatctcaaaaattatcagattaa

SEQ ID NO: 6572 - DNA, 408 bp, Staphylococcus epidermidis
atgatttttggaagtatattaaagtacataagaatgtcaaataatggtacaactaataaaatagggaagagcgcgcttaccgccatgtccatcattttattagacgtgaagcttttaaatgcaaatccggtaccctcatgtgcggattctataacccatgctataccgttagctgctcctttaacccctgctcttccccatggaaaatatataaagaaccaagctaaaaacaaattcaaaataaccaaaataaaaatagatttccattgtatattcttcctatttctagagaaaataactcctatacctaggaaaataaataatccaatgatattaactaataaaaacatttggcacctacctatatgtatttttatactttcatgcattgattatgcaatcctgtaa

SEQ ID NO: 6573 - DNA, 909 bp, Staphylococcus epidermidis
atgtactttaatatacttccaaaaatcattggcggtattggttgggtacttgctaaagttacacgccaacctaagtttgaatcattttttggtgttgaaatgatgttcttaggtaatactgaagctcttgcagtttctagtgaacaacttaaacgaatgaatgagatgcgggtactaactattgcgatgatgtctatgagttcagtttcaggagcaattgtgggcgcttatgtgcaaatgatacctggagaacttgtattgacggcaattccacttaatattattaacgcaattatagtttcttgtattttgaatcctgtatcagttgaagaacaagaagatgtcgtgtatagcattaaagatcaccaaactgaaagacaaccatttttctcatttcttggagattcagttttagcagctggaaagcttgtattaattatcattgcatttgtcattagctttgtagctttggctgacttaattgatagattgattcatttaatcacacatcttattgcaaatggtattggtgtcaaaggtagctttggtcttgatcaaatcttaggcgttttcatgtatccatttgctttactattaggtttaccgtttaatgaagcgtgggaagtagcgcaacaaatggcgaagaaaattgtaacaaacgaatttgttgtgatgggggaaatttctaatcaagtcaatgcgatgacgcctcatcatagagcagttatatcaacatttttagtttcttttgcaaacttttcaactattggaatgattataggtacattgaaaggtattgttgataagaaaacgtcggatttcgtttccaaatatgtaccgatgatgttgttagcaggaattttagtatccttacttactgctgcatttgttggattatttgcttggtaa

SEQ ID NO: 6574 - DNA, 834 bp, Staphylococcus epidermidis
gtgaataaaactatcagagatatcattttagttatgataggttcatttattttctctgcaggtatcaatgcatttgttatttcagggaatttgggtgagggtggtgtcactggtatagccatcgtattatattatgcttttcatatttcaccgggaataaccaatttcgttttaaatgctattttaattattgtgggttataaatatttgagtaaacgtagtacatatttaacaatttttgctacagtactcatttcaatctttctaggtttaactgaaacatggcatgtagaaactgggaatgttgtgattaatgctgtgttcggtgggacttgtgttggtttaggaattggtattatcgttttagcagggggaacaaccgctggaacggttattcttgcgagaattgttaataaatatttagatattagtacgccatacgctttgttattctttgaccttatcgttgtgcttatttcattgacagaaattcctttagtgaagtgcttagttacagttatgtctttatatataggtacaaaagtgatggaatttgttatagaaggattaaatactaaaaaggcaatgactattatatctagtcgccctaatgaggtagcaaaagctattgatcagcaagttggaagaggattaacaatattaaatggacacggttattacactagagaagaaaaagatgtactttacgtagtcatctctaaaacacaagtttcccgtgctaaacgaatcatcaaaaatattgacgaaaatgcctttttagttattcatgacgttcgtgatgtatatggtaatggttttttgttagatgagtaa

SEQ ID NO: 6575 - DNA, 798 bp, Staphylococcus epidermidis
atgagtcgtttaagtggtgaacaagtgaaaattggctacggtgattctacgattattaataatttggatgtcgcaattcctgatggaaaggttacttctattattggacctaacgggtgtgggaaatcaactttattgaaagcgttatctagactattgtcaattaaagaaggtaaaattaatttggatggtaagagtattcatgccacatccacgaaagaaatagctaaaaaaatagcaattttaccacaatcaccagaggtcccagatggacttactgtaggagaacttgtttcttatgggcgttttccacatcaaaaaggatttgggcgtttaactgcagaagataaaaaagaaattgattgggcattgtcagttacaggtacaagtgaatttcgtcatcgtactataaatgatttaagtggtggacaaagacaacgcgtgtggattgcaatggcactagcccaacgtactgatattattttcttagatgaacctacaacttatttagatatttgtcatcaattagaaatattaaatttagtcaaaaagctcaacgaagaagaaggttgtactattgtgatggttttacatgacattaatcaagcaattcgcttctcagatcatctcattacgatgaaagctggagatattgttgctactggtcaaactgatgaagtgttaactaaggacattttagaaaaggtatttaatattgatggtgttttagatatagatccgagaacagggaaaccaattttagttacttacgatttattctgtcagacctattcgtga

SEQ ID NO: 6576 - DNA, 501 bp, Staphylococcus epidermidis; identical to SEQ ID NO: 3879

SEQ ID NO: 6577 - DNA, 1068 bp, Staphylococcus epidermidis
atggggctgaataaagaagctataaaaattggttttgcctatgtcggcattgttgtcggcgcaggattttcaacaggacaagaagtgatgcaatttttcacaccatttggtttatggtcatatattggagtgattatctcaggatttatacttggattcataggaagacaagtagctaagataggtactgcatttgaagcgaaaaatcacgagtctacattgcaatatgtgtttggaaaaaaatttagtaaagtttttgattatattcttgtctttttcttatttggtatagctgtcactatgatagccggatcaggttctacttttgagcaaagttttggaattcctacttggttaggcgcattaatcatgacagttttgatttacttaacattattattagattttaataaaattgtaagagctttaggactagttacaccatttttaatcataatggttattcttattgctgtgttttacctatttacaggtagtatttcattaggggaagtaaacagtgctatgcctgaaacgagtgcttggaaaggtatcttttggggattagtatacggcggattagcctttgctgtaggatttagtacgatagtagctatcggcggtgatgcgtctaagcgaagagtttcaggtgcaggagcaatgtttggtggtgtgctatacgctatcctacttgcgttaattaacttctcgcttcaaacagaatattcaaaaattaaagatgtggcaatacctacgcttaacctagcgaaaggtatacatccatggttaggtcttgtactcacagtcattatgttagctgtgatgtacaacacgattttaggtctttgttattcttttgcagcgcgtttcacagaaccttatagtaaaaaataccatatattcattattatcatgatggtgatggcatttattttaagtttcgtaggattcgctgatttaatcaatgtcttatacaaatttatgggtattgtcggattatttattgtagtagcagtattgattaaatattataaacgtaaaaaagatgatgaagagcatatcgcgtaa

SEQ ID NO: 6578 - DNA, 1068 bp, Staphylococcus epidermidis; identical to SEQ ID NO: 3877

SEQ ID NO: 6579 - DNA, 507 bp, Staphylococcus epidermidis; identical to SEQ ID NO: 3876

SEQ ID NO: 6580 - DNA, 924 bp, Staphylococcus epidermidis
atgaagcctaaagtattgttagcaggtggcaccggctatattggtagatatttaagtcgagtcattgaacatgatgctcaattatttgctttatctaaatatcccaaacctgacaaaggatctacgaacaaaatcacatggttaaaacgcgatatatataatcataaagatgtagttgaagctatgaaaggtatagacattgcggtatattatttagatccaactaaacattctgctaaattaacacatgcaacagcacgagatttaaactttatagcggcagataactttggtagagttgcatcaataaataagctgaaaaagattgtgtatattccggggagccgtcatgataatgaagctattgaacgtttaggcgcttatggcgtaccagttgattgtacggatgttgaagtgaaacgtcctcatattaacgtagaattacaaacagctaaatatgatgatgttcgaacagcgatgaagatgattttaccaaagaaatggacgctcaatcaacttgtagactattttagtaggtggttagatgagacaaaaggaacttttgtacatactcaaaaacaagatcatcactacatcatttacaataggaacattaaaagacctttagctattttcaaaatggttaatacaacagaagatataattacattacatcttgttgatggtaaattgatgaaacctaaatcaaagaagcaagcaaaattagaatttagacttcttaaaggaacacgtttaattatggttcatttatacgattatatccctagattattttggccaatttactatttcatacaagcaccgattcaaggacttcttatgagaggttttgaaattgattgtagaattaagcattatcaaggtcgcattcaatcaggtgagaagattaaatatactaaataa

SEQ ID NO: 6581 - DNA, 675 bp, Staphylococcus epidermidis; identical to SEQ ID NO: 3874

SEQ ID NO: 6582 - DNA, 903 bp, Staphylococcus epidermidis
gtgatattaaacgtaggattgagtatacttttcttattatttacgtttgttaaagaagtccgtctatctaaacatttttatgaagataaagaaattgaagaaattaagcataaagatttggcagaaaccccatttcaacaacaagtcatagattatctgtatcgtcatatagccgctcaaaaagagaaagtagtcgaacaacaattacaaattaaaaatcatgaacaaacaattacagagtttgttcatgatataaaaacacctgttacggctatgaaattattgatagatcaagagaatgatgatcagcgtaagcgagcgttattatttgaatggtctcgtattaatgagatgttagataagcaattatatttaacaaggcttgaaacacaacatcgtgatatgtattttgattatatttcattaaagagaatggttatagatgaaatacaagttactcgacatatcagtcaggcaaaagggataggttttgaattagattttaaagacgaacaaaaggtttatacagatgttaaatggtgccgtatgatgattaggcaagttctatctaactctttgaaatatagtgataattctacaataaatttaagtggttataacatagaaggacacgttgttttaaaaattaaagactacggtcgtggaattagtaaaagagatttaccacgtatatttgatagaggatttacttctacaacagaccgcaacgatactgcgtcttctggtatgggattataccttgtacaaagcgtgaaagaacaacttgggattgaagttaaagttgattcaatagtggggaaaggaacaacgttttatttcattttcccacaacaaaatgaaatcattgagcgcatgtctaaagtgacaagattgtcattttaa

SEQ ID NO: 6583 - DNA, 762 bp, Staphylococcus epidermidis; identical to SEQ ID NO: 3872

SEQ ID NO: 6584 - DNA, 141 bp, Staphylococcus epidermidis
atgaaatcattgaatggaaaggaatggaatcatcatggaatggaaacgaatggaatcactgaatggactcgaatgggatcatcatcaaatggaatcgaatggaatcatctaatgaacttgaaaggaatcatcatcaaatga

SEQ ID NO: 6585 - DNA, 990 bp, Staphylococcus epidermidis
atgactgaacagaaggatattaaagaaacagagtatcgacgacagaaaggaacaacttcgacaccttctaggcgaagaaataaaaaaagaatgcggaagttaccttttatcattttagtcatccttattattttaatttctatcattgtgtatattacccatcagtataacagtggtatgaagtatgctaaagaacatgctaaggatgttaaggtgcataaatttaatgggaatatgaaaaatgatgggaagatttcagttcttgtccttggcgcggataaggctcaaggtggtaaatcacgtactgactcgattatgattgttcaatatgattacgtacataaaaaaatgaaaatgatgtctgtcatgagagatatttatgctgatattcctggttatgataaatataaaattaatgccgcatattcacttggaggcccggaattgttaagaaaaacacttaacaaaaatttaggtgttaatcctgagtattacgctgtagtagattttactggatttgaaaaaatgatagatgaactacagcctaatggtgtcccaattgatgtggaaaaagacatgtctgaaaatataggtgtgtctttgaaaaaaggacatcataagttaaatggtaaagaattacttggttatgctagattccgtcatgatccggaaggcgattttggtcgtgtgagaagacaacaacaagtgatgcaaacattaaaacaagagttagttaatttcaatacagttgcgaaactaccaaaagttgctggtattttaagaggttatgttaatacaaatatgcctaactctgcgatttttcaaacaggtataagttttggaattcgtggagataaagatgtgcaatctttgacagtccctattaaaggaagctatcaagatattaatacaaataatgatggtagtgcgcttcaaatagactctgagaaaaataagcaagcaatcaaaaatttctttgaagataattaa

SEQ ID NO: 6586 - DNA, 516 bp, Staphylococcus epidermidis
atgaatatcaatactgcatactttgctggtggctgtttttggtgtatgactaaaccttttgatacattcgatggtatcgaaaaagtcacgtcgggatatatgggaggacacttagttaatccttcttatgaagaagtaaaaactggatctactgggcattatgaagtggttaaaattgagtatgatgttgctctattttcatatcataaattattagaaattttcttttcagttatcgatcctttggatgatggtggtcaatttcaagatagaggttctcaatataagactgctattttctattcaaatgaacatcaaagacagttagcagaacaatatatatgtgaactccaagatagttttaacgctgataaagcaattgcaacaaaaattttaccggcatcaactttttatgaagcggaagcgtaccatcaagatttctacaaaaagaaccctgaacgttatgaacaagaacaacaagatcgtgctagttatgtcaaaaataatcatatataa

SEQ ID NO: 6587 - DNA, 2523 bp, Staphylococcus epidermidis
atgacacaagaattaaaaagtaaattactttctttttttaaatttattttcgccactgctttatttatctttgtaatttttacactctatagagaattatcacatatcaattttaaagagacattcatacagttcggcaaaattaatagattatggctcgtactactatttgctggtgggggactgtcactcatcttattatcactgtacgatattattttagtaaaggcccttaaacttaaaatgccgttgattagagtctttagagtgagttatattatcaacgcccttaattctataattggttttggagggtttataggtgcaggcgtaagagcttttgtgtataaaaattatactaatgacacgaaaaagcttgtacaatatatttctatcattttagtatctatgcttacgggattaagtttattatccatcttagttgtcctgcgtatatttaatgcttctcacatgattgatgaaatttcgtgggtacgttggattttatatattgttgcattatttttaccaatttttattttttataccgtcgcacgacctgtagatagaaataatcgttatatgggtgtgtattgtacagttgtatcatgtgttgagtggatggcagcagctactgtattatattttgctgcattgattgtcgatatacatatctcatttatgacttttgtaggtatatttgttattgcagctttatctggtttagttagttttattccaggtggttttggcgcgtttgatttagtcgtgttactaggactgaaatcacttggtatttctgaagaaaagatacttctagcattagttttatatcgatttgcttattattttgtgccagtgatgattgcacttatactatcttcatttgaatttggaaatactgctaaaaaatatctcgacaattcgaagtactttatacctgtaaaagacttcacttcatttttgaggtcttatcagaaagatattttagctaaagtgccttcattttcgttagcgattttaatatttttaactagtattattttctttattaacaatttaactattgtctatgatggattgtatgatggaaatcattttgcctattatattgctttagctgtacaaacgagtgcttgtttgttacttattttaaatgtaagaggtatttataaaggcagtcgtcgtgcaataatttatgcctttatttctattattttaattgctagtgcgactatatatacttatgcgtcatttttattattgtcatggctcattatcatatttgtgttactgattttagcttatcaacgtgcgcaagtacttaaacgaccattacgctttaaaaagttggcgtttatgctacttcttagtatctttattctttatttaaatcatattttaatatcaggaactttatatgcattagatgtttatcatattgagattgatacgtctttattacgatattacttttggatgaccattgttattattatgctactcgttggcgttattgcttggctttttgactataagtataaacgccctcatcatagcattgatttaacactttgcgatgcaattattcaaaaatacggtggtaattatttaagtcaccttgtttatagtggtgacaaagattgtttctttaatgaaaataaagattcttttattatgtatcgatataagtccaatgcccttgtcgttttgggtgatccaattggcaatactaaatcattcgagtcattattagaagcattttatcagtttgcagagtatcaaggttatgagattattttttatcaaataagtgatcaatatatgcctttatatcataattttgggaatcaattcttcaaattaggtgaagaagctattattgatttaacaacgtttacaacatctggtaaaaagcgacgtggtttcagagcgacgctcaataaatttgatgatttaaatatcaattttgaaattattgaaccaccatttactcaagatttctttgatgaacttaaatttgtgagtgataaatggttggatggaagaagtgaaatgcatttttctgtaggtcaatttactcaaacttatttatcgaaagcacctattggagtaatgagagatcattctggcaagatgattgcattttgtagtttgatgcctacttattctaataatgcaatatctgttgatttaattagatggttgcctgaattggatttacctttaatggatggattatatcttcatatgttgttatggagtaaagaaaaggggtataaagcatttaatatgggaatggcgacactctcgaatgtaggtcaattgcattattcttatttaagagagagaatggcaggacgtgtatttgaacatttcaatggtttataccgttttcaaggattaagacgttataaagaaaaatatagccccaattgggaacctagatttttagtttatcaaaagcattattctctgtgggagagtatgcttaaagtgatgagagtcatacgccataaataa

SEQ ID NO: 6588 - DNA, 1218 bp, Staphylococcus epidermidis
atgaaaaatgaaaaagaaataaatggaaaaaaaagccatttttttagtttgtcagagtctagatttatgaggtttttaggcggaaatgaccttatttatgctttaattgcattggttcttttaggtattgtcatttttatctttgataaaatttcatatgtctttcaaccatttattattgtatttaatacaatagcagcacctattattgtttcattagtgctattttatttattcaatcctattgtaaatatgatggagagatatcgtattccaagactattaggtataacaattatttatgttgcaattgttggtattattacattaatagttaatttacttattccaattattggatcacagatagaaagttttatcaaaaatacacctaattatttacataaaattacgcgttcacttgataaacttaataataataccattttatctggttacatgggacaagtgaacgaatggttagaatctgctcagaaaaagataccatctatggtttcagattactcagacggatttggatctaaactcgcaacttttgctgaggcagtcgcaaatatcggtattgttattgggactacaccttttgtgttgttctttatgttaaaagatggtcataaatttaaagattatactacaaaaattatgccacctaaatttagaaaagattttcatgacttgttagaaaagatgagtgtacaagttggttcatacattcaaggtcaaattattgtgtcattttgtattggattattactatttattggctattcaattattggtcttaagtatgccttagttttagcaagtattgctgcagtaactagtgtggttccttatttaggaccgacaatagcaatatcacctgcgattgttatcgcgattattacttcacctttaatgttattaaagttagctgttgtatggacgcttgtccaattctttgaaggccactttatctctcctaacgttatggggaaaacattgaaaattcatcctttaacaattattttcattttattatgtgcaggaaatttaatgggcattgttggtgtgattattggtattcctctatacgctgtacttaaggtattggtttcacacatatttatgttatttaaacgaagatacaatcgctactatggaaatgatgctggtgagtacactatcactgaagaagaaaaaggaattaaacaataa

SEQ ID NO: 6589 - DNA, 960 bp, Staphylococcus epidermidis
atgtcattgattcaatctctatataacagtaaaaaatttcaaaatagattccttttcaatttaggtattaagcattataattttaataatgatattagaaaggtgattatgatgagcaagtatgtaataacgaaaacactcaataataatgtcatcatatgcacaaaaaatcatcaagaggttgttttaattggtaaaggtattggttttaataaaaaggttggtatgacagttcaagagaatgcttcaatagaaaaaatttataaattagaacaacaagagcaacaagaacactacaaaacacttttggagctcggagaagatcatgttgttcaagcggtgatagaatcagttaatattatcaatgaatctggtctaattacagatgataaaaatttggttgttgcacttacagatcacatcatttatgcctataaaagacttaagcaacatcaaatgattacaaatccatttgtgattgaaacaaaacatctttatagtaatgcatacaatgttgctcgaaaggtaatcgataaattaaataaaaccttagacgtacattttccagaagatgaaattggattcatcgcattacatattgcatccaactctgaaaaattatcaattcacgatatttcagtaataaacaagttaatcaataagagtattacaattattgaaactgatttacaacattcaattgataaacaaacaatacaatatcagcgttttataagacacatacaatttttaatatatcgattaactaaaggtgagtatttagaagcacaggagaattttatatcgatgataaaaactatgtatcctcgtagttttaatacggcttataaaatattaaaaatgattcaacgtgagtttagtgtgtatgtatacgaagcggaaatagtttatttaacattacatatcaatcattttgaagttcaaattagtagtgaataa

SEQ ID NO: 6590 - DNA, 849 bp, Staphylococcus epidermidis; identical to SEQ ID NO: 2805

SEQ ID NO: 6591 - DNA, 1059 bp, Staphylococcus epidermidis; identical to SEQ ID NO: 2804

SEQ ID NO: 6592 - DNA, 1458 bp, Staphylococcus epidermidis
atgaagtgtttgttcaaaatgctatcaatcataataataatgttaagtactttcaccttattcatcagtccgagtacatatgcaaatgaagatgaaaattggactaaaataaaaaatcgaggagaactaagagttggattgtcagctgattatgcacctttagaatttgaaaagacgatacatggtaaaactgaatatgcgggtgtagatatagaattagctaaaaagattgcgaaagataatcatctaaagctaaaaattgtaaacatgcaatttgatagcttattaggtgcacttaagaccggtaaaatcgatattattatctccggtatgacaacaactcccgaacgaaaaaaagaagtggattttacaaaaccttacatgattacaaataatgtgatgatgattaaaaaagatgatgcaaaacgttatcaaaacatcaaagattttgaaggcaaaaaaattgctgcgcaaaaagggacagatcaagaaaaaattgcacaaactgagattgaagatagtaaaatttcttcactcaatagattacctgaagctatattatctttaaaaagtggaaaagtagcaggtgtagttgttgaaaaaccagtaggtgaggcatatttaaaacaaaattcagaactaacattttcaaagattaaatttaatgaagaaaagaaacaaacatgtatagctgttcctaagaactctcctgtacttttagataagctaaatcaaacgattgataatgtaaaagaaaaaaatttaattgatcaatacatgacaaaagcagccgaagatatgcaagatgatggaaattttatttctaaatatggcagttttttcattaaaggaattaaaaatactattttgatttcattagtaggtgtggtattggggtctattttaggctcttttatagctttattaaaaataagtaaaattagaccattacaatggatagcaagtatatacatagaatttttaagaggtactcctatgcttgtgcaagtgtttattgtattttttgggactactgcagctttggggttagatatttcagctttaatttgtggtactattgcgcttgttataaattcttcagcctacattgccgagattattagagctggtattaatgctgtagataaaggacaaactgaagctgctagaagtttaggattgaattatagacagactatgcaatcagtagttatgccacaggcaattaagaaaattttacctgcattaggtaatgaatttgtaaccttgattaaagaatcgtctatagtttccacaattggagtgagtgaaatcatgtttaatgcacaagttgtacaagggatatcttttgatcctttcacaccattgttagttgcagcattactatatttcttacttacatttgcacttacacgtgttatgaattttattgaagggagaatgagtgccagtgattaa

SEQ ID NO: 6593 - DNA, 729 bp, Staphylococcus epidermidis
gtgccagtgattaatattaaaaatttaaataaaaaatttggagcaaatgaagtattgagagatattaatcttactgttgaaaagggtgaagtggttgcaataattggaccatctggaagtggtaaaagcactttactccgttgtatgaatttgttagatgtaccttcaaaaggtaaagttatatttgaagataatgaattaactcaacataatgttcatttagataatttacgacaaaaaatgggtatggtatttcaaaattttaatttatttcctcataaaaaggtcattgaaaatgtaatgttggcaccacttttattacataaagatagtaaagatcaattaaaagagaaagctttatatttacttgaaaaagtggggcttaaagacaaagcagattcatatcctaatcaactgtctggaggtcaaaaacaaagagttgctattgcaagagctttggcaatggaacctgatgttatgttatttgatgaaccaacatctgcacttgatcctgaagtagtaggggatgttttaaaagtaatgagacaattagcgaatgaaggtatgacaatggtgattgtcacgcatgagatgaactttgctaaagaaataagtgataaagtagtatttatggccgatggtgttgtggttgaatctggtacaccacaaaacatatttgaaaatcctcagcacagtcgaactgaaaattttttatcacgagtgttataa

SEQ ID NO: 6594 - DNA, 1002 bp, Staphylococcus epidermidis
gtggaagaattcacaaaaagttataaagcccttgttaaagaaagtttaataactaacaataaaacattattaattaagaaatgtgaagcattcacaaatgaagttataaagaaagatgttttacctgaagatatagttgagatacataaagattatattaatacattagatttaactgaagaagatattttagaaacgctcgatgtgttacaagaagtcgttaaaggatttggatatagttaccgagattaccaaagacttgttaataagcttcaagtccacgataaagaaatggatttagcctcaagacttcaacaaactatgctgaaagctgatattccacaatttgatagtattcaaataggagtgatatctgttgctgcacaaaaagtaagtggtgattattttaatcttattgatcataaagatggcacaatgagttttgctgtggcagacgttataggttcaggtattccagcagctttagctatgagtatgataaaatttggcatggatgcttatggacattcacaactacctagtgatggtttgaagcgtttgaaccgtgttgttgaaaagaacgttaaccaaaatatgtttgtcacaatgttttatggactgtatgaagagatgaatcatcttctttactgtagctcagctgggcatgaacctggctatatatatcgcgcagaaactgaagcgtttgaggaaattggtgtgcgaggaagagttctaggtgtgagtcccaaaacacgttatagccaacaggaaatccctatttaccttgatgatttaatcataatttttactgatggtgttacagaggcacgagatgtagagggtaattttattgataaagataagttgttagacttaattcaaaaatataagcatatgcatccacaggatatagttcaaattatttacgaagcgattttaaaattacaaaatcctgcgagaaaagatgatatgactattttaattataaaaagagtaaactaa

SEQ ID NO: 6595 - DNA, 327 bp, Staphylococcus epidermidis
atgaatctaaatattgaaacaataactcatgatgatttttatgaggttaaagttggtggagaattggacgtatatactgtacctgaattagaagaggtactagtaccaatgagacaagaaggtacacatgatgttcacgttaacttagctaatgtgagctatatggattcaacaggcctcggtttattcgtaggcacgctaaaagcattaaatcaaaatgataaaaatctctatatcttaggtgtttcagagcggataggtagattgtttgatattacaggtttaaaagatttaatgcatgttaatgaaggaacggaggtagaataa

SEQ ID NO: 6596 - DNA, 480 bp, Staphylococcus epidermidis
atgcaatctacacaagattatattgaaatgcggttgccagcttctgcagaatacgtaagtttaatacgtttgacgctttcaggggtattttcaagagctggcgcatcttacgatgatatagaggattctaaaatagcagtgagtgaagcggtgacaaatgcggttaaacatgcatataaaaaaaattctgaaataggcatgattaatctttgttttgaaatatttgatgatagaattaaaatcgttatttcagaccaaggtgaaagttttgattatgaagccacaaaaacacatttaggtccatataatgataatgaaaatattgattttctacgtgaaggtggtctaggattatttttaattgagtctttaatggatgaagttactgtttataaagaatctggtgtaacaatcagtatgattaagtatataaaaaaagagcaggtgcgaaataatggcgaaagagtcgaaatcagctag

SEQ ID NO: 6597 - DNA, 771 bp, Staphylococcus epidermidis
atggcgaaagagtcgaaatcagctagtgaagtatcacctgaacaaattaaccaatggattaaacaacatcaagaaaacgaagatagccaagctcaagataaattagtaaaacattatcgtaagctgattgaatctttagcttataggtactctaagggacaatcacatcatgaagatttagttcaagttggtatggttggtctaataggtgctattaatagatttgatttatcatttgatcgtaagtttgaagccttcttagtaccaacagttattggtgagattaaaagatatttacgagataaaacatggagtgttcatgtacctagacgtattaaagaaattggtccaagaatcaaaaaagttagtgatgaattaacaaatgaacttgaacgttcaccatctattagtgaaatcgcacaacgcttagaagtttcagatgaagaagttttggaagcgatggagatggggcagagttacaatgccctgagtgtggatcactctatagaagcagataaagatggttcgacagttacattattagatattatgggacaacaagatgataattatgatttaacggaaaaacgtatgatattagagcgtattttacctattttgtcagagagagaaagacaaatcatacaatgtacttttattgaaggtcttagccaaaaagagactggtgaaagaattggtcttagtcaaatgcatgtttcacgtttgcaacgtaccgcaataaaaaaattacaagaagctgcaagacagtaa

SEQ ID NO: 6598 - DNA, 2151 bp, Staphylococcus epidermidis
atggataacagtttaattgaaacaattgtaagtaaatatcaattttcggaaaaacaaattaaagcagttttaaaattgatgaaagaaaacaatacggttccatttatagcaagatatcgtaaagaagctacaggtggacttgatgaagtagaaattaaacaaatcaatgatgaatataactatatgttaaatcttcaaaaacgtaaagaagaagtaatacataatattgatcaacagggtctattaacttctgatttaaagcaagacatattaacacagacgaagctacaaagagttgaagatttatatcgtccatataaacaaaaaaagaaaacacgtgcaactgaggctaaaagaaaaggattagaagatttagcagattggttttcacaatcaaaattggatacaaaaattgaagataaagcccaattattcttaaatgatgaagtgactgcaattgaagatgcgatagaaggggctaaagatattatagctgaacgtatttcggataatcctcaatatcgctctaaaatacttaaagatgtttttaatcagggactaattgtttcctcgaaaaagaaaaaagccgaagatgagaaacaaacattttctatgtactatgattacaaggaaccaattaaacgtattgctaatcatcgtgttttggcgatgaatcgaggagaaaaagaaaaagtattatcaataaaaattgattttgacacgacacgtattcaaagagaaatagcaaatgttgagataaaaactcaaaatgaagcaactccgtttattaaagaggctattcaggatagtcttaagcgattaattcttccttcaatagaaagagaaattagaggagatttaacacaaaatgcagaatctcatgcaatagatgtgttcagtgaaaatcttagaaatttattactacaaccaccaatgaaaggtaaacaaattcttggagtagatccagcatttagaacagggtgcaaacttgctgtcgtcaatccatttggtacctttattgctaaaggtgttatttatcctcatcctccaatatcaaaggttgaggcagccgaaaaagagctggtaaagatgataagtgactataatattgagcttttagcgattggtaacggtactgcgagtagagaaactgaacaatttgttgctcaagtaataaaaaaatatcaacttcaagctcaatttatcatagtcaatgaagctggcgcatcagtttattcagcatcagaaattgctagacaagaatttccagattttcaagtagaagaacgaagtgcagtttcaattggtagaagagttcaggatcctttaagcgaacttgttaaaatagatcctaaatctataggagtaggacagtaccaacatgatgtcaaccaaaaagatttaagtagtgccttaacgtttgtagtagagactgccgtcaatcaagttggtgtggatgtgaatactgcttctaaatccttgttacaatatgtatcaggtcttacatcaactatcgctcaaaatattattgattatagagaagaaaacggacctataaaacatcataaagaaataagtagaattaaacgattaggtgcaaaaacatttgagcaaagtattggttttttaagaattgttgatggtgaagaacctttagataatactgcaatacaccctgaaagttacgatgttgcatatcgcatgcttcatcaattagatttaactacacaagatataggttccgttaaactcaaaaacacgttatcaaatgttaatatttcaacacttgtatctcaattaaatattggtgaacctacattaaaagatataatacaatcattgattgcacctaatagagatccaagagatgaatttgaaacacctattttgaagtccgatgtattatcgattgaagatttatctaaaggcatgaagttgaatggtacagtaagaaatgttgttgactttggagcatttgtagatatcggtgttaaacaagacggactagtacacatatcaaaattatctaagaaattcgttaaaaatccaatggatatgataagtgtaggagatattgtagaagtttggattttagatatagatgaaaataaaggcaaagtttcattgactatggttgacccaaatgaataa

SEQ ID NO: 6599 - DNA, 294 bp, Staphylococcus epidermidis
atgtttggagaaaaagcagtcattgatatcataaaacatgaactgtgtcattattttcttcatttagctggtgaaggatatcaacatcgtgataaagcattcaagagtttgagcgccaaagtaggagcacctaggttttgtactccgacagaatcttatcaagatagagctaattataaatataggtgcatctattgtgaacaagaatttattcgtataaagcgtgtgaatcttgaaaaaatgcgttgtggacgatgtggaggtattttaaaacttcttcaaacaagaaagtga

SEQ ID NO: 6600 - DNA, 177 bp, Staphylococcus epidermidis
atggaaccattgtatcaatacttaacacaaaaaagtaaaaatggtttgggcgattttgtagtagaatggaactttcagaaattcctgataaacgaagaaggaaaattggcaaaagtcataagcccaaaagtttcgccaaccgacaacgaaattaccaattggattgaaggaaaataa

SEQ ID NO: 6601 - DNA, 1491 bp, Staphylococcus epidermidis
atggtgaaagaagtagttctaggaattgatttaggcacaagcgcaataaaaattattgctgttgatcaactaggaaatgtcattgaatcagtaagcgaaacattaaagttataccaagagcatcctggttatagcgaacaagaccctaatgaatggtttgaggctactaagaaagggataaaagaattaattcaatcaacagaaatgtcagataagatagtaaaggggatttctttttcaggtcaaatgcatgggttggtcatagttgatgataatggcattcctttgagaaaagcgattttatggaatgatactagaaattcaatacaatgtagacaaattgaagatatatatggtgaaagattgaattacaatccgatattagaaggatttacacttcctaaaatgttatgggtacaacaacatgaacctgaaatttggagtcgagttgatgtttttatgttgcctaaagattatttacgttattgcttaacgcagacaattcatatggaatatagtgatgcatgtagtacattattattcaatcctgagaattatgaatggacaagagatgttggagatacatttaacattggtgatatctatccacccttagtaaaatcacattcgtatgttggaaatgtaacttcatcactggctaaagaattaggattatctagtgatgttgctgtatatgctgggggtggtgataatgcatgtggtgcaattggtgctggtgtcatccatgataaaagtgcattatgtagcataggtacttcaggtgttgtattaaatgttgaataccaacgagtgacctcatatgatagtaatttacacttattcaatcatagtgttccagatacttattacgcaatgggagtaacgttggcagcaggctatagtttaaactggttaaaacaaactttttttgaaaatgaatcttttgaagagattttaaatttagctgcatcttcaaagataggtgccaatggactactatttacaccttacttagctggagaacgtacgccacatggtgatgctcaaatacgtggaagttttataggtatcagtgggcaacatactaaagctgactttgcgagagcagtaatcgaaggcataacgtattctttatatgattctataaagattatgagacgagctggtcatgaaatgaactctatcacttcaatcggtggtggtgctaagagtagattttggttacaacttcaagctgatatttttaatgtgcaaataaaaagattgaagcatgaagaaggcccaagcatgggagcggcaattttagcggcatacggtctaggatggtttaaaacaattgagtcttgtgtagaggcatttattaaagtagacgaggtgtttgagccgaataatgaaaatcatgacctttatgaacaatactattcagtttatgaagctatatataaacaaacgaaacagcttactgctgatttgttaacgataacgaattaa

SEQ ID NO: 6602 - DNA, 786 bp, Staphylococcus epidermidis
atgtttatttcaaaacaagaattatatgaaaagttacaatatgttacgccaagaacgtttgcctacttgaatgaaatagattattataacttattaatgataattgaagagcatcaaatatctattccaccgattcatcaacttcgaaaaacattgcgaggaagtaaaattatgaagcctaagaatcgcgtagacaattgttatattcatttaaaggatgaaattccgacccctattaacaatgaacaattaagtttcctgcatttttatccacgtcagcaaatacatttaattttgagtgcttattctagaatgaaaagtctaaagttacaatctcaaaaacattgtttaaagctcaaattccccttagatcagcattctattcgtaaagaaattacaccacctaaaagctctgataaagacaatgatattttaatttgtctattacaaaaattaatcaacgaaattaccaaatgtcaagttcctgtttctctaaagaataattctttcgaaataaaactaccaaactatatcataaaggttgatttaaactatcacgaacagcaagaccatttatatccattacaatatagcatccacgcatggcatagagatttccaatatctcgaaatctcaaataccttcacaataccgtctttgaatgatcttattttccatatacaaaagctttttttacttatatttcaattacctgaacatctcgcgagacaagaatattcattgagtcaatattatttttactcgcaatgccatacaaaaaattaa

SEQ ID NO: 6603 - DNA, 1044 bp, Staphylococcus epidermidis
atggatattattttaggagtagggactttagtactcgttcttattatcatgacgcttttcttaaattttgcgccatatggtaaacaaggtttacaagctttatcaggggctgcttgtgccacgtttttaccacaggcgttcttaagttacgcaattggtggcgtattccatgttaaatttttccaagaaattggtgatctagcagggagtttaagtggtatagctgttggtatattaacttgtctaaagttagaagtgtctccagtatttgcagtcattgtaggtttagtattacatgactcaaaattattacctgcgtttatcgcagcgtatgttgttgcatttggaatcaagtttgttgagaaaaaagttccagagggactagatttaattgttgttattttattggctccagcagttacatttggtcttgcaaacttaatttctccaggggttattgcagtacttaaacaaattggtagtgcaatcacttcagtaggtgataacaacccatatgcattagcagtcattttaggacttgttattcctgtaactggtatgacgccattaagctcaatggtgcttacaagcttattaggtttaactggtattccaatggcaattggtgcattaacatgtacaggagcatcttttgttaatggaatcttatttagcaaattaaaaattggtaataaaggtaatgccttcgcggtatttgtagaaccgttaactcaaattgacttaattgccaaatatccactacaactgtttggtgcgaatgccattattggtgttgtaaatgcttgtattgtcacatacagtggactaattattgatattaaaggtatggcaacacctatagcaggtgctattgtactttatggctttaacgacgctgtaagatctacaattacaattatcgcagtagcaattgcaagtgtgatattagcgtacgttattagtgctattattaataaatttaacttgatgaatgtcggattcaagttaccacgtagaaaaaaccaagttaaggagagtgtttaa

SEQ ID NO: 6604 - DNA, 684 bp, Staphylococcus epidermidis
atgatggctaaaagctatgattatcaaagtgctttcgatattattggaccagtaatgatgggaccttcaagttctcatacagcaggtgcagtaaaaattggtaattcagcgagagctgtgttaggagatatgcctaagcatatagaaattcgttattatgaatcttttgctaaaacgcatcaagggcatggtacagacgttgctattgtcggtggtgctatgggctacagcactttcgatagtagaattaaatcatccttagacatagcaaaagatgaaaatattacaattgatattattgaagatgaaggagaaagtattggtcaacatcctaactgtgcttatatcaaagcaaatacgaaagacggacgttatatagaagtgataggtatttctattggtggcggtacaatcaaactaaaaggtatcaatgtaaatggtttaaatgtggaactgaatcatgggcttccaatgttagttatagatggaaatatgaataaagctaaaataaatcatcttattaatgatttatcagatatggacttagacttaggtgaagaattaatagaaacaaatgataatgaaggtttagttgtatttcctttaaataaagcaatctcagaatcagcattaaatattattaaagataaacatagtgatttaaacgtttcctatatcaaatag

SEQ ID NO: 6605 - DNA, 900 bp, Staphylococcus epidermidis
atgtttgattcaattagagagacaatagattattcagttgaaaataacatcagttttgctgatatgatgattaatgatgaaatggaaagagaaggtaaatctcgcgaagaagtgcgtgatttaatgagacaaaacttaaatgttatgcgtgaggcagttgaaaaaggtacgactggcgatggtgtggaaagtgtaacaggttatacaggtcatgatgctgctaaacttcgagattacaacgagaataatcatgcattatcaggtcatgaaatgattgatgcagtcaaaggtgcagttgcaacgaacgaagtcaatgcagcaatgggtattatttgtgctactccgacagctggttcctcgggaacgattcccggcgtaatatttaaattagaaaaaactcataatatcactgaagatcaaatgatagattttctattcacatcagctttattcgggcgagtagttgcaaacaacgcgagcgttgccggtgcaactggtggttgtcaagccgaagtgggttcggcatctgcaatggctgcagctgctgcagtatcaatttttaacgggtcaccagaacaatcaggacatgccatggcattggcaattagtaacttattaggcttagtttgcgatccagttgctggtttagttgaaattccatgtgtaatgcgtaatgctattggttcaggaaatgcattaatatctgcagaccttgcactagctggagttgaaagtcaaattccagttgatgaagtcataggtgctatggatagagtaggtcgtaatttacctgcatcattaagagaaacaggtttaggcggtttagcaggtacacctactggcgaagaaattaaacgtaaaatattcggcgaagcagacaacatggttaaaaataaataa

SEQ ID NO: 6606 - DNA, 651 bp, Staphylococcus epidermidis
gtgggcgttttagtatcgggaacagggatagagagtgtacaaacaaatataactcatgcaaaagaaaattacgaatcaactcctcagactgttaaattagttgggacttatgatgcttctcaagttgattccaaaacgatgaaacaatttaaagaaattgaaaaagaagataataatttccacataactaaacatggaaataaaatcgttgtagaagacaaattacctaatccagagaataaaacttcaagttattcagctgatggtagtgctgaaaataatacaaaagtaattaatttctctgattttgttggtaatatggatggaataaccttttatagtggtaaatcatataacggacaacacgatggtcaaaaagtaaaaaaaggtgctcatgtatattgtaatagatttaacggaacaaaatctgatcatagatactggtcaaaaaaacatcctagagcttatgtagatttttataaaagtgactgctggtatcacgccaaagcttataaatgttcttccttgggaaaaataactacatgcgatggtttgaataatatttatagaaaaggtgttaaagattgctcatcatggaaaggtaaacccaaacataaaaactggcctaaaacagcatggtatagaaattaa

SEQ ID NO: 6607 - DNA, 360 bp, Staphylococcus epidermidis
atgaaaaaagtattctatggtattggtataataattattttagtaatttgttatatttttgtaaactttttcttttttgattcatgggcatgtcattcaagtgaaaagcaattaaataattatgttaaacatggagatgttaagaaattaaaaaagattgctaaagataataaaacgtatcaattcttaaaaaaacaaaataaaatttctatagatggaaaatctgataatcaaggaagtggacatacaggttattatcgtattgatatcaatggaaagccagcttcattatttataaagattaagtatgcatttcttccagaaataccaaagataaaaacagtagagttagataaataa

SEQ ID NO: 6608 - DNA, 366 bp, Staphylococcus epidermidis
atgaaatggttaaaaatcattatattaattttatctttagttccaatagaatttatcggattatttactgattatcaaacaggtttattaataggctacattccatttataatagttgctatattaatgagtatatccatttttaaattcggctttgaaaataatataagtattgtaataggtagatgcattggaatatttctttcttgggtatgtgttcatttatttatgaacatttacgattcatcaaattattttaaacctcttaccacagatattttttcattatttttaggagctatttatttcatatttattatgcttatatatttagttatctatggtttttctcaccgtaataagtga

SEQ ID NO: 6609 - DNA, 303 bp, Staphylococcus epidermidis
atgttacgtgaagtgagagcatcacatgagcattatcagaaaagacaaaaacaattatttacagggattggatcaatactgttagtctttatgctatttgctttaattatgaccataggcagtgactttatgagtttcttgcatgtagatatattacaaaaagccatagcaagcaaaatcaaagcgtctgaaggctttatgacatttgtttggtatagttgtgcatatggtttgccttatatattcgctataggactatttattggcttatatgagtggattagagtacgattccataattaa

SEQ ID NO: 6610 - DNA, 306 bp, Staphylococcus epidermidis
ttggaattcttgtatgtttgtaaaaaaatcatggatattttagttagtatagtaacagttttggaagaagacgtagcaagaatgttagttaaaatcagcgaaagaattaaaaaaggtggttttattttaaaaattgttttatttttcacatattattttgtttcttgttttattttgtcttccttatgtgatttattactttcaacaaaatttgatgtatatataaatgtaattgcagcattgatttttgcagtatgtatgacacctcttacttttatattaaaggacgataaaaacaagaagtag

SEQ ID NO: 6611 - DNA, 129 bp, Staphylococcus epidermidis
atgagtataaaaggaaaggttaattttatgttattaaaaaataagatttattcaggcattattattgttatttttatagtttgtttgattataggattgaatgaaaatatcattggaaatcctttatga

SEQ ID NO: 6612 - DNA, 315 bp, Staphylococcus epidermidis
ttgaaaaaaggtgattttttcatcacaaataacgtaagttcaaaagggtttacaggtcatgctgcaatatatactggaaaaggaaatcccaaacatcgttatatcaaagtttatcgagcatcaaaaaaatatagaggtaaagctggaagctatgcgaaatctcattttaacggtgtaccttacagtataacgacgaatccatattctaaaagcgttacatactgttcgaaacttgtttggcaatcgtattattatggtgccggacgattatcagttcttccggttgttacatctcaatttattattgagccataa

SEQ ID NO: 6613 - DNA, 174 bp, Staphylococcus epidermidis
gtgtctaaatcaattactgaacaacaatggcaacaaatgaaagctcaagagcgtaaagatgaagcagaatttgagaaaacagctgaagtacaatggcagaaacaacaaaaacaagatcgaatagatcgagaaaatcgttcaagaaaaaaagaaatttcatttgaaaaaaggtga

SEQ ID NO: 6614 - DNA, 396 bp, Staphylococcus epidermidis
atgcaaagaaaatacaaaattataggtattatttttatcgttcttcttattgttttaacattaatttttagtatagttcaccattatgctaatgttcaaaaacatgaagaagctaaactaaaacaaaaagttcaccatattttcaaacaaaaaggttgggaagataaagttaaagaagaaaaaaatatatttacgttcaatactggagataatgacttacaagtcacttttaaagatgagccttataatacgtatacatattctattgatgaaaacaataaagtatatggacatgctgttttgaaagatgaatatgataaagattttgatagtaaaaaaaagtacaaagaatatttaagaaaaatgcattttgaagaaaaatatgatctgaaataa

SEQ ID NO: 6615 - DNA, 180 bp, Staphylococcus epidermidis; identical to SEQ ID NO: 3562

SEQ ID NO: 6616 - DNA, 438 bp, Staphylococcus epidermidis; identical to SEQ ID NO: 3563

SEQ ID NO: 6617 - DNA, 120 bp, Staphylococcus epidermidis; identical to SEQ ID NO: 3564

SEQ ID NO: 6618 - DNA, 387 bp, Staphylococcus epidermidis; identical to SEQ ID NO: 3565

SEQ ID NO: 6619 - DNA, 834 bp, Staphylococcus epidermidis
atgatgtctttaaaaaaagtattaacgatagctggttcagatacaagtgctggtgccggtatgcaagcagatcttaaaacgttccaagaacttgatgtatatggaatggtcgctttaacatctattgtaacaatggataaagaaacatggtcccatgatgtaacacctattgatatgaatgttttcgaaaaacaacttgaaactgcaatatcaattggacctgatgctattaaaacaggaatgttaggaacacaagacattattaaacgtgccggagatgtttttgttgaatctggtgcagactattttgtagttgatccagtaatggtttgtaaaggagaagacgaagtacttaatccaggaaacacagaagcaatgattcaatatttactacctaaagctacagttgttactccgaatttattcgaagcaggtcaactctctggtttaggaaaattaacatcaattgaggatatgaaaaaagctgctcaagtgatttatgacaaaggcacacctcatgtcattatcaaaggtggtaaagcactcgatcaagataaatcttacgacttgtactatgatggccaacaattttatcaattaactactgacatgttccaacaaagttataatcatggtgcaggatgcacatttgctgctgccacaacagcttatcttgcgaacggtaaatctccaaaagaagcaatcattgctgctaaagcatttgtagcttcagcaatcaaaaatggctggaaaatgaatgactttgtaggacctgttgatcatggtgcatataaccgtattgaacagattaacgttgaagtcactgaggtttaa

SEQ ID NO: 6620 - DNA, 981 bp, Staphylococcus epidermidis
atgtgtactgccatttctttatatacaaaacaacgttaccattatttagctagaacaatggactttgcatttgaatttaatggtatcccaaccattgttccacgccattatcactaccaatttgatctagattcagacatgcgtcttgaatatggttttgttggaacaaatttaaaagtaggacgttatagatttggtgatggtataaacgaaaaaggtttagctatttcgaaccattacttcactggtgaagcctcatacagtacccataaacgttatggttattttaacttagcacctgaggagtttattgtttgggttttaggttttaataaaagtattagcgaattaaaacaaaaggttaagaaaatcaatattatgaatgaaaaaaatacgactttgaatatcgttcctcctttacatttcatggtcactgatgaaacaggacataccgtagcaatagaacctcacaatggcttattaatagttaaagataattatgttcataccttaacaaatgaacctaaattagattggcatctatctaacttaagaaattacgcttttttaacgccacagaaatcaaccaatcaattaataggtaaagtgctagtaagatcaatgggctgtgaagcaggaacaaatggcttaccgggtggttatacgtcaacagatcgttttatacgcgctacatatttaagacaccaactacgctgttcccataatgaagatgaaaatttaatgaattgttttaaagttctagaatcagtcagtatccctcaaggtgcagttatcgatgccaataaaatacattacacacaatatcaattagtgatggaaagtaaagaaagaagttattatattaagccttactttagcaatcaaattttcaaaataaaattaactgaagaccttttaagtaagaatgagatgacattcttacctattaatcacgaattaaaaataacatcaatacaatag

SEQ ID NO: 6621 - DNA, 651 bp, Staphylococcus epidermidis
atgaaatggtcagaggtatttcatgatataacaacgcgccatgattttcaggcgatgcatgactttttagaaaaagaatatacgactcaaaccgtctatccagataaacaaaatatctatcaagcatttgatttaacgccgtttgaagatatcaaggttgttattttagggcaagatccttatcacggtcctaatcaagcacatggtttagcattttcagtgcaacctcatgctaaatttccaccatctttaagaaatatgtatcaagaactagaaaatgatatagggtgtcatagaacttcgcctcatttacaagactgggcaagagaaggtgtcttgttattaaatacggtattgactgttcgacaaggtgaagcacattcacatcgaaatattggatgggaaacattcacggatgaaatcatacaagctgtttctaattatcgtgagcatgttgtttttattctgtggggaagaccggctcaacaaaaggaacgattcattgatacatctaaacacttaatcattaaatcgccacatcctagtccactatcggcttttagaggattttttggttctaaaccttattcaactacaaataactatttaaaatctaaagggaaaacaccagttcagtggtgtgaaagttag

SEQ ID NO: 6622 - DNA, 360 bp, Staphylococcus epidermidis
atgaacaaagaacagattctacaattgattgagcaagaattgatacaagcagatgaagctcagacagatacggaatttgaaaagcatatgtatgctatacacatgctcacatctcttgttagttctcatcaaagtcgttctacaatagagaaattaaatcattctaaaccaatgaatagtaatatcaaagatgattatgagatgaaacaacagtcttcacaaaaacatcatgtaactgcagctgaaatagaagcaatgggtggtaaagtaccacaatcaatgaaaaagcatcatacttctaataatatgatgattacagatgatcaagttggtaatggtgaatctatttttgatttttaa

SEQ ID NO: 6623 - DNA, 372 bp, Staphylococcus epidermidis
atgatgaaagtttttattattttaggtgcattaaatgcaatgatggctgtcggtactggcgcatttggagcacatgggttggaagataaattatcagataaatacatgtcaatatgggaaaaagcaacaacttatcaaatgtatcatggattaggtctgttagttataggtttaataagtggtacaacatcaattaatgtaaattgggctggttggttattattctttggtattgtctttttcagtggttccttgtatttcttagccttaacacaagttcgtattttaggtgcaattacgccaataggtggtgttctatttataattggttggcttgttcttgtgattgctacacttaaattcgctgggtaa

SEQ ID NO: 6624 - DNA, 1491 bp, Staphylococcus epidermidis
atggaaaataaaaataacaatgtagatagaggtaaccttaagcagaatctttccgagaaatttgtatgggctattgcatatggttcgtgtatcggatggggcgcttttatattaccaggagattggattaaacaatcagggcctattgcttcttcaataggtatagtaatcggtgcgttattgatgattcttattgctgtaagttatggcgcactcgttgaaaaatttcctgtttctggtggcgcatttgcttttagttttttaagttttggaagatatgtaagctttttctcttcatggtttttaacatttggctatgtttgtgttgttgcgttaaatgcgacagcattcagtttgttgattaaatttttattaccaaatgttttgaacaacggtaagttatatacagtagctggttgggatgtttacataactgaaattgttatcgcaactgtgctacttatagtgtttatgttgattactattagaggtgccagtgtgtctggttcgttacaatattacttctgtgttgcaatggtccttgtagttgcacttatgtttataggttctttctttagcagtcactttagtttgagtcatttagagccattagcaagtgtagataaaggatggtttcaatcaatcattatgattgtctctattgcaccatgggcgtacgtagggtttgataatataccgcaaactgctgaagaatttaacttttctcctaacaagacgtttaaacttattgtttatagtttactagctgcgtcactcacttatgtagtgatgttactttacacaggctggctaagtacacaagcaacaagtttaaatggtaacttatggcttacaggtgcagtgactcaagatgcattcggttttattggccttgcagtattagcagtggcaattattatggggatttttactggattaaatggatttttaatgagttcgagtcgcttattattttcaatggggcgctctggcattatgccaacagtatttagtaaattacacagtaaacataaaacaccatatgtcgctattatcttcctagtagctgtatctttaattgctccttggttaggtagaacggcattaacatggattgtagatatgtcatctacaggtgtttcaattgcatattttattacttgtttatctgctacgaaattatttagttttaataaacagagtaatacgtatgcaccagtttataaaatttttggtattataggatcgattgtatcctttgtgttcttatgtttattgcttattccaggttctcctgcagcactttcgataccatcatacatcgctttaggaatttggttggtaataggattaatcttttttatcattcgcttgccaaaacttaagaaaatgaataatgatgaattgagtcgattgattttaaatcattctgaagacgaagttttagagatggttcatgaacctggtcaatctaattcaacgaataaatag

SEQ ID NO: 6625 - DNA, 150 bp, Staphylococcus epidermidis
atggcacatagccttgctcaaattggaatcaggtttgtgccaataccagtagaaacagacgaagaatttcatacgttagccgcatccctttcacaaaagctggaaatgatggtggcgaaagcagaagcagatgagagaaaccaggtatga

SEQ ID NO: 6626 - DNA, 921 bp, Staphylococcus epidermidis
atgagtaagaaaaatcattcaaatcacttacgaaataaggatttagataatttttctaaaaccggctactctaatagccggttaaaccgacatactatgtacacccccgaaccaaaattaagctttgacgctatgactattgttggaaatcttaataaaaataatgctcacaaactatctgaatttatgagtattgagccacaaatacgactttgggatatacttcaaactaaatttaaagctaaggcgctacaagaaaaagtttatattgaatatgacaaagtaaaagcagatacgtgggatagacgtaatatgcgtgttgaatttaatccaaataaacttacgcatgaagaaatgctttggttaaaacaaaacgttatcgactacatggaagatgacggttttacaagattagatttagcttttgattttgaagatgatttaagtgattattatgcaatgactgataaatcagttaagaaaactattttctatggtcgtaatggtaaaccagaaacaaaatattttggtgttcgtgacagtgataggtttattagaatttataataaaaaacaggaacgtagggataatgcaaatattgaagttgtttcagaacatctatggcgtgtagaaattgaattaaaaagaggtatggttgattattggaacgattgttttggtgatttacatatattacaaccagattggaaaactatcgaacgtacttctgatagagcaatggtttttatgttgttgaatgacgaagaagaatggggaaaattagaaagacgtactaagaataaatataagcaattaattaaagaaatatctccagttgatttaacggaattaatgaaattgactttaaaagcgaatgaaaaacaattgcaaaagcagattgatttttggttaattaaataa

SEQ ID NO: 6627 - DNA, 222 bp, Staphylococcus epidermidis
atgtcagatatgtttgaagtagatagagaaattaaaaatacttatttgaaaatgagtattggaaaaaatacttgtccgaaatgtaatagcatttttgaagtttcagtttttaatgatgattttccgaatagagagaatgaattagtatcttgtccatattgttctagtttagttggttacgttagaacaagtggaactgttagatcttataaaattaattaa

SEQ ID NO: 6628 - DNA, 384 bp, Staphylococcus epidermidis
atgagcgaacaaaacacatttgtggctagcgacgaaactgttgggcgaaaccgtaaacccaaccgtaaggagccaaaacaaattagttttcgtgtgagcgaatccgaatatttaaagttaaggcaatctgcggaaactttaaatatgagtgtgcctgctttcgtaaagaaaaaggcacaaggcagtcgattagtcgcaccaaaatttgataaagaaacgcgacaatcgattgctagagatttaagtaagttaggtgcaaacgccaatcagattgctaaatattgtaataaacatcaacatgaagcacccaattacatagcgttagaacataatatcaatgagttacgtgaaaggcttgatgagatatggcaacaactaaattag

SEQ ID NO: 6629 - DNA, 852 bp, Staphylococcus epidermidis
atggcaacaactaaattaggtaataccaaatcagcaagtcgagcaatcaattacgcagaaaagcgagcagaagaaaaaagtggcttaaattgtgatatagattatgcaaaatcatcgtttaagcaaacacgagctttatatggcaaagagaatggtgttcaagcacatacagtgattcaatcgttcaagcctggcgaggtaacgccagagcaatgtaatcaattgggtctagaattggcagaaaagattgcacctaatcatcaagtagccgtctatacgcacgcagatacaaatcatgtacacaatcatattgtgattaattcaattgatttagaaactgggaaaaaatatcaaagcaataaaaaacaaagagagttcgtaaaacaaaaaaatgatgaagtatgtagagaacatggattgtctgtaactgaacgcaatgcaacaatgcgatatactcaagccgaaaaaggcttaattgaaaaaggtaaaagctcttggaaagacgaaattagagatgcgattgaacaatcacaagcgacaaattttgaggagcttgagagagagttgaaccaattagacatcacaatcgatcgtgtcacaaacaaaacaatcacttacagacacttgaaagaaaataaaaaagtgagaggtaaaaatttaggtgaacaattcgataagggggcattagaaaatgagtttgcggtcgcaaatgaacggagagaattcgagcaacaattatcagaatacgaaccgagagaaagtgagtacagaccaagagatacagaaaaaaatattaaacgtcctaaagaacttagagtccaatcacgagaaaacgactttgaacttgagtga

SEQ ID NO: 6630 - DNA, 477 bp, Staphylococcus epidermidis
atgaccgatcagataaaacgctcgaatacgcatgagattaaagtaaatattgaaacagatgataatctaagcgaatttattaaacaaaaaatcgatgagaaatttgatgaaaaaatacctaatcttcgtacaaagcaaacaatggaacaattcaaatggtctttgatgagaattgaggataaacaagaaatactcgatgacaatattgaaagtgttcacaaatgggcgacttactttaagtcagcgttgatgttgacactatttgccgttttattgattagcgttgtcgctacattcatgggtggtttattcaatgttttaggatttgaccacatgtataaaggtttagaatatcaaataaagcactcagaaggttttgtagcatttttatggcatttaggatacttgataccttatttactattagcgacgctgatatggcttatattggctttagaacacaaatatagatattaa

SEQ ID NO: 6631 - DNA, 162 bp, Staphylococcus epidermidis
gtgataaaagagttatttttaagtgtattgttttttattgttattattttgatcttaacgttttcagattatatatttttaaatgatatcaatactttaaaaaatatattggcaacaatggctataacaatatttattatgtgtgttatagggagggattaa

SEQ ID NO: 6632 - DNA, 318 bp, Staphylococcus epidermidis
atgaaattaaaaaaagtaatagttactattatgtttttattagtaataatattttctttaaatattattataagatttcagtatacggaaagtaaggttcgctcatatttggttaacattgagaaaaaacctaaaaaaattgaattaaaaaaaagaattgggaatttaccaggatataggaattatttaatagaatataaagaaaaagatactacgaagtactactattatgactataaagcaaagcaagtgaagggagaagagcaaataataaatggttattctaaagatttaaagactaaatctcaatatatttag

SEQ ID NO: 6633 - DNA, 552 bp, Staphylococcus epidermidis
atgaatagaaataatatattcataaaaattttatttatcacatcatttgctatgattcttgcaattgttagtaaccacaatcaaacttttgctcttacttataaaaaaggtgatgtcttaacaactagaagtactagtgcaagtggtcttacaggacataacggtatatacataggtaatggaaaagttctagacactcctagagttcaccattatccaagagtaatgtcagtgaaaaaatggattaaaagctatcctaaaacaaaagtaacacgaccaaaaaattctagtctaggaaataaagctgcaaacaacgccgttaaatattttaaaggcaaaaaaataccatataaggttacaccaaatcctaaaaatatcaaaaaaacctattgcagcgaaatagtatggtattcctattacaaggctggaaaacaatatatgatccccgagcatggagtttggttaccaccaagtattgtagccccatatgcatttgttaataaacaagatgttaagcacaatggttttaaattcgtagataataaatggtag

SEQ ID NO: 6634 - DNA, 117 bp, Staphylococcus epidermidis
atggttaagtgcgatggtttaaaccaactctatcataaaggtgtcaaagattgctcatcatggaaaggtaaacctaaacacaaaaattggcctaaaacagcatggtatagaaattaa

SEQ ID NO: 6635 - DNA, 375 bp, Staphylococcus epidermidis
atgaaaaaaatagtttatatacttggtactattatagttttaggcttttgttatttttatgtaaatttaattttttttgatagttggacacgttattctgctgaaaaagaaataaataattatatttcaaatcatgatacaaagaaactaaaagaaatatccgcgaataataaaacatatcaacttttgaaacatgctaaacatgtgacaataaaaggagatacagataatcaaggtggaggtcatatagggtattttactagtacgattaatggtaaagaaggagcgctttttgtacatcttaattttggtttgtttcctgaaattcctaaagtaaccaagttggaagtttttgataaaaatatttatgagtag

SEQ ID NO: 6636 - DNA, 180 bp, Staphylococcus epidermidis
atgttattaaaaaataagatttattcaggcattattattgttatttttatagtttgtttgattataggattgaatgaaaatatcattggaaatcctttaggagaaaaaatattttatttattaggttttctattttttgtattattaattattggtacaacaaaaaatagaaagcattaa

SEQ ID NO: 6637 - DNA, 453 bp, Staphylococcus epidermidis
atgccaaaaaaacaaagctcgaaagaaaaaatcttaaccgttcgtgtcagtcaagcgcaatacaaaaagatacaagatttagcctacatacgtagtatgaatgtcacagaatatatacgccaaacagctgtgggtaatcggattaaaccgacggtgattgaatatccaaaagagcaaataacgatggatgattctaattctaagaataatacgaataatttgtataaagttattgaacatctagaagaagacaacgaagcactcaaatcagacagagacgcacttcgacaacgtcatgaccaacttgaagatgatatagaacaatacaaaagggagaatgagatatttcatcgcttgttagagcactttgatagtactgcatttatgaattttaatacgtatcgtgatgatagaccattaaaaaaagaaattaaacgattgaaagaacattaa

SEQ ID NO: 6638 - DNA, 1209 bp, Staphylococcus epidermidis
ttgaaattagcttggaatacgcaaaaaaataaaatgagcgatgttaaaggcaaagagatggaacaagaacgtaaagggagaatcaaaaacgatgagattgatttgaaacggacaaacttaaactttgatttagttgaagatgaacgtcatttgtatcatcgtgtgaaagatagagtcgattattataaagaacaggggtcacgtgtacagaaaaatagtgtggtgatgtattccaatatcattacgttatcgaaagaagaagccgaccgtatgggagagacacgtacaaaacactactttaaaacatgtaaagattacttcagtgaacgttttggcgaagccaatgtcgtttcagcgaaagtgcatatggatgaatcagcgcctcatatgcaccttcactttatacctgttaatcatcaagggcgattatcagcacgtacagctatgaatcgacaagcgattaatcacatccatgatgaattaacaacacatctgtgccagcaaggttttgatgttgaacgtgggagtaccgatgataataaaacgtatattcaagatattcatgaatacaaaaagaaagcgaaagttttaagtgaattagaccaacaaattgaaacgaaaaaacaattgttgagggatatcaacgatttacacgatgaaaaagaacatttaactcgggatattcaaaacttaaaacggaaaaatcattttttacaagaggattctcaacaggctcaagaagatatcgacctatacaagcaactgagaacgatttctagggacgatcttaaaaaagatgaggaaaagtaccaaaaagaaatcaaagcgtatgaggcgtctctgagtgaccttagaatgaattaccgagatttggacaagcgcaatcaacatttaacaacacaaaataatcaacttgaacaccatttagacatgttaaatgcacgtcatcaagcgatgaacgacatggtaagaaacgatacacgtattttgtttgcggggcttagatgtgcattgaaagataggaacattgaattaagcgcagaaattaaatatcaacgtatgccagaagtcggtattgatcctgatacggtcgatcaaggggctttaacacatgcatatcaaggtgatgtgtcagggatagaccatcatataagaaagacatcagcacctattaaaaaagagacaaagaatgacttagaattagaataa

SEQ ID NO: 6639 - DNA, 144 bp, Staphylococcus epidermidis; identical to SEQ ID NO: 3536

SEQ ID NO: 6640 - DNA, 630 bp, Staphylococcus epidermidis
atgatccaattaaagaatgtatctaaatcatttaaagatatctatattttgaaaaatataaaccttactattaaagaaaaagcatttgttgtaattaaaggaaaaagtggtcaaggaaagtctacattgctaaatattttaggtttattagaagcacctactgagggtcaaataatttataaaaatcagtctattgcttcaaagtcacaaattagaaagtttaaaaaagaagatattgcctatatttatcaaaattatggcttattagaaaataaaacagtattagcaaatcttatgttaccattaaatatttctaaaaaagatatgcctaaaattatcgaaattattcaatctgtcggattaccgaaagagatacttaaacgaaaagtttatacttgtagtggtggagagcaacaacgtattgctattgcaagagcgattcttaaaaatcctaccgttatatttgctgatgaacccacgggtaatttggatgaaaaaaacgctcatgatgttatcaatattttccaatatttaaatagacaaggtgtcacaatcattatggctacacacagccaaaacttttttgatataggtacagaattgattgatttagatgttcaaaatgcataa

SEQ ID NO: 6641 - DNA, 2043 bp, Staphylococcus epidermidis
atgaaaaaattattattatttttattggtctcaatcacgttgatatttagtttaggcatcgcaaattcggcgaaaaacctttctttttatcaaaccatcataaaagaccatgatcatttcgtttataatgttccgggaaaagaaaagaaacatactcgggatgcgcctcaatactttaataaaatcgccaaaaatcatcatgttggtttaactaaagttacatatttcaacgataatcgtattctttttaatacaaatgaaaaaagattacttaatcaaagagataatcatcatcagttacatatatttgatagtaaaatgcatatcgatgttgaaaatataacaactacaaaacatctgtctgcagtaggaatgtattatataaaaggggatcctaaagataaagcgactgtgctttcactcatgagcaaatatgcgggggacacgatcaaacaggaaaatcctagcttgctatcttatttaactttagatcaatatactttagcattagttttcttattaagtttgttaatttttatcgtttattgtcactacttacaacgtaataaacaaaattataaaatgctttcagatttaggatatgacctaactcatcactttatgtttgtaatgcgagatttgaaatggatatttttaagttatgttttactatctattggaactacgttgatcacttacttagcgatttataaagacttacatatcttacaattattagctgtcgtatgttccgttatggttttaacattgattgcactaagttgcattacaatccttcttttaatgatatatcaaaaaaatttttataaaaatcaagtcaaacctaatgtcaacctaataatctatctttatattttacttgccatcgtaatgggtgtctttttaacgacttcaacacaccaagtcataaaaaatagtcatgattttcagtctaaaattccttcacttaagggttggaaaaatacgaaagatgtatatcaacctaatgttcaagacaatggggcagtgtataacaagaaaattgaaatagcacaggataaaagatttgatcgtttattaaaaagtaaagaaaatccaggttttttaatagatactgaaaattttacaagtgaagacggagaacttccattatataaaatgaatgaagaggaaaataacagtatagaacccgatggtaaaacaataatcgtcgatcccaattatcttaaacgacatcatatggttacgcctcaaagtgaagatgttttgagatacattcaacatgataaatatacgagaaatatattggtacctattaagttcaaacattatgaacataagattagaaagaactttacaaaagattttaaatttaaacgcacgttatatgatgatatccgaaaagatcatgcccctgcgcatattaatattatttatgtaaaaaacagttcaaagtatcctacgtataatagtgatgcagggggcaagaacaataaaatagaggctcctattgcgatagttgaaacaggtaatacgcatgtcagaaacaatgcacattatatggatgactgctatttctttgagagtaaaaaagataatccttatgatactttgaaaccactattaaaaaaatatggtttactggacgatataatttctattaattcggtctatgacacgaaggtagatgatattaacgatatcaagaaagaaattattaagtatgttctactagcacttattacgttaatttcatttattattgctatatttacagctatccatttatattttgttaattggaagcatgcaatatttattaaatataatctaggatattccgtttggaataaccacaagtatgcatttctattattagcatttgttaacatactgttacttggtatgtttttacaaaagtatcctataaccagtttattgatctttattagtttgcttatttttgaaatgatcgtcatctctatagaatttttaatactcaatcagaagaataacaatgctattttgaaaggaaaagagtaa

SEQ ID NO: 6642 - DNA, 393 bp, Staphylococcus epidermidis
atgaagaaacaatttttacttgcttctgctcttactcttggcattagtggcttaggaactataggctatgcacaggcatctatgacagacgctcatggaggttctgaaaatgtagataactctcatggtttaaaagcttcaaaaacctatgataataatgtttctactcgttcaataaaacaaggtaaaaagtcaggaggatactgggtaagagggactacaagcaaaactgttaaatcaaattataaacattatagacacaaaggccatgcttcagttataaatggaagtggaaatggaaatagtggcggctggaagaagccgggtcattggtctaaatcttctgtgaaaaaaacatggtctggaaacaaagctttttatgatcacacataa

SEQ ID NO: 6643 - DNA, 189 bp, Staphylococcus epidermidis
atgatgggatatgctgaaaaagatattgtttttaaagatcaaccatatagtgagtatgagtataacgtgacaccagcaccagcaccatggacagatgataaagagtataaggtgtggggggaaacagatttacaaaagaaagactcctattataaatatcttttagaatcagaaccttacagaaaataa

SEQ ID NO: 6644 - DNA, 690 bp, Staphylococcus epidermidis; identical to SEQ ID NO: 4542

SEQ ID NO: 6645 - DNA, 1056 bp, Staphylococcus epidermidis; identical to SEQ ID NO: 4541

SEQ ID NO: 6646 - DNA, 1116 bp, Staphylococcus epidermidis
atgaaaattgggattcctaaagaaataaagaataatgagaatcgagtggggttatccccaagtggtgtacatgcacttgtagaccaaggacatgaagttttagtagaaacaaatgctggtctaggatcttactttgaagatggtgattatcaagaagccggtgccaaaattgttgatgagcagtcaaaagcttgggatgttgatatgatcatcaaagttaaagaaccacttgaatcggaatacaaattctttaaagaagagttaatcttatttacttatttacaccttgcgaatgaacagaaattaactcaggcacttgtggacaacaaggttatatctattgcctatgaaactgtacaattaccagacggttctttaccgttattaacaccaatgagtgaagtggctggtagaatgtctacacaagtgggagctgaatttttacaaagatttaatggaggtatgggtatcttactaggtggcatacctggagtacctaaaggcaaagtcactatcattggtggtggtcaagcaggtacaaatgcagctaagatagctttaggattgggagctgaagtgacaatactagatgttaatcctaaacgtttagaagaattagaggacttatttgatggcagagtaagaacaattatgtctaatccattaaatatagaaatgtatgtgaaagaaagcgatttagtgattggagcagtccttattccaggtgctaaagctccaaacttagtgactgaagatatgataaaagaaatgaaagatggatcagtgattgtagatattgcgatagatcaaggtggaatttttgaaacaactgataagattactactcatgataatccgacttacactaaacatggtgtcgtgcattatgctgtagctaatatgccaggtgccgttccacgtacatctacaattggattgaacaatgcaacattaccttatgcgcaattattggctaataaaggttatcgtgaagcatttaaagtaaatcatccattatctctaggtctgaatacatttaatggacatgtgactaataagaatgtagctgatacatttaattttgaatacacttcaattgaagatgcattgaaataa

SEQ ID NO: 6647 - DNA, 504 bp, Staphylococcus epidermidis; identical to SEQ ID NO: 4539

SEQ ID NO: 6648 - DNA, 591 bp, Staphylococcus epidermidis
atggataaagctacaaaatatgcacttcaattaagggtgattgctcaagaaagctatcctaatgtcgatagacattcctttctagtcgaaaaattacgcttacttattcaacaattaaaacaatctattcatcatctcaaacaattagatgatgccatgattcaattagcacaacaactcgattattttgaaaatattcattcgatacctggtattggtaagctaagcacagctatgattattggggagattggtgatattaagcgatttaaatcaaataaacaactcaatgcttttgttggcattgatatcaaacgatatcaatcaggtcatacacactgtagagataccatcaacaagcgtggtaataaaaaagcgagaaaacttttattttgggtgattatgaatataataagagggcagcatcattatgacaatcatgtcgtcgattattactacaaactaagaaagcagcctaatgagaaacctcataagactgccatcattgcttgtataaatcgattattaaaaacaattcattatcttgtaatgaatcataaattgtacgattatcgaatgtcaccacattag

SEQ ID NO: 6649 - DNA, 1215 bp, Staphylococcus epidermidis
atgcatattgtgattgggatattaggaatcattttctttttagcactcgcagttttatttagttcagacagaaaaaatattcgctggcgatatgttggattgctattagtaattcaactaatatttgcatttatattacttaaaactaatttgggaatttcagttattgggagtatttcagatggttttaattatttattagctaaagcagcggtcggtgtcaattttgtatttggtggctttaaatttattgatcctaaacaaccaccattcttctttagcgttttgttacctattgtttttatttcagcattgattggtatattacaatatacacgaatacttccactaattattaacttactgggatttttaatttcaaaaattaatggaatgggccgtttagaatcttacaatgcggtcgcggcagcaattctaggacaatctgaagtctttatctcattaaaaaaacaattaccttacatacctaaacaacgcttatatacattaactgcttcagcgatgtcaacggtatcagcatcaattataggcgcttattttacacttattgaaccaaaatatgttgttactgcagtagtgcttaacttgtttggtggttttatcattgcatctatcattaatccttataaagtcaatgaggaagacgacaaattattaattgatgagaacgaaacaaaaaaacaatctttctttgaaatgcttggggagtatatactagatggatttaaagtagcagttattgtaggcgctatgctgataggttatattgcaattattgctttattaaatggaatggtgagtggaatcttaagctttatgtctggtggtgctattcaatggaacttccaaacgcttattggatttatttttgcacctttcgctttcctaactggaataccgtggcaagatgcagttcaatctggttcagtaatggctacaaaattactatctaatgaatttgtagcaatgcaagatttaggtaaagcgactggattatcggaacatgctaaaggaattacctctgtcttcttagtatcattcgcaaactttagttcaattggtattatttcaggagctattaaatcattgaatgatgaaaaaggtgacgttgttgctcgtttcggaataaaattattatttggtgcaacacttgtttcgtttatatcagcggctattgcaggattctttatctaa

SEQ ID NO: 6650 - DNA, 462 bp, Staphylococcus epidermidis; identical to SEQ ID NO: 4010

SEQ ID NO: 6651 - DNA, 564 bp, Staphylococcus epidermidis; identical to SEQ ID NO: 4009

SEQ ID NO: 6652 - DNA, 1005 bp, Staphylococcus epidermidis; identical to SEQ ID NO: 4008

SEQ ID NO: 6653 - DNA, 2454 bp, Staphylococcus epidermidis
atgttatttggtagattgacagagcgtgcacaacgtgtgttggcacatgcacaagaggaagcaattcgtttgaaccattctaatattggaacagaacatcttttgcttggtttaatgaaagagccagaaggtatagcagcaaaggtattagaaagttttaatattactgaagataaagtcatcgaagaagttgaaaaacttatcggtcacggtcaagagcaaatgggcacactacattatacaccgagagcaaaaaaagtaattgaactgtctatggatgaagctcgaaagctacatcataactttgtaggaacagagcatatactattaggtttaattagagaaaatgaaggtgttgcagcacgtgtatttgcaaacctagatttaaatattactaaagcacgtgcccaagttgtaaaagctttaggaagtccagaaatgagtaataaaaatgcgcaagctaataagtctaataacacgcctactttagatggattagctagagatttaactgttattgctaaagatggaacgttagatccagtcgtaggacgagataaagaaattactcgtgtaattgaagttttaagtcgtcgtactaaaaataatcctgtgctaattggtgaacccggtgttggtaaaacagcaattgctgaagggcttgcgcaagcaattgttaaaaatgaagtaccagaaactttaaaagacaaacgtgtaatgtcattagatatgggtacagtcgtagctggcactaaatatcgtggtgaatttgaagaaagattgaaaaaagttatggaggaaatccatcaagctggtaatgttattctatttatcgatgaacttcatactttagttggcgctggtggcgcagaaggagcaattgatgcatctaatattttaaaacctgctttagctcgtggagaattgcaatgtataggtgccacaacattagatgaatatcgtaaaaatatagaaaaagacgctgcattagaacgtcgttttcaaccaattcaagtggatgaacctacagttgaagacacgattgaaatcttaaaaggattacgtgaccgttatgaggctcatcacagaattaatatctcagatgaagctttagaagcggctgctaaattgagtgatcgctatgtttcagatcgtttcttgccagataaagccattgacttaattgatgaggcaagttcaaaagttagacttaaaagtcatacaacgccaagtaatttaaaagagattgaacaagaaattgataaagtaaaaaatgaaaaagatgctgcagttcatgctcaagaatttgaaaatgccgctaatttaagagataagcaatctaaacttgaaaagcaatatgaagatgctaaaaatgaatggaaaaatgcacaaggtggtttagatactgccttatctgaagaaaatatcgctgaagtaatagctggttggacaggtattcctttaactaaaattaatgaaactgaatcagatcgtttattgaatcttgaagatacacttcataaacgtgtcattggacaaaacgatgctgtcaattcaattagtaaagctgttagaagagctcgtgctggtcttaaagatccaaaacgtccaatcggtagttttattttcttaggacctacaggtgtgggtaaaactgaattggctcgtgctttagctgaatctatgtttggtgaagacgatgcaatgattcgcgtagatatgagtgaatttatggagaaacatgctgtcagtcgattagttggtgcacctccaggatatgtaggacatgatgacggcggtcaattgactgaaaaagttagacgtaaaccatactctgtgattttatttgatgaaattgagaaagcacatcctgacgtatttaatattcttctacaagttttagatgatggtcatttaacagatactaaaggtcgtactgtggacttccgtaatactgtgattattatgacttctaatgtgggagctcaagaattacaggaccaacgctttgctggttttggaggtgcttcagaaggtagtgactacgaaactgtcagaaaaacaatgatgaaagaattaaaaaattcattccgaccagaattcttaaaccgtgttgatgacattattgtcttccacaaacttacaaaagatgaattaaaagaaattgttacaatgatggtaaataaacttactcaccgtctttcagagcaaaatattaatattgttgttactgataaagcgaaagaaaaaattgcagaagaaggatatgatcctgaatatggtgctagaccactcattagagcaattcaaaaaacggttgaagataatttaagcgaattgattttagatggaaataaaattgaaggtaaagaagtaacaattgatcatgatggtaaagaatttaagtatgatattcatgaaattacagctaaaaaagaaacaacagaatcataa

SEQ ID NO: 6654 - DNA, 1374 bp, Staphylococcus epidermidis
atggccaagaaaaaagtaatattcgaatgtatggcatgtggctatcaatctcctaagtggatgggcaagtgccctaactgcggtgcgtggaatcaaatggaagaaatagtagaaaaggttgctcatcctaaacatggtgtaaaaacaaaagaaacagcaggtaaggtacaaaagttaaatagtgttaagcatgaagctacccctagattacttacagaatcaaaggaatttaaccgtgttttaggtggaggtattgtaagtggttcgttagtactaataggtggagacccaggtattggtaagtcgactttattgctacaaatttgtgctgcgctgtcacaaaataagaatgttttatatattactggtgaggaatctattaatcaaactaagttgcgcgctgatcgtttagaagaagattctagtcatcttaatgttttagctgaaactgatttagaagtgatacatcaaactgtaaaagaagagagacctgacttacttgttgttgattcgattcaaacaatctatcatccggaaattagttccgcacctggatcggtatcacaagtaagagagagtacgcagagtttaatgaacattgctaaacaaatgaatattgccacatttattgtgggacacgtaacaaaagaaggacaaatcgccggaccaagattattggaacatatggttgatacagttctttattttgaaggagatgagcatcacgcatatcgtatccttagagcagtaaaaaatagatttggttctacaaatgagatggggattttcgaaatgaagcaaagtggattaaaaggtgtacttaatccttctgaaatgtttttagaagaacgttctacaaatgttccgggctctacaatcgtccccactatggaaggaacaagaccactactcattgaagtccaagcgcttgttacaccaacaacatttaataatcctagacgaatggctacaggtatagatcataatcgattaagtttacttatggcggttctagaaaaaaaggaaaactatttactccaacaacaagatgcctatattaaagtagcaggtggcgtcaaattaacagaacctgctgttgatttaagcattattgttgcgacagcttcaagttttaaagatcaagctgttgatggattagattgttttgtgggtgaagttggattaacaggtgaagtacgcagagtatctcgcatagagcaacgtgttcaagaagcggtcaaactagggtttaaaagagctattattccacagacaaatattggaggttggacattcccagaaggcatccaagtcgttggtgtttcatcagtacatgaagctttgaaatatgcattacattcaaaacagcgataa

SEQ ID NO: 6655 - DNA, 1059 bp, Staphylococcus epidermidis; identical to SEQ ID NO: 4005

SEQ ID NO: 6656 - DNA, 1455 bp, Staphylococcus epidermidis; identical to SEQ ID NO: 4004

SEQ ID NO: 6657 - DNA, 642 bp, Staphylococcus epidermidis; identical to SEQ ID NO: 4003

SEQ ID NO: 6658 - DNA, 1401 bp, Staphylococcus epidermidis
atgattacattatataataccttaacacgtcggaaagagacgtttgagcccattgaaccaggtaaggtcaaaatgtatgtatgtgggccaacagtttacaattatattcatattggaaatgcacgaccagctattaattatgatgtagtcagaagatatttcgaatataagggatatgaagtcatctatgtttctaatttcacagacgttgatgataaactcattaatcgctctaaagaacttaatgaaagtgttcctgaaattgctgaaaagtatattaaagctttttatgaggacgttggtgctttgaatgtgaaaaaggctacatctaatccgcgtgtgatgcatcatatgggtgaaattattgattttattaaagaattagtagatgaaggttatgcatatgaaagtgacggtgatgtctattttagaacacgtcaatttgatggatatggtaaattaagtcatcaatcattagatgatttgaaagttggcgctcgtattgaagctggagaacaaaaagaagatgcgctagattttactttatggaagaaagctaaaccaggtgaaattagttggaatagtccatttggtaaaggtagaccaggttggcacattgaatgttcagtaatggcttatcatgaactagggtctacaatagatattcacgcaggtggttcagatttacaatttccgcatcatgaaaatgaaattgctcaatcagaggctcataatcatgcacctttcgcaaattattggatgcataatggttttattaatattgataatgagaaaatgagtaagtctctaggaaatttcattttagttcacgatatcattaaagaagtcgatccagacgtattacgattctttatgattagtgtgcattatcgtaacccaataaactacaatttagaattagtaggtgcggcgcgaagtggtcttgaacgtatacgtaatagctacaagttaattgaggaaagagaacaaattgcctcagatttggaagaacaatcagaatatatacaacaaatagataaaatactaaatcaatttgaaacggtaatggatgatgactttaatactgctaatgcagtaactgcatggtatgacttagctaaacttgcaaataaatatgtattagaaaatacaacttcaacaaaagttttaaatagatttaaagaagtgtacagcatttttagtgacgtccttggtgtaccacttaagagtaaagaaactgaagagttactagatgaagacattgaacaattgattgaggagcgtaatgaagcacgtaaaaataaagatttcgctcgagcagatgaaattagagatatgttaaaagcacgtcatatcattttagaagataccccccaaggtgtaagatttaaacgtggctaa

SEQ ID NO: 6659 - DNA, 399 bp, Staphylococcus epidermidis
gtggctaaacatatgaacgtaaaacttcttaatcctttaacattggcatatatgggtgatgcagtacttgatcaacatgtgcgtgaatatatcgtgctaaaattacaaagtaaacctcatcgtttgcaccaagtatcgaaaagttacgtttcagcgaaaagtcaagctaagactttagagtatttgttagatattgactggtttacagaggaagagctaagtgttttaaaacgaggacgtaacgctaaaagttatacaaaagctaaaaatactgacattcaaacttatcgtaaaagttcagcgttagaagctgttatcggatttttatatttagaccatcaatcagaacgattagaaaacttattagaaacaattgttaggatagtggatgaaaggtag

SEQ ID NO: 6660 - DNA, 768 bp, Staphylococcus epidermidis; identical to SEQ ID NO: 4000

SEQ ID NO: 6661 - DNA, 492 bp, Staphylococcus epidermidis
atgattggccaatcctcaacacttagcactgttgctaaagagaatttagaagaagctagagagcaattattagacacaattgccaactacaatgcattaatagcagatgaaattgtctgtgtatttgatgcctatgaacagtcagggatagaaagggaatacttctatcatggtgtcaaaacaatctttactaaagaaaaagaaactgcagatagttttatagaacgctacgtgtatgaattatataataaacacacgacacacattaccgttgtaacaagtgatatgagtgaacaacatgctatttttggttcaggtgcatatcgtatttcttcaagagaaatgtggcgtgaattaaaagaaaatgaggttgttgttaacaagtcacttgatgattttagcgaaaagaaaccaagaattagaattccgttatctaatgagatacttgaagaatttgaaaagattagacgtggcaatcagaaaaaagactaa

SEQ ID NO: 6662 - DNA, 576 bp, Staphylococcus epidermidis; identical to SEQ ID NO: 3998

SEQ ID NO: 6663 - DNA, 144 bp, Staphylococcus epidermidis; identical to SEQ ID NO: 3997

SEQ ID NO: 6664 - DNA, 186 bp, Staphylococcus epidermidis; identical to SEQ ID NO: 3996

SEQ ID NO: 6665 - DNA, 549 bp, Staphylococcus epidermidis; identical to SEQ ID NO: 3995

SEQ ID NO: 6666 - DNA, 423 bp, Staphylococcus epidermidis; identical to SEQ ID NO: 3994

SEQ ID NO: 6667 - DNA, 696 bp, Staphylococcus epidermidis; identical to SEQ ID NO: 3993

SEQ ID NO: 6668 - DNA, 501 bp, Staphylococcus epidermidis
atgtctgctatcattgaagcaaaaaaacaacaagtcgatactatcgctgaacaacttaaaaattcagtttcaacagttatcgttgactaccgtggtttgactgtagcagaagttactgaattacgttcacaattacgtgaagcaggtgttgagtataaagtatacaaaaacactatggttcgtcgtgctgctgaacaagcaggtatcgaaggcttggatgaattcttaacaggtcctacagcaatcgcaacttctactgaagatgttgttgcaccagcaaaagttattgcaggatttgcaaaagaacatgaagctttagaagttaaaacaggcgttatggaaggtaacgttatctctgctgaagaagttaaaacagttggttcattaccttcacacgatggtcttgtatctatgcttttatctgtattacaagcacctgtacgcaacttcgcttatgcagttaaagctgttggagaacaaaaagaagaaagcgctgaataa

SEQ ID NO: 6669 - DNA, 369 bp, Staphylococcus epidermidis; identical to SEQ ID NO: 3991

SEQ ID NO: 6670 - DNA, 735 bp, Staphylococcus epidermidis
atgcaaatacaacctgaattctttgagaagttaaaaccccgttattctaataacggggtttttcaattaattaatacaagcatactaaatgcttttggattgaatgataaaaatagaggtgaagaaatgagtcattattatgatgaacaacctgatgttaaaagtaacccaaaaagaattagttatcaaattaaaaatgcgcaactagagcttactactgatgctggagttttttcaaaagataatgtagattttggatctgacttactaattaaaacttttttaaaagaacatcctccaggcccaagtaaaaccatcgcggatgtaggatgtggatatggtcctatcggtttagcaataggaaaagtatctccacaccatcaaatcacaatgttggatattaacaatagagccttggcgttggcagaaatgaataagacgaaaaatcaagtggataatgtaacgattatagaaagcgattgtttatctgctgtcaatcatcagtgctttgattacattttaactaatccccctattagagctggtaaggacattgttcatcgaatctttgaacaagcgtttgacagactcaagactacgggtgaactttatgtcgtcattcaaaaaaagcaaggtatgccttcagctaaaaagaaaatagaagaactatttggcaatgtagaaattatagctaagagtaaaggatattatattttgaaaagtataaaaggttga

SEQ ID NO: 6671 - DNA, 3552 bp, Staphylococcus epidermidis
ttggcaggtcaagttgtccaatatggaagacatcgtaaacgtagaaattacgcgagaatttcagaagtattagaattaccaaacttaatagaaattcaaacaaaatcttatgattggttccttaaagaaggtttattagaaatgttcagagatatttctccaattgaagatttcactggcaacctatctttagaatttgtagattacagattaggtgaacctaaatatgatttagaagaatcaaaaaaccgtgacgctacttatgctgcacctcttcgtgtgaaagtgcgtcttattattaaagaaactggtgaagttaaagaacaagaagtcttcatgggtgattttccactgatgacagatacaggtacgttcgtaattaatggtgctgaacgtgttatcgtatctcaattagttcgttcaccatccgtgtattttaacgagaaaatcgataaaaatggacgtgaaaactatgatgcaacaatcattcctaaccgtggtgcttggttagagtatgagacagatgctaaagatgttgtatatgttcgtatcgatagaacacgtaaattaccattgactgtattactacgtgcgctaggtttctcaactgatcaagaaattgttgacttattaggagacagcgaatatttacgtaatacattagaaaaagatgggacagaaaatacagaacaggctttattagagatttatgaacgtttacgtcctggcgaaccaccaacagtagaaaatgctaaaagtttattatattctcgtttcttcgaccctaaacgctatgatttagccagtgtaggtcgttataaagcgaacaaaaaattacacctaaaacatcgtttgttcaatcaaaaattagcagaaccaattgttaacagtgaaactggtgaaattgttgttgacgaaggaacagtgttagatcgtcgtaaacttgacgaaatcatggacgtattagaaacaaacgctaatagcgaagtatttgaacttgaaggtagcgtaattgacgaacctgtagaaatccaatctattaaagtgtatgtgcctaacgatgaagaaggtcgtacgactactgtcattggtaatgcattacctgattctgaagttaaatgtattactccagcagatattgttgcctcaatgagttatttcttcaacttattgaatggcattggttatacagatgatattgatcatctaggtaatcgtcgtttacgttctgtcggtgagctattacaaaatcaattccgtatcggtttatccagaatggaacgtgttgttcgtgaaagaatgtcaatacaagatacagattctattacgccacaacaactcattaatatcagaccagttattgcatcaatcaaagaattctttggtagttcacaattatctcaattcatggaccaagctaacccgttagcagagttaacgcacaaacgtcgtttatctgctctagggcctggtggattaacacgtgaacgtgctcaaatggaagtgcgtgacgttcactactctcactatgggcgtatgtgtccaattgaaacacctgagggtcctaatattggtttaataaactcattgtcaagttatgctagagtgaatgaatttggttttattgaaacgccatatcgtaaagtggatttagatacaaactcaatcactgatcaaatagattatttgacagctgatgaagaggatagttacgttgttgcacaggctaattctagacttgatgaaaatggtcgtttcttagatgatgaagttgtttgtcgtttccgtggtaataacactgttatggctaaagaaaaaatggattacatggacgtatcaccaaaacaagttgtttcagcagcaacagcatgtattccattcttagaaaatgacgactctaaccgtgcgttaatgggagcaaacatgcaacgtcaagcggtacctttaatgaatcctgaagctccatttgtgggtacaggtatggaacacgtagccgcaagagactctggtgctgcaattactgctaagcatagaggacgcgttgagcatgttgaatctaatgaaattttagttcgtcgtttagtcgaagaaaatggaactgaacatgaaggtgaattagatcgttatcctttagcgaagttcaagcgttcaaactctggtacttgttataaccaacgtccgattgtatcaattggtgatgttgttgaatataatgagattttagcggacggtccttcaatggaattaggagaaatggcattaggacgaaatgtagttgtcggtttcatgacatgggacggttacaactatgaggatgctgtaattatgagtgaacgactagttaaagatgatgtatatacatctattcatattgaagagtatgagtcagaagctcgtgatacgaaattaggacctgaggaaatcacacgtgatattccaaacgtatctgaaagtgcacttaagaacttagatgatcgtggtatcgtttatgttggtgcagaagttaaagatggtgacatcttagtaggtaaagtaacgcctaaaggtgtaactgaattaacagctgaggagagattattacacgctatctttggtgaaaaagcacgtgaagttcgtgatacatcattacgtgtacctcatggtgctggcggtatcgttttagatgttaaagtctttaatcgtgaagaaggagacgacactctatctcctggagttaaccaattagtacgtgtatatattgtccaaaaacgtaaaatacatgttggggacaaaatgtgtggtcgtcacggtaacaaaggtgttatttctaagattgttccagaagaagatatgccttatttaccagatggtcgaccaatcgatattatgttaaacccattaggtgtaccatcacgtatgaacattggacaagtattagaattacatttaggtatggcagctaaaaacttaggaattcacgttgcttccccagtgtttgatggtgccaacgatgatgacgtttggtcaactatcgaagaagctggaatggcgcgtgacggtaaaactgttctatacgatggacgaactggtgaaccattcgataatcgtatttcagttggtgtcatgtacatgcttaaacttgcacacatggtagatgataagttacatgcacgttctacgggaccatactcacttgttacacaacaaccattaggtggtaaagcacaattcggtggtcaacgtttcggtgagatggaggtatgggcacttgaagcttatggtgctgcttatactttacaagaaatcttaacttataaatctgatgatactgtaggtcgtgttaaaacttacgagtctatagttaaaggtgagaatatttctagacctagtgttccagaatcattccgagtattgatgaaagaactacaaagtttaggtctagatgttaaagtgatggatgagcatgataatgaaatcgaaatggctgatgttgatgacgaagatgcagcagaacgcaaagtagatttacagcaaaagagtgctccagaatcacaaaaagaaactactgattaa

SEQ ID NO: 6672 - DNA, 3624 bp, Staphylococcus epidermidis
ttgattgatgtaaataatttccattatatgaaaataggattagcttcacctgaaaaaattcgctcttggtcttatggtgaagttaagaaacctgaaacaataaattaccgtacacttaagcctgaaaaagatggtctattctgtgaaagaattttcggacctactaaagattgggaatgtagttgtggtaagtacaaacgtgtacgctacaaaggtatggtatgtgatagatgtggcgttgaagtaacgaaatcaaaagtgcgtcgtgaaagaatgggtcatattgaattagcagcacccgtatctcacatttggtatttcaaaggaattccaagtcgtatggggctattattagatatgtctcctagagcattagaagaagtaatatacttcgcttcatatgttgtagttgatccaggaccaactggacttgaaaagaaaacattattatctgaagctgaattcagagaatattatgacaagtacccaaatcaatttgttgctaaaatgggtgcagaaggtattaaagacctattagaagaaattgatttagatgaagaattaaaagagttacgtgatgagcttgaatctgcaacaggtcaaagattaacacgtgcgattaaacgtttagaggtagttgagtcatttagaaattctgggaataatccttcttggatgattttagatgtattacctattataccacctgaaattcgtccgatggttcaattagacggtggacgtttcgctacaagtgatttaaatgacttgtatcgtcgtgttatcaaccgtaacaaccgtttgaaacgtttattagaccttggagcaccaggtatcatcgttcaaaatgaaaaacgtatgttacaagaagcagtcgatgctttaattgacaatggtcgtcgtggtcgacctgtaacaggaccaggtaaccgtccattgaaatctctttcacatatgcttaaaggtaagcaaggacgtttccgtcaaaacttactaggtaaacgtgttgactattcaggacgttcagttatcgcagttggaccaagcttgaaaatgtatcaatgtggtttgccaaaagaaatggcgcttgaattatttaaaccattcgttatgaaagagttagttcaacgtgaaattgctacaaacattaaaaatgctaaaagtaaaattgaacgtatggacgatgaagtttgggatgtgcttgaagatgttataactgaacatccagtgctattaaaccgtgctccaacattacacagattaggtattcaggcatttgaacctactctagtagaaggtcgtgcaattcgccttcaccctcttgttacaactgcttataatgcagactttgatggtgaccaaatggctgttcacgttccgttatcaaaagaagctcaagctgaagcacgtatgcttatgcttgcagcacaaaacatcctaaaccctaaagatggtaagccggttgtaacaccatcacaagatatggttttaggtaactattacctaacattagagcgaaaagatgccgtgaatactggtgcaatctttaacgatactaatgaggttttaaaagcttatgcaaatggttatgtacatctacacactcgtattggtgttcatgctaattcattcaataatccaacgtttactgatgagcaaaatagcaaaattttagctacatcagtaggtaaaattattttcaatgaaattattcctgattcatttgcatacatcaatgaaccaagtcaagctaacctagaaagaacgacacctgataaatactttgttgatcctacgcaattaggtgaaggtggactaaaagaatactttgataatacagaacttattgaacctttcaacaaaaagttcttaggaaatatcatcgcagaagtattcaatagatttagcattactgatacttcaatgatgcttgatagaatgaaagatttaggattcaaattctcatctaaagctggtattactgttggtgtttctgacattgttgtacttccagataaacaagacattttagatgaacatgaaaaattagttgaacatgtgactaaacaatataatcgtggtttaatcactgaagacgagcgttacaatgcggttgtagaaatttggactgacgcaaaagaccaaattcaaggcgaattaatgcagtctcttgagaaaactaacccaatattcatgatgagtgattctggtgcccgtggtaatgcatcaaacttcactcaattagctggtatgcgtggtttaatggcagcaccatctggtaagattatagaattaccaatcacatcttcattccgtgaaggtttaacggtattagaatactttatttctacacacggtgcgcgtaaaggtcttgccgatacagcacttaaaacagctgactctggttaccttactcgtcgtcttgttgatgtagcacaagatgttatcgttcgtgaagaagattgtggtacagaccgtggtttattagtttctgatataaaagaaggaactgaaatgattgaaccatttatcgaacgtatcgaaggtcgttattctaaagaaacaattcgccatcctgaaacagacgaagtaattattcgtccagacgaattaattacaccagatattgcaaaacaaatcactgatgcaggtattgagcaaatgtatatacgctcagcatttacatgtaacacacgtcatggtgtatgtgaaaaatgttatggtaaaaaccttgctactggtgaaaaagttgaagtgggtgaagcagttggtacaattgccgctcaatctatcggtgaaccaggtacccaacttacaatgcgtacattccacactggtggggtagcaggaagtgacatcactcaaggtcttcctcgtatccaagaaatctttgaggcacgtaatccaaaaggtcaagctgtgattactgaaatcgaaggtgtagttgatgatattaaattagcaaaagatcgccaacaagaaataattgttaaaggtgctaatgaaactagatcttatctagcatcaggtacttcaagacttaaagttgaaataggtcaatctgttgaacgtggtgaagttctaacagaaggttcaattgaacctaaaaactatttatctgtagcaggcctaaatgcaactgaaagttacctattaaaagaagtacaaaaagtttaccgtatgcaaggtgttgaaattgacgacaaacacgttgaagttatggtaagacaaatgttacgtaaagttcgcatcattgaggctggtgacactaaattattaccaggttcattagttgatattcataactttactgacgctaacagagatgcattcaagcatcgtaaacgtccagctacagctaaaccagtattacttggtattactaaagcttctctggaaactgaaagcttcttatcagcagcttcattccaagaaacaacacgtgtgcttactgatgcagctattaaaggtaaacgtgacgatttacttggtcttaaagagaatgttattattggtaagttaattcctgctggtactggtatgagacgttatagtgatattcaatacgataaagctactgcaccagtaacagaaacaagtgaagaagttgaaacgatagaataa

SEQ ID NO: 6673 - DNA, 261 bp, Staphylococcus epidermidis; identical to SEQ ID NO: 3987

SEQ ID NO: 6674 - DNA, 414 bp, Staphylococcus epidermidis; identical to SEQ ID NO: 3986

SEQ ID NO: 6675 - DNA, 471 bp, Staphylococcus epidermidis; identical to SEQ ID NO: 3985

SEQ ID NO: 6676 - DNA, 2082 bp, Staphylococcus epidermidis
atggcaagagacttttctttgaaaaatactcgtaatatcggtatcatggctcacattgatgctggtaagacaactacgactgaacgtattctttactacacaggtcgtatccataaaattggtgaaacacatgaaggtgcttcacaaatggactggatggaacaagagcaagaccgtggtattactatcacatctgctgctacaactgcacaatggcaaggtcaccgtgtaaacatcattgatactcctggacacgtagacttcacagttgaagttgaacgttcattacgtgtacttgatggtgccgttactgtacttgatgcacaatcaggtgtagaacctcaaactgaaacagtttggcgtcaagcaacaacttatggtgtacctcgtattgtttttgtaaacaaaatggacaaattaggtgcgaactttgaatattcagtaagcactttacatgatcgtttacaagcaaatgcagcacctattcaattacctattggtgcagaagatgaatttgaagcaatcattgacttagtagaaatgaaatgctttaaatatacaaacgacctaggtacagaaatcgatgaaatcgaaattccagaagaccataaagaaagagctgaagaagctcgcgctcaattaattgaagctgttgctgaaaacaacgacgatttaatggagaaatatcttggggatgaagagatttcagttgatgaattaaaagatgctatccgccaagctactactgacgtagaattctacccagtactttgtggtacagcgttcaaaaacaaaggtgttcaattaatgcttaatgcagtaattgattatttaccttcaccattagatgttaaaccaattattggtcatcgtgcgaacaaccctgatgaagaagttgttgctaaaccagatgattcagcagaatttgctgctttggcatttaaagttatgactgacccttatgttggtaaattaacattcttccgtgtatactctggaacattatcttcaggttcatatgtgaagaactcttctaaagataaacgtgaacgtgttggacgtttattacaaatgcacgcgaactcacgtcaagaaattgacactgtttactcaggtgaaattgcagctgcagtaggccttaaagaaacaggtactggtgatactttatgtggagagaaaaatgacattatcttggaatcaatggaattcccagaaccagttatccacttatcagttgaaccaaaatctaaagctgaccaagataaaatgactcaagctttagttaaattacaagaagaagacccaacattccatgcacacacagatgaagaaactggacaagttatcatcggtggtatgggtgaattacacttagatattttagttgaccgtatgaagaaagaattcaacgttgaatgtaacgtaggtgctccaatggtttcttatcgtgaaacatttaaacaacctgcacaagttcaaggtaaattctcacgtcaatctggtggtcgtggtcaatatggtgatgttcatattgaattcactcctaacgaaacaggtggcggtttcgaattcgaaaacgctattgttggtggtgtagttcctcgtgaatacattccatcagttgaacaaggtcttaaagatgctatggaaaatggtgtcttagctggttatccattaattgatgttaaagctaaattatttgatggttcttatcatgatgtcgattcatctgaaatggccttcaaaattgctgcatcattagcgcttaaagaagctgctaaaaaatgtgatccagttatcttagaaccaatgatgaaagttactatcgaaatgcctgaagaatatatgggtgatatcatgggtgacgtaactgctcgtcgtggacgtgtagacggtatggaaccacgtggtaatgctcaagttgttaacgcatatgtaccactttcagaaatgtttggttatgcaacttcattacgttctaacacgcaaggtcgcggtacttacacaatgtactttgaccactatgcagaagttcctaaatcaattgctgaagaaatcatcaagaaaaataaaggtgaataa

SEQ ID NO: 6677 - DNA, 1185 bp, Staphylococcus epidermidis
atggcaaaagaaaaatttgatcgctcaaaagaacatgccaatattggtactatcggtcacgttgaccatggtaaaacaactttaacagctgctatcgcaactgtattagctaaaaatggtgacactgttgcacaatcatacgatatgattgacaacgctccagaagaaaaagaacgtggtattacaatcaatactgcacatatcgaataccaaactgacaaacgtcactatgctcacgttgactgcccaggacacgctgactatgttaaaaacatgatcactggtgcagctcaaatggacggcggtatcttagttgtatctgctgctgacggtccaatgccacaaactcgtgaacacatcttattatcacgtaacgttggtgtaccagcattagttgtattcttaaacaaagtggacatggtagacgacgaagaattattagaattagttgaaatggaagttcgtgacttattaagcgaatatgacttcccaggtgacgatgtacctgtaatcgctggttctgcattaaaagcattagaaggcgatgctgaatacgaacaaaaaatcttagacttaatgcaagcagttgatgattacattccaactccagaacgtgattctgacaaaccatttatgatgccagttgaggacgtattctcaatcactggtcgtggtactgttgctacaggccgtgttgaacgtggtcaaatcaaagttggtgaagaagttgaaatcatcggtatgcacgaaacttctaaaacaactgttactggtgtagaaatgttccgtaaattattagactacgctgaagctggtgacaacatcggtgctttattacgtggtgttgcacgtgaagacgtacaacgtggtcaagtattagctgctcctggttctattacaccacacacaaaattcaaagctgaagtatacgtattatctaaagatgaaggtggacgtcacactccattcttcactaactatcgcccacaattctatttccgtactactgacgtaactggtgttgtaaacttaccagaaggtacagaaatggttatgcctggtgacaacgttgaaatgacagttgaattaatcgctccaatcgctatcgaagacggaactcgtttctcaattcgtgaaggtggacgtactgttggatcaggcgttgtaactgaaatctttgaataa

SEQ ID NO: 6678 - DNA, 1188 bp, Staphylococcus epidermidis; identical to SEQ ID NO: 3982

SEQ ID NO: 6679 - DNA, 510 bp, Staphylococcus epidermidis
gtggaggaaataagaccaataacctatcaagataaagaggcatactattattatattcaagagtggtatgaaaatgaggaaaaagtggtaccagggaatacagatattgccaattatagttcatttaacaatatggttgatcggcttaatcgtagtgaagttgatgagggttttgtaccgactacaacactattttattttaaagattcaattattataggtgctgttgatatcagacatcaattaaatgataaactatctaatattggtggtcatgtgggatacggtgtagctaaatcttatagagggaaaggttacgctactatccttctagaaaaggctttagatgaacttaagacattaaatgtagaggtcgtacttatgacttgtaatccacttaattttgcttctcaaacagtgatgaagaaatgtggtggatatcaaattgaatcctatattaaaaaaaatggtaaacctgttcatcgatatcatatacctaatacaaaataa

SEQ ID NO: 6680 - DNA, 951 bp, Staphylococcus epidermidis
atgaaatatatagatgagcaaacacaagctcaattattagacatgaatgaagtcattttagaagtagaaaaagctttgcaagctttttcagagaataagacgataacgccattaagatatgttttgccatttaatgagcaaaatcgttatttagtgatgccagcattatcagatgaattaaatatcgttggacttaaaacagtctcatttgcacctgaaaattcaaaaaaagggaaagcgactattactggatcagttattttaagtgactatgaaacaggagaaacattgtctatattagatggtggttttcttactaaagtaagaactggtgcaatttcaggtgtagctactaaatatctagcaaaagaaaacgctaaaacacttagtgtaataggggcaggtgtacaagctgaaggtttaattgaagcgatacttgctgttagagatattgaaaaaattcacatcgcaagtagaacgttcgaaaaagcagaaaaatttgctcaaaatatacgaaatcgatttaatattaaagtgagtgtatttagatcggcagatgaagcgatagacagtgcagatattgtagttacagcaacaaatgcaaatcagcccgtttatactcattctttacatccaggcgtgcatttaaatgcagtcggatcctttaaaccagatatgcaagaaataccttcagaaacaatgcttgttgctaataaaattgttgttgaatctatggaagcagctttagaagaaacaggtgatttaaaaattcctcaagcagaaggaatattaactaaaaatatgctacatagtgaattaggcgacattatttctggtgaaaaagttggccgcgaaactgaagaagaagtgacagtctttaaatcggtcggtctagcaattgtagatatcattgtggcacaatatttttataaaaaattaatacaatcttag

SEQ ID NO: 6681 - DNA, 210 bp, Staphylococcus epidermidis
atgaaacgaagttcatacctacgtcgtcaatcaaatttaattatatctatgattattttcgttatttttttaattgttgatatcaatgtacttattaataaacatcaagttgtgcctgtgctattatcaagtatcagtttaattatttttatcatgctatttgtagttgcattgttcaaatgtataactaattataaacatcaatcttag

SEQ ID NO: 6682 - DNA, 957 bp, Staphylococcus epidermidis
atgaaaaaaataataatcactggagcacttggtcaaattggtactgaattagttattaagtgtagagaaagatatggaactgaaaatgtattagctactgatataagaaagccagaaccacactctccagttaaaaacggtccttttgaaatcttagatgttacagatagaaatcgtttatttgaaacagtgagatatttcaatgctgatacacttatgcatatggctgcactgctttctgctacagcggaaaagaaaccactagttgcctgggatttgaatatggggggacttataaatacactcgaagcagcaagaaggtatcaattaaaatattttacgccaagttcaataggagcttttggtatttcgacacctaaagtaaatacacctcaattaacaatacaacaaccaacgactatgtatggtataaacaaagtaactggggaattattatgtcagtattattatgtcaaatttggagtagatacacgtagcgttagatttcctggtttaatttcacatgttaaagaacctggcggtggcataacagattatgcagttgatatgtattttaaggcagttagaaaaggacattatacaagttatattaatcgttacacttatatggatatgatgtacatggaagatgctattgatgcgattatcaaattaatggaagaagacagtgttaaattaaaaacaagaaatggctataacttaagtgcgatgagtattgaacctgaaatgctaaaacaagctatacaagtatactatccagatttcaccttagattatgacattgatttagagcgtcaagatattgcattaagttggccagatagtatagatacgagctgtgctcaggaagagtggggatttgatcctaaatatgatttaccaactatgactaaagtgatgttagaggcaattgagaaaaaacaaaaagaatgctga

SEQ ID NO: 6683 - DNA, 1077 bp, Staphylococcus epidermidis
atgtcagaaaaagtaaaattcgaaaaaagagagtctttaaaagaaaaacctgatacagcaaacttaggatttggacaatatttcacagactatatgttaagtgttgattatgacgctgatcaaggatggcatgatatgaagattgtgccgtacgcaccatttgaaatttcaccagcagcgcaagggttacattatggtcaggcagtttttgaaggccttaaagcctataaacataatggagaagttgtattattccgcccagatcaaaacttcaaacgtattaataattctttagcacgtttagaaatgccagaagttgatgaagaagcattattagaagggttgaagcagcttatcgacgttgaacgagattgggtacctgaaggcgaaggtcaatcgttatatattcgtccttttgtatttgctactgaaggtgttttgggtgtacgttcttcacatcaatataaattactaattattttatctccgtcaggcgcttattatggtggtgacacattaaagtcaactaaaatttatgtcgaagatgaatatgtacgtgcagtacgtggaggtgtaggtttcgctaaagttgcaggtaactatgctgccagcttactcgcacaaacaaacgctaataaattaggttatgaccaagtattgtggcttgatggtgttgaacaaaaatatgttgaagaagttggtagtatgaatattttcttcgtagaaaatggaaaagtagttacgccagcattaaacggtagtatcttgcctggtatcactagaaagtcaattattcaattagctgaagatttaggttatgaagttgaagagagaagagtttctatagaagagctgtttaacgcatatgataaaggtgaacttacagaagtatttggttcaggtacagcagctgttatctctcctgtaggtacacttcgctatgaagatagagaaattgttattaataacaatgaacctggtaaaatcactcaaaaattatatgacacatatactggtattcaaagtggcaaattagaagataaatacggatggagagtagaagttcctaagtattaa

SEQ ID NO: 6684 - DNA, 717 bp, Staphylococcus epidermidis
atgatttatgcgggtatattagcaggtggtattggttctagaatgggaaatgttccattacccaaacaatttttatcattacaaggaaaacctattattattcatacagtagaaaaatttttaatgtataaggactttgatgaaatcatcattgccacgcctcaaaagtggatcaattatatgctcgatttgctaaacaattatcaattagacgataagaaaataaaagtaatacaaggcggagacgaccgaaatcactctataatgaatattatagaaagcattgagcaacataaaaaattaaatgatgaagatataatcgttacccatgatgcagttaggccatttctaacaaatcgaattattagagagaatgtggaatatgccagtcaatatggtgcagtagatacggttgttaatgctgttgatactatcatttcttcaaatgatgcacaatttatttctgggattccaataagaagtgagatgtatcaaggacagacgcctcaaacttttaaaataaaagagttaaaggatagctatttatcgttaactcaatctcaaaaggaaatattaactgacgcgtgtaaaatactcgtagaattgggtaagccagtaaaattagtcaaaggagagttatttaacataaaaataacaacaccatatgatttaaaagttgcgaattcaattattactggagctgttgataatgattaa

SEQ ID NO: 6685 - DNA, 1032 bp, Staphylococcus epidermidis
atgattaatcaagtatatcaattagtaagtccacgacaatttgaagcaacatttaaaactattgatttacataatcataatagcaaagttattgttcgacccttatatttgtcaatttgtgcagccgacttgagatattattgtggaaatagagatagcaaaattttatctaagaaattacctatgtcattgattcatgaaagtgtaggtgaaattgtatacgactctgaacatcgactgaaaaatggaactaaggttgttatgattcccaatacaccgtctaaatcgcataatattattgcagaaaattatttaacttctagtcattttaagtcaagtggttatgatggttttatgcaagattatatagtaatgaaacctgatagagtagtcactttaccacaagaaattgatttgagtgtagcgtcgtatactgaattagttacagttagtgttcatgcaatagatcgttttcaatcaaaagcaataccacaatttgaatcattggggatatggggagacggtaatttagggtatatcactgcagttttactaaaaaaactatatcctactacaaaaataatagtttttggaaaaacattatataaattaagccgtttttcatttgtagatgaaattattcaaattgacaatattcctcaacatatcaaaattgatcatgcatttgaatgcgtgggtggtaaaggaagtcagcaggctattgaacaaattattaatattattaatcctgaagggagtatcgctttattaggagtgagcgaactgcctatacaagtgaatacaagaatggttttagaaaaaggtttaactataattggtagtagcagaagtggtttaaaggattttgaaaaaactattgaattgtatcgtaaatatcctgaagttcttaatcaattagcattacttaaaggtaaagaatttgaaataaataccatagaagatctcattacagcgttcgaatatgatatttctaacgcatggggaaaaacagttttaaaatggaatatttaa

SEQ ID NO: 6686 - DNA, 1611 bp, Staphylococcus epidermidis
atgacaaagcaaaatatatttatagatgacatttattgggaacgtgtccaactcttcgtcaaaggacattttgaaggagtaaaacctacaagaaatttccttcttagaaatctaacagaaacaaaactattaaatgccaatcatgttaatattcaagggtcaacttttgaggcaagatttaatattgctattttagaaaaaggtaattttttaggtacaggcaattatatattaatcaaccgacaagaagatgaatatgtctgccaaattaaccccaaatttttattaaaaaagtatggtaaaagtttccaaagatataataacaaagagattaaatcttacgtcattgttccggcaatatcccaagaaattaatgagtttatttttaaagttcaatataaatctgaaataaagaaaataagtaaacttaagcaattatcatacatattacataaagctttgaggaaaattagcttcaatgtgagagataaaatatatttgtcggtatttaacatttccaaaacagtatataagaataataaaaatcatgttttgtttacatcagattctagagcaaatatgtcaggaaattttaaatttatatacgaagaaatgcttaaacaacaattggacaaaaaacttgtcattcattctatttttaaacctaatatagcaaataggagatcgtttattgataaattaaaatttccatattttttaggaaaatctaaatatatcttggttgatgattatcatccgatgatatataaacttcaatttagagaaaaccaagaaatagttcaagtatggcatgctgtgggtgcttttaagactgtaggatttagtagaactgggaaaaaaggaggacctttcatagactctattggacataggaattatagtaaagcttatgtttcgtcaaataatgatattctttactatgctgaagcttttggaattgaagaacatagggttattccaacaggtgttccacgtacggatgttttgttcgatgaatcttataaaacacgcattaaacaaagtttagaaacaaaattaccaattataaaaaataaaaaagtcattctttttgcacctacatttagaggaaatggacatcgcacagcacactatcctttctttaaaattaattttgcaagattagctagttattgtgaagaacatcaagctactgttctgtttaaaatgcatccttttgttagaaataaattaaatatcccagcaatttatagtaaatattttttagatatttcaaattaccgcgaagtaaatgatgtattgttcattacggatattttaatctctgattattcttctttaatctatgaattttcagtttttaaaaaaccaatgcttttttatgcttttgatttggaagattatatttacacgagagatttttatgaaccttatgaaacctttgttcctggtaaaatagtgaaaacttttgatgagcttattttagcgttagaaaataatgattttgaattagaaaaggtgaagccgtttttaaataaaaattttaaatataaagatggtaaatcaagtgaacgattagttaaagatttatttaacaaattttttcagtaa

SEQ ID NO: 6687 - DNA, 696 bp, Staphylococcus epidermidis
gtggaatggatattatttgataaagatggtacattgattgagtttgacagtagttgggaaaaaattggcgtacgtctcgttgatcaacttttagaaacctttccagtacatgacaaggaagcggcacatcgccaattaggtattatcgataaaaaaattaaaccagattctgttatgggatcgggttcattaggtgaaattatagagtcttttaatggtgtaacaggtaaagaaacttcagattggacaagggatacgagtcaggaactcattgattcaagagtgcctgaaaacaattggattgatggtgtacaagaaactattcaagctcttagaaatgaaggatatcacataggcatagtaacaagtgatactaaaaaaggagtcgatcaatttctggaggaaacgcaaactagaaatctctttgatttagtaatttctacagaaacacatgcagaagaaaaaccacatcctaaagtcttagatccactatttaatgcttttgatgttgaaccgggacaggtagcaatagtaggagatacggccaacgatatgaaaaccgcgattaatgctaatttaggattaggtatcggtgtgctaacaggcgtggctaaaaaagaggaactctacgacgcagatgtcatcataaacagtgcaaaagatgttaaacaagttatagaacaatacggaaaataa

SEQ ID NO: 6688 - DNA, 1305 bp, Staphylococcus epidermidis
atgacaaataatcactttcttaacataggtgtgttactgtatgggtgtggtcatcatcaagcggcatggcgtatgaaagattctaatattgaggatatcggcaacatatcttattatcagcatttagctcaaatagctgagaaaggctttttggatatcgtcttttttgcagacaatcaagcctttaatgcgagtgataatactactatgcccgctttttggtttgatcctataattaacttatcagctattgcacaagttacatcgcatataggattagtgccaacaatatcgagtacattttcaaatccattcaccgcttctcgtcaattattaagtctagactacttatctcatggccgtgtaggttggaatttggtcacatccatgacagatattgaagcccaaaatcacagtcttcaatacttaccggaaagacatgagcgctacaaaaaagcagatgaatttgcatcggtaatgaataagctattcacttcttggtcaactgcatcttatgtaccagataaaaacaacaacaaaattattgagtctaaagatattaaacctttttatcatgagggggactattttcaagtacgaggaccacatacaacaccacaaagtcctcaaggtaaaccagtatctatgcaagccggtgcgtcaaaagaaggtattgcattagcagcaaaatatgctgatgctgtttactctgtttcatgggatattaagcaagcacgtagttataaaaagaaattgtctgatgctatatctaaaactcaccatccagatagaaaaattaaaattttccctggtttagtaacgtatgtaggtgaaacccatgaaaaagcattatcaaaaaaagcagaacttgatcaaaagttacccattgaagatgctttaaagcaactcagtttttttgttcaacaagattgttcggattgggaattagatgaaccagttcctcccttacctcccgttgaaaatttcaaaggtccgattggtcgatatgaaacagttttagcaattataaaagataaacaaccaactgtaagagaattattaggttacctaagtgccggtggtggtcatcttactcttataggtacacctgaggagatagtggatgagatggagcactggtttaatgaaggcgttgcagacggctttaatctgatgccaccttcattaccccatagccttgaagattttgtaaaatacattataccagaactacaacgtcgttctttatttaaaaattcttataatcaacctacactacgtacattattaaatctcaactcataa

SEQ ID NO: 6689 - DNA, 753 bp, Staphylococcus epidermidis
atgaaaaaaactgcaattatcacgggaagtagtcgtggattaggcgctaaaattgcaataactttactagaaaaaggctacaatgttgttgttaattacaaacaaaataaggataaagctgaaaaattaattagaaattataatcaaagtaaggctatagctattcaagctgatgtgacagacagaaacgatgtgaatcaaatgattcaaactgccacacaacattttggaaaaatagatatagtaatcaataatgcacttgttggttttaaatttgatccaaatcagcaaaaatcgtttgaagatttaacttgggaagattatcaacaacaacttaatggtactttaaaaggagcatttaatgtgactcaaagcgtcataccacaatttatagaacaacaaagtggatgcattattagtattggaaccaatttgtatcaaaatccagtcgtaccttatcatgagtatacaacagcaaaggcaggtctcatcggctttacccgtaatattgctgcagaacttggacaatatggtatcacagcaaatgttgtttctggaggattactcaaaacgactgatgcaagtgcagttactacacctgaagtatttgatttaattgctcaaactacacctcttagaaaagtaacatcacctcaagatgtagccaatatggttgtatatctcgcttcagacgaagcacgtggcgtgacaggtcaaaatattaccgttgacggtggtttaacaatgaactaa

SEQ ID NO: 6690 - DNA, 663 bp, Staphylococcus epidermidis
atgaataattatggtattcctcaaaatgcagtaataaccattgctggtactgtaggggttggtaaatctacgttaacacaagcacttgctgataagttaaattttaaaacttcctttgagaatgtagaccataatccttatttagataaattttatcataattttgaacgttggagctttcatcttcaaatttactttcttgctgaacgttttaaggaacaaaaacgcatgtttgagtatggtggaggtttcgttcaagatcgttcaatttatgaggatgtagatatttttgcaaaaatgcatgaagaacaaggaacaatgagtgctgacgactatcacacgtattacgaattatttaatgcaatggtcatgacaccttattttccaaagcctgatgttctaatttatctagaatgtgattatgatgaagtaattgatcgtattcaacagcgtggacgtgacatggaaatcaatacagatccagaatattggagaaaactatttaaacggtatgaaaattggattaacaattttaatgcatgtcctgttgttcgacttaatattaatgaatatgacatacacgaagatttagactcccttgatccagtcattgataaaattgctcaagttattaaagcataccgacaagtggatacaagataa

SEQ ID NO: 6691 - DNA, 618 bp, Staphylococcus epidermidis
atgaataaaccatttattgcaatcgaaggacctataggtgttggtaaatcctctcttgctcaccgattaagcaagacgtttggtttttatgaagagaaagaaattgttgatgaaaatccatttctatctgatttttatgatgatatagaaaaatggagttttcaaactgaaatgttctttttatgtaacagatataaacagattagagatattgagtcgctaaatcaaggtatagttagcgattatcatattcataaaaataaaatttttgctaaaaatactttagatgctaaagaatttgataaattcagtcgtatttttgatattttaactgaagatatcgaaatgccaaatacaattatctttttagatgctgatttaaatgtattaaaatcaagaattgcacaacgtaatcgtagctttgaatctcatatagaagatgactatttacttactttaaaaaaagattatcttgcttattatgaatcattaaagaatgacggtgcaaatgtcattcgaattgatacgtcacaacaagatttcgttaaaaatgattacgattaccaaaatattttaaatttagtaaaacctatgattggagaaaataaagatgaataa

SEQ ID NO: 6692 - DNA, 507 bp, Staphylococcus epidermidis
atgaaaaaaaatcatgattacatgcgcttagcaattaatgaagcacacaaagccaaagcattaggagaagttccaatcggagcagttattgttaaagagggtcaagtcattgcacgtgcacataatttaagggaaacattgcagcaacctaccgcccatgcagagcacatagcgatagaacgggcttcagaagttgtcggcagttggagattagaagaatgtacgttgtatgttacattagagccctgtgttatgtgtgcgggcactattattatgagccgtattccaaaggttgtgtatggtgctactgatcccaagggaggttgttcgggaagtcttatgaatttattagaacaaccccagtttaatcatagggcaaccgtagaaaaaggaattttagaagaagagtgtgcagaactattgagaagtttttttaaggaaatacgtgaaaagaaaaaagcagaaaaacaggggaagatacaaaaggatataaatttgttaaaatga

SEQ ID NO: 6693 - DNA, 879 bp, Staphylococcus epidermidis
atgataaagctaatagcaactgatatggatggaacattacttaacgctggtcatgaaatcaccactatgaaccaagaagcgataaaatttgcgcaagcgaacggtattacagtagttattgcaactggtagagcgttttacgaggcacaaacacctgttgctgaaacagacttaaaagtcccttacatatgtttgaatggtgcagaagttcgtgacgaatcatttaacataatgagtacatcacatcttaatcatgatttagtacacaaaattacgacagcacttaaaaataatcatatttattatcaaatttacacaaatcgtggcatatatacagaagatcctaaacgtgatttagcaatctatatagatattgcagaacgtgcgggtcaaaaagcagatgtagccaagatacgaaataatatacaaaaacgcatagataacggtactttaaaagttgtagataattatgattcaattgaagatattcctggagaacttattatgaaggtgttagcttttgatgcagatttaagtaaaatcgaccaagtaggtcaggagttagcatcatcaccaaatttagcagtatcctcatcatcaagaggtaacctagaaatcactcattcagacgctcaaaaaggcattgccttatcagctattgctcatcaattaggtatagatttaacagatgtggtagcaataggagataatttaaatgatatttcaatgctagaacgtgtaggttatccagtagcaatgaataatgctacatatgaagttaaagatattgctaaatatgtcacagacaccaatgaaaatagtggagttggaaaagcaatcatgaaaatattaaaagaagaaaataatttagaggtgtaa

SEQ ID NO: 6694 - DNA, 567 bp, Staphylococcus epidermidis
atgaaaggtttaattattatagggagtgctcaagtagggtctcatacgaacgctttatcaaaatatttaaaaggtcaactcggcgaacatgatgttgaggtggaaatctttgacctagctgagaaacccattcatcaattggattttgctggtacaacacaagcagttgatgaaattaaaaacaatgtcaaatctttacaaaataaagcaatggaagcagatttcttaattttaggaacgccaaattatcatggatcgttttcaggtattcttaaaaatgcacttgaccaccttaatatggaccatttcaaaatgaaacccgtgggactcatttgcaatagtggaggaatagtaagttctgagccattatcacacttgagagtcatcgtacgtagtttacttggtattgctgtaccaacgcaaattgctacacatgattctgattatgctaaattagaagatggtaccttatacttagaagataatgaatttcaactacgttcaaaattgtttgttgatcaaattgtatccttcgtaacaaatagtccatatgaacacttaaaataa

SEQ ID NO: 6695 - DNA, 2913 bp, Staphylococcus epidermidis
atgattaataaaaaaaataatttactaactaaaaagaaacctatagcaaataaatccaataaatatgcaattagaaaattcacagtaggtacagcgtctattgtaataggtgcaacattattgtttggtttaggtcataatgaggccaaagccgaggagaattcagtacaagacgttaaagattcgaatacggatgatgaattatcagacagcaatgatcagtctagtgatgaagaaaagaatgatgtgatcaataataatcagtcaataaacaccgacgataataaccaaataattaaaaaagaagaaacgaataactacgatggcatagaaaaacgctcagaagatagaacagagtcaacaacaaatgtagatgaaaacgaagcaacatttttacaaaagacccctcaagataatactcatcttacagaagaagaggtaaaagaatcctcatcagtcgaatcctcaaattcatcaattgatactgcccaacaaccatctcacacaacaataaatagagaagaatctgttcaaacaagtgataatgtagaagattcacacgtatcagattttgctaactctaaaataaaagagagtaacactgaatctggtaaagaagagaatactatagagcaacctaataaagtaaaagaagattcaacaacaagtcagccgtctggctatacaaatatagatgaaaaaatttcaaatcaagatgagttattaaatttaccaataaatgaatatgaaaataaggctagaccattatctacaacatctgcccaaccatcgattaaacgtgtaaccgtaaatcaattagcggcggaacaaggttcgaatgttaaccatttaattaaagttactgatcaaagtattactgaaggatatgatgatagtgaaggtgttattaaagcacatgatgctgaaaacttaatctatgatgtaacttttgaagtagatgataaggtgaaatctggtgatacgatgacagtggatatagataagaatacagttccatcagatttaaccgatagctttacaataccaaaaataaaagataattctggagaaatcatcgctacaggtacttatgataacaaaaataaacaaatcacctatacttttacagattatgtagataagtatgaaaatattaaagcacaccttaaattaacgtcatacattgataaatcaaaggttccaaataataataccaagttagatgtagaatataaaacggccctttcatcagtaaataaaacaattacggttgaatatcaaagacctaacgaaaatcggactgctaaccttcaaagtatgtttacaaacatagatacgaaaaatcatacagttgagcaaacgatttatattaaccctcttcgttattcagccaaggaaacaaatgtaaatatttcagggaatggtgatgaaggttcaacaattatagacgatagcacaataattaaagtttataaggttggagataatcaaaatttaccagatagtaacagaatttatgattacagtgaatatgaagatgtcacaaatgatgattatgcccaattaggaaataataatgatgtgaatattaattttggtaatatagattcaccatatattattaaagttattagtaaatatgaccctaataaggatgattacacgactatacagcaaactgtgacaatgcagacgactataaatgagtatactggtgagtttaaaacagcatcctatgataatacaattgctttctctacaagttcaggtcaaggacaaggtgacttgcctcctgaaaaaacttataaaatcggagattacgtatgggaagatgtagataaagatggtattcaaaatacaaatgataatgaaaaaccgcttagtaatgtattggtaactttgacgtatcctgatggaacttcaaaatcagtcagaacagatgaagatgggaaatatcaatttgatggattgaaaaacggattgacttataaaattacattcgaaacacctgaaggatatacgccgacgcttaaacattcaggaacaaatcctgcactagactcagaaggtaattctgtatgggtaactattaatggacaagacgatatgacgattgatagtggattttatcaaacacctaaatacagtttagggaactatgtatggtatgacactaataaagatggtattcaaggtgatgatgaaaaaggaatctctggagttaaagtgacgttaaaagatgaaaacggaaatatcattagtacaactacaaccgatgaaaatggaaagtatcaatttgataatttaaatagtggtaattatattgttcattttgataaaccttcaggtatgactcaaacaacaacagattctggtgatgatgacgaacaggatgctgatggggaagaagtccatgtaacaattactgatcatgatgactttagtatagataacggatactatgatgacgactcggattccgatagtgattcagactccgatagcgactcggattcagacagcgactcagattcagacagcgactcagattcagactccgatagcgactcggattccgatagcgactcagattcagacagcgactcagactccgatagtgattcagactcagacagcgactcagattccgatagtgattcagactcagacagcgactcagattctgatagtgattcagactcaggcagtgattcggattccgataatgattcagactcagacaacgactcagatttaggcaatagctcagataagagtacaaaagataaattacctgatacaggagctaatgaagattatggctctaaaggcacgttacttggaactctgtttgcaggtttaggagcgttattattagggaaacgtcgcaaaaatagaaaaaataaaaattaa

SEQ ID NO: 6696 - DNA, 1503 bp, Staphylococcus epidermidis
atgtactattttgtaggtaataacatcggtcataaaactgctggtatagaaaaagcaatgattaatcggttaaacctatttaaagcatatcattatcaagctaaaattttattactagcatggaatcgctatttaactcaaacagcatcgcaatatattaatagcgaagattatgtaaacatgtatgattattttcaagaagcaagtaacgtaacatcagtgttcagtaaaaattggcttcattactggagaaatgaatgtggttatactataaaaccggtttctgagacaaatgacgttcggatatatgatcaacaacaatttataatgtatgcgcattttgctgatgaagcttatcaaaaaattgattacattaattattttgacacatctagaagaaaaataaaaagagagttatacgatacacgcggatttttaagttgtgttagagtcttatcaacggaccaaaaaatacaagcggagtactatctttctcctcaaggaaacgtgaaaattgaaaagtattatgatattaattcaaatcatccctatgaggcaaaaaagattatattaaatcatttaggtaaaacgcactttttaaacaatgaaactgagctaggtgctttttttattgaaacaatatatcaaaatagtgacttattctttagcgatcgtaaccttgttacatcacatatatttaacatagttgcatcttacatccctgttattgcagtgttacatagcactcatgttaaagacgttactgatttagcgcattcaccaatcaaaaatgtttataaaggggtttttgaacatttacaaaggtataaagccatcattgtttcaacccaacaacaaaaagctgacgtaattgagagaatcagtggagttattccagtatatgctattccagttggctattcatctatcgatatgaaagattactctaatgaaaataaatatgtttcacctaagaaaattatttctgtcgcaagatactcacctgaaaagcaattgatacaacaaatcgaacttattaataagcttaaagattcatttccaaatatcgaactacatatgtatggttttggtaaagaagaacaacatttaaaagaacgaattcaagaattaggattagaaaagcacgtaatattaagaggttttttaaaagatttaactgatgaatatcaagatgcatatctaaatttaataacaagtaatatggaaggcttttccttagcattattagaatgtgagtcacatggtgtaccttctatcagttatgatattcaatatggtccaggtgaattgatacaggatggtaagaatggatatttagtagaaaagaataatcaacacatgctatttgaaaaagtaaaattattgctcaacaaccctcaacttcaacagtctttttctcaccattgtattgaaactgcacaaaagtattctcgaacacaaatcatgttactgtggaaaaatttacttcaacattttaactaa

SEQ ID NO: 6697 - DNA, 249 bp, Staphylococcus epidermidis
atgaacttcaaacaaatgcatcaatacaattataggttacctgagctattgacaaactatttacatttaatacattcgactgttgtcacattgtgtagtgaagcagatgcaaactgtccagtttcacctaaaaacgtcactaaagaacattggggatttgatgatcctgctggtaaagattggtcagaatttcaacgtgtaagagatgagattaaaacaacgatagaaacatttgctcatagagagtaa

SEQ ID NO: 6698 - DNA, 879 bp, Staphylococcus epidermidis
atgacagaatttgacttatccactagagagggtcgttggaaacatttcggttctgttgaccctgtcaaaggtacgaaaccaactactaaaaatgaaatgaccgatttacaaagtactcataaaaatttcttatttgaaatagaggaagtaggcattaaaaatttaacttatccagttttaattgatcagtatcaaacagctggtttatttagtttttcaacgagtttaaataaaaatgaaaaaggcattaatatgagtcgcatattagaaagcgttgaaaaacattatgataatggcattgaacttgaatttaacacactacatcaattgttgcgtactctacaagataaaatgaatcaaaatgctgcaggtgttgatgtgtcaggtaaatggttctttgatcgttatagtcctgtgactaatattaaagctgtaggccacgcagatgttacttatggtttggctattgaaaatcataccgttacacgcaaagaattaactattcaagccaaagtaacaacactatgtccttgctcaaaagaaattagtgaatattccgcacataatcaacgtggtatcgttacagttaaagcatatttagataaaaataatgatgtcatcgatgattataaagataaaattttagacgctatggaagccaacgctagttctatcttatatccaatcttaaaacgtcctgatgaaaaacgagtaacagaacgcgcttatgaaaatccacgatttgttgaagatttaattcgactaattgcagctgacttagttgaatttgactggattgaagggttcgatattgaatgtcgtaatgaagagtctatccaccagcatgatgctttcgcacgtctgaaatatcgcaaataa

SEQ ID NO: 6699 - DNA, 666 bp, Staphylococcus epidermidis
atgactgatgaaagacacgtacttgtgattttcccccatcctgatgatgaaactttttcgtctgctggaactatcgcaagttatattgaaaaaggtattcccgtcacatatgcatgtcttaccctaggacaaatgggacgtaatctaggtaaccctccttttgcaacaagagaatctttaccatttatacgtgaacgtgagttagaagaagcatgcaaagcaattgggattacagatttaaggaaaatggggttaagagataaaactgttgaatttgaaccttacgatcaaatggatcaaatgattcaatcacttattgacgaaacaaatccatcattaattatttcgttctatcctaaatttgcagttcaccctgatcacgaggcaactgcagaagctgtagtacgtacagttggacgcatgcatgtatcagatcgaccccgtcttacacttgtagcgtttagcaatgatgcaccagaaattcttggagaacctgatattcaaaatgacatatctcaatatagtgatataaaacttaaagcttttgaagcacatgcttcacaaacaggaccatttttaaaacaacttgctagtcccgaaatagatggtcaagcacagagtttcttaaaaatagagccattttggacatatcactttgaatcttaa

SEQ ID NO: 6700 - DNA, 360 bp, Staphylococcus epidermidis
ttggaaccaattaaagaacaagaagtgctagatttattaacttcttactcaaatcagcctgtttacctacacgttgaaacaacaaatggtgcttatgcaaatcatttcgatcaacgcgtatttaacgctggaacatttttaagaaatattgtcgtgacttttgaacatgcacaacttaaaggcggcgacaaagatccatatcgtgtaggtcttaaattaaaagatggtggctgggtttacgtgcaaggacttacgcactatgaagttaatgagaataacgaatttttaattgcaggttttaattatgaaggacaattggctgctacaatagaaataagtaaacagccatttactatataa
